United States Patent Application Publication US 2025/0333767 A1 - sequence listing, part 10

SEQ ID NO: 38933 - protein, 980 aa, synthetic construct
  REGION 1..980: note = engineered CasX variant
QEIKRINKIRRRLVKDSNTKKAGKTGPMKTLLVRVMTPDLRERLENLRKKPENIPQPISNTSRANLNKLLTDYTEMKKAILHVYWEEFQKDPVGLMSRVAQPASKKIDQNKLKPEMDEKGNLTTAGFACSQCGQPLFVYKLEQVSEKGKAYTNYFGRCNVAEHEKLILLAQLKPEKDSDEAVTYSLGKFGQRALDFYSIHVTKESTHPVKPLAQIAGNRYASAPVGKALSDACMGTIASFLSKYQDIIIEHQKVVKGNQKRLESLRELAGKENLEYPSVTLPPQPHTKEGVDAYNEVIARVRMWVNLNLWQKLKLSRDDAKPLLRLKGFPSFPLVERQANEVDWWDMVCNVKKLINEKKEDGKVFWQNLAGYKRQEALRPYLSSEEDVRKKGKKFARYQLGDLLLHLEKKHGEDWGKVYDEAWERIDKKVEGLSKHIKLEEERRSEDAQSKAALTDWLRAKASFVIEGLKEADKDEFCRCELKLQKWYGDLRGKPFAIEAENSILDISGFSKQYNCAFIWQKDGVKKLNLYLIINYFKGGKLRFKKIKPEAFEANRFYTVINKKSGEIVPMEVNFNFDDPNLIILPLAFGKRQGREFIWNDLLSLETGSLKLANGRVIEKTLYNRRTRQDEPALFVALTFERREVLDSSNIKPMNLIGVDRGENIPAVIALTDPEGCPLSRFKDSLGNPTHILRIGESYKEKQRTIQAKKEVEQRRAGGYSRKYASKAKNLADDMVRNTARDLLYYAVTQDAMLIFENLSRGFGRQGKRTFMAERQYTRMEDWLTAKLAYEGPLPSKTYLSKTLAQYTSKTCSNCGFTITSADYDRVLEKLKKTATGWMTTINGKELKVEGQITYYNRYKRQNVVKDLSVELDRLSEESVNNDISSWTKGRSGEALSLLKKRFSHRPVQEKFVCLNCGFETHADEQAALNIARSWLFLRSQEYKKYQTNKTTGNTDKRAFVETWQSFYRKKLKEVWKPAV

SEQ ID NO: 38934 - protein, 980 aa, synthetic construct
  REGION 1..980: note = engineered CasX variant
QEIKRINKIRRRLVKDSNTKKAGKTGPMKTLLVRVMTPDLRERLENLRKKPENIPQPISNTSRANLNKLLTDYTEMKKAILHVYWEEFQKDPVGLMSRVAQPASKKIDQNKLKPEMDEKGNLTTAGFACSQCGQPLFVYKLEQVSEKGKAYTNYFGRCNVAEHEKLILLAQLKPEKDSDEAVTYSLGKFGQRALDFYSIHVTKESTHPVKPLAQIAGNRYASVPVGKALSDACMGTIASFLSKYQDIIIEHQKVVKGNQKRLESLRELAGKENLEYPSVTLPPQPHTKEGVDAYNEVIARVRMWVNLNLWQKLKLSRDDAKPLLRLKGFPSFPLVERQANEVDWWDMVCNVKKLINEKKEDGKVFWQNLAGYKRQEALRPYLSSEEDVRKKGKKFARYQLGDLLLHLEKKHGEDWGKVYDEAWERIDKKVEGLSKHIKLEEERRSEDAQSKAALTDWLRAKASFVIEGLKEADKDEFCRCELKLQKWYGDLRGKPFAIEAENSILDISGFSKQYNCAFIWQKDGVKKLNLYLIINYFKGGKLRFKKIKPEAFEANRFYTVINKKSGEIVPMEVNFNFDDPNLIILPLAFGKRQGREFIWNDLLSLETGSLKLANGRVIEKTLYNRRTRQDEPALFVALTFERREVLDSSNIKPMNLIGVDRGENIPAVIALTDPEGCPLSRFKDSLGNPTHILRIGESYKEKQRTIQAKKEVEQRRAGGYSRKYASKAKNLADDMVRNTARDLLYYAVTQDAMLIFENLSRGFGRQGKRTFMAERQYTRMEDWLTAKLAYEGPLPSKTYLSKTLAQYTSKTCSNCGFTITSADYDRVLEKLKKTATGWMTTINGKELKVEGQITYYNRYKRQNVVKDLSVELDRLSEESVNNDISSWTKGRSGEALSLLKKRFSHRPVQEKFVCLNCGFETHADEQAALNIARSWLFLRSQEYKKYQTNKTTGNTDKRAFVETWQSFYRKKLKEVWKPAV

SEQ ID NO: 38935 - protein, 980 aa, synthetic construct
  REGION 1..980: note = engineered CasX variant
QEIKRINKIRRRLVKDSNTKKAGKTGPMKTLLVRVMTPDLRERLENLRKKPENIPQPISNTSRANLNKLLTDYTEMKKAILHVYWEEFQKDPVGLMSRVAQPASKKIDQNKLKPEMDEKGNLTTAGFACSQCGQPLFVYKLEQVSEKGKAYTNYFGRCNVAEHEKLIKLAQLKPEKDSDEAVTYSLGKFGQRALDFYSIHVTKESTHPVKPLAQIAGNRYASGPVGKALSDACMGTIASFLSKYQDIIIEHQKVVKGNQKRLESLRELAGKENLEYPSVTLPPQPHTKEGVDAYNEVIARVRMWVNLNLWQKLKLSRDDAKPLLRLKGFPSFPLVERQANEVDWWDMVCNVKKLINEKKEDGKVFWQNLAGYKRQEALRPYLSSEEDVRKKGKKFARYQLGDLLLHLEKKHGEDWGKVYDEAWERIDKKVEGLSKHIKLEEERRSEDAQSKAALTDWLRAKASFVIEGLKEADKDEFCRCELKLQKWYGDLRGKPFAIEAENSILDISGFSKQYNCAFIWQKDGVKKLNLYLIINYFKGGKLRFKKIKPEAFEANRFYTVINKKSGEIVPMEVNFNFDDPNLIILPLAFGKRQGREFIWNDLLSLETGSLKLANGRVIEKTLYNRRTRQDEPALFVALTFERREVLDSSNIKPMNLIGVDRGENIPAVIALTDPEGCPLSRFKDSLGNPTHILRIGESYKEKQRTIQAKKEVEQRRAGGYSRKYASKAKNLADDMVRNTARDLLYYAVTQDAMLIFENLSRGFGRQGKRTFMAERQYTRMEDWLTAKLAYEGPLPSKTYLSKTLAQYTSKTCSNCGFTITSADYDRVLEKLKKTATGWMTTINGKELKVEGQITYYNRYKRQNVVKDLSVELDRLSEESVNNDISSWTKGRSGEALSLLKKRFSHRPVQEKFVCLNCGFETHADEQAALNIARSWLFLRSQEYKKYQTNKTTGNTDKRAFVETWQSFYRKKLKEVWKPAV

SEQ ID NO: 38936 - protein, 979 aa, synthetic construct
  REGION 1..979: note = engineered CasX variant
QEIKRINKIRRRLVKDSNTKKAGKTGPMKTLLVRVMTPDLRERLENLRKKPENIPQPISNTSRANLNKLLTDYTEMKKAILHVYWEEFQKDPVGLMSRVAQPASKKIDQNKLKPEMDEKGNLTTAGFACSQCGQPLFVYKLEQVSEKGKAYTNYFGRCNVAEHEKLILLAQLKPEKDSDEAVTYSLGKFGQRALDFYSIHVTKESTHPVKPLAQIAGNRYASPVGKALSDACMGTIASFLSKYQDIIIEHQKVVKGNQKRLESLRELAGKENLEYPSVTLPPQPHTKEGVDAYNEVIARVRMWVNLNLWQKLKLSRDDAKPLLRLKGFPSFPLVERQANEVDWWDMVCNVKKLINEKKEDGKVFWQNLAGYKRQEALRPYLSSEEDVRKKGKKFARYQLGDLLLHLEKKHGEDWGKVYDEAWERIDKKVEGLSKHIKLEEERRSEDAQSKAALTDWLRAKASFVIEGLKEADKDEFCRCELKLQKWYGDLRGKPFAIEAENSILDISGFSKQYNCAFIWQKDGVKKLNLYLIINYFKGGKLRFKKIKPEAFEANRFYTVINKKSGEIVPMEVNFNFDDPNLIILPLAFGKRQGREFIWNDLLSLETGSLKLANGRVIEKTLYNRRTRQDEPALFVALTFERREVLDSSNIKPMNLIGVDRGENIPAVIALTDPEGCPLSRFKDSLGNPTHILRIGESYKEKQRTIQAKKEVEQRRAGGYSRKYASKAKNLADDMVRNTARDLLYYAVTQDAMLIFENLSRGFGRQGKRTFMAERQYTRMEDWLTAKLAYEGPLPSKTYLSKTLAQYTSKTCSNCGFTITSADYDRVLEKLKKTATGWMTTINGKELKVEGQITYYNRYKRQNVVKDLSVELDRLSEESVNNDISSWTKGRSGEALSLLKKRFSHRPVQEKFVCLNCGFETHADEQAALNIARSWLFLRSQEYKKYQTNKTTGNTDKRAFVETWQSFYRKKLKEVWKPAV

SEQ ID NO: 38937 - protein, 979 aa, synthetic construct
  REGION 1..979: note = engineered CasX variant
QEIKRINKIRRRLVKDSNTKKAGKTGPMKTLLVRVMTPDLRERLENLRKKPENIPQPISNTSRANLNKLLTDYTEMKKAILHVYWEEFQKDPVGLMSRVAQPASKKIDQNKLKPEMDEKGNLTTAGFACSQCGQPLFVYKLEQVSEKGKAYTNYFGRCNVAEHEKLILLAQLKPEKDSDEAVTYSLGKFGQRALDFYSIHVTKESTHPVKPLAQIAGNRYASYPVGKALSDACMGTIASFLSKYQDIIIEHQKVVKGNQKRLESLRELAGKENLEYPSVTLPPQPHTKEGVDAYNEVIARVRMWVNLNLWQKLKLSRDDAKPLLRLKGFPSFPLVERQANEVDWWDMVCNVKKLINEKKEDGKVFWQNLAGYKRQEALRPYLSSEEDRKKGKKFARYQLGDLLLHLEKKHGEDWGKVYDEAWERIDKKVEGLSKHIKLEEERRSEDAQSKAALTDWLRAKASFVIEGLKEADKDEFCRCELKLQKWYGDLRGKPFAIEAENSILDISGFSKQYNCAFIWQKDGVKKLNLYLIINYFKGGKLRFKKIKPEAFEANRFYTVINKKSGEIVPMEVNFNFDDPNLIILPLAFGKRQGREFIWNDLLSLETGSLKLANGRVIEKTLYNRRTRQDEPALFVALTFERREVLDSSNIKPMNLIGVDRGENIPAVIALTDPEGCPLSRFKDSLGNPTHILRIGESYKEKQRTIQAKKEVEQRRAGGYSRKYASKAKNLADDMVRNTARDLLYYAVTQDAMLIFENLSRGFGRQGKRTFMAERQYTRMEDWLTAKLAYEGPLPSKTYLSKTLAQYTSKTCSNCGFTITSADYDRMLEKLKKTATGWMTTINGKELKVEGQITYYNRYKRQNVVKDLSVELDRLSEESVNNDISSWTKGRSGEALSLLKKRFSHRPVQEKFVCLNCGFETHADEQAALNIARSWLFLRSQEYKKYQTNKTTGNTDKRAFVETWQSFYRKKLKEVWKPAV

SEQ ID NO: 38938 - protein, 979 aa, synthetic construct
  REGION 1..979: note = engineered CasX variant
QEIKRINKIRRRLVKDSNTKKAGKTGPMKTLLVRVMTPDLRERLENLRKKPENIPQPISNTSRANLNKLLTDYTEMKKAILHVYWEEFQKDPVGLMSRVAQPASKKIDQNKLKPEMDEKGNLTTAGFACSQCGQPLFVYKLEQVSEKGKAYTNYFGRCNVAEHEKLILLAQLKPEKDSDEAVTYSLGKFGQRALDFYSIHVTKESTHPVKPLAQIAGNRYASHPVGKALSDACMGTIASFLSKYQDIIIEHQKVVKGNQKRLESLRELAGKENLEYPSVTLPPQPHTKEGVDAYNEVIARVRMWVNLNLWQKLKLSRDDAKPLLRLKGFPSFPLVERQANEVDWWDMVCNVKKLINEKKEDGKVFWQNLAGYKRQEALRPYLSSEEDRKKGKKFARYQLGDLLLHLEKKHGEDWGKVYDEAWERIDKKVEGLSKHIKLEEERRSEDAQSKAALTDWLRAKASFVIEGLKEADKDEFCRCELKLQKWYGDLRGKPFAIEAENSILDISGFSKQYNCAFIWQKDGVKKLNLYLIINYFKGGKLRFKKIKPEAFEANRFYTVINKKSGEIVPMEVNFNFDDPNLIILPLAFGKRQGREFIWNDLLSLETGSLKLANGRVIEKTLYNRRTRQDEPALFVALTFERREVLDSSNIKPMNLIGVDRGENIPAVIALTDPEGCPLSRFKDSLGNPTHILRIGESYKEKQRTIQAKKEVEQRRAGGYSRKYASKAKNLADDMVRNTARDLLYYAVTQDAMLIFENLSRGFGRQGKRTFMAERQYTRMEDWLTAKLAYEGPLPSKTYLSKTLAQYTSKTCSNCGFTITSADYDRMLEKLKKTATGWMTTINGKELKVEGQITYYNRYKRQNVVKDLSVELDRLSEESVNNDISSWTKGRSGEALSLLKKRFSHRPVQEKFVCLNCGFETHADEQAALNIARSWLFLRSQEYKKYQTNKTTGNTDKRAFVETWQSFYRKKLKEVWKPAV

SEQ ID NO: 38939 - protein, 979 aa, synthetic construct
  REGION 1..979: note = engineered CasX variant
QEIKRINKIRRRLVKDSNTKKAGKTGPMKTLLVRVMTPDLRERLENLRKKPENIPQPISNTSRANLNKLLTDYTEMKKAILHVYWEEFQKDPVGLMSRVAQPASKKIDQNKLKPEMDEKGNLTTAGFACSQCGQPLFVYKLEQVSEKGKAYTNYFGRCNVAEHEKLILLAQLKPEKDSDEAVTYSLGKFGQRALDFYSIHVTKESTHPVKPLAQIAGNRYASSPVGKALSDACMGTIASFLSKYQDIIIEHQKVVKGNQKRLESLRELAGKENLEYPSVTLPPQPHTKEGVDAYNEVIARVRMWVNLNLWQKLKLSRDDAKPLLRLKGFPSFPLVERQANEVDWWDMVCNVKKLINEKKEDGKVFWQNLAGYKRQEALRPYLSSEEDRKKGKKFARYQLGDLLLHLEKKHGEDWGKVYDEAWERIDKKVEGLSKHIKLEEERRSEDAQSKAALTDWLRAKASFVIEGLKEADKDEFCRCELKLQKWYGDLRGKPFAIEAENSILDISGFSKQYNCAFIWQKDGVKKLNLYLIINYFKGGKLRFKKIKPEAFEANRFYTVINKKSGEIVPMEVNFNFDDPNLIILPLAFGKRQGREFIWNDLLSLETGSLKLANGRVIEKTLYNRRTRQDEPALFVALTFERREVLDSSNIKPMNLIGVDRGENIPAVIALTDPEGCPLSRFKDSLGNPTHILRIGESYKEKQRTIQAKKEVEQRRAGGYSRKYASKAKNLADDMVRNTARDLLYYAVTQDAMLIFENLSRGFGRQGKRTFMAERQYTRMEDWLTAKLAYEGPLPSKTYLSKTLAQYTSKTCSNCGFTITSADYDRMLEKLKKTATGWMTTINGKELKVEGQITYYNRYKRQNVVKDLSVELDRLSEESVNNDISSWTKGRSGEALSLLKKRFSHRPVQEKFVCLNCGFETHADEQAALNIARSWLFLRSQEYKKYQTNKTTGNTDKRAFVETWQSFYRKKLKEVWKPAV

SEQ ID NO: 38940 - protein, 979 aa, synthetic construct
  REGION 1..979: note = engineered CasX variant
QEIKRINKIRRRLVKDSNTKKAGKTGPMKTLLVRVMTPDLRERLENLRKKPENIPQPISNTSRANLNKLLTDYTEMKKAILHVYWEEFQKDPVGLMSRVAQPASKKIDQNKLKPEMDEKGNLTTAGFACSQCGQPLFVYKLEQVSEKGKAYTNYFGRCNVAEHEKLILLAQLKPEKDSDEAVTYSLGKFGQRALDFYSIHVTKESTHPVKPLAQIAGNRYASTPVGKALSDACMGTIASFLSKYQDIIIEHQKVVKGNQKRLESLRELAGKENLEYPSVTLPPQPHTKEGVDAYNEVIARVRMWVNLNLWQKLKLSRDDAKPLLRLKGFPSFPLVERQANEVDWWDMVCNVKKLINEKKEDGKVFWQNLAGYKRQEALRPYLSSEEDRKKGKKFARYQLGDLLLHLEKKHGEDWGKVYDEAWERIDKKVEGLSKHIKLEEERRSEDAQSKAALTDWLRAKASFVIEGLKEADKDEFCRCELKLQKWYGDLRGKPFAIEAENSILDISGFSKQYNCAFIWQKDGVKKLNLYLIINYFKGGKLRFKKIKPEAFEANRFYTVINKKSGEIVPMEVNFNFDDPNLIILPLAFGKRQGREFIWNDLLSLETGSLKLANGRVIEKTLYNRRTRQDEPALFVALTFERREVLDSSNIKPMNLIGVDRGENIPAVIALTDPEGCPLSRFKDSLGNPTHILRIGESYKEKQRTIQAKKEVEQRRAGGYSRKYASKAKNLADDMVRNTARDLLYYAVTQDAMLIFENLSRGFGRQGKRTFMAERQYTRMEDWLTAKLAYEGPLPSKTYLSKTLAQYTSKTCSNCGFTITSADYDRMLEKLKKTATGWMTTINGKELKVEGQITYYNRYKRQNVVKDLSVELDRLSEESVNNDISSWTKGRSGEALSLLKKRFSHRPVQEKFVCLNCGFETHADEQAALNIARSWLFLRSQEYKKYQTNKTTGNTDKRAFVETWQSFYRKKLKEVWKPAV

SEQ ID NO: 38941 - protein, 979 aa, synthetic construct
  REGION 1..979: note = engineered CasX variant
QEIKRINKIRRRLVKDSNTKKAGKTGPMKTLLVRVMTPDLRERLENLRKKPENIPQPISNTSRANLNKLLTDYTEMKKAILHVYWEEFQKDPVGLMSRVAQPASKKIDQNKLKPEMDEKGNLTTAGFACSQCGQPLFVYKLEQVSEKGKAYTNYFGRCNVAEHEKLILLAQLKPEKDSDEAVTYSLGKFGQRALDFYSIHVTKESTHPVKPLAQIAGNRYASAPVGKALSDACMGTIASFLSKYQDIIIEHQKVVKGNQKRLESLRELAGKENLEYPSVTLPPQPHTKEGVDAYNEVIARVRMWVNLNLWQKLKLSRDDAKPLLRLKGFPSFPLVERQANEVDWWDMVCNVKKLINEKKEDGKVFWQNLAGYKRQEALRPYLSSEEDRKKGKKFARYQLGDLLLHLEKKHGEDWGKVYDEAWERIDKKVEGLSKHIKLEEERRSEDAQSKAALTDWLRAKASFVIEGLKEADKDEFCRCELKLQKWYGDLRGKPFAIEAENSILDISGFSKQYNCAFIWQKDGVKKLNLYLIINYFKGGKLRFKKIKPEAFEANRFYTVINKKSGEIVPMEVNFNFDDPNLIILPLAFGKRQGREFIWNDLLSLETGSLKLANGRVIEKTLYNRRTRQDEPALFVALTFERREVLDSSNIKPMNLIGVDRGENIPAVIALTDPEGCPLSRFKDSLGNPTHILRIGESYKEKQRTIQAKKEVEQRRAGGYSRKYASKAKNLADDMVRNTARDLLYYAVTQDAMLIFENLSRGFGRQGKRTFMAERQYTRMEDWLTAKLAYEGPLPSKTYLSKTLAQYTSKTCSNCGFTITSADYDRMLEKLKKTATGWMTTINGKELKVEGQITYYNRYKRQNVVKDLSVELDRLSEESVNNDISSWTKGRSGEALSLLKKRFSHRPVQEKFVCLNCGFETHADEQAALNIARSWLFLRSQEYKKYQTNKTTGNTDKRAFVETWQSFYRKKLKEVWKPAV

SEQ ID NO: 38942 - protein, 979 aa, synthetic construct
  REGION 1..979: note = engineered CasX variant
QEIKRINKIRRRLVKDSNTKKAGKTGPMKTLLVRVMTPDLRERLENLRKKPENIPQPISNTSRANLNKLLTDYTEMKKAILHVYWEEFQKDPVGLMSRVAQPASKKIDQNKLKPEMDEKGNLTTAGFACSQCGQPLFVYKLEQVSEKGKAYTNYFGRCNVAEHEKLILLAQLKPEKDSDEAVTYSLGKFGQRALDFYSIHVTKESTHPVKPLAQIAGNRYASVPVGKALSDACMGTIASFLSKYQDIIIEHQKVVKGNQKRLESLRELAGKENLEYPSVTLPPQPHTKEGVDAYNEVIARVRMWVNLNLWQKLKLSRDDAKPLLRLKGFPSFPLVERQANEVDWWDMVCNVKKLINEKKEDGKVFWQNLAGYKRQEALRPYLSSEEDRKKGKKFARYQLGDLLLHLEKKHGEDWGKVYDEAWERIDKKVEGLSKHIKLEEERRSEDAQSKAALTDWLRAKASFVIEGLKEADKDEFCRCELKLQKWYGDLRGKPFAIEAENSILDISGFSKQYNCAFIWQKDGVKKLNLYLIINYFKGGKLRFKKIKPEAFEANRFYTVINKKSGEIVPMEVNFNFDDPNLIILPLAFGKRQGREFIWNDLLSLETGSLKLANGRVIEKTLYNRRTRQDEPALFVALTFERREVLDSSNIKPMNLIGVDRGENIPAVIALTDPEGCPLSRFKDSLGNPTHILRIGESYKEKQRTIQAKKEVEQRRAGGYSRKYASKAKNLADDMVRNTARDLLYYAVTQDAMLIFENLSRGFGRQGKRTFMAERQYTRMEDWLTAKLAYEGPLPSKTYLSKTLAQYTSKTCSNCGFTITSADYDRMLEKLKKTATGWMTTINGKELKVEGQITYYNRYKRQNVVKDLSVELDRLSEESVNNDISSWTKGRSGEALSLLKKRFSHRPVQEKFVCLNCGFETHADEQAALNIARSWLFLRSQEYKKYQTNKTTGNTDKRAFVETWQSFYRKKLKEVWKPAV

SEQ ID NO: 38943 - protein, 979 aa, synthetic construct
  REGION 1..979: note = engineered CasX variant
QEIKRINKIRRRLVKDSNTKKAGKTGPMKTLLVRVMTPDLRERLENLRKKPENIPQPISNTSRANLNKLLTDYTEMKKAILHVYWEEFQKDPVGLMSRVAQPASKKIDQNKLKPEMDEKGNLTTAGFACSQCGQPLFVYKLEQVSEKGKAYTNYFGRCNVAEHEKLIKLAQLKPEKDSDEAVTYSLGKFGQRALDFYSIHVTKESTHPVKPLAQIAGNRYASGPVGKALSDACMGTIASFLSKYQDIIIEHQKVVKGNQKRLESLRELAGKENLEYPSVTLPPQPHTKEGVDAYNEVIARVRMWVNLNLWQKLKLSRDDAKPLLRLKGFPSFPLVERQANEVDWWDMVCNVKKLINEKKEDGKVFWQNLAGYKRQEALRPYLSSEEDRKKGKKFARYQLGDLLLHLEKKHGEDWGKVYDEAWERIDKKVEGLSKHIKLEEERRSEDAQSKAALTDWLRAKASFVIEGLKEADKDEFCRCELKLQKWYGDLRGKPFAIEAENSILDISGFSKQYNCAFIWQKDGVKKLNLYLIINYFKGGKLRFKKIKPEAFEANRFYTVINKKSGEIVPMEVNFNFDDPNLIILPLAFGKRQGREFIWNDLLSLETGSLKLANGRVIEKTLYNRRTRQDEPALFVALTFERREVLDSSNIKPMNLIGVDRGENIPAVIALTDPEGCPLSRFKDSLGNPTHILRIGESYKEKQRTIQAKKEVEQRRAGGYSRKYASKAKNLADDMVRNTARDLLYYAVTQDAMLIFENLSRGFGRQGKRTFMAERQYTRMEDWLTAKLAYEGPLPSKTYLSKTLAQYTSKTCSNCGFTITSADYDRMLEKLKKTATGWMTTINGKELKVEGQITYYNRYKRQNVVKDLSVELDRLSEESVNNDISSWTKGRSGEALSLLKKRFSHRPVQEKFVCLNCGFETHADEQAALNIARSWLFLRSQEYKKYQTNKTTGNTDKRAFVETWQSFYRKKLKEVWKPAV

SEQ ID NO: 38944 - protein, 978 aa, synthetic construct
  REGION 1..978: note = engineered CasX variant
QEIKRINKIRRRLVKDSNTKKAGKTGPMKTLLVRVMTPDLRERLENLRKKPENIPQPISNTSRANLNKLLTDYTEMKKAILHVYWEEFQKDPVGLMSRVAQPASKKIDQNKLKPEMDEKGNLTTAGFACSQCGQPLFVYKLEQVSEKGKAYTNYFGRCNVAEHEKLILLAQLKPEKDSDEAVTYSLGKFGQRALDFYSIHVTKESTHPVKPLAQIAGNRYASPVGKALSDACMGTIASFLSKYQDIIIEHQKVVKGNQKRLESLRELAGKENLEYPSVTLPPQPHTKEGVDAYNEVIARVRMWVNLNLWQKLKLSRDDAKPLLRLKGFPSFPLVERQANEVDWWDMVCNVKKLINEKKEDGKVFWQNLAGYKRQEALRPYLSSEEDRKKGKKFARYQLGDLLLHLEKKHGEDWGKVYDEAWERIDKKVEGLSKHIKLEEERRSEDAQSKAALTDWLRAKASFVIEGLKEADKDEFCRCELKLQKWYGDLRGKPFAIEAENSILDISGFSKQYNCAFIWQKDGVKKLNLYLIINYFKGGKLRFKKIKPEAFEANRFYTVINKKSGEIVPMEVNFNFDDPNLIILPLAFGKRQGREFIWNDLLSLETGSLKLANGRVIEKTLYNRRTRQDEPALFVALTFERREVLDSSNIKPMNLIGVDRGENIPAVIALTDPEGCPLSRFKDSLGNPTHILRIGESYKEKQRTIQAKKEVEQRRAGGYSRKYASKAKNLADDMVRNTARDLLYYAVTQDAMLIFENLSRGFGRQGKRTFMAERQYTRMEDWLTAKLAYEGPLPSKTYLSKTLAQYTSKTCSNCGFTITSADYDRMLEKLKKTATGWMTTINGKELKVEGQITYYNRYKRQNVVKDLSVELDRLSEESVNNDISSWTKGRSGEALSLLKKRFSHRPVQEKFVCLNCGFETHADEQAALNIARSWLFLRSQEYKKYQTNKTTGNTDKRAFVETWQSFYRKKLKEVWKPAV

SEQ ID NO: 38945 - protein, 979 aa, synthetic construct
  REGION 1..979: note = engineered CasX variant
QEIKRINKIRRRLVKDSNTKKAGKTGPMKTLLVRVMTPDLRERLENLRKKPENIPQPISNTSRANLNKLLTDYTEMKKAILHVYWEEFQKDPVGLMSRVAQPASKKIDQNKLKPEMDEKGNLTTAGFACSQCGQPLFVYKLEQVSEKGKAYTNYFGRCNVAEHEKLILLAQLKPEKDSDEAVTYSLGKFGQRALDFYSIHVTKESTHPVKPLAQIAGNRYASYPVGKALSDACMGTIASFLSKYQDIIIEHQKVVKGNQKRLESLRELAGKENLEYPSVTLPPQPHTKEGVDAYNEVIARVRMWVNLNLWQKLKLSRDDAKPLLRLKGFPSFPLVERQANEVDWWDMVCNVKKLINEKKEDGKVFWQNLAGYKRQEALRPYLSSEEDRKKGKKFARYQLGDLLLHLEKKHGEDWGKVYDEAWERIDKKVEGLSKHIKLEEERRSEDAQSKAALTDWLRAKASFVIEGLKEADKDEFCRCELKLQKWYGDLRGKPFAIEAENSILDISGFSKQYNCAFIWQKDGVKKLNLYLIINYFKGGKLRFKKIKPEAFEANRFYTVINKKSGEIVPMEVNFNFDDPNLIILPLAFGKRQGREFIWNDLLSLETGSLKLANGRVIEKTLYNRRTRQDEPALFVALTFERREVLDSSNIKPMNLIGVDRGENIPAVIALTDPEGCPLSRFKDSLGNPTHILRIGESYKEKQRTIQAKKEVEQRRAGGYSRKYASKAKNLADDMVRNTARDLLYYAVTQDAMLIFENLSRGFGRQGKRTFMAERQYTRMEDWLTAKLAYEGPLPSKTYLSKTLAQYTSKTCSNCGFTITSADYDRVLEKLKKTATGWMTTINGKELKVEGQITYYNRYKRQNVVKDLSVELDRLSEESVNNDISSWTKGRQGEALSLLKKRFSHRPVQEKFVCLNCGFETHADEQAALNIARSWLFLRSQEYKKYQTNKTTGNTDKRAFVETWQSFYRKKLKEVWKPAV

SEQ ID NO: 38946 - protein, 979 aa, synthetic construct
  REGION 1..979: note = engineered CasX variant
QEIKRINKIRRRLVKDSNTKKAGKTGPMKTLLVRVMTPDLRERLENLRKKPENIPQPISNTSRANLNKLLTDYTEMKKAILHVYWEEFQKDPVGLMSRVAQPASKKIDQNKLKPEMDEKGNLTTAGFACSQCGQPLFVYKLEQVSEKGKAYTNYFGRCNVAEHEKLILLAQLKPEKDSDEAVTYSLGKFGQRALDFYSIHVTKESTHPVKPLAQIAGNRYASHPVGKALSDACMGTIASFLSKYQDIIIEHQKVVKGNQKRLESLRELAGKENLEYPSVTLPPQPHTKEGVDAYNEVIARVRMWVNLNLWQKLKLSRDDAKPLLRLKGFPSFPLVERQANEVDWWDMVCNVKKLINEKKEDGKVFWQNLAGYKRQEALRPYLSSEEDRKKGKKFARYQLGDLLLHLEKKHGEDWGKVYDEAWERIDKKVEGLSKHIKLEEERRSEDAQSKAALTDWLRAKASFVIEGLKEADKDEFCRCELKLQKWYGDLRGKPFAIEAENSILDISGFSKQYNCAFIWQKDGVKKLNLYLIINYFKGGKLRFKKIKPEAFEANRFYTVINKKSGEIVPMEVNFNFDDPNLIILPLAFGKRQGREFIWNDLLSLETGSLKLANGRVIEKTLYNRRTRQDEPALFVALTFERREVLDSSNIKPMNLIGVDRGENIPAVIALTDPEGCPLSRFKDSLGNPTHILRIGESYKEKQRTIQAKKEVEQRRAGGYSRKYASKAKNLADDMVRNTARDLLYYAVTQDAMLIFENLSRGFGRQGKRTFMAERQYTRMEDWLTAKLAYEGPLPSKTYLSKTLAQYTSKTCSNCGFTITSADYDRVLEKLKKTATGWMTTINGKELKVEGQITYYNRYKRQNVVKDLSVELDRLSEESVNNDISSWTKGRQGEALSLLKKRFSHRPVQEKFVCLNCGFETHADEQAALNIARSWLFLRSQEYKKYQTNKTTGNTDKRAFVETWQSFYRKKLKEVWKPAV

SEQ ID NO: 38947 - protein, 979 aa, synthetic construct
  REGION 1..979: note = engineered CasX variant
QEIKRINKIRRRLVKDSNTKKAGKTGPMKTLLVRVMTPDLRERLENLRKKPENIPQPISNTSRANLNKLLTDYTEMKKAILHVYWEEFQKDPVGLMSRVAQPASKKIDQNKLKPEMDEKGNLTTAGFACSQCGQPLFVYKLEQVSEKGKAYTNYFGRCNVAEHEKLILLAQLKPEKDSDEAVTYSLGKFGQRALDFYSIHVTKESTHPVKPLAQIAGNRYASSPVGKALSDACMGTIASFLSKYQDIIIEHQKVVKGNQKRLESLRELAGKENLEYPSVTLPPQPHTKEGVDAYNEVIARVRMWVNLNLWQKLKLSRDDAKPLLRLKGFPSFPLVERQANEVDWWDMVCNVKKLINEKKEDGKVFWQNLAGYKRQEALRPYLSSEEDRKKGKKFARYQLGDLLLHLEKKHGEDWGKVYDEAWERIDKKVEGLSKHIKLEEERRSEDAQSKAALTDWLRAKASFVIEGLKEADKDEFCRCELKLQKWYGDLRGKPFAIEAENSILDISGFSKQYNCAFIWQKDGVKKLNLYLIINYFKGGKLRFKKIKPEAFEANRFYTVINKKSGEIVPMEVNFNFDDPNLIILPLAFGKRQGREFIWNDLLSLETGSLKLANGRVIEKTLYNRRTRQDEPALFVALTFERREVLDSSNIKPMNLIGVDRGENIPAVIALTDPEGCPLSRFKDSLGNPTHILRIGESYKEKQRTIQAKKEVEQRRAGGYSRKYASKAKNLADDMVRNTARDLLYYAVTQDAMLIFENLSRGFGRQGKRTFMAERQYTRMEDWLTAKLAYEGPLPSKTYLSKTLAQYTSKTCSNCGFTITSADYDRVLEKLKKTATGWMTTINGKELKVEGQITYYNRYKRQNVVKDLSVELDRLSEESVNNDISSWTKGRQGEALSLLKKRFSHRPVQEKFVCLNCGFETHADEQAALNIARSWLFLRSQEYKKYQTNKTTGNTDKRAFVETWQSFYRKKLKEVWKPAV

SEQ ID NO: 38948 - protein, 979 aa, synthetic construct
  REGION 1..979: note = engineered CasX variant
QEIKRINKIRRRLVKDSNTKKAGKTGPMKTLLVRVMTPDLRERLENLRKKPENIPQPISNTSRANLNKLLTDYTEMKKAILHVYWEEFQKDPVGLMSRVAQPASKKIDQNKLKPEMDEKGNLTTAGFACSQCGQPLFVYKLEQVSEKGKAYTNYFGRCNVAEHEKLILLAQLKPEKDSDEAVTYSLGKFGQRALDFYSIHVTKESTHPVKPLAQIAGNRYASTPVGKALSDACMGTIASFLSKYQDIIIEHQKVVKGNQKRLESLRELAGKENLEYPSVTLPPQPHTKEGVDAYNEVIARVRMWVNLNLWQKLKLSRDDAKPLLRLKGFPSFPLVERQANEVDWWDMVCNVKKLINEKKEDGKVFWQNLAGYKRQEALRPYLSSEEDRKKGKKFARYQLGDLLLHLEKKHGEDWGKVYDEAWERIDKKVEGLSKHIKLEEERRSEDAQSKAALTDWLRAKASFVIEGLKEADKDEFCRCELKLQKWYGDLRGKPFAIEAENSILDISGFSKQYNCAFIWQKDGVKKLNLYLIINYFKGGKLRFKKIKPEAFEANRFYTVINKKSGEIVPMEVNFNFDDPNLIILPLAFGKRQGREFIWNDLLSLETGSLKLANGRVIEKTLYNRRTRQDEPALFVALTFERREVLDSSNIKPMNLIGVDRGENIPAVIALTDPEGCPLSRFKDSLGNPTHILRIGESYKEKQRTIQAKKEVEQRRAGGYSRKYASKAKNLADDMVRNTARDLLYYAVTQDAMLIFENLSRGFGRQGKRTFMAERQYTRMEDWLTAKLAYEGPLPSKTYLSKTLAQYTSKTCSNCGFTITSADYDRVLEKLKKTATGWMTTINGKELKVEGQITYYNRYKRQNVVKDLSVELDRLSEESVNNDISSWTKGRQGEALSLLKKRFSHRPVQEKFVCLNCGFETHADEQAALNIARSWLFLRSQEYKKYQTNKTTGNTDKRAFVETWQSFYRKKLKEVWKPAV

SEQ ID NO: 38949 - protein, 979 aa, synthetic construct
  REGION 1..979: note = engineered CasX variant
QEIKRINKIRRRLVKDSNTKKAGKTGPMKTLLVRVMTPDLRERLENLRKKPENIPQPISNTSRANLNKLLTDYTEMKKAILHVYWEEFQKDPVGLMSRVAQPASKKIDQNKLKPEMDEKGNLTTAGFACSQCGQPLFVYKLEQVSEKGKAYTNYFGRCNVAEHEKLILLAQLKPEKDSDEAVTYSLGKFGQRALDFYSIHVTKESTHPVKPLAQIAGNRYASAPVGKALSDACMGTIASFLSKYQDIIIEHQKVVKGNQKRLESLRELAGKENLEYPSVTLPPQPHTKEGVDAYNEVIARVRMWVNLNLWQKLKLSRDDAKPLLRLKGFPSFPLVERQANEVDWWDMVCNVKKLINEKKEDGKVFWQNLAGYKRQEALRPYLSSEEDRKKGKKFARYQLGDLLLHLEKKHGEDWGKVYDEAWERIDKKVEGLSKHIKLEEERRSEDAQSKAALTDWLRAKASFVIEGLKEADKDEFCRCELKLQKWYGDLRGKPFAIEAENSILDISGFSKQYNCAFIWQKDGVKKLNLYLIINYFKGGKLRFKKIKPEAFEANRFYTVINKKSGEIVPMEVNFNFDDPNLIILPLAFGKRQGREFIWNDLLSLETGSLKLANGRVIEKTLYNRRTRQDEPALFVALTFERREVLDSSNIKPMNLIGVDRGENIPAVIALTDPEGCPLSRFKDSLGNPTHILRIGESYKEKQRTIQAKKEVEQRRAGGYSRKYASKAKNLADDMVRNTARDLLYYAVTQDAMLIFENLSRGFGRQGKRTFMAERQYTRMEDWLTAKLAYEGPLPSKTYLSKTLAQYTSKTCSNCGFTITSADYDRVLEKLKKTATGWMTTINGKELKVEGQITYYNRYKRQNVVKDLSVELDRLSEESVNNDISSWTKGRQGEALSLLKKRFSHRPVQEKFVCLNCGFETHADEQAALNIARSWLFLRSQEYKKYQTNKTTGNTDKRAFVETWQSFYRKKLKEVWKPAV

SEQ ID NO: 38950 - protein, 979 aa, synthetic construct
  REGION 1..979: note = engineered CasX variant
QEIKRINKIRRRLVKDSNTKKAGKTGPMKTLLVRVMTPDLRERLENLRKKPENIPQPISNTSRANLNKLLTDYTEMKKAILHVYWEEFQKDPVGLMSRVAQPASKKIDQNKLKPEMDEKGNLTTAGFACSQCGQPLFVYKLEQVSEKGKAYTNYFGRCNVAEHEKLILLAQLKPEKDSDEAVTYSLGKFGQRALDFYSIHVTKESTHPVKPLAQIAGNRYASVPVGKALSDACMGTIASFLSKYQDIIIEHQKVVKGNQKRLESLRELAGKENLEYPSVTLPPQPHTKEGVDAYNEVIARVRMWVNLNLWQKLKLSRDDAKPLLRLKGFPSFPLVERQANEVDWWDMVCNVKKLINEKKEDGKVFWQNLAGYKRQEALRPYLSSEEDRKKGKKFARYQLGDLLLHLEKKHGEDWGKVYDEAWERIDKKVEGLSKHIKLEEERRSEDAQSKAALTDWLRAKASFVIEGLKEADKDEFCRCELKLQKWYGDLRGKPFAIEAENSILDISGFSKQYNCAFIWQKDGVKKLNLYLIINYFKGGKLRFKKIKPEAFEANRFYTVINKKSGEIVPMEVNFNFDDPNLIILPLAFGKRQGREFIWNDLLSLETGSLKLANGRVIEKTLYNRRTRQDEPALFVALTFERREVLDSSNIKPMNLIGVDRGENIPAVIALTDPEGCPLSRFKDSLGNPTHILRIGESYKEKQRTIQAKKEVEQRRAGGYSRKYASKAKNLADDMVRNTARDLLYYAVTQDAMLIFENLSRGFGRQGKRTFMAERQYTRMEDWLTAKLAYEGPLPSKTYLSKTLAQYTSKTCSNCGFTITSADYDRVLEKLKKTATGWMTTINGKELKVEGQITYYNRYKRQNVVKDLSVELDRLSEESVNNDISSWTKGRQGEALSLLKKRFSHRPVQEKFVCLNCGFETHADEQAALNIARSWLFLRSQEYKKYQTNKTTGNTDKRAFVETWQSFYRKKLKEVWKPAV

SEQ ID NO: 38951 - protein, 979 aa, synthetic construct
  REGION 1..979: note = engineered CasX variant
QEIKRINKIRRRLVKDSNTKKAGKTGPMKTLLVRVMTPDLRERLENLRKKPENIPQPISNTSRANLNKLLTDYTEMKKAILHVYWEEFQKDPVGLMSRVAQPASKKIDQNKLKPEMDEKGNLTTAGFACSQCGQPLFVYKLEQVSEKGKAYTNYFGRCNVAEHEKLIKLAQLKPEKDSDEAVTYSLGKFGQRALDFYSIHVTKESTHPVKPLAQIAGNRYASGPVGKALSDACMGTIASFLSKYQDIIIEHQKVVKGNQKRLESLRELAGKENLEYPSVTLPPQPHTKEGVDAYNEVIARVRMWVNLNLWQKLKLSRDDAKPLLRLKGFPSFPLVERQANEVDWWDMVCNVKKLINEKKEDGKVFWQNLAGYKRQEALRPYLSSEEDRKKGKKFARYQLGDLLLHLEKKHGEDWGKVYDEAWERIDKKVEGLSKHIKLEEERRSEDAQSKAALTDWLRAKASFVIEGLKEADKDEFCRCELKLQKWYGDLRGKPFAIEAENSILDISGFSKQYNCAFIWQKDGVKKLNLYLIINYFKGGKLRFKKIKPEAFEANRFYTVINKKSGEIVPMEVNFNFDDPNLIILPLAFGKRQGREFIWNDLLSLETGSLKLANGRVIEKTLYNRRTRQDEPALFVALTFERREVLDSSNIKPMNLIGVDRGENIPAVIALTDPEGCPLSRFKDSLGNPTHILRIGESYKEKQRTIQAKKEVEQRRAGGYSRKYASKAKNLADDMVRNTARDLLYYAVTQDAMLIFENLSRGFGRQGKRTFMAERQYTRMEDWLTAKLAYEGPLPSKTYLSKTLAQYTSKTCSNCGFTITSADYDRVLEKLKKTATGWMTTINGKELKVEGQITYYNRYKRQNVVKDLSVELDRLSEESVNNDISSWTKGRQGEALSLLKKRFSHRPVQEKFVCLNCGFETHADEQAALNIARSWLFLRSQEYKKYQTNKTTGNTDKRAFVETWQSFYRKKLKEVWKPAV

SEQ ID NO: 38952 - protein, 978 aa, synthetic construct
  REGION 1..978: note = engineered CasX variant
QEIKRINKIRRRLVKDSNTKKAGKTGPMKTLLVRVMTPDLRERLENLRKKPENIPQPISNTSRANLNKLLTDYTEMKKAILHVYWEEFQKDPVGLMSRVAQPASKKIDQNKLKPEMDEKGNLTTAGFACSQCGQPLFVYKLEQVSEKGKAYTNYFGRCNVAEHEKLILLAQLKPEKDSDEAVTYSLGKFGQRALDFYSIHVTKESTHPVKPLAQIAGNRYASPVGKALSDACMGTIASFLSKYQDIIIEHQKVVKGNQKRLESLRELAGKENLEYPSVTLPPQPHTKEGVDAYNEVIARVRMWVNLNLWQKLKLSRDDAKPLLRLKGFPSFPLVERQANEVDWWDMVCNVKKLINEKKEDGKVFWQNLAGYKRQEALRPYLSSEEDRKKGKKFARYQLGDLLLHLEKKHGEDWGKVYDEAWERIDKKVEGLSKHIKLEEERRSEDAQSKAALTDWLRAKASFVIEGLKEADKDEFCRCELKLQKWYGDLRGKPFAIEAENSILDISGFSKQYNCAFIWQKDGVKKLNLYLIINYFKGGKLRFKKIKPEAFEANRFYTVINKKSGEIVPMEVNFNFDDPNLIILPLAFGKRQGREFIWNDLLSLETGSLKLANGRVIEKTLYNRRTRQDEPALFVALTFERREVLDSSNIKPMNLIGVDRGENIPAVIALTDPEGCPLSRFKDSLGNPTHILRIGESYKEKQRTIQAKKEVEQRRAGGYSRKYASKAKNLADDMVRNTARDLLYYAVTQDAMLIFENLSRGFGRQGKRTFMAERQYTRMEDWLTAKLAYEGPLPSKTYLSKTLAQYTSKTCSNCGFTITSADYDRVLEKLKKTATGWMTTINGKELKVEGQITYYNRYKRQNVVKDLSVELDRLSEESVNNDISSWTKGRQGEALSLLKKRFSHRPVQEKFVCLNCGFETHADEQAALNIARSWLFLRSQEYKKYQTNKTTGNTDKRAFVETWQSFYRKKLKEVWKPAV

SEQ ID NO: 38953 - protein, 979 aa, synthetic construct
  REGION 1..979: note = engineered CasX variant
QEIKRINKIRRRLVKDSNTKKAGKTGPMKTLLVRVMTPDLRERLENLRKKPENIPQPISNTSRANLNKLLTDYTEMKKAILHVYWEEFQKDPVGLMSRVAQPASKKIDQNKLKPEMDEKGNLTTAGFACSQCGQPLFVYKLEQVSEKGKAYTNYFGRCNVAEHEKLILLAQLKPEKDSDEAVTYSLGKFGQRALDFYSIHVTKESTHPVKPLAQIAGNRYASYPVGKALSDACMGTIASFLSKYQDIIIEHQKVVKGNQKRLESLRELAGKENLEYPSVTLPPQPHTKEGVDAYNEVIARVRMWVNLNLWQKLKLSRDDAKPLLRLKGFPSFPLVERQANEVDWWDMVCNVKKLINEKKEDGKVFWQNLAGYKRQEALRPYLSSEEDRKKGKKFARYQLGDLLLHLEKKHGEDWGKVYDEAWERIDKKVEGLSKHIKLEEERRSEDAQSKAALTDWLRAKASFVIEGLKEADKDEFCRCELKLQKWYGDLRGKPFAIEAENSILDISGFSKQYNCAFIWQKDGVKKLNLYLIINYFKGGKLRFKKIKPEAFEANRFYTVINKKSGEIVPMEVNFNFDDPNLIILPLAFGKRQGREFIWNDLLSLETGSLKLANGRVIEKTLYNRRTRQDEPALFVALTFERREVLDSSNIKPMNLIGVDRGENIPAVIALTDPEGCPLSRFKDSLGNPTHILRIGESYKEKQRTIQAKKEVEQRRAGGYSRKYASKAKNLADDMVRNTARDLLYYAVTQDAMLIFENLSRGFGRQGKRTFMAERQYTRMEDWLTAKLAYEGPLPSKTYLSKTLAQYTSKTCSNCGFTITSADYDRVLEKLKKTATGWMTTINGKELKVEGQITYYNRYKRQNVVKDLSVELDRLSEESVNNDISSWTKGRSGEALSLLKKRFSHRPVQEKFVCLNCEFETHADEQAALNIARSWLFLRSQEYKKYQTNKTTGNTDKRAFVETWQSFYRKKLKEVWKPAV

SEQ ID NO: 38954 - protein, 979 aa, synthetic construct
  REGION 1..979: note = engineered CasX variant
QEIKRINKIRRRLVKDSNTKKAGKTGPMKTLLVRVMTPDLRERLENLRKKPENIPQPISNTSRANLNKLLTDYTEMKKAILHVYWEEFQKDPVGLMSRVAQPASKKIDQNKLKPEMDEKGNLTTAGFACSQCGQPLFVYKLEQVSEKGKAYTNYFGRCNVAEHEKLILLAQLKPEKDSDEAVTYSLGKFGQRALDFYSIHVTKESTHPVKPLAQIAGNRYASHPVGKALSDACMGTIASFLSKYQDIIIEHQKVVKGNQKRLESLRELAGKENLEYPSVTLPPQPHTKEGVDAYNEVIARVRMWVNLNLWQKLKLSRDDAKPLLRLKGFPSFPLVERQANEVDWWDMVCNVKKLINEKKEDGKVFWQNLAGYKRQEALRPYLSSEEDRKKGKKFARYQLGDLLLHLEKKHGEDWGKVYDEAWERIDKKVEGLSKHIKLEEERRSEDAQSKAALTDWLRAKASFVIEGLKEADKDEFCRCELKLQKWYGDLRGKPFAIEAENSILDISGFSKQYNCAFIWQKDGVKKLNLYLIINYFKGGKLRFKKIKPEAFEANRFYTVINKKSGEIVPMEVNFNFDDPNLIILPLAFGKRQGREFIWNDLLSLETGSLKLANGRVIEKTLYNRRTRQDEPALFVALTFERREVLDSSNIKPMNLIGVDRGENIPAVIALTDPEGCPLSRFKDSLGNPTHILRIGESYKEKQRTIQAKKEVEQRRAGGYSRKYASKAKNLADDMVRNTARDLLYYAVTQDAMLIFENLSRGFGRQGKRTFMAERQYTRMEDWLTAKLAYEGPLPSKTYLSKTLAQYTSKTCSNCGFTITSADYDRVLEKLKKTATGWMTTINGKELKVEGQITYYNRYKRQNVVKDLSVELDRLSEESVNNDISSWTKGRSGEALSLLKKRFSHRPVQEKFVCLNCEFETHADEQAALNIARSWLFLRSQEYKKYQTNKTTGNTDKRAFVETWQSFYRKKLKEVWKPAV

SEQ ID NO: 38955 - protein, 979 aa, synthetic construct
  REGION 1..979: note = engineered CasX variant
QEIKRINKIRRRLVKDSNTKKAGKTGPMKTLLVRVMTPDLRERLENLRKKPENIPQPISNTSRANLNKLLTDYTEMKKAILHVYWEEFQKDPVGLMSRVAQPASKKIDQNKLKPEMDEKGNLTTAGFACSQCGQPLFVYKLEQVSEKGKAYTNYFGRCNVAEHEKLILLAQLKPEKDSDEAVTYSLGKFGQRALDFYSIHVTKESTHPVKPLAQIAGNRYASSPVGKALSDACMGTIASFLSKYQDIIIEHQKVVKGNQKRLESLRELAGKENLEYPSVTLPPQPHTKEGVDAYNEVIARVRMWVNLNLWQKLKLSRDDAKPLLRLKGFPSFPLVERQANEVDWWDMVCNVKKLINEKKEDGKVFWQNLAGYKRQEALRPYLSSEEDRKKGKKFARYQLGDLLLHLEKKHGEDWGKVYDEAWERIDKKVEGLSKHIKLEEERRSEDAQSKAALTDWLRAKASFVIEGLKEADKDEFCRCELKLQKWYGDLRGKPFAIEAENSILDISGFSKQYNCAFIWQKDGVKKLNLYLIINYFKGGKLRFKKIKPEAFEANRFYTVINKKSGEIVPMEVNFNFDDPNLIILPLAFGKRQGREFIWNDLLSLETGSLKLANGRVIEKTLYNRRTRQDEPALFVALTFERREVLDSSNIKPMNLIGVDRGENIPAVIALTDPEGCPLSRFKDSLGNPTHILRIGESYKEKQRTIQAKKEVEQRRAGGYSRKYASKAKNLADDMVRNTARDLLYYAVTQDAMLIFENLSRGFGRQGKRTFMAERQYTRMEDWLTAKLAYEGPLPSKTYLSKTLAQYTSKTCSNCGFTITSADYDRVLEKLKKTATGWMTTINGKELKVEGQITYYNRYKRQNVVKDLSVELDRLSEESVNNDISSWTKGRSGEALSLLKKRFSHRPVQEKFVCLNCEFETHADEQAALNIARSWLFLRSQEYKKYQTNKTTGNTDKRAFVETWQSFYRKKLKEVWKPAV

SEQ ID NO: 38956 - protein, 979 aa, synthetic construct
  REGION 1..979: note = engineered CasX variant
QEIKRINKIRRRLVKDSNTKKAGKTGPMKTLLVRVMTPDLRERLENLRKKPENIPQPISNTSRANLNKLLTDYTEMKKAILHVYWEEFQKDPVGLMSRVAQPASKKIDQNKLKPEMDEKGNLTTAGFACSQCGQPLFVYKLEQVSEKGKAYTNYFGRCNVAEHEKLILLAQLKPEKDSDEAVTYSLGKFGQRALDFYSIHVTKESTHPVKPLAQIAGNRYASTPVGKALSDACMGTIASFLSKYQDIIIEHQKVVKGNQKRLESLRELAGKENLEYPSVTLPPQPHTKEGVDAYNEVIARVRMWVNLNLWQKLKLSRDDAKPLLRLKGFPSFPLVERQANEVDWWDMVCNVKKLINEKKEDGKVFWQNLAGYKRQEALRPYLSSEEDRKKGKKFARYQLGDLLLHLEKKHGEDWGKVYDEAWERIDKKVEGLSKHIKLEEERRSEDAQSKAALTDWLRAKASFVIEGLKEADKDEFCRCELKLQKWYGDLRGKPFAIEAENSILDISGFSKQYNCAFIWQKDGVKKLNLYLIINYFKGGKLRFKKIKPEAFEANRFYTVINKKSGEIVPMEVNFNFDDPNLIILPLAFGKRQGREFIWNDLLSLETGSLKLANGRVIEKTLYNRRTRQDEPALFVALTFERREVLDSSNIKPMNLIGVDRGENIPAVIALTDPEGCPLSRFKDSLGNPTHILRIGESYKEKQRTIQAKKEVEQRRAGGYSRKYASKAKNLADDMVRNTARDLLYYAVTQDAMLIFENLSRGFGRQGKRTFMAERQYTRMEDWLTAKLAYEGPLPSKTYLSKTLAQYTSKTCSNCGFTITSADYDRVLEKLKKTATGWMTTINGKELKVEGQITYYNRYKRQNVVKDLSVELDRLSEESVNNDISSWTKGRSGEALSLLKKRFSHRPVQEKFVCLNCEFETHADEQAALNIARSWLFLRSQEYKKYQTNKTTGNTDKRAFVETWQSFYRKKLKEVWKPAV

SEQ ID NO: 38957 - protein, 979 aa, synthetic construct
  REGION 1..979: note = engineered CasX variant
QEIKRINKIRRRLVKDSNTKKAGKTGPMKTLLVRVMTPDLRERLENLRKKPENIPQPISNTSRANLNKLLTDYTEMKKAILHVYWEEFQKDPVGLMSRVAQPASKKIDQNKLKPEMDEKGNLTTAGFACSQCGQPLFVYKLEQVSEKGKAYTNYFGRCNVAEHEKLILLAQLKPEKDSDEAVTYSLGKFGQRALDFYSIHVTKESTHPVKPLAQIAGNRYASAPVGKALSDACMGTIASFLSKYQDIIIEHQKVVKGNQKRLESLRELAGKENLEYPSVTLPPQPHTKEGVDAYNEVIARVRMWVNLNLWQKLKLSRDDAKPLLRLKGFPSFPLVERQANEVDWWDMVCNVKKLINEKKEDGKVFWQNLAGYKRQEALRPYLSSEEDRKKGKKFARYQLGDLLLHLEKKHGEDWGKVYDEAWERIDKKVEGLSKHIKLEEERRSEDAQSKAALTDWLRAKASFVIEGLKEADKDEFCRCELKLQKWYGDLRGKPFAIEAENSILDISGFSKQYNCAFIWQKDGVKKLNLYLIINYFKGGKLRFKKIKPEAFEANRFYTVINKKSGEIVPMEVNFNFDDPNLIILPLAFGKRQGREFIWNDLLSLETGSLKLANGRVIEKTLYNRRTRQDEPALFVALTFERREVLDSSNIKPMNLIGVDRGENIPAVIALTDPEGCPLSRFKDSLGNPTHILRIGESYKEKQRTIQAKKEVEQRRAGGYSRKYASKAKNLADDMVRNTARDLLYYAVTQDAMLIFENLSRGFGRQGKRTFMAERQYTRMEDWLTAKLAYEGPLPSKTYLSKTLAQYTSKTCSNCGFTITSADYDRVLEKLKKTATGWMTTINGKELKVEGQITYYNRYKRQNVVKDLSVELDRLSEESVNNDISSWTKGRSGEALSLLKKRFSHRPVQEKFVCLNCEFETHADEQAALNIARSWLFLRSQEYKKYQTNKTTGNTDKRAFVETWQSFYRKKLKEVWKPAV

SEQ ID NO: 38958 - protein, 979 aa, synthetic construct
  REGION 1..979: note = engineered CasX variant
QEIKRINKIRRRLVKDSNTKKAGKTGPMKTLLVRVMTPDLRERLENLRKKPENIPQPISNTSRANLNKLLTDYTEMKKAILHVYWEEFQKDPVGLMSRVAQPASKKIDQNKLKPEMDEKGNLTTAGFACSQCGQPLFVYKLEQVSEKGKAYTNYFGRCNVAEHEKLILLAQLKPEKDSDEAVTYSLGKFGQRALDFYSIHVTKESTHPVKPLAQIAGNRYASVPVGKALSDACMGTIASFLSKYQDIIIEHQKVVKGNQKRLESLRELAGKENLEYPSVTLPPQPHTKEGVDAYNEVIARVRMWVNLNLWQKLKLSRDDAKPLLRLKGFPSFPLVERQANEVDWWDMVCNVKKLINEKKEDGKVFWQNLAGYKRQEALRPYLSSEEDRKKGKKFARYQLGDLLLHLEKKHGEDWGKVYDEAWERIDKKVEGLSKHIKLEEERRSEDAQSKAALTDWLRAKASFVIEGLKEADKDEFCRCELKLQKWYGDLRGKPFAIEAENSILDISGFSKQYNCAFIWQKDGVKKLNLYLIINYFKGGKLRFKKIKPEAFEANRFYTVINKKSGEIVPMEVNFNFDDPNLIILPLAFGKRQGREFIWNDLLSLETGSLKLANGRVIEKTLYNRRTRQDEPALFVALTFERREVLDSSNIKPMNLIGVDRGENIPAVIALTDPEGCPLSRFKDSLGNPTHILRIGESYKEKQRTIQAKKEVEQRRAGGYSRKYASKAKNLADDMVRNTARDLLYYAVTQDAMLIFENLSRGFGRQGKRTFMAERQYTRMEDWLTAKLAYEGPLPSKTYLSKTLAQYTSKTCSNCGFTITSADYDRVLEKLKKTATGWMTTINGKELKVEGQITYYNRYKRQNVVKDLSVELDRLSEESVNNDISSWTKGRSGEALSLLKKRFSHRPVQEKFVCLNCEFETHADEQAALNIARSWLFLRSQEYKKYQTNKTTGNTDKRAFVETWQSFYRKKLKEVWKPAV

SEQ ID NO: 38959 - protein, 979 aa, synthetic construct
  REGION 1..979: note = engineered CasX variant
QEIKRINKIRRRLVKDSNTKKAGKTGPMKTLLVRVMTPDLRERLENLRKKPENIPQPISNTSRANLNKLLTDYTEMKKAILHVYWEEFQKDPVGLMSRVAQPASKKIDQNKLKPEMDEKGNLTTAGFACSQCGQPLFVYKLEQVSEKGKAYTNYFGRCNVAEHEKLIKLAQLKPEKDSDEAVTYSLGKFGQRALDFYSIHVTKESTHPVKPLAQIAGNRYASGPVGKALSDACMGTIASFLSKYQDIIIEHQKVVKGNQKRLESLRELAGKENLEYPSVTLPPQPHTKEGVDAYNEVIARVRMWVNLNLWQKLKLSRDDAKPLLRLKGFPSFPLVERQANEVDWWDMVCNVKKLINEKKEDGKVFWQNLAGYKRQEALRPYLSSEEDRKKGKKFARYQLGDLLLHLEKKHGEDWGKVYDEAWERIDKKVEGLSKHIKLEEERRSEDAQSKAALTDWLRAKASFVIEGLKEADKDEFCRCELKLQKWYGDLRGKPFAIEAENSILDISGFSKQYNCAFIWQKDGVKKLNLYLIINYFKGGKLRFKKIKPEAFEANRFYTVINKKSGEIVPMEVNFNFDDPNLIILPLAFGKRQGREFIWNDLLSLETGSLKLANGRVIEKTLYNRRTRQDEPALFVALTFERREVLDSSNIKPMNLIGVDRGENIPAVIALTDPEGCPLSRFKDSLGNPTHILRIGESYKEKQRTIQAKKEVEQRRAGGYSRKYASKAKNLADDMVRNTARDLLYYAVTQDAMLIFENLSRGFGRQGKRTFMAERQYTRMEDWLTAKLAYEGPLPSKTYLSKTLAQYTSKTCSNCGFTITSADYDRVLEKLKKTATGWMTTINGKELKVEGQITYYNRYKRQNVVKDLSVELDRLSEESVNNDISSWTKGRSGEALSLLKKRFSHRPVQEKFVCLNCEFETHADEQAALNIARSWLFLRSQEYKKYQTNKTTGNTDKRAFVETWQSFYRKKLKEVWKPAV

SEQ ID NO: 38960 - protein, 978 aa, synthetic construct
  REGION 1..978: note = engineered CasX variant
QEIKRINKIRRRLVKDSNTKKAGKTGPMKTLLVRVMTPDLRERLENLRKKPENIPQPISNTSRANLNKLLTDYTEMKKAILHVYWEEFQKDPVGLMSRVAQPASKKIDQNKLKPEMDEKGNLTTAGFACSQCGQPLFVYKLEQVSEKGKAYTNYFGRCNVAEHEKLILLAQLKPEKDSDEAVTYSLGKFGQRALDFYSIHVTKESTHPVKPLAQIAGNRYASPVGKALSDACMGTIASFLSKYQDIIIEHQKVVKGNQKRLESLRELAGKENLEYPSVTLPPQPHTKEGVDAYNEVIARVRMWVNLNLWQKLKLSRDDAKPLLRLKGFPSFPLVERQANEVDWWDMVCNVKKLINEKKEDGKVFWQNLAGYKRQEALRPYLSSEEDRKKGKKFARYQLGDLLLHLEKKHGEDWGKVYDEAWERIDKKVEGLSKHIKLEEERRSEDAQSKAALTDWLRAKASFVIEGLKEADKDEFCRCELKLQKWYGDLRGKPFAIEAENSILDISGFSKQYNCAFIWQKDGVKKLNLYLIINYFKGGKLRFKKIKPEAFEANRFYTVINKKSGEIVPMEVNFNFDDPNLIILPLAFGKRQGREFIWNDLLSLETGSLKLANGRVIEKTLYNRRTRQDEPALFVALTFERREVLDSSNIKPMNLIGVDRGENIPAVIALTDPEGCPLSRFKDSLGNPTHILRIGESYKEKQRTIQAKKEVEQRRAGGYSRKYASKAKNLADDMVRNTARDLLYYAVTQDAMLIFENLSRGFGRQGKRTFMAERQYTRMEDWLTAKLAYEGPLPSKTYLSKTLAQYTSKTCSNCGFTITSADYDRVLEKLKKTATGWMTTINGKELKVEGQITYYNRYKRQNVVKDLSVELDRLSEESVNNDISSWTKGRSGEALSLLKKRFSHRPVQEKFVCLNCEFETHADEQAALNIARSWLFLRSQEYKKYQTNKTTGNTDKRAFVETWQSFYRKKLKEVWKPAV

SEQ ID NO: 38961 - protein, 980 aa, synthetic construct
  REGION 1..980: note = engineered CasX variant
QEIKRINKIRRRLVKDSNTKKAGKTGPMKTLLVRVMTPDLRERLENLRKKPENIPQPISNTSRANLNKLLTDYTEMKKAILHVYWEEFQKDPVGLMSRVAQPASKKIDQNKLKPEMDEKGNLTTAGFACSQCGQPLFVYKLEQVSEKGKAYTNYFGRCNVAEHEKLILLAQLKPEKDSDEAVTYSLGKFGQRALDFYSIHVTKESTHPVKPLAQIAGNRYASYPVGKALSDACMGTIASFLSKYQDIIIEHQKVVKGNQKRLESLRELAGKENLEYPSVTLPPQPHTKEGVDAYNEVIARVRMWVNLNLWQKLKLSRDDAKPLLRLKGFPSFPLVERQANEVDWWDMVCNVKKLINEKKEDGKVFWQNLAGYKRQEALRPYLSSEEDRKKGKKFARYQLGDLLLHLEKKHGEDWGKVYDEAWERIDKKVEGLSKHIKLEEERRSEDAQSKAALTDWLRAKASFVIEGLKEADKDEFCRCELKLQKWYGDLRGKPFAIEAENSILDISGFSKQYNCAFIWQKDGVKKLNLYLIINYFKGGKLRFKKIKPEAFEANRFYTVINKKSGEIVPMEVNFNFDDPNLIILPLAFGKRQGREFIWNDLLSLETGSLKLANGRVIEKTLYNRRTRQDEPALFVALTFERREVLDSSNIKPMNLIGVDRGENIPAVIALTDPEGCPLSRFKDSLGNPTHILRIGESYKEKQRTIQAKKEVEQRRAGGYSRKYASKAKNLADDMVRNTARDLLYYAVTQDAMLIFENLSRGFGRQGKRTFMAERQYTRMEDWLTAKLAYEGPLPSKTYLSKTLAQYTSKTCSNCGFTITSADYDRVLEKLKKTATGWMTTINGKELKVEGQITYYNRYKRQNVVKDLSVELDRLSEESVNNDISSWTKGRSGEALSLLKKRFSHRPVQEKFVCLNCGFETHADEQAALNIARSWLFLRSQEYKKYQTNKTSTGNTDKRAFVETWQSFYRKKLKEVWKPAV

SEQ ID NO: 38962 - protein, 980 aa, synthetic construct
  REGION 1..980: note = engineered CasX variant
QEIKRINKIRRRLVKDSNTKKAGKTGPMKTLLVRVMTPDLRERLENLRKKPENIPQPISNTSRANLNKLLTDYTEMKKAILHVYWEEFQKDPVGLMSRVAQPASKKIDQNKLKPEMDEKGNLTTAGFACSQCGQPLFVYKLEQVSEKGKAYTNYFGRCNVAEHEKLILLAQLKPEKDSDEAVTYSLGKFGQRALDFYSIHVTKESTHPVKPLAQIAGNRYASHPVGKALSDACMGTIASFLSKYQDIIIEHQKVVKGNQKRLESLRELAGKENLEYPSVTLPPQPHTKEGVDAYNEVIARVRMWVNLNLWQKLKLSRDDAKPLLRLKGFPSFPLVERQANEVDWWDMVCNVKKLINEKKEDGKVFWQNLAGYKRQEALRPYLSSEEDRKKGKKFARYQLGDLLLHLEKKHGEDWGKVYDEAWERIDKKVEGLSKHIKLEEERRSEDAQSKAALTDWLRAKASFVIEGLKEADKDEFCRCELKLQKWYGDLRGKPFAIEAENSILDISGFSKQYNCAFIWQKDGVKKLNLYLIINYFKGGKLRFKKIKPEAFEANRFYTVINKKSGEIVPMEVNFNFDDPNLIILPLAFGKRQGREFIWNDLLSLETGSLKLANGRVIEKTLYNRRTRQDEPALFVALTFERREVLDSSNIKPMNLIGVDRGENIPAVIALTDPEGCPLSRFKDSLGNPTHILRIGESYKEKQRTIQAKKEVEQRRAGGYSRKYASKAKNLADDMVRNTARDLLYYAVTQDAMLIFENLSRGFGRQGKRTFMAERQYTRMEDWLTAKLAYEGPLPSKTYLSKTLAQYTSKTCSNCGFTITSADYDRVLEKLKKTATGWMTTINGKELKVEGQITYYNRYKRQNVVKDLSVELDRLSEESVNNDISSWTKGRSGEALSLLKKRFSHRPVQEKFVCLNCGFETHADEQAALNIARSWLFLRSQEYKKYQTNKTSTGNTDKRAFVETWQSFYRKKLKEVWKPAV

SEQ ID NO: 38963 - protein, 980 aa, synthetic construct
  REGION 1..980: note = engineered CasX variant
QEIKRINKIRRRLVKDSNTKKAGKTGPMKTLLVRVMTPDLRERLENLRKKPENIPQPISNTSRANLNKLLTDYTEMKKAILHVYWEEFQKDPVGLMSRVAQPASKKIDQNKLKPEMDEKGNLTTAGFACSQCGQPLFVYKLEQVSEKGKAYTNYFGRCNVAEHEKLILLAQLKPEKDSDEAVTYSLGKFGQRALDFYSIHVTKESTHPVKPLAQIAGNRYASSPVGKALSDACMGTIASFLSKYQDIIIEHQKVVKGNQKRLESLRELAGKENLEYPSVTLPPQPHTKEGVDAYNEVIARVRMWVNLNLWQKLKLSRDDAKPLLRLKGFPSFPLVERQANEVDWWDMVCNVKKLINEKKEDGKVFWQNLAGYKRQEALRPYLSSEEDRKKGKKFARYQLGDLLLHLEKKHGEDWGKVYDEAWERIDKKVEGLSKHIKLEEERRSEDAQSKAALTDWLRAKASFVIEGLKEADKDEFCRCELKLQKWYGDLRGKPFAIEAENSILDISGFSKQYNCAFIWQKDGVKKLNLYLIINYFKGGKLRFKKIKPEAFEANRFYTVINKKSGEIVPMEVNFNFDDPNLIILPLAFGKRQGREFIWNDLLSLETGSLKLANGRVIEKTLYNRRTRQDEPALFVALTFERREVLDSSNIKPMNLIGVDRGENIPAVIALTDPEGCPLSRFKDSLGNPTHILRIGESYKEKQRTIQAKKEVEQRRAGGYSRKYASKAKNLADDMVRNTARDLLYYAVTQDAMLIFENLSRGFGRQGKRTFMAERQYTRMEDWLTAKLAYEGPLPSKTYLSKTLAQYTSKTCSNCGFTITSADYDRVLEKLKKTATGWMTTINGKELKVEGQITYYNRYKRQNVVKDLSVELDRLSEESVNNDISSWTKGRSGEALSLLKKRFSHRPVQEKFVCLNCGFETHADEQAALNIARSWLFLRSQEYKKYQTNKTSTGNTDKRAFVETWQSFYRKKLKEVWKPAV

SEQ ID NO: 38964 - protein, 980 aa, synthetic construct
  REGION 1..980: note = engineered CasX variant
QEIKRINKIRRRLVKDSNTKKAGKTGPMKTLLVRVMTPDLRERLENLRKKPENIPQPISNTSRANLNKLLTDYTEMKKAILHVYWEEFQKDPVGLMSRVAQPASKKIDQNKLKPEMDEKGNLTTAGFACSQCGQPLFVYKLEQVSEKGKAYTNYFGRCNVAEHEKLILLAQLKPEKDSDEAVTYSLGKFGQRALDFYSIHVTKESTHPVKPLAQIAGNRYASTPVGKALSDACMGTIASFLSKYQDIIIEHQKVVKGNQKRLESLRELAGKENLEYPSVTLPPQPHTKEGVDAYNEVIARVRMWVNLNLWQKLKLSRDDAKPLLRLKGFPSFPLVERQANEVDWWDMVCNVKKLINEKKEDGKVFWQNLAGYKRQEALRPYLSSEEDRKKGKKFARYQLGDLLLHLEKKHGEDWGKVYDEAWERIDKKVEGLSKHIKLEEERRSEDAQSKAALTDWLRAKASFVIEGLKEADKDEFCRCELKLQKWYGDLRGKPFAIEAENSILDISGFSKQYNCAFIWQKDGVKKLNLYLIINYFKGGKLRFKKIKPEAFEANRFYTVINKKSGEIVPMEVNFNFDDPNLIILPLAFGKRQGREFIWNDLLSLETGSLKLANGRVIEKTLYNRRTRQDEPALFVALTFERREVLDSSNIKPMNLIGVDRGENIPAVIALTDPEGCPLSRFKDSLGNPTHILRIGESYKEKQRTIQAKKEVEQRRAGGYSRKYASKAKNLADDMVRNTARDLLYYAVTQDAMLIFENLSRGFGRQGKRTFMAERQYTRMEDWLTAKLAYEGPLPSKTYLSKTLAQYTSKTCSNCGFTITSADYDRVLEKLKKTATGWMTTINGKELKVEGQITYYNRYKRQNVVKDLSVELDRLSEESVNNDISSWTKGRSGEALSLLKKRFSHRPVQEKFVCLNCGFETHADEQAALNIARSWLFLRSQEYKKYQTNKTSTGNTDKRAFVETWQSFYRKKLKEVWKPAV

SEQ ID NO: 38965 - protein, 980 aa, synthetic construct
  REGION 1..980: note = engineered CasX variant
QEIKRINKIRRRLVKDSNTKKAGKTGPMKTLLVRVMTPDLRERLENLRKKPENIPQPISNTSRANLNKLLTDYTEMKKAILHVYWEEFQKDPVGLMSRVAQPASKKIDQNKLKPEMDEKGNLTTAGFACSQCGQPLFVYKLEQVSEKGKAYTNYFGRCNVAEHEKLILLAQLKPEKDSDEAVTYSLGKFGQRALDFYSIHVTKESTHPVKPLAQIAGNRYASAPVGKALSDACMGTIASFLSKYQDIIIEHQKVVKGNQKRLESLRELAGKENLEYPSVTLPPQPHTKEGVDAYNEVIARVRMWVNLNLWQKLKLSRDDAKPLLRLKGFPSFPLVERQANEVDWWDMVCNVKKLINEKKEDGKVFWQNLAGYKRQEALRPYLSSEEDRKKGKKFARYQLGDLLLHLEKKHGEDWGKVYDEAWERIDKKVEGLSKHIKLEEERRSEDAQSKAALTDWLRAKASFVIEGLKEADKDEFCRCELKLQKWYGDLRGKPFAIEAENSILDISGFSKQYNCAFIWQKDGVKKLNLYLIINYFKGGKLRFKKIKPEAFEANRFYTVINKKSGEIVPMEVNFNFDDPNLIILPLAFGKRQGREFIWNDLLSLETGSLKLANGRVIEKTLYNRRTRQDEPALFVALTFERREVLDSSNIKPMNLIGVDRGENIPAVIALTDPEGCPLSRFKDSLGNPTHILRIGESYKEKQRTIQAKKEVEQRRAGGYSRKYASKAKNLADDMVRNTARDLLYYAVTQDAMLIFENLSRGFGRQGKRTFMAERQYTRMEDWLTAKLAYEGPLPSKTYLSKTLAQYTSKTCSNCGFTITSADYDRVLEKLKKTATGWMTTINGKELKVEGQITYYNRYKRQNVVKDLSVELDRLSEESVNNDISSWTKGRSGEALSLLKKRFSHRPVQEKFVCLNCGFETHADEQAALNIARSWLFLRSQEYKKYQTNKTSTGNTDKRAFVETWQSFYRKKLKEVWKPAV

SEQ ID NO: 38966 - protein, 980 aa, synthetic construct
  REGION 1..980: note = engineered CasX variant
QEIKRINKIRRRLVKDSNTKKAGKTGPMKTLLVRVMTPDLRERLENLRKKPENIPQPISNTSRANLNKLLTDYTEMKKAILHVYWEEFQKDPVGLMSRVAQPASKKIDQNKLKPEMDEKGNLTTAGFACSQCGQPLFVYKLEQVSEKGKAYTNYFGRCNVAEHEKLILLAQLKPEKDSDEAVTYSLGKFGQRALDFYSIHVTKESTHPVKPLAQIAGNRYASVPVGKALSDACMGTIASFLSKYQDIIIEHQKVVKGNQKRLESLRELAGKENLEYPSVTLPPQPHTKEGVDAYNEVIARVRMWVNLNLWQKLKLSRDDAKPLLRLKGFPSFPLVERQANEVDWWDMVCNVKKLINEKKEDGKVFWQNLAGYKRQEALRPYLSSEEDRKKGKKFARYQLGDLLLHLEKKHGEDWGKVYDEAWERIDKKVEGLSKHIKLEEERRSEDAQSKAALTDWLRAKASFVIEGLKEADKDEFCRCELKLQKWYGDLRGKPFAIEAENSILDISGFSKQYNCAFIWQKDGVKKLNLYLIINYFKGGKLRFKKIKPEAFEANRFYTVINKKSGEIVPMEVNFNFDDPNLIILPLAFGKRQGREFIWNDLLSLETGSLKLANGRVIEKTLYNRRTRQDEPALFVALTFERREVLDSSNIKPMNLIGVDRGENIPAVIALTDPEGCPLSRFKDSLGNPTHILRIGESYKEKQRTIQAKKEVEQRRAGGYSRKYASKAKNLADDMVRNTARDLLYYAVTQDAMLIFENLSRGFGRQGKRTFMAERQYTRMEDWLTAKLAYEGPLPSKTYLSKTLAQYTSKTCSNCGFTITSADYDRVLEKLKKTATGWMTTINGKELKVEGQITYYNRYKRQNVVKDLSVELDRLSEESVNNDISSWTKGRSGEALSLLKKRFSHRPVQEKFVCLNCGFETHADEQAALNIARSWLFLRSQEYKKYQTNKTSTGNTDKRAFVETWQSFYRKKLKEVWKPAV

SEQ ID NO: 38967 - protein, 980 aa, synthetic construct
  REGION 1..980: note = engineered CasX variant
QEIKRINKIRRRLVKDSNTKKAGKTGPMKTLLVRVMTPDLRERLENLRKKPENIPQPISNTSRANLNKLLTDYTEMKKAILHVYWEEFQKDPVGLMSRVAQPASKKIDQNKLKPEMDEKGNLTTAGFACSQCGQPLFVYKLEQVSEKGKAYTNYFGRCNVAEHEKLIKLAQLKPEKDSDEAVTYSLGKFGQRALDFYSIHVTKESTHPVKPLAQIAGNRYASGPVGKALSDACMGTIASFLSKYQDIIIEHQKVVKGNQKRLESLRELAGKENLEYPSVTLPPQPHTKEGVDAYNEVIARVRMWVNLNLWQKLKLSRDDAKPLLRLKGFPSFPLVERQANEVDWWDMVCNVKKLINEKKEDGKVFWQNLAGYKRQEALRPYLSSEEDRKKGKKFARYQLGDLLLHLEKKHGEDWGKVYDEAWERIDKKVEGLSKHIKLEEERRSEDAQSKAALTDWLRAKASFVIEGLKEADKDEFCRCELKLQKWYGDLRGKPFAIEAENSILDISGFSKQYNCAFIWQKDGVKKLNLYLIINYFKGGKLRFKKIKPEAFEANRFYTVINKKSGEIVPMEVNFNFDDPNLIILPLAFGKRQGREFIWNDLLSLETGSLKLANGRVIEKTLYNRRTRQDEPALFVALTFERREVLDSSNIKPMNLIGVDRGENIPAVIALTDPEGCPLSRFKDSLGNPTHILRIGESYKEKQRTIQAKKEVEQRRAGGYSRKYASKAKNLADDMVRNTARDLLYYAVTQDAMLIFENLSRGFGRQGKRTFMAERQYTRMEDWLTAKLAYEGPLPSKTYLSKTLAQYTSKTCSNCGFTITSADYDRVLEKLKKTATGWMTTINGKELKVEGQITYYNRYKRQNVVKDLSVELDRLSEESVNNDISSWTKGRSGEALSLLKKRFSHRPVQEKFVCLNCGFETHADEQAALNIARSWLFLRSQEYKKYQTNKTSTGNTDKRAFVETWQSFYRKKLKEVWKPAV

SEQ ID NO: 38968 - protein, 979 aa, synthetic construct
  REGION 1..979: note = engineered CasX variant
QEIKRINKIRRRLVKDSNTKKAGKTGPMKTLLVRVMTPDLRERLENLRKKPENIPQPISNTSRANLNKLLTDYTEMKKAILHVYWEEFQKDPVGLMSRVAQPASKKIDQNKLKPEMDEKGNLTTAGFACSQCGQPLFVYKLEQVSEKGKAYTNYFGRCNVAEHEKLILLAQLKPEKDSDEAVTYSLGKFGQRALDFYSIHVTKESTHPVKPLAQIAGNRYASPVGKALSDACMGTIASFLSKYQDIIIEHQKVVKGNQKRLESLRELAGKENLEYPSVTLPPQPHTKEGVDAYNEVIARVRMWVNLNLWQKLKLSRDDAKPLLRLKGFPSFPLVERQANEVDWWDMVCNVKKLINEKKEDGKVFWQNLAGYKRQEALRPYLSSEEDRKKGKKFARYQLGDLLLHLEKKHGEDWGKVYDEAWERIDKKVEGLSKHIKLEEERRSEDAQSKAALTDWLRAKASFVIEGLKEADKDEFCRCELKLQKWYGDLRGKPFAIEAENSILDISGFSKQYNCAFIWQKDGVKKLNLYLIINYFKGGKLRFKKIKPEAFEANRFYTVINKKSGEIVPMEVNFNFDDPNLIILPLAFGKRQGREFIWNDLLSLETGSLKLANGRVIEKTLYNRRTRQDEPALFVALTFERREVLDSSNIKPMNLIGVDRGENIPAVIALTDPEGCPLSRFKDSLGNPTHILRIGESYKEKQRTIQAKKEVEQRRAGGYSRKYASKAKNLADDMVRNTARDLLYYAVTQDAMLIFENLSRGFGRQGKRTFMAERQYTRMEDWLTAKLAYEGPLPSKTYLSKTLAQYTSKTCSNCGFTITSADYDRVLEKLKKTATGWMTTINGKELKVEGQITYYNRYKRQNVVKDLSVELDRLSEESVNNDISSWTKGRSGEALSLLKKRFSHRPVQEKFVCLNCGFETHADEQAALNIARSWLFLRSQEYKKYQTNKTSTGNTDKRAFVETWQSFYRKKLKEVWKPAV

SEQ ID NO: 38969 - protein, 980 aa, synthetic construct
  REGION 1..980: note = engineered CasX variant
QEIKRINKIRRRLVKDSNTKKAGKTGPMKTLLVRVMTPDLRERLENLRKKPENIPQPISNTSRANLNKLLTDYTEMKKAILHVYWEEFQKDPVGLMSRVAQPASKKIDQNKLKPEMDEKGNLTTAGFACSQCGQPLFVYKLEQVSEKGKAYTNYFGRCNVAEHEKLILLAQLKPEKDSDEAVTYSLGKFGQRALDFYSIHVTKESTHPVKPLAQIAGNRYASYPVGKALSDACMGTIASFLSKYQDIIIEHQKVVKGNQKRLESLRELAGKENLEYPSVTLPPQPHTKEGVDAYNEVIARVRMWVNLNLWQKLKLSRDDAKPLLRLKGFPSFPLVERQANEVDWWDMVCNVKKLINEKKEDGKVFWQNLAGYKRQEALRPYLSSEEDRKKGKKFARYQLGDLLLHLEKKHGEDWGKVYDEAWERIDKKVEGLSKHIKLEEERRSEDAQSKAALTDWLRAKASFVIEGLKEADKDEFCRCELKLQKWYGDLRGKPFAIEAENSILDISGFSKQYNCAFIWQKDGVKKLNLYLIINYFKGGKLRFKKIKPEAFEANRFYTVINKKSGEIVPMEVNFNFDDPNLIILPLAFGKRQGREFIWNDLLSLETGSLKLANGRVIEKTLYNRRTRQDEPALFVALTFERREVLDSSNIKPMNLIGVDRGENIPAVIALTDPEGCPLSRFKDSLGNPTHILRIGESYKEKQRTIQAKKEVEQRRAGGYSRKYASKAKNLADDMVRNTARDLLYYAVTQDAMLIFENLSRGFGRQGKRTFMAERQYTRMEDWLTAKLAYEGPLPSKTYLSKTLAQYTSKTCSNCGFTITSADYDRVLEKLKKTATGWMTTINGKELKVEGQITYYNRYKRQNVVKDLSVELDRLSEESVNNDISSWTKGRSGEALSLLKKRFSHRPVQEKFVCLNCGFETHADEQAALNIARSWLFLRSQEYKKYQTNKTTGKNTDKRAFVETWQSFYRKKLKEVWKPAV

SEQ ID NO: 38970 - protein, 980 aa, synthetic construct
  REGION 1..980: note = engineered CasX variant
QEIKRINKIRRRLVKDSNTKKAGKTGPMKTLLVRVMTPDLRERLENLRKKPENIPQPISNTSRANLNKLLTDYTEMKKAILHVYWEEFQKDPVGLMSRVAQPASKKIDQNKLKPEMDEKGNLTTAGFACSQCGQPLFVYKLEQVSEKGKAYTNYFGRCNVAEHEKLILLAQLKPEKDSDEAVTYSLGKFGQRALDFYSIHVTKESTHPVKPLAQIAGNRYASHPVGKALSDACMGTIASFLSKYQDIIIEHQKVVKGNQKRLESLRELAGKENLEYPSVTLPPQPHTKEGVDAYNEVIARVRMWVNLNLWQKLKLSRDDAKPLLRLKGFPSFPLVERQANEVDWWDMVCNVKKLINEKKEDGKVFWQNLAGYKRQEALRPYLSSEEDRKKGKKFARYQLGDLLLHLEKKHGEDWGKVYDEAWERIDKKVEGLSKHIKLEEERRSEDAQSKAALTDWLRAKASFVIEGLKEADKDEFCRCELKLQKWYGDLRGKPFAIEAENSILDISGFSKQYNCAFIWQKDGVKKLNLYLIINYFKGGKLRFKKIKPEAFEANRFYTVINKKSGEIVPMEVNFNFDDPNLIILPLAFGKRQGREFIWNDLLSLETGSLKLANGRVIEKTLYNRRTRQDEPALFVALTFERREVLDSSNIKPMNLIGVDRGENIPAVIALTDPEGCPLSRFKDSLGNPTHILRIGESYKEKQRTIQAKKEVEQRRAGGYSRKYASKAKNLADDMVRNTARDLLYYAVTQDAMLIFENLSRGFGRQGKRTFMAERQYTRMEDWLTAKLAYEGPLPSKTYLSKTLAQYTSKTCSNCGFTITSADYDRVLEKLKKTATGWMTTINGKELKVEGQITYYNRYKRQNVVKDLSVELDRLSEESVNNDISSWTKGRSGEALSLLKKRFSHRPVQEKFVCLNCGFETHADEQAALNIARSWLFLRSQEYKKYQTNKTTGKNTDKRAFVETWQSFYRKKLKEVWKPAV

SEQ ID NO: 38971 - protein, 980 aa, synthetic construct
  REGION 1..980: note = engineered CasX variant
QEIKRINKIRRRLVKDSNTKKAGKTGPMKTLLVRVMTPDLRERLENLRKKPENIPQPISNTSRANLNKLLTDYTEMKKAILHVYWEEFQKDPVGLMSRVAQPASKKIDQNKLKPEMDEKGNLTTAGFACSQCGQPLFVYKLEQVSEKGKAYTNYFGRCNVAEHEKLILLAQLKPEKDSDEAVTYSLGKFGQRALDFYSIHVTKESTHPVKPLAQIAGNRYASSPVGKALSDACMGTIASFLSKYQDIIIEHQKVVKGNQKRLESLRELAGKENLEYPSVTLPPQPHTKEGVDAYNEVIARVRMWVNLNLWQKLKLSRDDAKPLLRLKGFPSFPLVERQANEVDWWDMVCNVKKLINEKKEDGKVFWQNLAGYKRQEALRPYLSSEEDRKKGKKFARYQLGDLLLHLEKKHGEDWGKVYDEAWERIDKKVEGLSKHIKLEEERRSEDAQSKAALTDWLRAKASFVIEGLKEADKDEFCRCELKLQKWYGDLRGKPFAIEAENSILDISGFSKQYNCAFIWQKDGVKKLNLYLIINYFKGGKLRFKKIKPEAFEANRFYTVINKKSGEIVPMEVNFNFDDPNLIILPLAFGKRQGREFIWNDLLSLETGSLKLANGRVIEKTLYNRRTRQDEPALFVALTFERREVLDSSNIKPMNLIGVDRGENIPAVIALTDPEGCPLSRFKDSLGNPTHILRIGESYKEKQRTIQAKKEVEQRRAGGYSRKYASKAKNLADDMVRNTARDLLYYAVTQDAMLIFENLSRGFGRQGKRTFMAERQYTRMEDWLTAKLAYEGPLPSKTYLSKTLAQYTSKTCSNCGFTITSADYDRVLEKLKKTATGWMTTINGKELKVEGQITYYNRYKRQNVVKDLSVELDRLSEESVNNDISSWTKGRSGEALSLLKKRFSHRPVQEKFVCLNCGFETHADEQAALNIARSWLFLRSQEYKKYQTNKTTGKNTDKRAFVETWQSFYRKKLKEVWKPAV

SEQ ID NO: 38972 - protein, 980 aa, synthetic construct
  REGION 1..980: note = engineered CasX variant
QEIKRINKIRRRLVKDSNTKKAGKTGPMKTLLVRVMTPDLRERLENLRKKPENIPQPISNTSRANLNKLLTDYTEMKKAILHVYWEEFQKDPVGLMSRVAQPASKKIDQNKLKPEMDEKGNLTTAGFACSQCGQPLFVYKLEQVSEKGKAYTNYFGRCNVAEHEKLILLAQLKPEKDSDEAVTYSLGKFGQRALDFYSIHVTKESTHPVKPLAQIAGNRYASTPVGKALSDACMGTIASFLSKYQDIIIEHQKVVKGNQKRLESLRELAGKENLEYPSVTLPPQPHTKEGVDAYNEVIARVRMWVNLNLWQKLKLSRDDAKPLLRLKGFPSFPLVERQANEVDWWDMVCNVKKLINEKKEDGKVFWQNLAGYKRQEALRPYLSSEEDRKKGKKFARYQLGDLLLHLEKKHGEDWGKVYDEAWERIDKKVEGLSKHIKLEEERRSEDAQSKAALTDWLRAKASFVIEGLKEADKDEFCRCELKLQKWYGDLRGKPFAIEAENSILDISGFSKQYNCAFIWQKDGVKKLNLYLIINYFKGGKLRFKKIKPEAFEANRFYTVINKKSGEIVPMEVNFNFDDPNLIILPLAFGKRQGREFIWNDLLSLETGSLKLANGRVIEKTLYNRRTRQDEPALFVALTFERREVLDSSNIKPMNLIGVDRGENIPAVIALTDPEGCPLSRFKDSLGNPTHILRIGESYKEKQRTIQAKKEVEQRRAGGYSRKYASKAKNLADDMVRNTARDLLYYAVTQDAMLIFENLSRGFGRQGKRTFMAERQYTRMEDWLTAKLAYEGPLPSKTYLSKTLAQYTSKTCSNCGFTITSADYDRVLEKLKKTATGWMTTINGKELKVEGQITYYNRYKRQNVVKDLSVELDRLSEESVNNDISSWTKGRSGEALSLLKKRFSHRPVQEKFVCLNCGFETHADEQAALNIARSWLFLRSQEYKKYQTNKTTGKNTDKRAFVETWQSFYRKKLKEVWKPAV

SEQ ID NO: 38973 - protein, 980 aa, synthetic construct
  REGION 1..980: note = engineered CasX variant
QEIKRINKIRRRLVKDSNTKKAGKTGPMKTLLVRVMTPDLRERLENLRKKPENIPQPISNTSRANLNKLLTDYTEMKKAILHVYWEEFQKDPVGLMSRVAQPASKKIDQNKLKPEMDEKGNLTTAGFACSQCGQPLFVYKLEQVSEKGKAYTNYFGRCNVAEHEKLILLAQLKPEKDSDEAVTYSLGKFGQRALDFYSIHVTKESTHPVKPLAQIAGNRYASAPVGKALSDACMGTIASFLSKYQDIIIEHQKVVKGNQKRLESLRELAGKENLEYPSVTLPPQPHTKEGVDAYNEVIARVRMWVNLNLWQKLKLSRDDAKPLLRLKGFPSFPLVERQANEVDWWDMVCNVKKLINEKKEDGKVFWQNLAGYKRQEALRPYLSSEEDRKKGKKFARYQLGDLLLHLEKKHGEDWGKVYDEAWERIDKKVEGLSKHIKLEEERRSEDAQSKAALTDWLRAKASFVIEGLKEADKDEFCRCELKLQKWYGDLRGKPFAIEAENSILDISGFSKQYNCAFIWQKDGVKKLNLYLIINYFKGGKLRFKKIKPEAFEANRFYTVINKKSGEIVPMEVNFNFDDPNLIILPLAFGKRQGREFIWNDLLSLETGSLKLANGRVIEKTLYNRRTRQDEPALFVALTFERREVLDSSNIKPMNLIGVDRGENIPAVIALTDPEGCPLSRFKDSLGNPTHILRIGESYKEKQRTIQAKKEVEQRRAGGYSRKYASKAKNLADDMVRNTARDLLYYAVTQDAMLIFENLSRGFGRQGKRTFMAERQYTRMEDWLTAKLAYEGPLPSKTYLSKTLAQYTSKTCSNCGFTITSADYDRVLEKLKKTATGWMTTINGKELKVEGQITYYNRYKRQNVVKDLSVELDRLSEESVNNDISSWTKGRSGEALSLLKKRFSHRPVQEKFVCLNCGFETHADEQAALNIARSWLFLRSQEYKKYQTNKTTGKNTDKRAFVETWQSFYRKKLKEVWKPAV

SEQ ID NO: 38974 - protein, 980 aa, synthetic construct
  REGION 1..980: note = engineered CasX variant
QEIKRINKIRRRLVKDSNTKKAGKTGPMKTLLVRVMTPDLRERLENLRKKPENIPQPISNTSRANLNKLLTDYTEMKKAILHVYWEEFQKDPVGLMSRVAQPASKKIDQNKLKPEMDEKGNLTTAGFACSQCGQPLFVYKLEQVSEKGKAYTNYFGRCNVAEHEKLILLAQLKPEKDSDEAVTYSLGKFGQRALDFYSIHVTKESTHPVKPLAQIAGNRYASVPVGKALSDACMGTIASFLSKYQDIIIEHQKVVKGNQKRLESLRELAGKENLEYPSVTLPPQPHTKEGVDAYNEVIARVRMWVNLNLWQKLKLSRDDAKPLLRLKGFPSFPLVERQANEVDWWDMVCNVKKLINEKKEDGKVFWQNLAGYKRQEALRPYLSSEEDRKKGKKFARYQLGDLLLHLEKKHGEDWGKVYDEAWERIDKKVEGLSKHIKLEEERRSEDAQSKAALTDWLRAKASFVIEGLKEADKDEFCRCELKLQKWYGDLRGKPFAIEAENSILDISGFSKQYNCAFIWQKDGVKKLNLYLIINYFKGGKLRFKKIKPEAFEANRFYTVINKKSGEIVPMEVNFNFDDPNLIILPLAFGKRQGREFIWNDLLSLETGSLKLANGRVIEKTLYNRRTRQDEPALFVALTFERREVLDSSNIKPMNLIGVDRGENIPAVIALTDPEGCPLSRFKDSLGNPTHILRIGESYKEKQRTIQAKKEVEQRRAGGYSRKYASKAKNLADDMVRNTARDLLYYAVTQDAMLIFENLSRGFGRQGKRTFMAERQYTRMEDWLTAKLAYEGPLPSKTYLSKTLAQYTSKTCSNCGFTITSADYDRVLEKLKKTATGWMTTINGKELKVEGQITYYNRYKRQNVVKDLSVELDRLSEESVNNDISSWTKGRSGEALSLLKKRFSHRPVQEKFVCLNCGFETHADEQAALNIARSWLFLRSQEYKKYQTNKTTGKNTDKRAFVETWQSFYRKKLKEVWKPAV

SEQ ID NO: 38975 - protein, 980 aa, synthetic construct
  REGION 1..980: note = engineered CasX variant
QEIKRINKIRRRLVKDSNTKKAGKTGPMKTLLVRVMTPDLRERLENLRKKPENIPQPISNTSRANLNKLLTDYTEMKKAILHVYWEEFQKDPVGLMSRVAQPASKKIDQNKLKPEMDEKGNLTTAGFACSQCGQPLFVYKLEQVSEKGKAYTNYFGRCNVAEHEKLIKLAQLKPEKDSDEAVTYSLGKFGQRALDFYSIHVTKESTHPVKPLAQIAGNRYASGPVGKALSDACMGTIASFLSKYQDIIIEHQKVVKGNQKRLESLRELAGKENLEYPSVTLPPQPHTKEGVDAYNEVIARVRMWVNLNLWQKLKLSRDDAKPLLRLKGFPSFPLVERQANEVDWWDMVCNVKKLINEKKEDGKVFWQNLAGYKRQEALRPYLSSEEDRKKGKKFARYQLGDLLLHLEKKHGEDWGKVYDEAWERIDKKVEGLSKHIKLEEERRSEDAQSKAALTDWLRAKASFVIEGLKEADKDEFCRCELKLQKWYGDLRGKPFAIEAENSILDISGFSKQYNCAFIWQKDGVKKLNLYLIINYFKGGKLRFKKIKPEAFEANRFYTVINKKSGEIVPMEVNFNFDDPNLIILPLAFGKRQGREFIWNDLLSLETGSLKLANGRVIEKTLYNRRTRQDEPALFVALTFERREVLDSSNIKPMNLIGVDRGENIPAVIALTDPEGCPLSRFKDSLGNPTHILRIGESYKEKQRTIQAKKEVEQRRAGGYSRKYASKAKNLADDMVRNTARDLLYYAVTQDAMLIFENLSRGFGRQGKRTFMAERQYTRMEDWLTAKLAYEGPLPSKTYLSKTLAQYTSKTCSNCGFTITSADYDRVLEKLKKTATGWMTTINGKELKVEGQITYYNRYKRQNVVKDLSVELDRLSEESVNNDISSWTKGRSGEALSLLKKRFSHRPVQEKFVCLNCGFETHADEQAALNIARSWLFLRSQEYKKYQTNKTTGKNTDKRAFVETWQSFYRKKLKEVWKPAV

SEQ ID NO: 38976 - protein, 979 aa, synthetic construct
  REGION 1..979: note = engineered CasX variant
QEIKRINKIRRRLVKDSNTKKAGKTGPMKTLLVRVMTPDLRERLENLRKKPENIPQPISNTSRANLNKLLTDYTEMKKAILHVYWEEFQKDPVGLMSRVAQPASKKIDQNKLKPEMDEKGNLTTAGFACSQCGQPLFVYKLEQVSEKGKAYTNYFGRCNVAEHEKLILLAQLKPEKDSDEAVTYSLGKFGQRALDFYSIHVTKESTHPVKPLAQIAGNRYASPVGKALSDACMGTIASFLSKYQDIIIEHQKVVKGNQKRLESLRELAGKENLEYPSVTLPPQPHTKEGVDAYNEVIARVRMWVNLNLWQKLKLSRDDAKPLLRLKGFPSFPLVERQANEVDWWDMVCNVKKLINEKKEDGKVFWQNLAGYKRQEALRPYLSSEEDRKKGKKFARYQLGDLLLHLEKKHGEDWGKVYDEAWERIDKKVEGLSKHIKLEEERRSEDAQSKAALTDWLRAKASFVIEGLKEADKDEFCRCELKLQKWYGDLRGKPFAIEAENSILDISGFSKQYNCAFIWQKDGVKKLNLYLIINYFKGGKLRFKKIKPEAFEANRFYTVINKKSGEIVPMEVNFNFDDPNLIILPLAFGKRQGREFIWNDLLSLETGSLKLANGRVIEKTLYNRRTRQDEPALFVALTFERREVLDSSNIKPMNLIGVDRGENIPAVIALTDPEGCPLSRFKDSLGNPTHILRIGESYKEKQRTIQAKKEVEQRRAGGYSRKYASKAKNLADDMVRNTARDLLYYAVTQDAMLIFENLSRGFGRQGKRTFMAERQYTRMEDWLTAKLAYEGPLPSKTYLSKTLAQYTSKTCSNCGFTITSADYDRVLEKLKKTATGWMTTINGKELKVEGQITYYNRYKRQNVVKDLSVELDRLSEESVNNDISSWTKGRSGEALSLLKKRFSHRPVQEKFVCLNCGFETHADEQAALNIARSWLFLRSQEYKKYQTNKTTGKNTDKRAFVETWQSFYRKKLKEVWKPAV

SEQ ID NO: 38977 - protein, 979 aa, synthetic construct
  REGION 1..979: note = engineered CasX variant
QEIKRINKIRRRLVKDSNTKKAGKTGPMKTLLVRVMTPDLRERLENLRKKPENIPQPISNTSRANLNKLLTDYTEMKKAILHVYWEEFQKDPVGLMSRVAQPASKKIDQNKLKPEMDEKGNLTTAGFACSQCGQPLFVYKLEQVSEKGKAYTNYFGRCNVAEHEKLILLAQLKPEKDSDEAVTYSLGKFGQRALDFYSIHVTKESTHPVKPLAQIAGNRYASYPVGKALSDACMGTIASFLSKYQDIIIEHQKVVKGNQKRLESLRELAGKENLEYPSVTLPPQPHTKEGVDAYNEVIARVRMWVNLNLWQKLKLSRDDAKPLLRLKKFPSFPLVERQANEVDWWDMVCNVKKLINEKKEDGKVFWQNLAGYKRQEALRPYLSSEEDRKKGKKFARYQLGDLLLHLEKKHGEDWGKVYDEAWERIDKKVEGLSKHIKLEEERRSEDAQSKAALTDWLRAKASFVIEGLKEADKDEFCRCELKLQKWYGDLRGKPFAIEAENSILDISGFSKQYNCAFIWQKDGVKKLNLYLIINYFKGGKLRFKKIKPEAFEANRFYTVINKKSGEIVPMEVNFNFDDPNLIILPLAFGKRQGREFIWNDLLSLETGSLKLANGRVIEKTLYNRRTRQDEPALFVALTFERREVLDSSNIKPMNLIGVDRGENIPAVIALTDPEGCPLSRFKDSLGNPTHILRIGESYKEKQRTIQAKKEVEQRRAGGYSRKYASKAKNLADDMVRNTARDLLYYAVTQDAMLIFENLSRGFGRQGKRTFMAERQYTRMEDWLTAKLAYEGPLPSKTYLSKTLAQYTSKTCSNCGFTITSADYDRVLEKLKKTATGWMTTINGKELKVEGQITYYNRYKRQNVVKDLSVELDRLSEESVNNDISSWTKGRSGEALSLLKKRFSHRPVQEKFVCLNCGFETHADEQAALNIARSWLFLRSQEYKKYQTNKTTGNTDKRAFVETWQSFYRKKLKEVWKPAV

SEQ ID NO: 38978 - protein, 979 aa, synthetic construct
  REGION 1..979: note = engineered CasX variant
QEIKRINKIRRRLVKDSNTKKAGKTGPMKTLLVRVMTPDLRERLENLRKKPENIPQPISNTSRANLNKLLTDYTEMKKAILHVYWEEFQKDPVGLMSRVAQPASKKIDQNKLKPEMDEKGNLTTAGFACSQCGQPLFVYKLEQVSEKGKAYTNYFGRCNVAEHEKLILLAQLKPEKDSDEAVTYSLGKFGQRALDFYSIHVTKESTHPVKPLAQIAGNRYASHPVGKALSDACMGTIASFLSKYQDIIIEHQKVVKGNQKRLESLRELAGKENLEYPSVTLPPQPHTKEGVDAYNEVIARVRMWVNLNLWQKLKLSRDDAKPLLRLKKFPSFPLVERQANEVDWWDMVCNVKKLINEKKEDGKVFWQNLAGYKRQEALRPYLSSEEDRKKGKKFARYQLGDLLLHLEKKHGEDWGKVYDEAWERIDKKVEGLSKHIKLEEERRSEDAQSKAALTDWLRAKASFVIEGLKEADKDEFCRCELKLQKWYGDLRGKPFAIEAENSILDISGFSKQYNCAFIWQKDGVKKLNLYLIINYFKGGKLRFKKIKPEAFEANRFYTVINKKSGEIVPMEVNFNFDDPNLIILPLAFGKRQGREFIWNDLLSLETGSLKLANGRVIEKTLYNRRTRQDEPALFVALTFERREVLDSSNIKPMNLIGVDRGENIPAVIALTDPEGCPLSRFKDSLGNPTHILRIGESYKEKQRTIQAKKEVEQRRAGGYSRKYASKAKNLADDMVRNTARDLLYYAVTQDAMLIFENLSRGFGRQGKRTFMAERQYTRMEDWLTAKLAYEGPLPSKTYLSKTLAQYTSKTCSNCGFTITSADYDRVLEKLKKTATGWMTTINGKELKVEGQITYYNRYKRQNVVKDLSVELDRLSEESVNNDISSWTKGRSGEALSLLKKRFSHRPVQEKFVCLNCGFETHADEQAALNIARSWLFLRSQEYKKYQTNKTTGNTDKRAFVETWQSFYRKKLKEVWKPAV

SEQ ID NO: 38979 - protein, 979 aa, synthetic construct
  REGION 1..979: note = engineered CasX variant
QEIKRINKIRRRLVKDSNTKKAGKTGPMKTLLVRVMTPDLRERLENLRKKPENIPQPISNTSRANLNKLLTDYTEMKKAILHVYWEEFQKDPVGLMSRVAQPASKKIDQNKLKPEMDEKGNLTTAGFACSQCGQPLFVYKLEQVSEKGKAYTNYFGRCNVAEHEKLILLAQLKPEKDSDEAVTYSLGKFGQRALDFYSIHVTKESTHPVKPLAQIAGNRYASSPVGKALSDACMGTIASFLSKYQDIIIEHQKVVKGNQKRLESLRELAGKENLEYPSVTLPPQPHTKEGVDAYNEVIARVRMWVNLNLWQKLKLSRDDAKPLLRLKKFPSFPLVERQANEVDWWDMVCNVKKLINEKKEDGKVFWQNLAGYKRQEALRPYLSSEEDRKKGKKFARYQLGDLLLHLEKKHGEDWGKVYDEAWERIDKKVEGLSKHIKLEEERRSEDAQSKAALTDWLRAKASFVIEGLKEADKDEFCRCELKLQKWYGDLRGKPFAIEAENSILDISGFSKQYNCAFIWQKDGVKKLNLYLIINYFKGGKLRFKKIKPEAFEANRFYTVINKKSGEIVPMEVNFNFDDPNLIILPLAFGKRQGREFIWNDLLSLETGSLKLANGRVIEKTLYNRRTRQDEPALFVALTFERREVLDSSNIKPMNLIGVDRGENIPAVIALTDPEGCPLSRFKDSLGNPTHILRIGESYKEKQRTIQAKKEVEQRRAGGYSRKYASKAKNLADDMVRNTARDLLYYAVTQDAMLIFENLSRGFGRQGKRTFMAERQYTRMEDWLTAKLAYEGPLPSKTYLSKTLAQYTSKTCSNCGFTITSADYDRVLEKLKKTATGWMTTINGKELKVEGQITYYNRYKRQNVVKDLSVELDRLSEESVNNDISSWTKGRSGEALSLLKKRFSHRPVQEKFVCLNCGFETHADEQAALNIARSWLFLRSQEYKKYQTNKTTGNTDKRAFVETWQSFYRKKLKEVWKPAV

SEQ ID NO: 38980 - protein, 979 aa, synthetic construct
  REGION 1..979: note = engineered CasX variant
QEIKRINKIRRRLVKDSNTKKAGKTGPMKTLLVRVMTPDLRERLENLRKKPENIPQPISNTSRANLNKLLTDYTEMKKAILHVYWEEFQKDPVGLMSRVAQPASKKIDQNKLKPEMDEKGNLTTAGFACSQCGQPLFVYKLEQVSEKGKAYTNYFGRCNVAEHEKLILLAQLKPEKDSDEAVTYSLGKFGQRALDFYSIHVTKESTHPVKPLAQIAGNRYASTPVGKALSDACMGTIASFLSKYQDIIIEHQKVVKGNQKRLESLRELAGKENLEYPSVTLPPQPHTKEGVDAYNEVIARVRMWVNLNLWQKLKLSRDDAKPLLRLKKFPSFPLVERQANEVDWWDMVCNVKKLINEKKEDGKVFWQNLAGYKRQEALRPYLSSEEDRKKGKKFARYQLGDLLLHLEKKHGEDWGKVYDEAWERIDKKVEGLSKHIKLEEERRSEDAQSKAALTDWLRAKASFVIEGLKEADKDEFCRCELKLQKWYGDLRGKPFAIEAENSILDISGFSKQYNCAFIWQKDGVKKLNLYLIINYFKGGKLRFKKIKPEAFEANRFYTVINKKSGEIVPMEVNFNFDDPNLIILPLAFGKRQGREFIWNDLLSLETGSLKLANGRVIEKTLYNRRTRQDEPALFVALTFERREVLDSSNIKPMNLIGVDRGENIPAVIALTDPEGCPLSRFKDSLGNPTHILRIGESYKEKQRTIQAKKEVEQRRAGGYSRKYASKAKNLADDMVRNTARDLLYYAVTQDAMLIFENLSRGFGRQGKRTFMAERQYTRMEDWLTAKLAYEGPLPSKTYLSKTLAQYTSKTCSNCGFTITSADYDRVLEKLKKTATGWMTTINGKELKVEGQITYYNRYKRQNVVKDLSVELDRLSEESVNNDISSWTKGRSGEALSLLKKRFSHRPVQEKFVCLNCGFETHADEQAALNIARSWLFLRSQEYKKYQTNKTTGNTDKRAFVETWQSFYRKKLKEVWKPAV

SEQ ID NO: 38981 - protein, 979 aa, synthetic construct
  REGION 1..979: note = engineered CasX variant
QEIKRINKIRRRLVKDSNTKKAGKTGPMKTLLVRVMTPDLRERLENLRKKPENIPQPISNTSRANLNKLLTDYTEMKKAILHVYWEEFQKDPVGLMSRVAQPASKKIDQNKLKPEMDEKGNLTTAGFACSQCGQPLFVYKLEQVSEKGKAYTNYFGRCNVAEHEKLILLAQLKPEKDSDEAVTYSLGKFGQRALDFYSIHVTKESTHPVKPLAQIAGNRYASAPVGKALSDACMGTIASFLSKYQDIIIEHQKVVKGNQKRLESLRELAGKENLEYPSVTLPPQPHTKEGVDAYNEVIARVRMWVNLNLWQKLKLSRDDAKPLLRLKKFPSFPLVERQANEVDWWDMVCNVKKLINEKKEDGKVFWQNLAGYKRQEALRPYLSSEEDRKKGKKFARYQLGDLLLHLEKKHGEDWGKVYDEAWERIDKKVEGLSKHIKLEEERRSEDAQSKAALTDWLRAKASFVIEGLKEADKDEFCRCELKLQKWYGDLRGKPFAIEAENSILDISGFSKQYNCAFIWQKDGVKKLNLYLIINYFKGGKLRFKKIKPEAFEANRFYTVINKKSGEIVPMEVNFNFDDPNLIILPLAFGKRQGREFIWNDLLSLETGSLKLANGRVIEKTLYNRRTRQDEPALFVALTFERREVLDSSNIKPMNLIGVDRGENIPAVIALTDPEGCPLSRFKDSLGNPTHILRIGESYKEKQRTIQAKKEVEQRRAGGYSRKYASKAKNLADDMVRNTARDLLYYAVTQDAMLIFENLSRGFGRQGKRTFMAERQYTRMEDWLTAKLAYEGPLPSKTYLSKTLAQYTSKTCSNCGFTITSADYDRVLEKLKKTATGWMTTINGKELKVEGQITYYNRYKRQNVVKDLSVELDRLSEESVNNDISSWTKGRSGEALSLLKKRFSHRPVQEKFVCLNCGFETHADEQAALNIARSWLFLRSQEYKKYQTNKTTGNTDKRAFVETWQSFYRKKLKEVWKPAV

SEQ ID NO: 38982 - protein, 979 aa, synthetic construct
  REGION 1..979: note = engineered CasX variant
QEIKRINKIRRRLVKDSNTKKAGKTGPMKTLLVRVMTPDLRERLENLRKKPENIPQPISNTSRANLNKLLTDYTEMKKAILHVYWEEFQKDPVGLMSRVAQPASKKIDQNKLKPEMDEKGNLTTAGFACSQCGQPLFVYKLEQVSEKGKAYTNYFGRCNVAEHEKLILLAQLKPEKDSDEAVTYSLGKFGQRALDFYSIHVTKESTHPVKPLAQIAGNRYASVPVGKALSDACMGTIASFLSKYQDIIIEHQKVVKGNQKRLESLRELAGKENLEYPSVTLPPQPHTKEGVDAYNEVIARVRMWVNLNLWQKLKLSRDDAKPLLRLKKFPSFPLVERQANEVDWWDMVCNVKKLINEKKEDGKVFWQNLAGYKRQEALRPYLSSEEDRKKGKKFARYQLGDLLLHLEKKHGEDWGKVYDEAWERIDKKVEGLSKHIKLEEERRSEDAQSKAALTDWLRAKASFVIEGLKEADKDEFCRCELKLQKWYGDLRGKPFAIEAENSILDISGFSKQYNCAFIWQKDGVKKLNLYLIINYFKGGKLRFKKIKPEAFEANRFYTVINKKSGEIVPMEVNFNFDDPNLIILPLAFGKRQGREFIWNDLLSLETGSLKLANGRVIEKTLYNRRTRQDEPALFVALTFERREVLDSSNIKPMNLIGVDRGENIPAVIALTDPEGCPLSRFKDSLGNPTHILRIGESYKEKQRTIQAKKEVEQRRAGGYSRKYASKAKNLADDMVRNTARDLLYYAVTQDAMLIFENLSRGFGRQGKRTFMAERQYTRMEDWLTAKLAYEGPLPSKTYLSKTLAQYTSKTCSNCGFTITSADYDRVLEKLKKTATGWMTTINGKELKVEGQITYYNRYKRQNVVKDLSVELDRLSEESVNNDISSWTKGRSGEALSLLKKRFSHRPVQEKFVCLNCGFETHADEQAALNIARSWLFLRSQEYKKYQTNKTTGNTDKRAFVETWQSFYRKKLKEVWKPAV

SEQ ID NO: 38983 - protein, 979 aa, synthetic construct
  REGION 1..979: note = engineered CasX variant
QEIKRINKIRRRLVKDSNTKKAGKTGPMKTLLVRVMTPDLRERLENLRKKPENIPQPISNTSRANLNKLLTDYTEMKKAILHVYWEEFQKDPVGLMSRVAQPASKKIDQNKLKPEMDEKGNLTTAGFACSQCGQPLFVYKLEQVSEKGKAYTNYFGRCNVAEHEKLIKLAQLKPEKDSDEAVTYSLGKFGQRALDFYSIHVTKESTHPVKPLAQIAGNRYASGPVGKALSDACMGTIASFLSKYQDIIIEHQKVVKGNQKRLESLRELAGKENLEYPSVTLPPQPHTKEGVDAYNEVIARVRMWVNLNLWQKLKLSRDDAKPLLRLKKFPSFPLVERQANEVDWWDMVCNVKKLINEKKEDGKVFWQNLAGYKRQEALRPYLSSEEDRKKGKKFARYQLGDLLLHLEKKHGEDWGKVYDEAWERIDKKVEGLSKHIKLEEERRSEDAQSKAALTDWLRAKASFVIEGLKEADKDEFCRCELKLQKWYGDLRGKPFAIEAENSILDISGFSKQYNCAFIWQKDGVKKLNLYLIINYFKGGKLRFKKIKPEAFEANRFYTVINKKSGEIVPMEVNFNFDDPNLIILPLAFGKRQGREFIWNDLLSLETGSLKLANGRVIEKTLYNRRTRQDEPALFVALTFERREVLDSSNIKPMNLIGVDRGENIPAVIALTDPEGCPLSRFKDSLGNPTHILRIGESYKEKQRTIQAKKEVEQRRAGGYSRKYASKAKNLADDMVRNTARDLLYYAVTQDAMLIFENLSRGFGRQGKRTFMAERQYTRMEDWLTAKLAYEGPLPSKTYLSKTLAQYTSKTCSNCGFTITSADYDRVLEKLKKTATGWMTTINGKELKVEGQITYYNRYKRQNVVKDLSVELDRLSEESVNNDISSWTKGRSGEALSLLKKRFSHRPVQEKFVCLNCGFETHADEQAALNIARSWLFLRSQEYKKYQTNKTTGNTDKRAFVETWQSFYRKKLKEVWKPAV

SEQ ID NO: 38984 - protein, 978 aa, synthetic construct
  REGION 1..978: note = engineered CasX variant
QEIKRINKIRRRLVKDSNTKKAGKTGPMKTLLVRVMTPDLRERLENLRKKPENIPQPISNTSRANLNKLLTDYTEMKKAILHVYWEEFQKDPVGLMSRVAQPASKKIDQNKLKPEMDEKGNLTTAGFACSQCGQPLFVYKLEQVSEKGKAYTNYFGRCNVAEHEKLILLAQLKPEKDSDEAVTYSLGKFGQRALDFYSIHVTKESTHPVKPLAQIAGNRYASPVGKALSDACMGTIASFLSKYQDIIIEHQKVVKGNQKRLESLRELAGKENLEYPSVTLPPQPHTKEGVDAYNEVIARVRMWVNLNLWQKLKLSRDDAKPLLRLKKFPSFPLVERQANEVDWWDMVCNVKKLINEKKEDGKVFWQNLAGYKRQEALRPYLSSEEDRKKGKKFARYQLGDLLLHLEKKHGEDWGKVYDEAWERIDKKVEGLSKHIKLEEERRSEDAQSKAALTDWLRAKASFVIEGLKEADKDEFCRCELKLQKWYGDLRGKPFAIEAENSILDISGFSKQYNCAFIWQKDGVKKLNLYLIINYFKGGKLRFKKIKPEAFEANRFYTVINKKSGEIVPMEVNFNFDDPNLIILPLAFGKRQGREFIWNDLLSLETGSLKLANGRVIEKTLYNRRTRQDEPALFVALTFERREVLDSSNIKPMNLIGVDRGENIPAVIALTDPEGCPLSRFKDSLGNPTHILRIGESYKEKQRTIQAKKEVEQRRAGGYSRKYASKAKNLADDMVRNTARDLLYYAVTQDAMLIFENLSRGFGRQGKRTFMAERQYTRMEDWLTAKLAYEGPLPSKTYLSKTLAQYTSKTCSNCGFTITSADYDRVLEKLKKTATGWMTTINGKELKVEGQITYYNRYKRQNVVKDLSVELDRLSEESVNNDISSWTKGRSGEALSLLKKRFSHRPVQEKFVCLNCGFETHADEQAALNIARSWLFLRSQEYKKYQTNKTTGNTDKRAFVETWQSFYRKKLKEVWKPAV

SEQ ID NO: 38985 - protein, 979 aa, synthetic construct
  REGION 1..979: note = engineered CasX variant
QEIKRINKIRRRLVKDSNTKKAGKTGPMKTLLVRVMTPDLRERLENLRKKPENIPQPISNTSRANLNKLLTDYTEMKKAILHVYWEEFQKDPVGLMSRVAQPASKKIDQNKLKPEMDEKGNLTTAGFACSQCGQPLFVYKLEQVSEKGKAYTNYFGRCNVAEHEKLILLAQLKPEKDSDEAVTYSLGKFGQRALDFYSIHVTKESTHPVKPLAQIAGNRYASYPVGKALSDACMGTIASFLSKYQDIIIEHQKVVKGNQKRLESLRELAGKENLEYPSVTLPPQPHTKEGVDAYNEVIARVRMWVNLNLWQKLKLSRDDAKPLLRLKGFPSFPLVERQANEVDWWDMVCNVKKLINEKKEDGKVFWQNLAGYKRQEALRPYLSSEEDRKKGKKFARYQLGDLLLHLEKKHGEDWGKVYDEAWERIDKKVEGLSKHIKLEEERRSEDAQSKAALTDWLRAKASFVIEGLKEADKDEFCRCELKLQKWYGDLRGKPFAIEAENSILDISGFSKQYNCAFIWQKDGVKKLNLYLIINYFKGGKLRFKKIKPEAFEANRFYTVINKKSGEIVPMEVNFNFDDPNLIILPLAFGKRQGREFIWNDLLSLETGSLKLANGRVIEKTLYNRRTRQDEPALFVALTFERREVLDSSNIKPMNLIGVDRGENIPAVIALTDPEGCPLSRFKDSLGNPTHILRIGERYKEKQRTIQAKKEVEQRRAGGYSRKYASKAKNLADDMVRNTARDLLYYAVTQDAMLIFENLSRGFGRQGKRTFMAERQYTRMEDWLTAKLAYEGPLPSKTYLSKTLAQYTSKTCSNCGFTITSADYDRVLEKLKKTATGWMTTINGKELKVEGQITYYNRYKRQNVVKDLSVELDRLSEESVNNDISSWTKGRSGEALSLLKKRFSHRPVQEKFVCLNCGFETHADEQAALNIARSWLFLRSQEYKKYQTNKTTGNTDKRAFVETWQSFYRKKLKEVWKPAV

SEQ ID NO: 38986 - protein, 979 aa, synthetic construct
  REGION 1..979: note = engineered CasX variant
QEIKRINKIRRRLVKDSNTKKAGKTGPMKTLLVRVMTPDLRERLENLRKKPENIPQPISNTSRANLNKLLTDYTEMKKAILHVYWEEFQKDPVGLMSRVAQPASKKIDQNKLKPEMDEKGNLTTAGFACSQCGQPLFVYKLEQVSEKGKAYTNYFGRCNVAEHEKLILLAQLKPEKDSDEAVTYSLGKFGQRALDFYSIHVTKESTHPVKPLAQIAGNRYASHPVGKALSDACMGTIASFLSKYQDIIIEHQKVVKGNQKRLESLRELAGKENLEYPSVTLPPQPHTKEGVDAYNEVIARVRMWVNLNLWQKLKLSRDDAKPLLRLKGFPSFPLVERQANEVDWWDMVCNVKKLINEKKEDGKVFWQNLAGYKRQEALRPYLSSEEDRKKGKKFARYQLGDLLLHLEKKHGEDWGKVYDEAWERIDKKVEGLSKHIKLEEERRSEDAQSKAALTDWLRAKASFVIEGLKEADKDEFCRCELKLQKWYGDLRGKPFAIEAENSILDISGFSKQYNCAFIWQKDGVKKLNLYLIINYFKGGKLRFKKIKPEAFEANRFYTVINKKSGEIVPMEVNFNFDDPNLIILPLAFGKRQGREFIWNDLLSLETGSLKLANGRVIEKTLYNRRTRQDEPALFVALTFERREVLDSSNIKPMNLIGVDRGENIPAVIALTDPEGCPLSRFKDSLGNPTHILRIGERYKEKQRTIQAKKEVEQRRAGGYSRKYASKAKNLADDMVRNTARDLLYYAVTQDAMLIFENLSRGFGRQGKRTFMAERQYTRMEDWLTAKLAYEGPLPSKTYLSKTLAQYTSKTCSNCGFTITSADYDRVLEKLKKTATGWMTTINGKELKVEGQITYYNRYKRQNVVKDLSVELDRLSEESVNNDISSWTKGRSGEALSLLKKRFSHRPVQEKFVCLNCGFETHADEQAALNIARSWLFLRSQEYKKYQTNKTTGNTDKRAFVETWQSFYRKKLKEVWKPAV

SEQ ID NO: 38987 - protein, 979 aa, synthetic construct
  REGION 1..979: note = engineered CasX variant
QEIKRINKIRRRLVKDSNTKKAGKTGPMKTLLVRVMTPDLRERLENLRKKPENIPQPISNTSRANLNKLLTDYTEMKKAILHVYWEEFQKDPVGLMSRVAQPASKKIDQNKLKPEMDEKGNLTTAGFACSQCGQPLFVYKLEQVSEKGKAYTNYFGRCNVAEHEKLILLAQLKPEKDSDEAVTYSLGKFGQRALDFYSIHVTKESTHPVKPLAQIAGNRYASSPVGKALSDACMGTIASFLSKYQDIIIEHQKVVKGNQKRLESLRELAGKENLEYPSVTLPPQPHTKEGVDAYNEVIARVRMWVNLNLWQKLKLSRDDAKPLLRLKGFPSFPLVERQANEVDWWDMVCNVKKLINEKKEDGKVFWQNLAGYKRQEALRPYLSSEEDRKKGKKFARYQLGDLLLHLEKKHGEDWGKVYDEAWERIDKKVEGLSKHIKLEEERRSEDAQSKAALTDWLRAKASFVIEGLKEADKDEFCRCELKLQKWYGDLRGKPFAIEAENSILDISGFSKQYNCAFIWQKDGVKKLNLYLIINYFKGGKLRFKKIKPEAFEANRFYTVINKKSGEIVPMEVNFNFDDPNLIILPLAFGKRQGREFIWNDLLSLETGSLKLANGRVIEKTLYNRRTRQDEPALFVALTFERREVLDSSNIKPMNLIGVDRGENIPAVIALTDPEGCPLSRFKDSLGNPTHILRIGERYKEKQRTIQAKKEVEQRRAGGYSRKYASKAKNLADDMVRNTARDLLYYAVTQDAMLIFENLSRGFGRQGKRTFMAERQYTRMEDWLTAKLAYEGPLPSKTYLSKTLAQYTSKTCSNCGFTITSADYDRVLEKLKKTATGWMTTINGKELKVEGQITYYNRYKRQNVVKDLSVELDRLSEESVNNDISSWTKGRSGEALSLLKKRFSHRPVQEKFVCLNCGFETHADEQAALNIARSWLFLRSQEYKKYQTNKTTGNTDKRAFVETWQSFYRKKLKEVWKPAV

SEQ ID NO: 38988 - protein, 979 aa, synthetic construct
  REGION 1..979: note = engineered CasX variant
QEIKRINKIRRRLVKDSNTKKAGKTGPMKTLLVRVMTPDLRERLENLRKKPENIPQPISNTSRANLNKLLTDYTEMKKAILHVYWEEFQKDPVGLMSRVAQPASKKIDQNKLKPEMDEKGNLTTAGFACSQCGQPLFVYKLEQVSEKGKAYTNYFGRCNVAEHEKLILLAQLKPEKDSDEAVTYSLGKFGQRALDFYSIHVTKESTHPVKPLAQIAGNRYASTPVGKALSDACMGTIASFLSKYQDIIIEHQKVVKGNQKRLESLRELAGKENLEYPSVTLPPQPHTKEGVDAYNEVIARVRMWVNLNLWQKLKLSRDDAKPLLRLKGFPSFPLVERQANEVDWWDMVCNVKKLINEKKEDGKVFWQNLAGYKRQEALRPYLSSEEDRKKGKKFARYQLGDLLLHLEKKHGEDWGKVYDEAWERIDKKVEGLSKHIKLEEERRSEDAQSKAALTDWLRAKASFVIEGLKEADKDEFCRCELKLQKWYGDLRGKPFAIEAENSILDISGFSKQYNCAFIWQKDGVKKLNLYLIINYFKGGKLRFKKIKPEAFEANRFYTVINKKSGEIVPMEVNFNFDDPNLIILPLAFGKRQGREFIWNDLLSLETGSLKLANGRVIEKTLYNRRTRQDEPALFVALTFERREVLDSSNIKPMNLIGVDRGENIPAVIALTDPEGCPLSRFKDSLGNPTHILRIGERYKEKQRTIQAKKEVEQRRAGGYSRKYASKAKNLADDMVRNTARDLLYYAVTQDAMLIFENLSRGFGRQGKRTFMAERQYTRMEDWLTAKLAYEGPLPSKTYLSKTLAQYTSKTCSNCGFTITSADYDRVLEKLKKTATGWMTTINGKELKVEGQITYYNRYKRQNVVKDLSVELDRLSEESVNNDISSWTKGRSGEALSLLKKRFSHRPVQEKFVCLNCGFETHADEQAALNIARSWLFLRSQEYKKYQTNKTTGNTDKRAFVETWQSFYRKKLKEVWKPAV

SEQ ID NO: 38989 - protein, 979 aa, synthetic construct
  REGION 1..979: note = engineered CasX variant
QEIKRINKIRRRLVKDSNTKKAGKTGPMKTLLVRVMTPDLRERLENLRKKPENIPQPISNTSRANLNKLLTDYTEMKKAILHVYWEEFQKDPVGLMSRVAQPASKKIDQNKLKPEMDEKGNLTTAGFACSQCGQPLFVYKLEQVSEKGKAYTNYFGRCNVAEHEKLILLAQLKPEKDSDEAVTYSLGKFGQRALDFYSIHVTKESTHPVKPLAQIAGNRYASAPVGKALSDACMGTIASFLSKYQDIIIEHQKVVKGNQKRLESLRELAGKENLEYPSVTLPPQPHTKEGVDAYNEVIARVRMWVNLNLWQKLKLSRDDAKPLLRLKGFPSFPLVERQANEVDWWDMVCNVKKLINEKKEDGKVFWQNLAGYKRQEALRPYLSSEEDRKKGKKFARYQLGDLLLHLEKKHGEDWGKVYDEAWERIDKKVEGLSKHIKLEEERRSEDAQSKAALTDWLRAKASFVIEGLKEADKDEFCRCELKLQKWYGDLRGKPFAIEAENSILDISGFSKQYNCAFIWQKDGVKKLNLYLIINYFKGGKLRFKKIKPEAFEANRFYTVINKKSGEIVPMEVNFNFDDPNLIILPLAFGKRQGREFIWNDLLSLETGSLKLANGRVIEKTLYNRRTRQDEPALFVALTFERREVLDSSNIKPMNLIGVDRGENIPAVIALTDPEGCPLSRFKDSLGNPTHILRIGERYKEKQRTIQAKKEVEQRRAGGYSRKYASKAKNLADDMVRNTARDLLYYAVTQDAMLIFENLSRGFGRQGKRTFMAERQYTRMEDWLTAKLAYEGPLPSKTYLSKTLAQYTSKTCSNCGFTITSADYDRVLEKLKKTATGWMTTINGKELKVEGQITYYNRYKRQNVVKDLSVELDRLSEESVNNDISSWTKGRSGEALSLLKKRFSHRPVQEKFVCLNCGFETHADEQAALNIARSWLFLRSQEYKKYQTNKTTGNTDKRAFVETWQSFYRKKLKEVWKPAV

SEQ ID NO: 38990 - protein, 979 aa, synthetic construct
  REGION 1..979: note = engineered CasX variant
QEIKRINKIRRRLVKDSNTKKAGKTGPMKTLLVRVMTPDLRERLENLRKKPENIPQPISNTSRANLNKLLTDYTEMKKAILHVYWEEFQKDPVGLMSRVAQPASKKIDQNKLKPEMDEKGNLTTAGFACSQCGQPLFVYKLEQVSEKGKAYTNYFGRCNVAEHEKLILLAQLKPEKDSDEAVTYSLGKFGQRALDFYSIHVTKESTHPVKPLAQIAGNRYASVPVGKALSDACMGTIASFLSKYQDIIIEHQKVVKGNQKRLESLRELAGKENLEYPSVTLPPQPHTKEGVDAYNEVIARVRMWVNLNLWQKLKLSRDDAKPLLRLKGFPSFPLVERQANEVDWWDMVCNVKKLINEKKEDGKVFWQNLAGYKRQEALRPYLSSEEDRKKGKKFARYQLGDLLLHLEKKHGEDWGKVYDEAWERIDKKVEGLSKHIKLEEERRSEDAQSKAALTDWLRAKASFVIEGLKEADKDEFCRCELKLQKWYGDLRGKPFAIEAENSILDISGFSKQYNCAFIWQKDGVKKLNLYLIINYFKGGKLRFKKIKPEAFEANRFYTVINKKSGEIVPMEVNFNFDDPNLIILPLAFGKRQGREFIWNDLLSLETGSLKLANGRVIEKTLYNRRTRQDEPALFVALTFERREVLDSSNIKPMNLIGVDRGENIPAVIALTDPEGCPLSRFKDSLGNPTHILRIGERYKEKQRTIQAKKEVEQRRAGGYSRKYASKAKNLADDMVRNTARDLLYYAVTQDAMLIFENLSRGFGRQGKRTFMAERQYTRMEDWLTAKLAYEGPLPSKTYLSKTLAQYTSKTCSNCGFTITSADYDRVLEKLKKTATGWMTTINGKELKVEGQITYYNRYKRQNVVKDLSVELDRLSEESVNNDISSWTKGRSGEALSLLKKRFSHRPVQEKFVCLNCGFETHADEQAALNIARSWLFLRSQEYKKYQTNKTTGNTDKRAFVETWQSFYRKKLKEVWKPAV

SEQ ID NO: 38991 - protein, 979 aa, synthetic construct
  REGION 1..979: note = engineered CasX variant
QEIKRINKIRRRLVKDSNTKKAGKTGPMKTLLVRVMTPDLRERLENLRKKPENIPQPISNTSRANLNKLLTDYTEMKKAILHVYWEEFQKDPVGLMSRVAQPASKKIDQNKLKPEMDEKGNLTTAGFACSQCGQPLFVYKLEQVSEKGKAYTNYFGRCNVAEHEKLIKLAQLKPEKDSDEAVTYSLGKFGQRALDFYSIHVTKESTHPVKPLAQIAGNRYASGPVGKALSDACMGTIASFLSKYQDIIIEHQKVVKGNQKRLESLRELAGKENLEYPSVTLPPQPHTKEGVDAYNEVIARVRMWVNLNLWQKLKLSRDDAKPLLRLKGFPSFPLVERQANEVDWWDMVCNVKKLINEKKEDGKVFWQNLAGYKRQEALRPYLSSEEDRKKGKKFARYQLGDLLLHLEKKHGEDWGKVYDEAWERIDKKVEGLSKHIKLEEERRSEDAQSKAALTDWLRAKASFVIEGLKEADKDEFCRCELKLQKWYGDLRGKPFAIEAENSILDISGFSKQYNCAFIWQKDGVKKLNLYLIINYFKGGKLRFKKIKPEAFEANRFYTVINKKSGEIVPMEVNFNFDDPNLIILPLAFGKRQGREFIWNDLLSLETGSLKLANGRVIEKTLYNRRTRQDEPALFVALTFERREVLDSSNIKPMNLIGVDRGENIPAVIALTDPEGCPLSRFKDSLGNPTHILRIGERYKEKQRTIQAKKEVEQRRAGGYSRKYASKAKNLADDMVRNTARDLLYYAVTQDAMLIFENLSRGFGRQGKRTFMAERQYTRMEDWLTAKLAYEGPLPSKTYLSKTLAQYTSKTCSNCGFTITSADYDRVLEKLKKTATGWMTTINGKELKVEGQITYYNRYKRQNVVKDLSVELDRLSEESVNNDISSWTKGRSGEALSLLKKRFSHRPVQEKFVCLNCGFETHADEQAALNIARSWLFLRSQEYKKYQTNKTTGNTDKRAFVETWQSFYRKKLKEVWKPAV

SEQ ID NO: 38992 - protein, 978 aa, synthetic construct
  REGION 1..978: note = engineered CasX variant
QEIKRINKIRRRLVKDSNTKKAGKTGPMKTLLVRVMTPDLRERLENLRKKPENIPQPISNTSRANLNKLLTDYTEMKKAILHVYWEEFQKDPVGLMSRVAQPASKKIDQNKLKPEMDEKGNLTTAGFACSQCGQPLFVYKLEQVSEKGKAYTNYFGRCNVAEHEKLILLAQLKPEKDSDEAVTYSLGKFGQRALDFYSIHVTKESTHPVKPLAQIAGNRYASPVGKALSDACMGTIASFLSKYQDIIIEHQKVVKGNQKRLESLRELAGKENLEYPSVTLPPQPHTKEGVDAYNEVIARVRMWVNLNLWQKLKLSRDDAKPLLRLKGFPSFPLVERQANEVDWWDMVCNVKKLINEKKEDGKVFWQNLAGYKRQEALRPYLSSEEDRKKGKKFARYQLGDLLLHLEKKHGEDWGKVYDEAWERIDKKVEGLSKHIKLEEERRSEDAQSKAALTDWLRAKASFVIEGLKEADKDEFCRCELKLQKWYGDLRGKPFAIEAENSILDISGFSKQYNCAFIWQKDGVKKLNLYLIINYFKGGKLRFKKIKPEAFEANRFYTVINKKSGEIVPMEVNFNFDDPNLIILPLAFGKRQGREFIWNDLLSLETGSLKLANGRVIEKTLYNRRTRQDEPALFVALTFERREVLDSSNIKPMNLIGVDRGENIPAVIALTDPEGCPLSRFKDSLGNPTHILRIGERYKEKQRTIQAKKEVEQRRAGGYSRKYASKAKNLADDMVRNTARDLLYYAVTQDAMLIFENLSRGFGRQGKRTFMAERQYTRMEDWLTAKLAYEGPLPSKTYLSKTLAQYTSKTCSNCGFTITSADYDRVLEKLKKTATGWMTTINGKELKVEGQITYYNRYKRQNVVKDLSVELDRLSEESVNNDISSWTKGRSGEALSLLKKRFSHRPVQEKFVCLNCGFETHADEQAALNIARSWLFLRSQEYKKYQTNKTTGNTDKRAFVETWQSFYRKKLKEVWKPAV

SEQ ID NO: 38993 - protein, 979 aa, synthetic construct
  REGION 1..979: note = engineered CasX variant
QEIKRINKIRRRLVKDSNTKKAGKTGPMKTLLVRVMTPDLRERLENLRKKPENIPQPISNTSRANLNKLLTDYTEMKKAILHVYWEEFQKDPVGLMSRVAQPASKKIDQNKLKPEMDEKGNLTTAGFACSQCGQPLFVYKLEQVSEKGKAYTNYFGRCNVAEHEKLILLAQLKPEKDSDEAVTYSLGKFGQRALDFYSIHVTKESTHPVKPLAQIAGNRYASYPVGKALSDACMGTIASFLSKYQDIIIEHQKVVKGNQKRLESLRELAGKENLEYPSVTLPPQPHTKEGVDAYNEVIARVRMWVNLNLWQKLKLSRDDAKPLLRLKGFPSFPLVERQANEVDWWDMVCNVKKLINEKKEDGKVFWQNLAGYKRQEALRPYLSSEEDRKKGKKFARYQLGDLLLHLEKKHGEDWGKVYDEAWERIDKKVEGLSKHIKLEEERRSEDAQSKAALTDWLRAKASFVIEGLKEADKDEFCRCELKLQKWYGDLRGKPFAIEAENSILDISGFSKQYNCAFIWQKDGVKKLNLYLIINYFKGGKLRFKKIKPEAFEANRFYTVINKKSGEIVPMEVNFNFDDPNLIILPLAFGKRQGREFIWNDLLSLETGSLQLANGRVIEKTLYNRRTRQDEPALFVALTFERREVLDSSNIKPMNLIGVDRGENIPAVIALTDPEGCPLSRFKDSLGNPTHILRIGESYKEKQRTIQAKKEVEQRRAGGYSRKYASKAKNLADDMVRNTARDLLYYAVTQDAMLIFENLSRGFGRQGKRTFMAERQYTRMEDWLTAKLAYEGPLPSKTYLSKTLAQYTSKTCSNCGFTITSADYDRVLEKLKKTATGWMTTINGKELKVEGQITYYNRYKRQNVVKDLSVELDRLSEESVNNDISSWTKGRSGEALSLLKKRFSHRPVQEKFVCLNCGFETHADEQAALNIARSWLFLRSQEYKKYQTNKTTGNTDKRAFVETWQSFYRKKLKEVWKPAV

SEQ ID NO: 38994 - protein, 979 aa, synthetic construct
  REGION 1..979: note = engineered CasX variant
QEIKRINKIRRRLVKDSNTKKAGKTGPMKTLLVRVMTPDLRERLENLRKKPENIPQPISNTSRANLNKLLTDYTEMKKAILHVYWEEFQKDPVGLMSRVAQPASKKIDQNKLKPEMDEKGNLTTAGFACSQCGQPLFVYKLEQVSEKGKAYTNYFGRCNVAEHEKLILLAQLKPEKDSDEAVTYSLGKFGQRALDFYSIHVTKESTHPVKPLAQIAGNRYASHPVGKALSDACMGTIASFLSKYQDIIIEHQKVVKGNQKRLESLRELAGKENLEYPSVTLPPQPHTKEGVDAYNEVIARVRMWVNLNLWQKLKLSRDDAKPLLRLKGFPSFPLVERQANEVDWWDMVCNVKKLINEKKEDGKVFWQNLAGYKRQEALRPYLSSEEDRKKGKKFARYQLGDLLLHLEKKHGEDWGKVYDEAWERIDKKVEGLSKHIKLEEERRSEDAQSKAALTDWLRAKASFVIEGLKEADKDEFCRCELKLQKWYGDLRGKPFAIEAENSILDISGFSKQYNCAFIWQKDGVKKLNLYLIINYFKGGKLRFKKIKPEAFEANRFYTVINKKSGEIVPMEVNFNFDDPNLIILPLAFGKRQGREFIWNDLLSLETGSLQLANGRVIEKTLYNRRTRQDEPALFVALTFERREVLDSSNIKPMNLIGVDRGENIPAVIALTDPEGCPLSRFKDSLGNPTHILRIGESYKEKQRTIQAKKEVEQRRAGGYSRKYASKAKNLADDMVRNTARDLLYYAVTQDAMLIFENLSRGFGRQGKRTFMAERQYTRMEDWLTAKLAYEGPLPSKTYLSKTLAQYTSKTCSNCGFTITSADYDRVLEKLKKTATGWMTTINGKELKVEGQITYYNRYKRQNVVKDLSVELDRLSEESVNNDISSWTKGRSGEALSLLKKRFSHRPVQEKFVCLNCGFETHADEQAALNIARSWLFLRSQEYKKYQTNKTTGNTDKRAFVETWQSFYRKKLKEVWKPAV

SEQ ID NO: 38995 - protein, 979 aa, synthetic construct
  REGION 1..979: note = engineered CasX variant
QEIKRINKIRRRLVKDSNTKKAGKTGPMKTLLVRVMTPDLRERLENLRKKPENIPQPISNTSRANLNKLLTDYTEMKKAILHVYWEEFQKDPVGLMSRVAQPASKKIDQNKLKPEMDEKGNLTTAGFACSQCGQPLFVYKLEQVSEKGKAYTNYFGRCNVAEHEKLILLAQLKPEKDSDEAVTYSLGKFGQRALDFYSIHVTKESTHPVKPLAQIAGNRYASSPVGKALSDACMGTIASFLSKYQDIIIEHQKVVKGNQKRLESLRELAGKENLEYPSVTLPPQPHTKEGVDAYNEVIARVRMWVNLNLWQKLKLSRDDAKPLLRLKGFPSFPLVERQANEVDWWDMVCNVKKLINEKKEDGKVFWQNLAGYKRQEALRPYLSSEEDRKKGKKFARYQLGDLLLHLEKKHGEDWGKVYDEAWERIDKKVEGLSKHIKLEEERRSEDAQSKAALTDWLRAKASFVIEGLKEADKDEFCRCELKLQKWYGDLRGKPFAIEAENSILDISGFSKQYNCAFIWQKDGVKKLNLYLIINYFKGGKLRFKKIKPEAFEANRFYTVINKKSGEIVPMEVNFNFDDPNLIILPLAFGKRQGREFIWNDLLSLETGSLQLANGRVIEKTLYNRRTRQDEPALFVALTFERREVLDSSNIKPMNLIGVDRGENIPAVIALTDPEGCPLSRFKDSLGNPTHILRIGESYKEKQRTIQAKKEVEQRRAGGYSRKYASKAKNLADDMVRNTARDLLYYAVTQDAMLIFENLSRGFGRQGKRTFMAERQYTRMEDWLTAKLAYEGPLPSKTYLSKTLAQYTSKTCSNCGFTITSADYDRVLEKLKKTATGWMTTINGKELKVEGQITYYNRYKRQNVVKDLSVELDRLSEESVNNDISSWTKGRSGEALSLLKKRFSHRPVQEKFVCLNCGFETHADEQAALNIARSWLFLRSQEYKKYQTNKTTGNTDKRAFVETWQSFYRKKLKEVWKPAV

SEQ ID NO: 38996 - protein, 979 aa, synthetic construct
  REGION 1..979: note = engineered CasX variant
QEIKRINKIRRRLVKDSNTKKAGKTGPMKTLLVRVMTPDLRERLENLRKKPENIPQPISNTSRANLNKLLTDYTEMKKAILHVYWEEFQKDPVGLMSRVAQPASKKIDQNKLKPEMDEKGNLTTAGFACSQCGQPLFVYKLEQVSEKGKAYTNYFGRCNVAEHEKLILLAQLKPEKDSDEAVTYSLGKFGQRALDFYSIHVTKESTHPVKPLAQIAGNRYASTPVGKALSDACMGTIASFLSKYQDIIIEHQKVVKGNQKRLESLRELAGKENLEYPSVTLPPQPHTKEGVDAYNEVIARVRMWVNLNLWQKLKLSRDDAKPLLRLKGFPSFPLVERQANEVDWWDMVCNVKKLINEKKEDGKVFWQNLAGYKRQEALRPYLSSEEDRKKGKKFARYQLGDLLLHLEKKHGEDWGKVYDEAWERIDKKVEGLSKHIKLEEERRSEDAQSKAALTDWLRAKASFVIEGLKEADKDEFCRCELKLQKWYGDLRGKPFAIEAENSILDISGFSKQYNCAFIWQKDGVKKLNLYLIINYFKGGKLRFKKIKPEAFEANRFYTVINKKSGEIVPMEVNFNFDDPNLIILPLAFGKRQGREFIWNDLLSLETGSLQLANGRVIEKTLYNRRTRQDEPALFVALTFERREVLDSSNIKPMNLIGVDRGENIPAVIALTDPEGCPLSRFKDSLGNPTHILRIGESYKEKQRTIQAKKEVEQRRAGGYSRKYASKAKNLADDMVRNTARDLLYYAVTQDAMLIFENLSRGFGRQGKRTFMAERQYTRMEDWLTAKLAYEGPLPSKTYLSKTLAQYTSKTCSNCGFTITSADYDRVLEKLKKTATGWMTTINGKELKVEGQITYYNRYKRQNVVKDLSVELDRLSEESVNNDISSWTKGRSGEALSLLKKRFSHRPVQEKFVCLNCGFETHADEQAALNIARSWLFLRSQEYKKYQTNKTTGNTDKRAFVETWQSFYRKKLKEVWKPAV

SEQ ID NO: 38997 - protein, 979 aa, synthetic construct
  REGION 1..979: note = engineered CasX variant
QEIKRINKIRRRLVKDSNTKKAGKTGPMKTLLVRVMTPDLRERLENLRKKPENIPQPISNTSRANLNKLLTDYTEMKKAILHVYWEEFQKDPVGLMSRVAQPASKKIDQNKLKPEMDEKGNLTTAGFACSQCGQPLFVYKLEQVSEKGKAYTNYFGRCNVAEHEKLILLAQLKPEKDSDEAVTYSLGKFGQRALDFYSIHVTKESTHPVKPLAQIAGNRYASAPVGKALSDACMGTIASFLSKYQDIIIEHQKVVKGNQKRLESLRELAGKENLEYPSVTLPPQPHTKEGVDAYNEVIARVRMWVNLNLWQKLKLSRDDAKPLLRLKGFPSFPLVERQANEVDWWDMVCNVKKLINEKKEDGKVFWQNLAGYKRQEALRPYLSSEEDRKKGKKFARYQLGDLLLHLEKKHGEDWGKVYDEAWERIDKKVEGLSKHIKLEEERRSEDAQSKAALTDWLRAKASFVIEGLKEADKDEFCRCELKLQKWYGDLRGKPFAIEAENSILDISGFSKQYNCAFIWQKDGVKKLNLYLIINYFKGGKLRFKKIKPEAFEANRFYTVINKKSGEIVPMEVNFNFDDPNLIILPLAFGKRQGREFIWNDLLSLETGSLQLANGRVIEKTLYNRRTRQDEPALFVALTFERREVLDSSNIKPMNLIGVDRGENIPAVIALTDPEGCPLSRFKDSLGNPTHILRIGESYKEKQRTIQAKKEVEQRRAGGYSRKYASKAKNLADDMVRNTARDLLYYAVTQDAMLIFENLSRGFGRQGKRTFMAERQYTRMEDWLTAKLAYEGPLPSKTYLSKTLAQYTSKTCSNCGFTITSADYDRVLEKLKKTATGWMTTINGKELKVEGQITYYNRYKRQNVVKDLSVELDRLSEESVNNDISSWTKGRSGEALSLLKKRFSHRPVQEKFVCLNCGFETHADEQAALNIARSWLFLRSQEYKKYQTNKTTGNTDKRAFVETWQSFYRKKLKEVWKPAV

SEQ ID NO: 38998 - protein, 979 aa, synthetic construct
  REGION 1..979: note = engineered CasX variant
QEIKRINKIRRRLVKDSNTKKAGKTGPMKTLLVRVMTPDLRERLENLRKKPENIPQPISNTSRANLNKLLTDYTEMKKAILHVYWEEFQKDPVGLMSRVAQPASKKIDQNKLKPEMDEKGNLTTAGFACSQCGQPLFVYKLEQVSEKGKAYTNYFGRCNVAEHEKLILLAQLKPEKDSDEAVTYSLGKFGQRALDFYSIHVTKESTHPVKPLAQIAGNRYASVPVGKALSDACMGTIASFLSKYQDIIIEHQKVVKGNQKRLESLRELAGKENLEYPSVTLPPQPHTKEGVDAYNEVIARVRMWVNLNLWQKLKLSRDDAKPLLRLKGFPSFPLVERQANEVDWWDMVCNVKKLINEKKEDGKVFWQNLAGYKRQEALRPYLSSEEDRKKGKKFARYQLGDLLLHLEKKHGEDWGKVYDEAWERIDKKVEGLSKHIKLEEERRSEDAQSKAALTDWLRAKASFVIEGLKEADKDEFCRCELKLQKWYGDLRGKPFAIEAENSILDISGFSKQYNCAFIWQKDGVKKLNLYLIINYFKGGKLRFKKIKPEAFEANRFYTVINKKSGEIVPMEVNFNFDDPNLIILPLAFGKRQGREFIWNDLLSLETGSLQLANGRVIEKTLYNRRTRQDEPALFVALTFERREVLDSSNIKPMNLIGVDRGENIPAVIALTDPEGCPLSRFKDSLGNPTHILRIGESYKEKQRTIQAKKEVEQRRAGGYSRKYASKAKNLADDMVRNTARDLLYYAVTQDAMLIFENLSRGFGRQGKRTFMAERQYTRMEDWLTAKLAYEGPLPSKTYLSKTLAQYTSKTCSNCGFTITSADYDRVLEKLKKTATGWMTTINGKELKVEGQITYYNRYKRQNVVKDLSVELDRLSEESVNNDISSWTKGRSGEALSLLKKRFSHRPVQEKFVCLNCGFETHADEQAALNIARSWLFLRSQEYKKYQTNKTTGNTDKRAFVETWQSFYRKKLKEVWKPAV

SEQ ID NO: 38999 - protein, 979 aa, synthetic construct
  REGION 1..979: note = engineered CasX variant
QEIKRINKIRRRLVKDSNTKKAGKTGPMKTLLVRVMTPDLRERLENLRKKPENIPQPISNTSRANLNKLLTDYTEMKKAILHVYWEEFQKDPVGLMSRVAQPASKKIDQNKLKPEMDEKGNLTTAGFACSQCGQPLFVYKLEQVSEKGKAYTNYFGRCNVAEHEKLIKLAQLKPEKDSDEAVTYSLGKFGQRALDFYSIHVTKESTHPVKPLAQIAGNRYASGPVGKALSDACMGTIASFLSKYQDIIIEHQKVVKGNQKRLESLRELAGKENLEYPSVTLPPQPHTKEGVDAYNEVIARVRMWVNLNLWQKLKLSRDDAKPLLRLKGFPSFPLVERQANEVDWWDMVCNVKKLINEKKEDGKVFWQNLAGYKRQEALRPYLSSEEDRKKGKKFARYQLGDLLLHLEKKHGEDWGKVYDEAWERIDKKVEGLSKHIKLEEERRSEDAQSKAALTDWLRAKASFVIEGLKEADKDEFCRCELKLQKWYGDLRGKPFAIEAENSILDISGFSKQYNCAFIWQKDGVKKLNLYLIINYFKGGKLRFKKIKPEAFEANRFYTVINKKSGEIVPMEVNFNFDDPNLIILPLAFGKRQGREFIWNDLLSLETGSLQLANGRVIEKTLYNRRTRQDEPALFVALTFERREVLDSSNIKPMNLIGVDRGENIPAVIALTDPEGCPLSRFKDSLGNPTHILRIGESYKEKQRTIQAKKEVEQRRAGGYSRKYASKAKNLADDMVRNTARDLLYYAVTQDAMLIFENLSRGFGRQGKRTFMAERQYTRMEDWLTAKLAYEGPLPSKTYLSKTLAQYTSKTCSNCGFTITSADYDRVLEKLKKTATGWMTTINGKELKVEGQITYYNRYKRQNVVKDLSVELDRLSEESVNNDISSWTKGRSGEALSLLKKRFSHRPVQEKFVCLNCGFETHADEQAALNIARSWLFLRSQEYKKYQTNKTTGNTDKRAFVETWQSFYRKKLKEVWKPAV

SEQ ID NO: 39000 - protein, 978 aa, synthetic construct
  REGION 1..978: note = engineered CasX variant
QEIKRINKIRRRLVKDSNTKKAGKTGPMKTLLVRVMTPDLRERLENLRKKPENIPQPISNTSRANLNKLLTDYTEMKKAILHVYWEEFQKDPVGLMSRVAQPASKKIDQNKLKPEMDEKGNLTTAGFACSQCGQPLFVYKLEQVSEKGKAYTNYFGRCNVAEHEKLILLAQLKPEKDSDEAVTYSLGKFGQRALDFYSIHVTKESTHPVKPLAQIAGNRYASPVGKALSDACMGTIASFLSKYQDIIIEHQKVVKGNQKRLESLRELAGKENLEYPSVTLPPQPHTKEGVDAYNEVIARVRMWVNLNLWQKLKLSRDDAKPLLRLKGFPSFPLVERQANEVDWWDMVCNVKKLINEKKEDGKVFWQNLAGYKRQEALRPYLSSEEDRKKGKKFARYQLGDLLLHLEKKHGEDWGKVYDEAWERIDKKVEGLSKHIKLEEERRSEDAQSKAALTDWLRAKASFVIEGLKEADKDEFCRCELKLQKWYGDLRGKPFAIEAENSILDISGFSKQYNCAFIWQKDGVKKLNLYLIINYFKGGKLRFKKIKPEAFEANRFYTVINKKSGEIVPMEVNFNFDDPNLIILPLAFGKRQGREFIWNDLLSLETGSLQLANGRVIEKTLYNRRTRQDEPALFVALTFERREVLDSSNIKPMNLIGVDRGENIPAVIALTDPEGCPLSRFKDSLGNPTHILRIGESYKEKQRTIQAKKEVEQRRAGGYSRKYASKAKNLADDMVRNTARDLLYYAVTQDAMLIFENLSRGFGRQGKRTFMAERQYTRMEDWLTAKLAYEGPLPSKTYLSKTLAQYTSKTCSNCGFTITSADYDRVLEKLKKTATGWMTTINGKELKVEGQITYYNRYKRQNVVKDLSVELDRLSEESVNNDISSWTKGRSGEALSLLKKRFSHRPVQEKFVCLNCGFETHADEQAALNIARSWLFLRSQEYKKYQTNKTTGNTDKRAFVETWQSFYRKKLKEVWKPAV

SEQ ID NO: 39001 - protein, 979 aa, synthetic construct
  REGION 1..979: note = engineered CasX variant
QEIKRINKIRRRLVKDSNTKKAGKTGPMKTLLVRVMTPDLRERLENLRKKPENIPQPISNTSRANLNKLLTDYTEMKKAILHVYWEEFQKDPVGLMSRVAQPASKKIDQNKLKPEMDEKGNLTTAGFACSQCGQPLFVYKLEQVSEKGKAYTNYFGRCNVAEHEKLILLAQLKPEKDSDEAVTYSLGKFGQRALDFYSIHVTKESTHPVKPLAQIAGNRYASYPVGKALSDACMGTIASFLSKYQDIIIEHQKVVKGNQKRLESLRELAGKENLEYPSVTLPPQPHTKEGVDAYNEVIARVRMWVNLNLWQKLKLSRDDAKPLLRLKGFPSFPLVERQANEVDWWDMVCNVKKLINEKKEDGKVFWQNLAGYKRQEALRPYLSSEEDVRKKGKKFARYQLGDLLLHLEKKHGEDWGKVYDEAWERIDKKVEGLSKHIKLEEERRSEDAQSKAALTDWLRAKASFVIEGLKEADKDEFCRCELKLQKWYGDLRGKPFAIEAENSILDISGFSKQYNCAFIWQKDGVKKLNLYLIINYFKGGKLRFKKIKPEAFEANRFYTVINKKSGEIVPMEVNFNFDDPNLIILPLAFGKRQGREFIWNDLLSLETGSLKLANGRVIEKTLYNRRTRQDEPALFVALTFERREVLDSSNIKPMNLIGVDRGENIPAVIALTDPEGCPLSRFKDSLGNPTHILRIGESYKEKQRTIQAKKEVEQRRAGGYSRKYASKAKNLADDMVRNTARDLLYYAVTQDAMLIFENLSRGFGRQGKRTFMAERQYTRMEDWLTAKLAYEGLPSKTYLSKTLAQYTSKTCSNCGFTITSADYDRMLEKLKKTATGWMTTINGKELKVEGQITYYNRYKRQNVVKDLSVELDRLSEESVNNDISSWTKGRSGEALSLLKKRFSHRPVQEKFVCLNCGFETHADEQAALNIARSWLFLRSQEYKKYQTNKTTGNTDKRAFVETWQSFYRKKLKEVWKPAV

SEQ ID NO: 39002 - protein, 979 aa, synthetic construct
  REGION 1..979: note = engineered CasX variant
QEIKRINKIRRRLVKDSNTKKAGKTGPMKTLLVRVMTPDLRERLENLRKKPENIPQPISNTSRANLNKLLTDYTEMKKAILHVYWEEFQKDPVGLMSRVAQPASKKIDQNKLKPEMDEKGNLTTAGFACSQCGQPLFVYKLEQVSEKGKAYTNYFGRCNVAEHEKLILLAQLKPEKDSDEAVTYSLGKFGQRALDFYSIHVTKESTHPVKPLAQIAGNRYASHPVGKALSDACMGTIASFLSKYQDIIIEHQKVVKGNQKRLESLRELAGKENLEYPSVTLPPQPHTKEGVDAYNEVIARVRMWVNLNLWQKLKLSRDDAKPLLRLKGFPSFPLVERQANEVDWWDMVCNVKKLINEKKEDGKVFWQNLAGYKRQEALRPYLSSEEDVRKKGKKFARYQLGDLLLHLEKKHGEDWGKVYDEAWERIDKKVEGLSKHIKLEEERRSEDAQSKAALTDWLRAKASFVIEGLKEADKDEFCRCELKLQKWYGDLRGKPFAIEAENSILDISGFSKQYNCAFIWQKDGVKKLNLYLIINYFKGGKLRFKKIKPEAFEANRFYTVINKKSGEIVPMEVNFNFDDPNLIILPLAFGKRQGREFIWNDLLSLETGSLKLANGRVIEKTLYNRRTRQDEPALFVALTFERREVLDSSNIKPMNLIGVDRGENIPAVIALTDPEGCPLSRFKDSLGNPTHILRIGESYKEKQRTIQAKKEVEQRRAGGYSRKYASKAKNLADDMVRNTARDLLYYAVTQDAMLIFENLSRGFGRQGKRTFMAERQYTRMEDWLTAKLAYEGLPSKTYLSKTLAQYTSKTCSNCGFTITSADYDRMLEKLKKTATGWMTTINGKELKVEGQITYYNRYKRQNVVKDLSVELDRLSEESVNNDISSWTKGRSGEALSLLKKRFSHRPVQEKFVCLNCGFETHADEQAALNIARSWLFLRSQEYKKYQTNKTTGNTDKRAFVETWQSFYRKKLKEVWKPAV

SEQ ID NO: 39003 - protein, 979 aa, synthetic construct
  REGION 1..979: note = engineered CasX variant
QEIKRINKIRRRLVKDSNTKKAGKTGPMKTLLVRVMTPDLRERLENLRKKPENIPQPISNTSRANLNKLLTDYTEMKKAILHVYWEEFQKDPVGLMSRVAQPASKKIDQNKLKPEMDEKGNLTTAGFACSQCGQPLFVYKLEQVSEKGKAYTNYFGRCNVAEHEKLILLAQLKPEKDSDEAVTYSLGKFGQRALDFYSIHVTKESTHPVKPLAQIAGNRYASSPVGKALSDACMGTIASFLSKYQDIIIEHQKVVKGNQKRLESLRELAGKENLEYPSVTLPPQPHTKEGVDAYNEVIARVRMWVNLNLWQKLKLSRDDAKPLLRLKGFPSFPLVERQANEVDWWDMVCNVKKLINEKKEDGKVFWQNLAGYKRQEALRPYLSSEEDVRKKGKKFARYQLGDLLLHLEKKHGEDWGKVYDEAWERIDKKVEGLSKHIKLEEERRSEDAQSKAALTDWLRAKASFVIEGLKEADKDEFCRCELKLQKWYGDLRGKPFAIEAENSILDISGFSKQYNCAFIWQKDGVKKLNLYLIINYFKGGKLRFKKIKPEAFEANRFYTVINKKSGEIVPMEVNFNFDDPNLIILPLAFGKRQGREFIWNDLLSLETGSLKLANGRVIEKTLYNRRTRQDEPALFVALTFERREVLDSSNIKPMNLIGVDRGENIPAVIALTDPEGCPLSRFKDSLGNPTHILRIGESYKEKQRTIQAKKEVEQRRAGGYSRKYASKAKNLADDMVRNTARDLLYYAVTQDAMLIFENLSRGFGRQGKRTFMAERQYTRMEDWLTAKLAYEGLPSKTYLSKTLAQYTSKTCSNCGFTITSADYDRMLEKLKKTATGWMTTINGKELKVEGQITYYNRYKRQNVVKDLSVELDRLSEESVNNDISSWTKGRSGEALSLLKKRFSHRPVQEKFVCLNCGFETHADEQAALNIARSWLFLRSQEYKKYQTNKTTGNTDKRAFVETWQSFYRKKLKEVWKPAV

SEQ ID NO: 39004 - protein, 979 aa, synthetic construct
  REGION 1..979: note = engineered CasX variant
QEIKRINKIRRRLVKDSNTKKAGKTGPMKTLLVRVMTPDLRERLENLRKKPENIPQPISNTSRANLNKLLTDYTEMKKAILHVYWEEFQKDPVGLMSRVAQPASKKIDQNKLKPEMDEKGNLTTAGFACSQCGQPLFVYKLEQVSEKGKAYTNYFGRCNVAEHEKLILLAQLKPEKDSDEAVTYSLGKFGQRALDFYSIHVTKESTHPVKPLAQIAGNRYASTPVGKALSDACMGTIASFLSKYQDIIIEHQKVVKGNQKRLESLRELAGKENLEYPSVTLPPQPHTKEGVDAYNEVIARVRMWVNLNLWQKLKLSRDDAKPLLRLKGFPSFPLVERQANEVDWWDMVCNVKKLINEKKEDGKVFWQNLAGYKRQEALRPYLSSEEDVRKKGKKFARYQLGDLLLHLEKKHGEDWGKVYDEAWERIDKKVEGLSKHIKLEEERRSEDAQSKAALTDWLRAKASFVIEGLKEADKDEFCRCELKLQKWYGDLRGKPFAIEAENSILDISGFSKQYNCAFIWQKDGVKKLNLYLIINYFKGGKLRFKKIKPEAFEANRFYTVINKKSGEIVPMEVNFNFDDPNLIILPLAFGKRQGREFIWNDLLSLETGSLKLANGRVIEKTLYNRRTRQDEPALFVALTFERREVLDSSNIKPMNLIGVDRGENIPAVIALTDPEGCPLSRFKDSLGNPTHILRIGESYKEKQRTIQAKKEVEQRRAGGYSRKYASKAKNLADDMVRNTARDLLYYAVTQDAMLIFENLSRGFGRQGKRTFMAERQYTRMEDWLTAKLAYEGLPSKTYLSKTLAQYTSKTCSNCGFTITSADYDRMLEKLKKTATGWMTTINGKELKVEGQITYYNRYKRQNVVKDLSVELDRLSEESVNNDISSWTKGRSGEALSLLKKRFSHRPVQEKFVCLNCGFETHADEQAALNIARSWLFLRSQEYKKYQTNKTTGNTDKRAFVETWQSFYRKKLKEVWKPAV

SEQ ID NO: 39005 - protein, 979 aa, synthetic construct
  REGION 1..979: note = engineered CasX variant
QEIKRINKIRRRLVKDSNTKKAGKTGPMKTLLVRVMTPDLRERLENLRKKPENIPQPISNTSRANLNKLLTDYTEMKKAILHVYWEEFQKDPVGLMSRVAQPASKKIDQNKLKPEMDEKGNLTTAGFACSQCGQPLFVYKLEQVSEKGKAYTNYFGRCNVAEHEKLILLAQLKPEKDSDEAVTYSLGKFGQRALDFYSIHVTKESTHPVKPLAQIAGNRYASAPVGKALSDACMGTIASFLSKYQDIIIEHQKVVKGNQKRLESLRELAGKENLEYPSVTLPPQPHTKEGVDAYNEVIARVRMWVNLNLWQKLKLSRDDAKPLLRLKGFPSFPLVERQANEVDWWDMVCNVKKLINEKKEDGKVFWQNLAGYKRQEALRPYLSSEEDVRKKGKKFARYQLGDLLLHLEKKHGEDWGKVYDEAWERIDKKVEGLSKHIKLEEERRSEDAQSKAALTDWLRAKASFVIEGLKEADKDEFCRCELKLQKWYGDLRGKPFAIEAENSILDISGFSKQYNCAFIWQKDGVKKLNLYLIINYFKGGKLRFKKIKPEAFEANRFYTVINKKSGEIVPMEVNFNFDDPNLIILPLAFGKRQGREFIWNDLLSLETGSLKLANGRVIEKTLYNRRTRQDEPALFVALTFERREVLDSSNIKPMNLIGVDRGENIPAVIALTDPEGCPLSRFKDSLGNPTHILRIGESYKEKQRTIQAKKEVEQRRAGGYSRKYASKAKNLADDMVRNTARDLLYYAVTQDAMLIFENLSRGFGRQGKRTFMAERQYTRMEDWLTAKLAYEGLPSKTYLSKTLAQYTSKTCSNCGFTITSADYDRMLEKLKKTATGWMTTINGKELKVEGQITYYNRYKRQNVVKDLSVELDRLSEESVNNDISSWTKGRSGEALSLLKKRFSHRPVQEKFVCLNCGFETHADEQAALNIARSWLFLRSQEYKKYQTNKTTGNTDKRAFVETWQSFYRKKLKEVWKPAV

SEQ ID NO: 39006 - protein, 979 aa, synthetic construct
  REGION 1..979: note = engineered CasX variant
QEIKRINKIRRRLVKDSNTKKAGKTGPMKTLLVRVMTPDLRERLENLRKKPENIPQPISNTSRANLNKLLTDYTEMKKAILHVYWEEFQKDPVGLMSRVAQPASKKIDQNKLKPEMDEKGNLTTAGFACSQCGQPLFVYKLEQVSEKGKAYTNYFGRCNVAEHEKLILLAQLKPEKDSDEAVTYSLGKFGQRALDFYSIHVTKESTHPVKPLAQIAGNRYASVPVGKALSDACMGTIASFLSKYQDIIIEHQKVVKGNQKRLESLRELAGKENLEYPSVTLPPQPHTKEGVDAYNEVIARVRMWVNLNLWQKLKLSRDDAKPLLRLKGFPSFPLVERQANEVDWWDMVCNVKKLINEKKEDGKVFWQNLAGYKRQEALRPYLSSEEDVRKKGKKFARYQLGDLLLHLEKKHGEDWGKVYDEAWERIDKKVEGLSKHIKLEEERRSEDAQSKAALTDWLRAKASFVIEGLKEADKDEFCRCELKLQKWYGDLRGKPFAIEAENSILDISGFSKQYNCAFIWQKDGVKKLNLYLIINYFKGGKLRFKKIKPEAFEANRFYTVINKKSGEIVPMEVNFNFDDPNLIILPLAFGKRQGREFIWNDLLSLETGSLKLANGRVIEKTLYNRRTRQDEPALFVALTFERREVLDSSNIKPMNLIGVDRGENIPAVIALTDPEGCPLSRFKDSLGNPTHILRIGESYKEKQRTIQAKKEVEQRRAGGYSRKYASKAKNLADDMVRNTARDLLYYAVTQDAMLIFENLSRGFGRQGKRTFMAERQYTRMEDWLTAKLAYEGLPSKTYLSKTLAQYTSKTCSNCGFTITSADYDRMLEKLKKTATGWMTTINGKELKVEGQITYYNRYKRQNVVKDLSVELDRLSEESVNNDISSWTKGRSGEALSLLKKRFSHRPVQEKFVCLNCGFETHADEQAALNIARSWLFLRSQEYKKYQTNKTTGNTDKRAFVETWQSFYRKKLKEVWKPAV

SEQ ID NO: 39007 - protein, 979 aa, synthetic construct
  REGION 1..979: note = engineered CasX variant
QEIKRINKIRRRLVKDSNTKKAGKTGPMKTLLVRVMTPDLRERLENLRKKPENIPQPISNTSRANLNKLLTDYTEMKKAILHVYWEEFQKDPVGLMSRVAQPASKKIDQNKLKPEMDEKGNLTTAGFACSQCGQPLFVYKLEQVSEKGKAYTNYFGRCNVAEHEKLIKLAQLKPEKDSDEAVTYSLGKFGQRALDFYSIHVTKESTHPVKPLAQIAGNRYASGPVGKALSDACMGTIASFLSKYQDIIIEHQKVVKGNQKRLESLRELAGKENLEYPSVTLPPQPHTKEGVDAYNEVIARVRMWVNLNLWQKLKLSRDDAKPLLRLKGFPSFPLVERQANEVDWWDMVCNVKKLINEKKEDGKVFWQNLAGYKRQEALRPYLSSEEDVRKKGKKFARYQLGDLLLHLEKKHGEDWGKVYDEAWERIDKKVEGLSKHIKLEEERRSEDAQSKAALTDWLRAKASFVIEGLKEADKDEFCRCELKLQKWYGDLRGKPFAIEAENSILDISGFSKQYNCAFIWQKDGVKKLNLYLIINYFKGGKLRFKKIKPEAFEANRFYTVINKKSGEIVPMEVNFNFDDPNLIILPLAFGKRQGREFIWNDLLSLETGSLKLANGRVIEKTLYNRRTRQDEPALFVALTFERREVLDSSNIKPMNLIGVDRGENIPAVIALTDPEGCPLSRFKDSLGNPTHILRIGESYKEKQRTIQAKKEVEQRRAGGYSRKYASKAKNLADDMVRNTARDLLYYAVTQDAMLIFENLSRGFGRQGKRTFMAERQYTRMEDWLTAKLAYEGLPSKTYLSKTLAQYTSKTCSNCGFTITSADYDRMLEKLKKTATGWMTTINGKELKVEGQITYYNRYKRQNVVKDLSVELDRLSEESVNNDISSWTKGRSGEALSLLKKRFSHRPVQEKFVCLNCGFETHADEQAALNIARSWLFLRSQEYKKYQTNKTTGNTDKRAFVETWQSFYRKKLKEVWKPAV

SEQ ID NO: 39008 - protein, 978 aa, synthetic construct
  REGION 1..978: note = engineered CasX variant
QEIKRINKIRRRLVKDSNTKKAGKTGPMKTLLVRVMTPDLRERLENLRKKPENIPQPISNTSRANLNKLLTDYTEMKKAILHVYWEEFQKDPVGLMSRVAQPASKKIDQNKLKPEMDEKGNLTTAGFACSQCGQPLFVYKLEQVSEKGKAYTNYFGRCNVAEHEKLILLAQLKPEKDSDEAVTYSLGKFGQRALDFYSIHVTKESTHPVKPLAQIAGNRYASPVGKALSDACMGTIASFLSKYQDIIIEHQKVVKGNQKRLESLRELAGKENLEYPSVTLPPQPHTKEGVDAYNEVIARVRMWVNLNLWQKLKLSRDDAKPLLRLKGFPSFPLVERQANEVDWWDMVCNVKKLINEKKEDGKVFWQNLAGYKRQEALRPYLSSEEDVRKKGKKFARYQLGDLLLHLEKKHGEDWGKVYDEAWERIDKKVEGLSKHIKLEEERRSEDAQSKAALTDWLRAKASFVIEGLKEADKDEFCRCELKLQKWYGDLRGKPFAIEAENSILDISGFSKQYNCAFIWQKDGVKKLNLYLIINYFKGGKLRFKKIKPEAFEANRFYTVINKKSGEIVPMEVNFNFDDPNLIILPLAFGKRQGREFIWNDLLSLETGSLKLANGRVIEKTLYNRRTRQDEPALFVALTFERREVLDSSNIKPMNLIGVDRGENIPAVIALTDPEGCPLSRFKDSLGNPTHILRIGESYKEKQRTIQAKKEVEQRRAGGYSRKYASKAKNLADDMVRNTARDLLYYAVTQDAMLIFENLSRGFGRQGKRTFMAERQYTRMEDWLTAKLAYEGLPSKTYLSKTLAQYTSKTCSNCGFTITSADYDRMLEKLKKTATGWMTTINGKELKVEGQITYYNRYKRQNVVKDLSVELDRLSEESVNNDISSWTKGRSGEALSLLKKRFSHRPVQEKFVCLNCGFETHADEQAALNIARSWLFLRSQEYKKYQTNKTTGNTDKRAFVETWQSFYRKKLKEVWKPAV

SEQ ID NO: 39009 - protein, 979 aa, synthetic construct
  REGION 1..979: note = engineered CasX variant
QEIKRINKIRRRLVKDSNTKKAGKTGPMKTLLVRVMTPDLRERLENLRKKPENIPQPISNTSRANLNKLLTDYTEMKKAILHVYWEEFQKDPVGLMSRVAQPASKKIDQNKLKPEMDEKGNLTTAGFACSQCGQPLFVYKLEQVSEKGKAYTNYFGRCNVAEHEKLILLAQLKPEKDSDEAVTYSLGKFGQRALDFYSIHVTKESTHPVKPLAQIAGNRYASYPVGKALSDACMGTIASFLSKYQDIIIEHQKVVKGNQKRLESLRELAGKENLEYPSVTLPPQPHTKEGVDAYNEVIARVRMWVNLNLWQKLKLSRDDAKPLLRLKGFPSFPLVERQANEVDWWDMVCNVKKLINEKKEDGKVFWQNLAGYKRQEALRPYLSSEEDVRKKGKKFARYQLGDLLLHLEKKHGEDWGKVYDEAWERIDKKVEGLSKHIKLEEERRSEDAQSKAALTDWLRAKASFVIEGLKEADKDEFCRCELKLQKWYGDLRGKPFAIEAENSILDISGFSKQYNCAFIWQKDGVKKLNLYLIINYFKGGKLRFKKIKPEAFEANRFYTVINKKSGEIVPMEVNFNFDDPNLIILPLAFGKRQGREFIWNDLLSLETGSLKLANGRVIEKTLYNRRTRQDEPALFVALTFERREVLDSSNIKPMNLIGVDRGENIPAVIALTDPEGCPLSRFKDSLGNPTHILRIGESYKEKQRTIQAKKEVEQRRAGGYSRKYASKAKNLADDMVRNTARDLLYYAVTQDAMLIFENLSRGFGRQGKRTFMAERQYTRMEDWLTAKLAYEGLPSKTYLSKTLAQYTSKTCSNCGFTITSADYDRVLEKLKKTATGWMTTINGKELKVEGQITYYNRYKRQNVVKDLSVELDRLSEESVNNDISSWTKGRQGEALSLLKKRFSHRPVQEKFVCLNCGFETHADEQAALNIARSWLFLRSQEYKKYQTNKTTGNTDKRAFVETWQSFYRKKLKEVWKPAV

SEQ ID NO: 39010 - protein, 979 aa, synthetic construct
  REGION 1..979: note = engineered CasX variant
QEIKRINKIRRRLVKDSNTKKAGKTGPMKTLLVRVMTPDLRERLENLRKKPENIPQPISNTSRANLNKLLTDYTEMKKAILHVYWEEFQKDPVGLMSRVAQPASKKIDQNKLKPEMDEKGNLTTAGFACSQCGQPLFVYKLEQVSEKGKAYTNYFGRCNVAEHEKLILLAQLKPEKDSDEAVTYSLGKFGQRALDFYSIHVTKESTHPVKPLAQIAGNRYASHPVGKALSDACMGTIASFLSKYQDIIIEHQKVVKGNQKRLESLRELAGKENLEYPSVTLPPQPHTKEGVDAYNEVIARVRMWVNLNLWQKLKLSRDDAKPLLRLKGFPSFPLVERQANEVDWWDMVCNVKKLINEKKEDGKVFWQNLAGYKRQEALRPYLSSEEDVRKKGKKFARYQLGDLLLHLEKKHGEDWGKVYDEAWERIDKKVEGLSKHIKLEEERRSEDAQSKAALTDWLRAKASFVIEGLKEADKDEFCRCELKLQKWYGDLRGKPFAIEAENSILDISGFSKQYNCAFIWQKDGVKKLNLYLIINYFKGGKLRFKKIKPEAFEANRFYTVINKKSGEIVPMEVNFNFDDPNLIILPLAFGKRQGREFIWNDLLSLETGSLKLANGRVIEKTLYNRRTRQDEPALFVALTFERREVLDSSNIKPMNLIGVDRGENIPAVIALTDPEGCPLSRFKDSLGNPTHILRIGESYKEKQRTIQAKKEVEQRRAGGYSRKYASKAKNLADDMVRNTARDLLYYAVTQDAMLIFENLSRGFGRQGKRTFMAERQYTRMEDWLTAKLAYEGLPSKTYLSKTLAQYTSKTCSNCGFTITSADYDRVLEKLKKTATGWMTTINGKELKVEGQITYYNRYKRQNVVKDLSVELDRLSEESVNNDISSWTKGRQGEALSLLKKRFSHRPVQEKFVCLNCGFETHADEQAALNIARSWLFLRSQEYKKYQTNKTTGNTDKRAFVETWQSFYRKKLKEVWKPAV

SEQ ID NO: 39011 - protein, 979 aa, synthetic construct
  REGION 1..979: note = engineered CasX variant
QEIKRINKIRRRLVKDSNTKKAGKTGPMKTLLVRVMTPDLRERLENLRKKPENIPQPISNTSRANLNKLLTDYTEMKKAILHVYWEEFQKDPVGLMSRVAQPASKKIDQNKLKPEMDEKGNLTTAGFACSQCGQPLFVYKLEQVSEKGKAYTNYFGRCNVAEHEKLILLAQLKPEKDSDEAVTYSLGKFGQRALDFYSIHVTKESTHPVKPLAQIAGNRYASSPVGKALSDACMGTIASFLSKYQDIIIEHQKVVKGNQKRLESLRELAGKENLEYPSVTLPPQPHTKEGVDAYNEVIARVRMWVNLNLWQKLKLSRDDAKPLLRLKGFPSFPLVERQANEVDWWDMVCNVKKLINEKKEDGKVFWQNLAGYKRQEALRPYLSSEEDVRKKGKKFARYQLGDLLLHLEKKHGEDWGKVYDEAWERIDKKVEGLSKHIKLEEERRSEDAQSKAALTDWLRAKASFVIEGLKEADKDEFCRCELKLQKWYGDLRGKPFAIEAENSILDISGFSKQYNCAFIWQKDGVKKLNLYLIINYFKGGKLRFKKIKPEAFEANRFYTVINKKSGEIVPMEVNFNFDDPNLIILPLAFGKRQGREFIWNDLLSLETGSLKLANGRVIEKTLYNRRTRQDEPALFVALTFERREVLDSSNIKPMNLIGVDRGENIPAVIALTDPEGCPLSRFKDSLGNPTHILRIGESYKEKQRTIQAKKEVEQRRAGGYSRKYASKAKNLADDMVRNTARDLLYYAVTQDAMLIFENLSRGFGRQGKRTFMAERQYTRMEDWLTAKLAYEGLPSKTYLSKTLAQYTSKTCSNCGFTITSADYDRVLEKLKKTATGWMTTINGKELKVEGQITYYNRYKRQNVVKDLSVELDRLSEESVNNDISSWTKGRQGEALSLLKKRFSHRPVQEKFVCLNCGFETHADEQAALNIARSWLFLRSQEYKKYQTNKTTGNTDKRAFVETWQSFYRKKLKEVWKPAV

SEQ ID NO: 39012 - protein, 979 aa, synthetic construct
  REGION 1..979: note = engineered CasX variant
QEIKRINKIRRRLVKDSNTKKAGKTGPMKTLLVRVMTPDLRERLENLRKKPENIPQPISNTSRANLNKLLTDYTEMKKAILHVYWEEFQKDPVGLMSRVAQPASKKIDQNKLKPEMDEKGNLTTAGFACSQCGQPLFVYKLEQVSEKGKAYTNYFGRCNVAEHEKLILLAQLKPEKDSDEAVTYSLGKFGQRALDFYSIHVTKESTHPVKPLAQIAGNRYASTPVGKALSDACMGTIASFLSKYQDIIIEHQKVVKGNQKRLESLRELAGKENLEYPSVTLPPQPHTKEGVDAYNEVIARVRMWVNLNLWQKLKLSRDDAKPLLRLKGFPSFPLVERQANEVDWWDMVCNVKKLINEKKEDGKVFWQNLAGYKRQEALRPYLSSEEDVRKKGKKFARYQLGDLLLHLEKKHGEDWGKVYDEAWERIDKKVEGLSKHIKLEEERRSEDAQSKAALTDWLRAKASFVIEGLKEADKDEFCRCELKLQKWYGDLRGKPFAIEAENSILDISGFSKQYNCAFIWQKDGVKKLNLYLIINYFKGGKLRFKKIKPEAFEANRFYTVINKKSGEIVPMEVNFNFDDPNLIILPLAFGKRQGREFIWNDLLSLETGSLKLANGRVIEKTLYNRRTRQDEPALFVALTFERREVLDSSNIKPMNLIGVDRGENIPAVIALTDPEGCPLSRFKDSLGNPTHILRIGESYKEKQRTIQAKKEVEQRRAGGYSRKYASKAKNLADDMVRNTARDLLYYAVTQDAMLIFENLSRGFGRQGKRTFMAERQYTRMEDWLTAKLAYEGLPSKTYLSKTLAQYTSKTCSNCGFTITSADYDRVLEKLKKTATGWMTTINGKELKVEGQITYYNRYKRQNVVKDLSVELDRLSEESVNNDISSWTKGRQGEALSLLKKRFSHRPVQEKFVCLNCGFETHADEQAALNIARSWLFLRSQEYKKYQTNKTTGNTDKRAFVETWQSFYRKKLKEVWKPAV

SEQ ID NO: 39013 - protein, 979 aa, synthetic construct
  REGION 1..979: note = engineered CasX variant
QEIKRINKIRRRLVKDSNTKKAGKTGPMKTLLVRVMTPDLRERLENLRKKPENIPQPISNTSRANLNKLLTDYTEMKKAILHVYWEEFQKDPVGLMSRVAQPASKKIDQNKLKPEMDEKGNLTTAGFACSQCGQPLFVYKLEQVSEKGKAYTNYFGRCNVAEHEKLILLAQLKPEKDSDEAVTYSLGKFGQRALDFYSIHVTKESTHPVKPLAQIAGNRYASAPVGKALSDACMGTIASFLSKYQDIIIEHQKVVKGNQKRLESLRELAGKENLEYPSVTLPPQPHTKEGVDAYNEVIARVRMWVNLNLWQKLKLSRDDAKPLLRLKGFPSFPLVERQANEVDWWDMVCNVKKLINEKKEDGKVFWQNLAGYKRQEALRPYLSSEEDVRKKGKKFARYQLGDLLLHLEKKHGEDWGKVYDEAWERIDKKVEGLSKHIKLEEERRSEDAQSKAALTDWLRAKASFVIEGLKEADKDEFCRCELKLQKWYGDLRGKPFAIEAENSILDISGFSKQYNCAFIWQKDGVKKLNLYLIINYFKGGKLRFKKIKPEAFEANRFYTVINKKSGEIVPMEVNFNFDDPNLIILPLAFGKRQGREFIWNDLLSLETGSLKLANGRVIEKTLYNRRTRQDEPALFVALTFERREVLDSSNIKPMNLIGVDRGENIPAVIALTDPEGCPLSRFKDSLGNPTHILRIGESYKEKQRTIQAKKEVEQRRAGGYSRKYASKAKNLADDMVRNTARDLLYYAVTQDAMLIFENLSRGFGRQGKRTFMAERQYTRMEDWLTAKLAYEGLPSKTYLSKTLAQYTSKTCSNCGFTITSADYDRVLEKLKKTATGWMTTINGKELKVEGQITYYNRYKRQNVVKDLSVELDRLSEESVNNDISSWTKGRQGEALSLLKKRFSHRPVQEKFVCLNCGFETHADEQAALNIARSWLFLRSQEYKKYQTNKTTGNTDKRAFVETWQSFYRKKLKEVWKPAV

SEQ ID NO: 39014 - protein, 979 aa, synthetic construct
  REGION 1..979: note = engineered CasX variant
QEIKRINKIRRRLVKDSNTKKAGKTGPMKTLLVRVMTPDLRERLENLRKKPENIPQPISNTSRANLNKLLTDYTEMKKAILHVYWEEFQKDPVGLMSRVAQPASKKIDQNKLKPEMDEKGNLTTAGFACSQCGQPLFVYKLEQVSEKGKAYTNYFGRCNVAEHEKLILLAQLKPEKDSDEAVTYSLGKFGQRALDFYSIHVTKESTHPVKPLAQIAGNRYASVPVGKALSDACMGTIASFLSKYQDIIIEHQKVVKGNQKRLESLRELAGKENLEYPSVTLPPQPHTKEGVDAYNEVIARVRMWVNLNLWQKLKLSRDDAKPLLRLKGFPSFPLVERQANEVDWWDMVCNVKKLINEKKEDGKVFWQNLAGYKRQEALRPYLSSEEDVRKKGKKFARYQLGDLLLHLEKKHGEDWGKVYDEAWERIDKKVEGLSKHIKLEEERRSEDAQSKAALTDWLRAKASFVIEGLKEADKDEFCRCELKLQKWYGDLRGKPFAIEAENSILDISGFSKQYNCAFIWQKDGVKKLNLYLIINYFKGGKLRFKKIKPEAFEANRFYTVINKKSGEIVPMEVNFNFDDPNLIILPLAFGKRQGREFIWNDLLSLETGSLKLANGRVIEKTLYNRRTRQDEPALFVALTFERREVLDSSNIKPMNLIGVDRGENIPAVIALTDPEGCPLSRFKDSLGNPTHILRIGESYKEKQRTIQAKKEVEQRRAGGYSRKYASKAKNLADDMVRNTARDLLYYAVTQDAMLIFENLSRGFGRQGKRTFMAERQYTRMEDWLTAKLAYEGLPSKTYLSKTLAQYTSKTCSNCGFTITSADYDRVLEKLKKTATGWMTTINGKELKVEGQITYYNRYKRQNVVKDLSVELDRLSEESVNNDISSWTKGRQGEALSLLKKRFSHRPVQEKFVCLNCGFETHADEQAALNIARSWLFLRSQEYKKYQTNKTTGNTDKRAFVETWQSFYRKKLKEVWKPAV

SEQ ID NO: 39015 - protein, 979 aa, synthetic construct
  REGION 1..979: note = engineered CasX variant
QEIKRINKIRRRLVKDSNTKKAGKTGPMKTLLVRVMTPDLRERLENLRKKPENIPQPISNTSRANLNKLLTDYTEMKKAILHVYWEEFQKDPVGLMSRVAQPASKKIDQNKLKPEMDEKGNLTTAGFACSQCGQPLFVYKLEQVSEKGKAYTNYFGRCNVAEHEKLIKLAQLKPEKDSDEAVTYSLGKFGQRALDFYSIHVTKESTHPVKPLAQIAGNRYASGPVGKALSDACMGTIASFLSKYQDIIIEHQKVVKGNQKRLESLRELAGKENLEYPSVTLPPQPHTKEGVDAYNEVIARVRMWVNLNLWQKLKLSRDDAKPLLRLKGFPSFPLVERQANEVDWWDMVCNVKKLINEKKEDGKVFWQNLAGYKRQEALRPYLSSEEDVRKKGKKFARYQLGDLLLHLEKKHGEDWGKVYDEAWERIDKKVEGLSKHIKLEEERRSEDAQSKAALTDWLRAKASFVIEGLKEADKDEFCRCELKLQKWYGDLRGKPFAIEAENSILDISGFSKQYNCAFIWQKDGVKKLNLYLIINYFKGGKLRFKKIKPEAFEANRFYTVINKKSGEIVPMEVNFNFDDPNLIILPLAFGKRQGREFIWNDLLSLETGSLKLANGRVIEKTLYNRRTRQDEPALFVALTFERREVLDSSNIKPMNLIGVDRGENIPAVIALTDPEGCPLSRFKDSLGNPTHILRIGESYKEKQRTIQAKKEVEQRRAGGYSRKYASKAKNLADDMVRNTARDLLYYAVTQDAMLIFENLSRGFGRQGKRTFMAERQYTRMEDWLTAKLAYEGLPSKTYLSKTLAQYTSKTCSNCGFTITSADYDRVLEKLKKTATGWMTTINGKELKVEGQITYYNRYKRQNVVKDLSVELDRLSEESVNNDISSWTKGRQGEALSLLKKRFSHRPVQEKFVCLNCGFETHADEQAALNIARSWLFLRSQEYKKYQTNKTTGNTDKRAFVETWQSFYRKKLKEVWKPAV

SEQ ID NO: 39016 - protein, 978 aa, synthetic construct
  REGION 1..978: note = engineered CasX variant
QEIKRINKIRRRLVKDSNTKKAGKTGPMKTLLVRVMTPDLRERLENLRKKPENIPQPISNTSRANLNKLLTDYTEMKKAILHVYWEEFQKDPVGLMSRVAQPASKKIDQNKLKPEMDEKGNLTTAGFACSQCGQPLFVYKLEQVSEKGKAYTNYFGRCNVAEHEKLILLAQLKPEKDSDEAVTYSLGKFGQRALDFYSIHVTKESTHPVKPLAQIAGNRYASPVGKALSDACMGTIASFLSKYQDIIIEHQKVVKGNQKRLESLRELAGKENLEYPSVTLPPQPHTKEGVDAYNEVIARVRMWVNLNLWQKLKLSRDDAKPLLRLKGFPSFPLVERQANEVDWWDMVCNVKKLINEKKEDGKVFWQNLAGYKRQEALRPYLSSEEDVRKKGKKFARYQLGDLLLHLEKKHGEDWGKVYDEAWERIDKKVEGLSKHIKLEEERRSEDAQSKAALTDWLRAKASFVIEGLKEADKDEFCRCELKLQKWYGDLRGKPFAIEAENSILDISGFSKQYNCAFIWQKDGVKKLNLYLIINYFKGGKLRFKKIKPEAFEANRFYTVINKKSGEIVPMEVNFNFDDPNLIILPLAFGKRQGREFIWNDLLSLETGSLKLANGRVIEKTLYNRRTRQDEPALFVALTFERREVLDSSNIKPMNLIGVDRGENIPAVIALTDPEGCPLSRFKDSLGNPTHILRIGESYKEKQRTIQAKKEVEQRRAGGYSRKYASKAKNLADDMVRNTARDLLYYAVTQDAMLIFENLSRGFGRQGKRTFMAERQYTRMEDWLTAKLAYEGLPSKTYLSKTLAQYTSKTCSNCGFTITSADYDRVLEKLKKTATGWMTTINGKELKVEGQITYYNRYKRQNVVKDLSVELDRLSEESVNNDISSWTKGRQGEALSLLKKRFSHRPVQEKFVCLNCGFETHADEQAALNIARSWLFLRSQEYKKYQTNKTTGNTDKRAFVETWQSFYRKKLKEVWKPAV

SEQ ID NO: 39017 - protein, 979 aa, synthetic construct
  REGION 1..979: note = engineered CasX variant
QEIKRINKIRRRLVKDSNTKKAGKTGPMKTLLVRVMTPDLRERLENLRKKPENIPQPISNTSRANLNKLLTDYTEMKKAILHVYWEEFQKDPVGLMSRVAQPASKKIDQNKLKPEMDEKGNLTTAGFACSQCGQPLFVYKLEQVSEKGKAYTNYFGRCNVAEHEKLILLAQLKPEKDSDEAVTYSLGKFGQRALDFYSIHVTKESTHPVKPLAQIAGNRYASYPVGKALSDACMGTIASFLSKYQDIIIEHQKVVKGNQKRLESLRELAGKENLEYPSVTLPPQPHTKEGVDAYNEVIARVRMWVNLNLWQKLKLSRDDAKPLLRLKGFPSFPLVERQANEVDWWDMVCNVKKLINEKKEDGKVFWQNLAGYKRQEALRPYLSSEEDVRKKGKKFARYQLGDLLLHLEKKHGEDWGKVYDEAWERIDKKVEGLSKHIKLEEERRSEDAQSKAALTDWLRAKASFVIEGLKEADKDEFCRCELKLQKWYGDLRGKPFAIEAENSILDISGFSKQYNCAFIWQKDGVKKLNLYLIINYFKGGKLRFKKIKPEAFEANRFYTVINKKSGEIVPMEVNFNFDDPNLIILPLAFGKRQGREFIWNDLLSLETGSLKLANGRVIEKTLYNRRTRQDEPALFVALTFERREVLDSSNIKPMNLIGVDRGENIPAVIALTDPEGCPLSRFKDSLGNPTHILRIGESYKEKQRTIQAKKEVEQRRAGGYSRKYASKAKNLADDMVRNTARDLLYYAVTQDAMLIFENLSRGFGRQGKRTFMAERQYTRMEDWLTAKLAYEGLPSKTYLSKTLAQYTSKTCSNCGFTITSADYDRVLEKLKKTATGWMTTINGKELKVEGQITYYNRYKRQNVVKDLSVELDRLSEESVNNDISSWTKGRSGEALSLLKKRFSHRPVQEKFVCLNCEFETHADEQAALNIARSWLFLRSQEYKKYQTNKTTGNTDKRAFVETWQSFYRKKLKEVWKPAV

SEQ ID NO: 39018 - protein, 979 aa, synthetic construct
  REGION 1..979: note = engineered CasX variant
QEIKRINKIRRRLVKDSNTKKAGKTGPMKTLLVRVMTPDLRERLENLRKKPENIPQPISNTSRANLNKLLTDYTEMKKAILHVYWEEFQKDPVGLMSRVAQPASKKIDQNKLKPEMDEKGNLTTAGFACSQCGQPLFVYKLEQVSEKGKAYTNYFGRCNVAEHEKLILLAQLKPEKDSDEAVTYSLGKFGQRALDFYSIHVTKESTHPVKPLAQIAGNRYASHPVGKALSDACMGTIASFLSKYQDIIIEHQKVVKGNQKRLESLRELAGKENLEYPSVTLPPQPHTKEGVDAYNEVIARVRMWVNLNLWQKLKLSRDDAKPLLRLKGFPSFPLVERQANEVDWWDMVCNVKKLINEKKEDGKVFWQNLAGYKRQEALRPYLSSEEDVRKKGKKFARYQLGDLLLHLEKKHGEDWGKVYDEAWERIDKKVEGLSKHIKLEEERRSEDAQSKAALTDWLRAKASFVIEGLKEADKDEFCRCELKLQKWYGDLRGKPFAIEAENSILDISGFSKQYNCAFIWQKDGVKKLNLYLIINYFKGGKLRFKKIKPEAFEANRFYTVINKKSGEIVPMEVNFNFDDPNLIILPLAFGKRQGREFIWNDLLSLETGSLKLANGRVIEKTLYNRRTRQDEPALFVALTFERREVLDSSNIKPMNLIGVDRGENIPAVIALTDPEGCPLSRFKDSLGNPTHILRIGESYKEKQRTIQAKKEVEQRRAGGYSRKYASKAKNLADDMVRNTARDLLYYAVTQDAMLIFENLSRGFGRQGKRTFMAERQYTRMEDWLTAKLAYEGLPSKTYLSKTLAQYTSKTCSNCGFTITSADYDRVLEKLKKTATGWMTTINGKELKVEGQITYYNRYKRQNVVKDLSVELDRLSEESVNNDISSWTKGRSGEALSLLKKRFSHRPVQEKFVCLNCEFETHADEQAALNIARSWLFLRSQEYKKYQTNKTTGNTDKRAFVETWQSFYRKKLKEVWKPAV

SEQ ID NO: 39019 - protein, 979 aa, synthetic construct
  REGION 1..979: note = engineered CasX variant
QEIKRINKIRRRLVKDSNTKKAGKTGPMKTLLVRVMTPDLRERLENLRKKPENIPQPISNTSRANLNKLLTDYTEMKKAILHVYWEEFQKDPVGLMSRVAQPASKKIDQNKLKPEMDEKGNLTTAGFACSQCGQPLFVYKLEQVSEKGKAYTNYFGRCNVAEHEKLILLAQLKPEKDSDEAVTYSLGKFGQRALDFYSIHVTKESTHPVKPLAQIAGNRYASSPVGKALSDACMGTIASFLSKYQDIIIEHQKVVKGNQKRLESLRELAGKENLEYPSVTLPPQPHTKEGVDAYNEVIARVRMWVNLNLWQKLKLSRDDAKPLLRLKGFPSFPLVERQANEVDWWDMVCNVKKLINEKKEDGKVFWQNLAGYKRQEALRPYLSSEEDVRKKGKKFARYQLGDLLLHLEKKHGEDWGKVYDEAWERIDKKVEGLSKHIKLEEERRSEDAQSKAALTDWLRAKASFVIEGLKEADKDEFCRCELKLQKWYGDLRGKPFAIEAENSILDISGFSKQYNCAFIWQKDGVKKLNLYLIINYFKGGKLRFKKIKPEAFEANRFYTVINKKSGEIVPMEVNFNFDDPNLIILPLAFGKRQGREFIWNDLLSLETGSLKLANGRVIEKTLYNRRTRQDEPALFVALTFERREVLDSSNIKPMNLIGVDRGENIPAVIALTDPEGCPLSRFKDSLGNPTHILRIGESYKEKQRTIQAKKEVEQRRAGGYSRKYASKAKNLADDMVRNTARDLLYYAVTQDAMLIFENLSRGFGRQGKRTFMAERQYTRMEDWLTAKLAYEGLPSKTYLSKTLAQYTSKTCSNCGFTITSADYDRVLEKLKKTATGWMTTINGKELKVEGQITYYNRYKRQNVVKDLSVELDRLSEESVNNDISSWTKGRSGEALSLLKKRFSHRPVQEKFVCLNCEFETHADEQAALNIARSWLFLRSQEYKKYQTNKTTGNTDKRAFVETWQSFYRKKLKEVWKPAV

SEQ ID NO: 39020 - protein, 979 aa, synthetic construct
  REGION 1..979: note = engineered CasX variant
QEIKRINKIRRRLVKDSNTKKAGKTGPMKTLLVRVMTPDLRERLENLRKKPENIPQPISNTSRANLNKLLTDYTEMKKAILHVYWEEFQKDPVGLMSRVAQPASKKIDQNKLKPEMDEKGNLTTAGFACSQCGQPLFVYKLEQVSEKGKAYTNYFGRCNVAEHEKLILLAQLKPEKDSDEAVTYSLGKFGQRALDFYSIHVTKESTHPVKPLAQIAGNRYASTPVGKALSDACMGTIASFLSKYQDIIIEHQKVVKGNQKRLESLRELAGKENLEYPSVTLPPQPHTKEGVDAYNEVIARVRMWVNLNLWQKLKLSRDDAKPLLRLKGFPSFPLVERQANEVDWWDMVCNVKKLINEKKEDGKVFWQNLAGYKRQEALRPYLSSEEDVRKKGKKFARYQLGDLLLHLEKKHGEDWGKVYDEAWERIDKKVEGLSKHIKLEEERRSEDAQSKAALTDWLRAKASFVIEGLKEADKDEFCRCELKLQKWYGDLRGKPFAIEAENSILDISGFSKQYNCAFIWQKDGVKKLNLYLIINYFKGGKLRFKKIKPEAFEANRFYTVINKKSGEIVPMEVNFNFDDPNLIILPLAFGKRQGREFIWNDLLSLETGSLKLANGRVIEKTLYNRRTRQDEPALFVALTFERREVLDSSNIKPMNLIGVDRGENIPAVIALTDPEGCPLSRFKDSLGNPTHILRIGESYKEKQRTIQAKKEVEQRRAGGYSRKYASKAKNLADDMVRNTARDLLYYAVTQDAMLIFENLSRGFGRQGKRTFMAERQYTRMEDWLTAKLAYEGLPSKTYLSKTLAQYTSKTCSNCGFTITSADYDRVLEKLKKTATGWMTTINGKELKVEGQITYYNRYKRQNVVKDLSVELDRLSEESVNNDISSWTKGRSGEALSLLKKRFSHRPVQEKFVCLNCEFETHADEQAALNIARSWLFLRSQEYKKYQTNKTTGNTDKRAFVETWQSFYRKKLKEVWKPAV

SEQ ID NO: 39021 - protein, 979 aa, synthetic construct
  REGION 1..979: note = engineered CasX variant
QEIKRINKIRRRLVKDSNTKKAGKTGPMKTLLVRVMTPDLRERLENLRKKPENIPQPISNTSRANLNKLLTDYTEMKKAILHVYWEEFQKDPVGLMSRVAQPASKKIDQNKLKPEMDEKGNLTTAGFACSQCGQPLFVYKLEQVSEKGKAYTNYFGRCNVAEHEKLILLAQLKPEKDSDEAVTYSLGKFGQRALDFYSIHVTKESTHPVKPLAQIAGNRYASAPVGKALSDACMGTIASFLSKYQDIIIEHQKVVKGNQKRLESLRELAGKENLEYPSVTLPPQPHTKEGVDAYNEVIARVRMWVNLNLWQKLKLSRDDAKPLLRLKGFPSFPLVERQANEVDWWDMVCNVKKLINEKKEDGKVFWQNLAGYKRQEALRPYLSSEEDVRKKGKKFARYQLGDLLLHLEKKHGEDWGKVYDEAWERIDKKVEGLSKHIKLEEERRSEDAQSKAALTDWLRAKASFVIEGLKEADKDEFCRCELKLQKWYGDLRGKPFAIEAENSILDISGFSKQYNCAFIWQKDGVKKLNLYLIINYFKGGKLRFKKIKPEAFEANRFYTVINKKSGEIVPMEVNFNFDDPNLIILPLAFGKRQGREFIWNDLLSLETGSLKLANGRVIEKTLYNRRTRQDEPALFVALTFERREVLDSSNIKPMNLIGVDRGENIPAVIALTDPEGCPLSRFKDSLGNPTHILRIGESYKEKQRTIQAKKEVEQRRAGGYSRKYASKAKNLADDMVRNTARDLLYYAVTQDAMLIFENLSRGFGRQGKRTFMAERQYTRMEDWLTAKLAYEGLPSKTYLSKTLAQYTSKTCSNCGFTITSADYDRVLEKLKKTATGWMTTINGKELKVEGQITYYNRYKRQNVVKDLSVELDRLSEESVNNDISSWTKGRSGEALSLLKKRFSHRPVQEKFVCLNCEFETHADEQAALNIARSWLFLRSQEYKKYQTNKTTGNTDKRAFVETWQSFYRKKLKEVWKPAV

SEQ ID NO: 39022 - protein, 979 aa, synthetic construct
  REGION 1..979: note = engineered CasX variant
QEIKRINKIRRRLVKDSNTKKAGKTGPMKTLLVRVMTPDLRERLENLRKKPENIPQPISNTSRANLNKLLTDYTEMKKAILHVYWEEFQKDPVGLMSRVAQPASKKIDQNKLKPEMDEKGNLTTAGFACSQCGQPLFVYKLEQVSEKGKAYTNYFGRCNVAEHEKLILLAQLKPEKDSDEAVTYSLGKFGQRALDFYSIHVTKESTHPVKPLAQIAGNRYASVPVGKALSDACMGTIASFLSKYQDIIIEHQKVVKGNQKRLESLRELAGKENLEYPSVTLPPQPHTKEGVDAYNEVIARVRMWVNLNLWQKLKLSRDDAKPLLRLKGFPSFPLVERQANEVDWWDMVCNVKKLINEKKEDGKVFWQNLAGYKRQEALRPYLSSEEDVRKKGKKFARYQLGDLLLHLEKKHGEDWGKVYDEAWERIDKKVEGLSKHIKLEEERRSEDAQSKAALTDWLRAKASFVIEGLKEADKDEFCRCELKLQKWYGDLRGKPFAIEAENSILDISGFSKQYNCAFIWQKDGVKKLNLYLIINYFKGGKLRFKKIKPEAFEANRFYTVINKKSGEIVPMEVNFNFDDPNLIILPLAFGKRQGREFIWNDLLSLETGSLKLANGRVIEKTLYNRRTRQDEPALFVALTFERREVLDSSNIKPMNLIGVDRGENIPAVIALTDPEGCPLSRFKDSLGNPTHILRIGESYKEKQRTIQAKKEVEQRRAGGYSRKYASKAKNLADDMVRNTARDLLYYAVTQDAMLIFENLSRGFGRQGKRTFMAERQYTRMEDWLTAKLAYEGLPSKTYLSKTLAQYTSKTCSNCGFTITSADYDRVLEKLKKTATGWMTTINGKELKVEGQITYYNRYKRQNVVKDLSVELDRLSEESVNNDISSWTKGRSGEALSLLKKRFSHRPVQEKFVCLNCEFETHADEQAALNIARSWLFLRSQEYKKYQTNKTTGNTDKRAFVETWQSFYRKKLKEVWKPAV

SEQ ID NO: 39023 - protein, 979 aa, synthetic construct
  REGION 1..979: note = engineered CasX variant
QEIKRINKIRRRLVKDSNTKKAGKTGPMKTLLVRVMTPDLRERLENLRKKPENIPQPISNTSRANLNKLLTDYTEMKKAILHVYWEEFQKDPVGLMSRVAQPASKKIDQNKLKPEMDEKGNLTTAGFACSQCGQPLFVYKLEQVSEKGKAYTNYFGRCNVAEHEKLIKLAQLKPEKDSDEAVTYSLGKFGQRALDFYSIHVTKESTHPVKPLAQIAGNRYASGPVGKALSDACMGTIASFLSKYQDIIIEHQKVVKGNQKRLESLRELAGKENLEYPSVTLPPQPHTKEGVDAYNEVIARVRMWVNLNLWQKLKLSRDDAKPLLRLKGFPSFPLVERQANEVDWWDMVCNVKKLINEKKEDGKVFWQNLAGYKRQEALRPYLSSEEDVRKKGKKFARYQLGDLLLHLEKKHGEDWGKVYDEAWERIDKKVEGLSKHIKLEEERRSEDAQSKAALTDWLRAKASFVIEGLKEADKDEFCRCELKLQKWYGDLRGKPFAIEAENSILDISGFSKQYNCAFIWQKDGVKKLNLYLIINYFKGGKLRFKKIKPEAFEANRFYTVINKKSGEIVPMEVNFNFDDPNLIILPLAFGKRQGREFIWNDLLSLETGSLKLANGRVIEKTLYNRRTRQDEPALFVALTFERREVLDSSNIKPMNLIGVDRGENIPAVIALTDPEGCPLSRFKDSLGNPTHILRIGESYKEKQRTIQAKKEVEQRRAGGYSRKYASKAKNLADDMVRNTARDLLYYAVTQDAMLIFENLSRGFGRQGKRTFMAERQYTRMEDWLTAKLAYEGLPSKTYLSKTLAQYTSKTCSNCGFTITSADYDRVLEKLKKTATGWMTTINGKELKVEGQITYYNRYKRQNVVKDLSVELDRLSEESVNNDISSWTKGRSGEALSLLKKRFSHRPVQEKFVCLNCEFETHADEQAALNIARSWLFLRSQEYKKYQTNKTTGNTDKRAFVETWQSFYRKKLKEVWKPAV

SEQ ID NO: 39024 - protein, 978 aa, synthetic construct
  REGION 1..978: note = engineered CasX variant
QEIKRINKIRRRLVKDSNTKKAGKTGPMKTLLVRVMTPDLRERLENLRKKPENIPQPISNTSRANLNKLLTDYTEMKKAILHVYWEEFQKDPVGLMSRVAQPASKKIDQNKLKPEMDEKGNLTTAGFACSQCGQPLFVYKLEQVSEKGKAYTNYFGRCNVAEHEKLILLAQLKPEKDSDEAVTYSLGKFGQRALDFYSIHVTKESTHPVKPLAQIAGNRYASPVGKALSDACMGTIASFLSKYQDIIIEHQKVVKGNQKRLESLRELAGKENLEYPSVTLPPQPHTKEGVDAYNEVIARVRMWVNLNLWQKLKLSRDDAKPLLRLKGFPSFPLVERQANEVDWWDMVCNVKKLINEKKEDGKVFWQNLAGYKRQEALRPYLSSEEDVRKKGKKFARYQLGDLLLHLEKKHGEDWGKVYDEAWERIDKKVEGLSKHIKLEEERRSEDAQSKAALTDWLRAKASFVIEGLKEADKDEFCRCELKLQKWYGDLRGKPFAIEAENSILDISGFSKQYNCAFIWQKDGVKKLNLYLIINYFKGGKLRFKKIKPEAFEANRFYTVINKKSGEIVPMEVNFNFDDPNLIILPLAFGKRQGREFIWNDLLSLETGSLKLANGRVIEKTLYNRRTRQDEPALFVALTFERREVLDSSNIKPMNLIGVDRGENIPAVIALTDPEGCPLSRFKDSLGNPTHILRIGESYKEKQRTIQAKKEVEQRRAGGYSRKYASKAKNLADDMVRNTARDLLYYAVTQDAMLIFENLSRGFGRQGKRTFMAERQYTRMEDWLTAKLAYEGLPSKTYLSKTLAQYTSKTCSNCGFTITSADYDRVLEKLKKTATGWMTTINGKELKVEGQITYYNRYKRQNVVKDLSVELDRLSEESVNNDISSWTKGRSGEALSLLKKRFSHRPVQEKFVCLNCEFETHADEQAALNIARSWLFLRSQEYKKYQTNKTTGNTDKRAFVETWQSFYRKKLKEVWKPAV

SEQ ID NO: 39025 - protein, 980 aa, synthetic construct
  REGION 1..980: note = engineered CasX variant
QEIKRINKIRRRLVKDSNTKKAGKTGPMKTLLVRVMTPDLRERLENLRKKPENIPQPISNTSRANLNKLLTDYTEMKKAILHVYWEEFQKDPVGLMSRVAQPASKKIDQNKLKPEMDEKGNLTTAGFACSQCGQPLFVYKLEQVSEKGKAYTNYFGRCNVAEHEKLILLAQLKPEKDSDEAVTYSLGKFGQRALDFYSIHVTKESTHPVKPLAQIAGNRYASYPVGKALSDACMGTIASFLSKYQDIIIEHQKVVKGNQKRLESLRELAGKENLEYPSVTLPPQPHTKEGVDAYNEVIARVRMWVNLNLWQKLKLSRDDAKPLLRLKGFPSFPLVERQANEVDWWDMVCNVKKLINEKKEDGKVFWQNLAGYKRQEALRPYLSSEEDVRKKGKKFARYQLGDLLLHLEKKHGEDWGKVYDEAWERIDKKVEGLSKHIKLEEERRSEDAQSKAALTDWLRAKASFVIEGLKEADKDEFCRCELKLQKWYGDLRGKPFAIEAENSILDISGFSKQYNCAFIWQKDGVKKLNLYLIINYFKGGKLRFKKIKPEAFEANRFYTVINKKSGEIVPMEVNFNFDDPNLIILPLAFGKRQGREFIWNDLLSLETGSLKLANGRVIEKTLYNRRTRQDEPALFVALTFERREVLDSSNIKPMNLIGVDRGENIPAVIALTDPEGCPLSRFKDSLGNPTHILRIGESYKEKQRTIQAKKEVEQRRAGGYSRKYASKAKNLADDMVRNTARDLLYYAVTQDAMLIFENLSRGFGRQGKRTFMAERQYTRMEDWLTAKLAYEGLPSKTYLSKTLAQYTSKTCSNCGFTITSADYDRVLEKLKKTATGWMTTINGKELKVEGQITYYNRYKRQNVVKDLSVELDRLSEESVNNDISSWTKGRSGEALSLLKKRFSHRPVQEKFVCLNCGFETHADEQAALNIARSWLFLRSQEYKKYQTNKTSTGNTDKRAFVETWQSFYRKKLKEVWKPAV

SEQ ID NO: 39026 - protein, 980 aa, synthetic construct
  REGION 1..980: note = engineered CasX variant
QEIKRINKIRRRLVKDSNTKKAGKTGPMKTLLVRVMTPDLRERLENLRKKPENIPQPISNTSRANLNKLLTDYTEMKKAILHVYWEEFQKDPVGLMSRVAQPASKKIDQNKLKPEMDEKGNLTTAGFACSQCGQPLFVYKLEQVSEKGKAYTNYFGRCNVAEHEKLILLAQLKPEKDSDEAVTYSLGKFGQRALDFYSIHVTKESTHPVKPLAQIAGNRYASHPVGKALSDACMGTIASFLSKYQDIIIEHQKVVKGNQKRLESLRELAGKENLEYPSVTLPPQPHTKEGVDAYNEVIARVRMWVNLNLWQKLKLSRDDAKPLLRLKGFPSFPLVERQANEVDWWDMVCNVKKLINEKKEDGKVFWQNLAGYKRQEALRPYLSSEEDVRKKGKKFARYQLGDLLLHLEKKHGEDWGKVYDEAWERIDKKVEGLSKHIKLEEERRSEDAQSKAALTDWLRAKASFVIEGLKEADKDEFCRCELKLQKWYGDLRGKPFAIEAENSILDISGFSKQYNCAFIWQKDGVKKLNLYLIINYFKGGKLRFKKIKPEAFEANRFYTVINKKSGEIVPMEVNFNFDDPNLIILPLAFGKRQGREFIWNDLLSLETGSLKLANGRVIEKTLYNRRTRQDEPALFVALTFERREVLDSSNIKPMNLIGVDRGENIPAVIALTDPEGCPLSRFKDSLGNPTHILRIGESYKEKQRTIQAKKEVEQRRAGGYSRKYASKAKNLADDMVRNTARDLLYYAVTQDAMLIFENLSRGFGRQGKRTFMAERQYTRMEDWLTAKLAYEGLPSKTYLSKTLAQYTSKTCSNCGFTITSADYDRVLEKLKKTATGWMTTINGKELKVEGQITYYNRYKRQNVVKDLSVELDRLSEESVNNDISSWTKGRSGEALSLLKKRFSHRPVQEKFVCLNCGFETHADEQAALNIARSWLFLRSQEYKKYQTNKTSTGNTDKRAFVETWQSFYRKKLKEVWKPAV

SEQ ID NO: 39027 - protein, 980 aa, synthetic construct
  REGION 1..980: note = engineered CasX variant
QEIKRINKIRRRLVKDSNTKKAGKTGPMKTLLVRVMTPDLRERLENLRKKPENIPQPISNTSRANLNKLLTDYTEMKKAILHVYWEEFQKDPVGLMSRVAQPASKKIDQNKLKPEMDEKGNLTTAGFACSQCGQPLFVYKLEQVSEKGKAYTNYFGRCNVAEHEKLILLAQLKPEKDSDEAVTYSLGKFGQRALDFYSIHVTKESTHPVKPLAQIAGNRYASSPVGKALSDACMGTIASFLSKYQDIIIEHQKVVKGNQKRLESLRELAGKENLEYPSVTLPPQPHTKEGVDAYNEVIARVRMWVNLNLWQKLKLSRDDAKPLLRLKGFPSFPLVERQANEVDWWDMVCNVKKLINEKKEDGKVFWQNLAGYKRQEALRPYLSSEEDVRKKGKKFARYQLGDLLLHLEKKHGEDWGKVYDEAWERIDKKVEGLSKHIKLEEERRSEDAQSKAALTDWLRAKASFVIEGLKEADKDEFCRCELKLQKWYGDLRGKPFAIEAENSILDISGFSKQYNCAFIWQKDGVKKLNLYLIINYFKGGKLRFKKIKPEAFEANRFYTVINKKSGEIVPMEVNFNFDDPNLIILPLAFGKRQGREFIWNDLLSLETGSLKLANGRVIEKTLYNRRTRQDEPALFVALTFERREVLDSSNIKPMNLIGVDRGENIPAVIALTDPEGCPLSRFKDSLGNPTHILRIGESYKEKQRTIQAKKEVEQRRAGGYSRKYASKAKNLADDMVRNTARDLLYYAVTQDAMLIFENLSRGFGRQGKRTFMAERQYTRMEDWLTAKLAYEGLPSKTYLSKTLAQYTSKTCSNCGFTITSADYDRVLEKLKKTATGWMTTINGKELKVEGQITYYNRYKRQNVVKDLSVELDRLSEESVNNDISSWTKGRSGEALSLLKKRFSHRPVQEKFVCLNCGFETHADEQAALNIARSWLFLRSQEYKKYQTNKTSTGNTDKRAFVETWQSFYRKKLKEVWKPAV

SEQ ID NO: 39028 - protein, 980 aa, synthetic construct
  REGION 1..980: note = engineered CasX variant
QEIKRINKIRRRLVKDSNTKKAGKTGPMKTLLVRVMTPDLRERLENLRKKPENIPQPISNTSRANLNKLLTDYTEMKKAILHVYWEEFQKDPVGLMSRVAQPASKKIDQNKLKPEMDEKGNLTTAGFACSQCGQPLFVYKLEQVSEKGKAYTNYFGRCNVAEHEKLILLAQLKPEKDSDEAVTYSLGKFGQRALDFYSIHVTKESTHPVKPLAQIAGNRYASTPVGKALSDACMGTIASFLSKYQDIIIEHQKVVKGNQKRLESLRELAGKENLEYPSVTLPPQPHTKEGVDAYNEVIARVRMWVNLNLWQKLKLSRDDAKPLLRLKGFPSFPLVERQANEVDWWDMVCNVKKLINEKKEDGKVFWQNLAGYKRQEALRPYLSSEEDVRKKGKKFARYQLGDLLLHLEKKHGEDWGKVYDEAWERIDKKVEGLSKHIKLEEERRSEDAQSKAALTDWLRAKASFVIEGLKEADKDEFCRCELKLQKWYGDLRGKPFAIEAENSILDISGFSKQYNCAFIWQKDGVKKLNLYLIINYFKGGKLRFKKIKPEAFEANRFYTVINKKSGEIVPMEVNFNFDDPNLIILPLAFGKRQGREFIWNDLLSLETGSLKLANGRVIEKTLYNRRTRQDEPALFVALTFERREVLDSSNIKPMNLIGVDRGENIPAVIALTDPEGCPLSRFKDSLGNPTHILRIGESYKEKQRTIQAKKEVEQRRAGGYSRKYASKAKNLADDMVRNTARDLLYYAVTQDAMLIFENLSRGFGRQGKRTFMAERQYTRMEDWLTAKLAYEGLPSKTYLSKTLAQYTSKTCSNCGFTITSADYDRVLEKLKKTATGWMTTINGKELKVEGQITYYNRYKRQNVVKDLSVELDRLSEESVNNDISSWTKGRSGEALSLLKKRFSHRPVQEKFVCLNCGFETHADEQAALNIARSWLFLRSQEYKKYQTNKTSTGNTDKRAFVETWQSFYRKKLKEVWKPAV

SEQ ID NO: 39029 - protein, 980 aa, synthetic construct
  REGION 1..980: note = engineered CasX variant
QEIKRINKIRRRLVKDSNTKKAGKTGPMKTLLVRVMTPDLRERLENLRKKPENIPQPISNTSRANLNKLLTDYTEMKKAILHVYWEEFQKDPVGLMSRVAQPASKKIDQNKLKPEMDEKGNLTTAGFACSQCGQPLFVYKLEQVSEKGKAYTNYFGRCNVAEHEKLILLAQLKPEKDSDEAVTYSLGKFGQRALDFYSIHVTKESTHPVKPLAQIAGNRYASAPVGKALSDACMGTIASFLSKYQDIIIEHQKVVKGNQKRLESLRELAGKENLEYPSVTLPPQPHTKEGVDAYNEVIARVRMWVNLNLWQKLKLSRDDAKPLLRLKGFPSFPLVERQANEVDWWDMVCNVKKLINEKKEDGKVFWQNLAGYKRQEALRPYLSSEEDVRKKGKKFARYQLGDLLLHLEKKHGEDWGKVYDEAWERIDKKVEGLSKHIKLEEERRSEDAQSKAALTDWLRAKASFVIEGLKEADKDEFCRCELKLQKWYGDLRGKPFAIEAENSILDISGFSKQYNCAFIWQKDGVKKLNLYLIINYFKGGKLRFKKIKPEAFEANRFYTVINKKSGEIVPMEVNFNFDDPNLIILPLAFGKRQGREFIWNDLLSLETGSLKLANGRVIEKTLYNRRTRQDEPALFVALTFERREVLDSSNIKPMNLIGVDRGENIPAVIALTDPEGCPLSRFKDSLGNPTHILRIGESYKEKQRTIQAKKEVEQRRAGGYSRKYASKAKNLADDMVRNTARDLLYYAVTQDAMLIFENLSRGFGRQGKRTFMAERQYTRMEDWLTAKLAYEGLPSKTYLSKTLAQYTSKTCSNCGFTITSADYDRVLEKLKKTATGWMTTINGKELKVEGQITYYNRYKRQNVVKDLSVELDRLSEESVNNDISSWTKGRSGEALSLLKKRFSHRPVQEKFVCLNCGFETHADEQAALNIARSWLFLRSQEYKKYQTNKTSTGNTDKRAFVETWQSFYRKKLKEVWKPAV

SEQ ID NO: 39030 - protein, 980 aa, synthetic construct
  REGION 1..980: note = engineered CasX variant
QEIKRINKIRRRLVKDSNTKKAGKTGPMKTLLVRVMTPDLRERLENLRKKPENIPQPISNTSRANLNKLLTDYTEMKKAILHVYWEEFQKDPVGLMSRVAQPASKKIDQNKLKPEMDEKGNLTTAGFACSQCGQPLFVYKLEQVSEKGKAYTNYFGRCNVAEHEKLILLAQLKPEKDSDEAVTYSLGKFGQRALDFYSIHVTKESTHPVKPLAQIAGNRYASVPVGKALSDACMGTIASFLSKYQDIIIEHQKVVKGNQKRLESLRELAGKENLEYPSVTLPPQPHTKEGVDAYNEVIARVRMWVNLNLWQKLKLSRDDAKPLLRLKGFPSFPLVERQANEVDWWDMVCNVKKLINEKKEDGKVFWQNLAGYKRQEALRPYLSSEEDVRKKGKKFARYQLGDLLLHLEKKHGEDWGKVYDEAWERIDKKVEGLSKHIKLEEERRSEDAQSKAALTDWLRAKASFVIEGLKEADKDEFCRCELKLQKWYGDLRGKPFAIEAENSILDISGFSKQYNCAFIWQKDGVKKLNLYLIINYFKGGKLRFKKIKPEAFEANRFYTVINKKSGEIVPMEVNFNFDDPNLIILPLAFGKRQGREFIWNDLLSLETGSLKLANGRVIEKTLYNRRTRQDEPALFVALTFERREVLDSSNIKPMNLIGVDRGENIPAVIALTDPEGCPLSRFKDSLGNPTHILRIGESYKEKQRTIQAKKEVEQRRAGGYSRKYASKAKNLADDMVRNTARDLLYYAVTQDAMLIFENLSRGFGRQGKRTFMAERQYTRMEDWLTAKLAYEGLPSKTYLSKTLAQYTSKTCSNCGFTITSADYDRVLEKLKKTATGWMTTINGKELKVEGQITYYNRYKRQNVVKDLSVELDRLSEESVNNDISSWTKGRSGEALSLLKKRFSHRPVQEKFVCLNCGFETHADEQAALNIARSWLFLRSQEYKKYQTNKTSTGNTDKRAFVETWQSFYRKKLKEVWKPAV

SEQ ID NO: 39031 - protein, 980 aa, synthetic construct
  REGION 1..980: note = engineered CasX variant
QEIKRINKIRRRLVKDSNTKKAGKTGPMKTLLVRVMTPDLRERLENLRKKPENIPQPISNTSRANLNKLLTDYTEMKKAILHVYWEEFQKDPVGLMSRVAQPASKKIDQNKLKPEMDEKGNLTTAGFACSQCGQPLFVYKLEQVSEKGKAYTNYFGRCNVAEHEKLIKLAQLKPEKDSDEAVTYSLGKFGQRALDFYSIHVTKESTHPVKPLAQIAGNRYASGPVGKALSDACMGTIASFLSKYQDIIIEHQKVVKGNQKRLESLRELAGKENLEYPSVTLPPQPHTKEGVDAYNEVIARVRMWVNLNLWQKLKLSRDDAKPLLRLKGFPSFPLVERQANEVDWWDMVCNVKKLINEKKEDGKVFWQNLAGYKRQEALRPYLSSEEDVRKKGKKFARYQLGDLLLHLEKKHGEDWGKVYDEAWERIDKKVEGLSKHIKLEEERRSEDAQSKAALTDWLRAKASFVIEGLKEADKDEFCRCELKLQKWYGDLRGKPFAIEAENSILDISGFSKQYNCAFIWQKDGVKKLNLYLIINYFKGGKLRFKKIKPEAFEANRFYTVINKKSGEIVPMEVNFNFDDPNLIILPLAFGKRQGREFIWNDLLSLETGSLKLANGRVIEKTLYNRRTRQDEPALFVALTFERREVLDSSNIKPMNLIGVDRGENIPAVIALTDPEGCPLSRFKDSLGNPTHILRIGESYKEKQRTIQAKKEVEQRRAGGYSRKYASKAKNLADDMVRNTARDLLYYAVTQDAMLIFENLSRGFGRQGKRTFMAERQYTRMEDWLTAKLAYEGLPSKTYLSKTLAQYTSKTCSNCGFTITSADYDRVLEKLKKTATGWMTTINGKELKVEGQITYYNRYKRQNVVKDLSVELDRLSEESVNNDISSWTKGRSGEALSLLKKRFSHRPVQEKFVCLNCGFETHADEQAALNIARSWLFLRSQEYKKYQTNKTSTGNTDKRAFVETWQSFYRKKLKEVWKPAV

SEQ ID NO: 39032 - protein, 979 aa, synthetic construct
  REGION 1..979: note = engineered CasX variant
QEIKRINKIRRRLVKDSNTKKAGKTGPMKTLLVRVMTPDLRERLENLRKKPENIPQPISNTSRANLNKLLTDYTEMKKAILHVYWEEFQKDPVGLMSRVAQPASKKIDQNKLKPEMDEKGNLTTAGFACSQCGQPLFVYKLEQVSEKGKAYTNYFGRCNVAEHEKLILLAQLKPEKDSDEAVTYSLGKFGQRALDFYSIHVTKESTHPVKPLAQIAGNRYASPVGKALSDACMGTIASFLSKYQDIIIEHQKVVKGNQKRLESLRELAGKENLEYPSVTLPPQPHTKEGVDAYNEVIARVRMWVNLNLWQKLKLSRDDAKPLLRLKGFPSFPLVERQANEVDWWDMVCNVKKLINEKKEDGKVFWQNLAGYKRQEALRPYLSSEEDVRKKGKKFARYQLGDLLLHLEKKHGEDWGKVYDEAWERIDKKVEGLSKHIKLEEERRSEDAQSKAALTDWLRAKASFVIEGLKEADKDEFCRCELKLQKWYGDLRGKPFAIEAENSILDISGFSKQYNCAFIWQKDGVKKLNLYLIINYFKGGKLRFKKIKPEAFEANRFYTVINKKSGEIVPMEVNFNFDDPNLIILPLAFGKRQGREFIWNDLLSLETGSLKLANGRVIEKTLYNRRTRQDEPALFVALTFERREVLDSSNIKPMNLIGVDRGENIPAVIALTDPEGCPLSRFKDSLGNPTHILRIGESYKEKQRTIQAKKEVEQRRAGGYSRKYASKAKNLADDMVRNTARDLLYYAVTQDAMLIFENLSRGFGRQGKRTFMAERQYTRMEDWLTAKLAYEGLPSKTYLSKTLAQYTSKTCSNCGFTITSADYDRVLEKLKKTATGWMTTINGKELKVEGQITYYNRYKRQNVVKDLSVELDRLSEESVNNDISSWTKGRSGEALSLLKKRFSHRPVQEKFVCLNCGFETHADEQAALNIARSWLFLRSQEYKKYQTNKTSTGNTDKRAFVETWQSFYRKKLKEVWKPAV

SEQ ID NO: 39033 - protein, 980 aa, synthetic construct
  REGION 1..980: note = engineered CasX variant
QEIKRINKIRRRLVKDSNTKKAGKTGPMKTLLVRVMTPDLRERLENLRKKPENIPQPISNTSRANLNKLLTDYTEMKKAILHVYWEEFQKDPVGLMSRVAQPASKKIDQNKLKPEMDEKGNLTTAGFACSQCGQPLFVYKLEQVSEKGKAYTNYFGRCNVAEHEKLILLAQLKPEKDSDEAVTYSLGKFGQRALDFYSIHVTKESTHPVKPLAQIAGNRYASYPVGKALSDACMGTIASFLSKYQDIIIEHQKVVKGNQKRLESLRELAGKENLEYPSVTLPPQPHTKEGVDAYNEVIARVRMWVNLNLWQKLKLSRDDAKPLLRLKGFPSFPLVERQANEVDWWDMVCNVKKLINEKKEDGKVFWQNLAGYKRQEALRPYLSSEEDVRKKGKKFARYQLGDLLLHLEKKHGEDWGKVYDEAWERIDKKVEGLSKHIKLEEERRSEDAQSKAALTDWLRAKASFVIEGLKEADKDEFCRCELKLQKWYGDLRGKPFAIEAENSILDISGFSKQYNCAFIWQKDGVKKLNLYLIINYFKGGKLRFKKIKPEAFEANRFYTVINKKSGEIVPMEVNFNFDDPNLIILPLAFGKRQGREFIWNDLLSLETGSLKLANGRVIEKTLYNRRTRQDEPALFVALTFERREVLDSSNIKPMNLIGVDRGENIPAVIALTDPEGCPLSRFKDSLGNPTHILRIGESYKEKQRTIQAKKEVEQRRAGGYSRKYASKAKNLADDMVRNTARDLLYYAVTQDAMLIFENLSRGFGRQGKRTFMAERQYTRMEDWLTAKLAYEGLPSKTYLSKTLAQYTSKTCSNCGFTITSADYDRVLEKLKKTATGWMTTINGKELKVEGQITYYNRYKRQNVVKDLSVELDRLSEESVNNDISSWTKGRSGEALSLLKKRFSHRPVQEKFVCLNCGFETHADEQAALNIARSWLFLRSQEYKKYQTNKTTGKNTDKRAFVETWQSFYRKKLKEVWKPAV

SEQ ID NO: 39034 - protein, 980 aa, synthetic construct
  REGION 1..980: note = engineered CasX variant
QEIKRINKIRRRLVKDSNTKKAGKTGPMKTLLVRVMTPDLRERLENLRKKPENIPQPISNTSRANLNKLLTDYTEMKKAILHVYWEEFQKDPVGLMSRVAQPASKKIDQNKLKPEMDEKGNLTTAGFACSQCGQPLFVYKLEQVSEKGKAYTNYFGRCNVAEHEKLILLAQLKPEKDSDEAVTYSLGKFGQRALDFYSIHVTKESTHPVKPLAQIAGNRYASHPVGKALSDACMGTIASFLSKYQDIIIEHQKVVKGNQKRLESLRELAGKENLEYPSVTLPPQPHTKEGVDAYNEVIARVRMWVNLNLWQKLKLSRDDAKPLLRLKGFPSFPLVERQANEVDWWDMVCNVKKLINEKKEDGKVFWQNLAGYKRQEALRPYLSSEEDVRKKGKKFARYQLGDLLLHLEKKHGEDWGKVYDEAWERIDKKVEGLSKHIKLEEERRSEDAQSKAALTDWLRAKASFVIEGLKEADKDEFCRCELKLQKWYGDLRGKPFAIEAENSILDISGFSKQYNCAFIWQKDGVKKLNLYLIINYFKGGKLRFKKIKPEAFEANRFYTVINKKSGEIVPMEVNFNFDDPNLIILPLAFGKRQGREFIWNDLLSLETGSLKLANGRVIEKTLYNRRTRQDEPALFVALTFERREVLDSSNIKPMNLIGVDRGENIPAVIALTDPEGCPLSRFKDSLGNPTHILRIGESYKEKQRTIQAKKEVEQRRAGGYSRKYASKAKNLADDMVRNTARDLLYYAVTQDAMLIFENLSRGFGRQGKRTFMAERQYTRMEDWLTAKLAYEGLPSKTYLSKTLAQYTSKTCSNCGFTITSADYDRVLEKLKKTATGWMTTINGKELKVEGQITYYNRYKRQNVVKDLSVELDRLSEESVNNDISSWTKGRSGEALSLLKKRFSHRPVQEKFVCLNCGFETHADEQAALNIARSWLFLRSQEYKKYQTNKTTGKNTDKRAFVETWQSFYRKKLKEVWKPAV

SEQ ID NO: 39035 - protein, 980 aa, synthetic construct
  REGION 1..980: note = engineered CasX variant
QEIKRINKIRRRLVKDSNTKKAGKTGPMKTLLVRVMTPDLRERLENLRKKPENIPQPISNTSRANLNKLLTDYTEMKKAILHVYWEEFQKDPVGLMSRVAQPASKKIDQNKLKPEMDEKGNLTTAGFACSQCGQPLFVYKLEQVSEKGKAYTNYFGRCNVAEHEKLILLAQLKPEKDSDEAVTYSLGKFGQRALDFYSIHVTKESTHPVKPLAQIAGNRYASSPVGKALSDACMGTIASFLSKYQDIIIEHQKVVKGNQKRLESLRELAGKENLEYPSVTLPPQPHTKEGVDAYNEVIARVRMWVNLNLWQKLKLSRDDAKPLLRLKGFPSFPLVERQANEVDWWDMVCNVKKLINEKKEDGKVFWQNLAGYKRQEALRPYLSSEEDVRKKGKKFARYQLGDLLLHLEKKHGEDWGKVYDEAWERIDKKVEGLSKHIKLEEERRSEDAQSKAALTDWLRAKASFVIEGLKEADKDEFCRCELKLQKWYGDLRGKPFAIEAENSILDISGFSKQYNCAFIWQKDGVKKLNLYLIINYFKGGKLRFKKIKPEAFEANRFYTVINKKSGEIVPMEVNFNFDDPNLIILPLAFGKRQGREFIWNDLLSLETGSLKLANGRVIEKTLYNRRTRQDEPALFVALTFERREVLDSSNIKPMNLIGVDRGENIPAVIALTDPEGCPLSRFKDSLGNPTHILRIGESYKEKQRTIQAKKEVEQRRAGGYSRKYASKAKNLADDMVRNTARDLLYYAVTQDAMLIFENLSRGFGRQGKRTFMAERQYTRMEDWLTAKLAYEGLPSKTYLSKTLAQYTSKTCSNCGFTITSADYDRVLEKLKKTATGWMTTINGKELKVEGQITYYNRYKRQNVVKDLSVELDRLSEESVNNDISSWTKGRSGEALSLLKKRFSHRPVQEKFVCLNCGFETHADEQAALNIARSWLFLRSQEYKKYQTNKTTGKNTDKRAFVETWQSFYRKKLKEVWKPAV

SEQ ID NO: 39036 - protein, 980 aa, synthetic construct
  REGION 1..980: note = engineered CasX variant
QEIKRINKIRRRLVKDSNTKKAGKTGPMKTLLVRVMTPDLRERLENLRKKPENIPQPISNTSRANLNKLLTDYTEMKKAILHVYWEEFQKDPVGLMSRVAQPASKKIDQNKLKPEMDEKGNLTTAGFACSQCGQPLFVYKLEQVSEKGKAYTNYFGRCNVAEHEKLILLAQLKPEKDSDEAVTYSLGKFGQRALDFYSIHVTKESTHPVKPLAQIAGNRYASTPVGKALSDACMGTIASFLSKYQDIIIEHQKVVKGNQKRLESLRELAGKENLEYPSVTLPPQPHTKEGVDAYNEVIARVRMWVNLNLWQKLKLSRDDAKPLLRLKGFPSFPLVERQANEVDWWDMVCNVKKLINEKKEDGKVFWQNLAGYKRQEALRPYLSSEEDVRKKGKKFARYQLGDLLLHLEKKHGEDWGKVYDEAWERIDKKVEGLSKHIKLEEERRSEDAQSKAALTDWLRAKASFVIEGLKEADKDEFCRCELKLQKWYGDLRGKPFAIEAENSILDISGFSKQYNCAFIWQKDGVKKLNLYLIINYFKGGKLRFKKIKPEAFEANRFYTVINKKSGEIVPMEVNFNFDDPNLIILPLAFGKRQGREFIWNDLLSLETGSLKLANGRVIEKTLYNRRTRQDEPALFVALTFERREVLDSSNIKPMNLIGVDRGENIPAVIALTDPEGCPLSRFKDSLGNPTHILRIGESYKEKQRTIQAKKEVEQRRAGGYSRKYASKAKNLADDMVRNTARDLLYYAVTQDAMLIFENLSRGFGRQGKRTFMAERQYTRMEDWLTAKLAYEGLPSKTYLSKTLAQYTSKTCSNCGFTITSADYDRVLEKLKKTATGWMTTINGKELKVEGQITYYNRYKRQNVVKDLSVELDRLSEESVNNDISSWTKGRSGEALSLLKKRFSHRPVQEKFVCLNCGFETHADEQAALNIARSWLFLRSQEYKKYQTNKTTGKNTDKRAFVETWQSFYRKKLKEVWKPAV

SEQ ID NO: 39037 - protein, 980 aa, synthetic construct
  REGION 1..980: note = engineered CasX variant
QEIKRINKIRRRLVKDSNTKKAGKTGPMKTLLVRVMTPDLRERLENLRKKPENIPQPISNTSRANLNKLLTDYTEMKKAILHVYWEEFQKDPVGLMSRVAQPASKKIDQNKLKPEMDEKGNLTTAGFACSQCGQPLFVYKLEQVSEKGKAYTNYFGRCNVAEHEKLILLAQLKPEKDSDEAVTYSLGKFGQRALDFYSIHVTKESTHPVKPLAQIAGNRYASAPVGKALSDACMGTIASFLSKYQDIIIEHQKVVKGNQKRLESLRELAGKENLEYPSVTLPPQPHTKEGVDAYNEVIARVRMWVNLNLWQKLKLSRDDAKPLLRLKGFPSFPLVERQANEVDWWDMVCNVKKLINEKKEDGKVFWQNLAGYKRQEALRPYLSSEEDVRKKGKKFARYQLGDLLLHLEKKHGEDWGKVYDEAWERIDKKVEGLSKHIKLEEERRSEDAQSKAALTDWLRAKASFVIEGLKEADKDEFCRCELKLQKWYGDLRGKPFAIEAENSILDISGFSKQYNCAFIWQKDGVKKLNLYLIINYFKGGKLRFKKIKPEAFEANRFYTVINKKSGEIVPMEVNFNFDDPNLIILPLAFGKRQGREFIWNDLLSLETGSLKLANGRVIEKTLYNRRTRQDEPALFVALTFERREVLDSSNIKPMNLIGVDRGENIPAVIALTDPEGCPLSRFKDSLGNPTHILRIGESYKEKQRTIQAKKEVEQRRAGGYSRKYASKAKNLADDMVRNTARDLLYYAVTQDAMLIFENLSRGFGRQGKRTFMAERQYTRMEDWLTAKLAYEGLPSKTYLSKTLAQYTSKTCSNCGFTITSADYDRVLEKLKKTATGWMTTINGKELKVEGQITYYNRYKRQNVVKDLSVELDRLSEESVNNDISSWTKGRSGEALSLLKKRFSHRPVQEKFVCLNCGFETHADEQAALNIARSWLFLRSQEYKKYQTNKTTGKNTDKRAFVETWQSFYRKKLKEVWKPAV

SEQ ID NO: 39038 - protein, 980 aa, synthetic construct
  REGION 1..980: note = engineered CasX variant
QEIKRINKIRRRLVKDSNTKKAGKTGPMKTLLVRVMTPDLRERLENLRKKPENIPQPISNTSRANLNKLLTDYTEMKKAILHVYWEEFQKDPVGLMSRVAQPASKKIDQNKLKPEMDEKGNLTTAGFACSQCGQPLFVYKLEQVSEKGKAYTNYFGRCNVAEHEKLILLAQLKPEKDSDEAVTYSLGKFGQRALDFYSIHVTKESTHPVKPLAQIAGNRYASVPVGKALSDACMGTIASFLSKYQDIIIEHQKVVKGNQKRLESLRELAGKENLEYPSVTLPPQPHTKEGVDAYNEVIARVRMWVNLNLWQKLKLSRDDAKPLLRLKGFPSFPLVERQANEVDWWDMVCNVKKLINEKKEDGKVFWQNLAGYKRQEALRPYLSSEEDVRKKGKKFARYQLGDLLLHLEKKHGEDWGKVYDEAWERIDKKVEGLSKHIKLEEERRSEDAQSKAALTDWLRAKASFVIEGLKEADKDEFCRCELKLQKWYGDLRGKPFAIEAENSILDISGFSKQYNCAFIWQKDGVKKLNLYLIINYFKGGKLRFKKIKPEAFEANRFYTVINKKSGEIVPMEVNFNFDDPNLIILPLAFGKRQGREFIWNDLLSLETGSLKLANGRVIEKTLYNRRTRQDEPALFVALTFERREVLDSSNIKPMNLIGVDRGENIPAVIALTDPEGCPLSRFKDSLGNPTHILRIGESYKEKQRTIQAKKEVEQRRAGGYSRKYASKAKNLADDMVRNTARDLLYYAVTQDAMLIFENLSRGFGRQGKRTFMAERQYTRMEDWLTAKLAYEGLPSKTYLSKTLAQYTSKTCSNCGFTITSADYDRVLEKLKKTATGWMTTINGKELKVEGQITYYNRYKRQNVVKDLSVELDRLSEESVNNDISSWTKGRSGEALSLLKKRFSHRPVQEKFVCLNCGFETHADEQAALNIARSWLFLRSQEYKKYQTNKTTGKNTDKRAFVETWQSFYRKKLKEVWKPAV

SEQ ID NO: 39039 - protein, 980 aa, synthetic construct
  REGION 1..980: note = engineered CasX variant
QEIKRINKIRRRLVKDSNTKKAGKTGPMKTLLVRVMTPDLRERLENLRKKPENIPQPISNTSRANLNKLLTDYTEMKKAILHVYWEEFQKDPVGLMSRVAQPASKKIDQNKLKPEMDEKGNLTTAGFACSQCGQPLFVYKLEQVSEKGKAYTNYFGRCNVAEHEKLIKLAQLKPEKDSDEAVTYSLGKFGQRALDFYSIHVTKESTHPVKPLAQIAGNRYASGPVGKALSDACMGTIASFLSKYQDIIIEHQKVVKGNQKRLESLRELAGKENLEYPSVTLPPQPHTKEGVDAYNEVIARVRMWVNLNLWQKLKLSRDDAKPLLRLKGFPSFPLVERQANEVDWWDMVCNVKKLINEKKEDGKVFWQNLAGYKRQEALRPYLSSEEDVRKKGKKFARYQLGDLLLHLEKKHGEDWGKVYDEAWERIDKKVEGLSKHIKLEEERRSEDAQSKAALTDWLRAKASFVIEGLKEADKDEFCRCELKLQKWYGDLRGKPFAIEAENSILDISGFSKQYNCAFIWQKDGVKKLNLYLIINYFKGGKLRFKKIKPEAFEANRFYTVINKKSGEIVPMEVNFNFDDPNLIILPLAFGKRQGREFIWNDLLSLETGSLKLANGRVIEKTLYNRRTRQDEPALFVALTFERREVLDSSNIKPMNLIGVDRGENIPAVIALTDPEGCPLSRFKDSLGNPTHILRIGESYKEKQRTIQAKKEVEQRRAGGYSRKYASKAKNLADDMVRNTARDLLYYAVTQDAMLIFENLSRGFGRQGKRTFMAERQYTRMEDWLTAKLAYEGLPSKTYLSKTLAQYTSKTCSNCGFTITSADYDRVLEKLKKTATGWMTTINGKELKVEGQITYYNRYKRQNVVKDLSVELDRLSEESVNNDISSWTKGRSGEALSLLKKRFSHRPVQEKFVCLNCGFETHADEQAALNIARSWLFLRSQEYKKYQTNKTTGKNTDKRAFVETWQSFYRKKLKEVWKPAV

SEQ ID NO: 39040 - protein, 979 aa, synthetic construct
  REGION 1..979: note = engineered CasX variant
QEIKRINKIRRRLVKDSNTKKAGKTGPMKTLLVRVMTPDLRERLENLRKKPENIPQPISNTSRANLNKLLTDYTEMKKAILHVYWEEFQKDPVGLMSRVAQPASKKIDQNKLKPEMDEKGNLTTAGFACSQCGQPLFVYKLEQVSEKGKAYTNYFGRCNVAEHEKLILLAQLKPEKDSDEAVTYSLGKFGQRALDFYSIHVTKESTHPVKPLAQIAGNRYASPVGKALSDACMGTIASFLSKYQDIIIEHQKVVKGNQKRLESLRELAGKENLEYPSVTLPPQPHTKEGVDAYNEVIARVRMWVNLNLWQKLKLSRDDAKPLLRLKGFPSFPLVERQANEVDWWDMVCNVKKLINEKKEDGKVFWQNLAGYKRQEALRPYLSSEEDVRKKGKKFARYQLGDLLLHLEKKHGEDWGKVYDEAWERIDKKVEGLSKHIKLEEERRSEDAQSKAALTDWLRAKASFVIEGLKEADKDEFCRCELKLQKWYGDLRGKPFAIEAENSILDISGFSKQYNCAFIWQKDGVKKLNLYLIINYFKGGKLRFKKIKPEAFEANRFYTVINKKSGEIVPMEVNFNFDDPNLIILPLAFGKRQGREFIWNDLLSLETGSLKLANGRVIEKTLYNRRTRQDEPALFVALTFERREVLDSSNIKPMNLIGVDRGENIPAVIALTDPEGCPLSRFKDSLGNPTHILRIGESYKEKQRTIQAKKEVEQRRAGGYSRKYASKAKNLADDMVRNTARDLLYYAVTQDAMLIFENLSRGFGRQGKRTFMAERQYTRMEDWLTAKLAYEGLPSKTYLSKTLAQYTSKTCSNCGFTITSADYDRVLEKLKKTATGWMTTINGKELKVEGQITYYNRYKRQNVVKDLSVELDRLSEESVNNDISSWTKGRSGEALSLLKKRFSHRPVQEKFVCLNCGFETHADEQAALNIARSWLFLRSQEYKKYQTNKTTGKNTDKRAFVETWQSFYRKKLKEVWKPAV

SEQ ID NO: 39041 - protein, 979 aa, synthetic construct
  REGION 1..979: note = engineered CasX variant
QEIKRINKIRRRLVKDSNTKKAGKTGPMKTLLVRVMTPDLRERLENLRKKPENIPQPISNTSRANLNKLLTDYTEMKKAILHVYWEEFQKDPVGLMSRVAQPASKKIDQNKLKPEMDEKGNLTTAGFACSQCGQPLFVYKLEQVSEKGKAYTNYFGRCNVAEHEKLILLAQLKPEKDSDEAVTYSLGKFGQRALDFYSIHVTKESTHPVKPLAQIAGNRYASYPVGKALSDACMGTIASFLSKYQDIIIEHQKVVKGNQKRLESLRELAGKENLEYPSVTLPPQPHTKEGVDAYNEVIARVRMWVNLNLWQKLKLSRDDAKPLLRLKKFPSFPLVERQANEVDWWDMVCNVKKLINEKKEDGKVFWQNLAGYKRQEALRPYLSSEEDVRKKGKKFARYQLGDLLLHLEKKHGEDWGKVYDEAWERIDKKVEGLSKHIKLEEERRSEDAQSKAALTDWLRAKASFVIEGLKEADKDEFCRCELKLQKWYGDLRGKPFAIEAENSILDISGFSKQYNCAFIWQKDGVKKLNLYLIINYFKGGKLRFKKIKPEAFEANRFYTVINKKSGEIVPMEVNFNFDDPNLIILPLAFGKRQGREFIWNDLLSLETGSLKLANGRVIEKTLYNRRTRQDEPALFVALTFERREVLDSSNIKPMNLIGVDRGENIPAVIALTDPEGCPLSRFKDSLGNPTHILRIGESYKEKQRTIQAKKEVEQRRAGGYSRKYASKAKNLADDMVRNTARDLLYYAVTQDAMLIFENLSRGFGRQGKRTFMAERQYTRMEDWLTAKLAYEGLPSKTYLSKTLAQYTSKTCSNCGFTITSADYDRVLEKLKKTATGWMTTINGKELKVEGQITYYNRYKRQNVVKDLSVELDRLSEESVNNDISSWTKGRSGEALSLLKKRFSHRPVQEKFVCLNCGFETHADEQAALNIARSWLFLRSQEYKKYQTNKTTGNTDKRAFVETWQSFYRKKLKEVWKPAV

SEQ ID NO: 39042 - protein, 979 aa, synthetic construct
  REGION 1..979: note = engineered CasX variant
QEIKRINKIRRRLVKDSNTKKAGKTGPMKTLLVRVMTPDLRERLENLRKKPENIPQPISNTSRANLNKLLTDYTEMKKAILHVYWEEFQKDPVGLMSRVAQPASKKIDQNKLKPEMDEKGNLTTAGFACSQCGQPLFVYKLEQVSEKGKAYTNYFGRCNVAEHEKLILLAQLKPEKDSDEAVTYSLGKFGQRALDFYSIHVTKESTHPVKPLAQIAGNRYASHPVGKALSDACMGTIASFLSKYQDIIIEHQKVVKGNQKRLESLRELAGKENLEYPSVTLPPQPHTKEGVDAYNEVIARVRMWVNLNLWQKLKLSRDDAKPLLRLKKFPSFPLVERQANEVDWWDMVCNVKKLINEKKEDGKVFWQNLAGYKRQEALRPYLSSEEDVRKKGKKFARYQLGDLLLHLEKKHGEDWGKVYDEAWERIDKKVEGLSKHIKLEEERRSEDAQSKAALTDWLRAKASFVIEGLKEADKDEFCRCELKLQKWYGDLRGKPFAIEAENSILDISGFSKQYNCAFIWQKDGVKKLNLYLIINYFKGGKLRFKKIKPEAFEANRFYTVINKKSGEIVPMEVNFNFDDPNLIILPLAFGKRQGREFIWNDLLSLETGSLKLANGRVIEKTLYNRRTRQDEPALFVALTFERREVLDSSNIKPMNLIGVDRGENIPAVIALTDPEGCPLSRFKDSLGNPTHILRIGESYKEKQRTIQAKKEVEQRRAGGYSRKYASKAKNLADDMVRNTARDLLYYAVTQDAMLIFENLSRGFGRQGKRTFMAERQYTRMEDWLTAKLAYEGLPSKTYLSKTLAQYTSKTCSNCGFTITSADYDRVLEKLKKTATGWMTTINGKELKVEGQITYYNRYKRQNVVKDLSVELDRLSEESVNNDISSWTKGRSGEALSLLKKRFSHRPVQEKFVCLNCGFETHADEQAALNIARSWLFLRSQEYKKYQTNKTTGNTDKRAFVETWQSFYRKKLKEVWKPAV

SEQ ID NO: 39043 - protein, 979 aa, synthetic construct
  REGION 1..979: note = engineered CasX variant
QEIKRINKIRRRLVKDSNTKKAGKTGPMKTLLVRVMTPDLRERLENLRKKPENIPQPISNTSRANLNKLLTDYTEMKKAILHVYWEEFQKDPVGLMSRVAQPASKKIDQNKLKPEMDEKGNLTTAGFACSQCGQPLFVYKLEQVSEKGKAYTNYFGRCNVAEHEKLILLAQLKPEKDSDEAVTYSLGKFGQRALDFYSIHVTKESTHPVKPLAQIAGNRYASSPVGKALSDACMGTIASFLSKYQDIIIEHQKVVKGNQKRLESLRELAGKENLEYPSVTLPPQPHTKEGVDAYNEVIARVRMWVNLNLWQKLKLSRDDAKPLLRLKKFPSFPLVERQANEVDWWDMVCNVKKLINEKKEDGKVFWQNLAGYKRQEALRPYLSSEEDVRKKGKKFARYQLGDLLLHLEKKHGEDWGKVYDEAWERIDKKVEGLSKHIKLEEERRSEDAQSKAALTDWLRAKASFVIEGLKEADKDEFCRCELKLQKWYGDLRGKPFAIEAENSILDISGFSKQYNCAFIWQKDGVKKLNLYLIINYFKGGKLRFKKIKPEAFEANRFYTVINKKSGEIVPMEVNFNFDDPNLIILPLAFGKRQGREFIWNDLLSLETGSLKLANGRVIEKTLYNRRTRQDEPALFVALTFERREVLDSSNIKPMNLIGVDRGENIPAVIALTDPEGCPLSRFKDSLGNPTHILRIGESYKEKQRTIQAKKEVEQRRAGGYSRKYASKAKNLADDMVRNTARDLLYYAVTQDAMLIFENLSRGFGRQGKRTFMAERQYTRMEDWLTAKLAYEGLPSKTYLSKTLAQYTSKTCSNCGFTITSADYDRVLEKLKKTATGWMTTINGKELKVEGQITYYNRYKRQNVVKDLSVELDRLSEESVNNDISSWTKGRSGEALSLLKKRFSHRPVQEKFVCLNCGFETHADEQAALNIARSWLFLRSQEYKKYQTNKTTGNTDKRAFVETWQSFYRKKLKEVWKPAV

SEQ ID NO: 39044 - protein, 979 aa, synthetic construct
  REGION 1..979: note = engineered CasX variant
QEIKRINKIRRRLVKDSNTKKAGKTGPMKTLLVRVMTPDLRERLENLRKKPENIPQPISNTSRANLNKLLTDYTEMKKAILHVYWEEFQKDPVGLMSRVAQPASKKIDQNKLKPEMDEKGNLTTAGFACSQCGQPLFVYKLEQVSEKGKAYTNYFGRCNVAEHEKLILLAQLKPEKDSDEAVTYSLGKFGQRALDFYSIHVTKESTHPVKPLAQIAGNRYASTPVGKALSDACMGTIASFLSKYQDIIIEHQKVVKGNQKRLESLRELAGKENLEYPSVTLPPQPHTKEGVDAYNEVIARVRMWVNLNLWQKLKLSRDDAKPLLRLKKFPSFPLVERQANEVDWWDMVCNVKKLINEKKEDGKVFWQNLAGYKRQEALRPYLSSEEDVRKKGKKFARYQLGDLLLHLEKKHGEDWGKVYDEAWERIDKKVEGLSKHIKLEEERRSEDAQSKAALTDWLRAKASFVIEGLKEADKDEFCRCELKLQKWYGDLRGKPFAIEAENSILDISGFSKQYNCAFIWQKDGVKKLNLYLIINYFKGGKLRFKKIKPEAFEANRFYTVINKKSGEIVPMEVNFNFDDPNLIILPLAFGKRQGREFIWNDLLSLETGSLKLANGRVIEKTLYNRRTRQDEPALFVALTFERREVLDSSNIKPMNLIGVDRGENIPAVIALTDPEGCPLSRFKDSLGNPTHILRIGESYKEKQRTIQAKKEVEQRRAGGYSRKYASKAKNLADDMVRNTARDLLYYAVTQDAMLIFENLSRGFGRQGKRTFMAERQYTRMEDWLTAKLAYEGLPSKTYLSKTLAQYTSKTCSNCGFTITSADYDRVLEKLKKTATGWMTTINGKELKVEGQITYYNRYKRQNVVKDLSVELDRLSEESVNNDISSWTKGRSGEALSLLKKRFSHRPVQEKFVCLNCGFETHADEQAALNIARSWLFLRSQEYKKYQTNKTTGNTDKRAFVETWQSFYRKKLKEVWKPAV

SEQ ID NO: 39045 - protein, 979 aa, synthetic construct
  REGION 1..979: note = engineered CasX variant
QEIKRINKIRRRLVKDSNTKKAGKTGPMKTLLVRVMTPDLRERLENLRKKPENIPQPISNTSRANLNKLLTDYTEMKKAILHVYWEEFQKDPVGLMSRVAQPASKKIDQNKLKPEMDEKGNLTTAGFACSQCGQPLFVYKLEQVSEKGKAYTNYFGRCNVAEHEKLILLAQLKPEKDSDEAVTYSLGKFGQRALDFYSIHVTKESTHPVKPLAQIAGNRYASAPVGKALSDACMGTIASFLSKYQDIIIEHQKVVKGNQKRLESLRELAGKENLEYPSVTLPPQPHTKEGVDAYNEVIARVRMWVNLNLWQKLKLSRDDAKPLLRLKKFPSFPLVERQANEVDWWDMVCNVKKLINEKKEDGKVFWQNLAGYKRQEALRPYLSSEEDVRKKGKKFARYQLGDLLLHLEKKHGEDWGKVYDEAWERIDKKVEGLSKHIKLEEERRSEDAQSKAALTDWLRAKASFVIEGLKEADKDEFCRCELKLQKWYGDLRGKPFAIEAENSILDISGFSKQYNCAFIWQKDGVKKLNLYLIINYFKGGKLRFKKIKPEAFEANRFYTVINKKSGEIVPMEVNFNFDDPNLIILPLAFGKRQGREFIWNDLLSLETGSLKLANGRVIEKTLYNRRTRQDEPALFVALTFERREVLDSSNIKPMNLIGVDRGENIPAVIALTDPEGCPLSRFKDSLGNPTHILRIGESYKEKQRTIQAKKEVEQRRAGGYSRKYASKAKNLADDMVRNTARDLLYYAVTQDAMLIFENLSRGFGRQGKRTFMAERQYTRMEDWLTAKLAYEGLPSKTYLSKTLAQYTSKTCSNCGFTITSADYDRVLEKLKKTATGWMTTINGKELKVEGQITYYNRYKRQNVVKDLSVELDRLSEESVNNDISSWTKGRSGEALSLLKKRFSHRPVQEKFVCLNCGFETHADEQAALNIARSWLFLRSQEYKKYQTNKTTGNTDKRAFVETWQSFYRKKLKEVWKPAV

SEQ ID NO: 39046 - protein, 979 aa, synthetic construct
  REGION 1..979: note = engineered CasX variant
QEIKRINKIRRRLVKDSNTKKAGKTGPMKTLLVRVMTPDLRERLENLRKKPENIPQPISNTSRANLNKLLTDYTEMKKAILHVYWEEFQKDPVGLMSRVAQPASKKIDQNKLKPEMDEKGNLTTAGFACSQCGQPLFVYKLEQVSEKGKAYTNYFGRCNVAEHEKLILLAQLKPEKDSDEAVTYSLGKFGQRALDFYSIHVTKESTHPVKPLAQIAGNRYASVPVGKALSDACMGTIASFLSKYQDIIIEHQKVVKGNQKRLESLRELAGKENLEYPSVTLPPQPHTKEGVDAYNEVIARVRMWVNLNLWQKLKLSRDDAKPLLRLKKFPSFPLVERQANEVDWWDMVCNVKKLINEKKEDGKVFWQNLAGYKRQEALRPYLSSEEDVRKKGKKFARYQLGDLLLHLEKKHGEDWGKVYDEAWERIDKKVEGLSKHIKLEEERRSEDAQSKAALTDWLRAKASFVIEGLKEADKDEFCRCELKLQKWYGDLRGKPFAIEAENSILDISGFSKQYNCAFIWQKDGVKKLNLYLIINYFKGGKLRFKKIKPEAFEANRFYTVINKKSGEIVPMEVNFNFDDPNLIILPLAFGKRQGREFIWNDLLSLETGSLKLANGRVIEKTLYNRRTRQDEPALFVALTFERREVLDSSNIKPMNLIGVDRGENIPAVIALTDPEGCPLSRFKDSLGNPTHILRIGESYKEKQRTIQAKKEVEQRRAGGYSRKYASKAKNLADDMVRNTARDLLYYAVTQDAMLIFENLSRGFGRQGKRTFMAERQYTRMEDWLTAKLAYEGLPSKTYLSKTLAQYTSKTCSNCGFTITSADYDRVLEKLKKTATGWMTTINGKELKVEGQITYYNRYKRQNVVKDLSVELDRLSEESVNNDISSWTKGRSGEALSLLKKRFSHRPVQEKFVCLNCGFETHADEQAALNIARSWLFLRSQEYKKYQTNKTTGNTDKRAFVETWQSFYRKKLKEVWKPAV

SEQ ID NO: 39047 - protein, 979 aa, synthetic construct
  REGION 1..979: note = engineered CasX variant
QEIKRINKIRRRLVKDSNTKKAGKTGPMKTLLVRVMTPDLRERLENLRKKPENIPQPISNTSRANLNKLLTDYTEMKKAILHVYWEEFQKDPVGLMSRVAQPASKKIDQNKLKPEMDEKGNLTTAGFACSQCGQPLFVYKLEQVSEKGKAYTNYFGRCNVAEHEKLIKLAQLKPEKDSDEAVTYSLGKFGQRALDFYSIHVTKESTHPVKPLAQIAGNRYASGPVGKALSDACMGTIASFLSKYQDIIIEHQKVVKGNQKRLESLRELAGKENLEYPSVTLPPQPHTKEGVDAYNEVIARVRMWVNLNLWQKLKLSRDDAKPLLRLKKFPSFPLVERQANEVDWWDMVCNVKKLINEKKEDGKVFWQNLAGYKRQEALRPYLSSEEDVRKKGKKFARYQLGDLLLHLEKKHGEDWGKVYDEAWERIDKKVEGLSKHIKLEEERRSEDAQSKAALTDWLRAKASFVIEGLKEADKDEFCRCELKLQKWYGDLRGKPFAIEAENSILDISGFSKQYNCAFIWQKDGVKKLNLYLIINYFKGGKLRFKKIKPEAFEANRFYTVINKKSGEIVPMEVNFNFDDPNLIILPLAFGKRQGREFIWNDLLSLETGSLKLANGRVIEKTLYNRRTRQDEPALFVALTFERREVLDSSNIKPMNLIGVDRGENIPAVIALTDPEGCPLSRFKDSLGNPTHILRIGESYKEKQRTIQAKKEVEQRRAGGYSRKYASKAKNLADDMVRNTARDLLYYAVTQDAMLIFENLSRGFGRQGKRTFMAERQYTRMEDWLTAKLAYEGLPSKTYLSKTLAQYTSKTCSNCGFTITSADYDRVLEKLKKTATGWMTTINGKELKVEGQITYYNRYKRQNVVKDLSVELDRLSEESVNNDISSWTKGRSGEALSLLKKRFSHRPVQEKFVCLNCGFETHADEQAALNIARSWLFLRSQEYKKYQTNKTTGNTDKRAFVETWQSFYRKKLKEVWKPAV

SEQ ID NO: 39048 - protein, 978 aa, synthetic construct
  REGION 1..978: note = engineered CasX variant
QEIKRINKIRRRLVKDSNTKKAGKTGPMKTLLVRVMTPDLRERLENLRKKPENIPQPISNTSRANLNKLLTDYTEMKKAILHVYWEEFQKDPVGLMSRVAQPASKKIDQNKLKPEMDEKGNLTTAGFACSQCGQPLFVYKLEQVSEKGKAYTNYFGRCNVAEHEKLILLAQLKPEKDSDEAVTYSLGKFGQRALDFYSIHVTKESTHPVKPLAQIAGNRYASPVGKALSDACMGTIASFLSKYQDIIIEHQKVVKGNQKRLESLRELAGKENLEYPSVTLPPQPHTKEGVDAYNEVIARVRMWVNLNLWQKLKLSRDDAKPLLRLKKFPSFPLVERQANEVDWWDMVCNVKKLINEKKEDGKVFWQNLAGYKRQEALRPYLSSEEDVRKKGKKFARYQLGDLLLHLEKKHGEDWGKVYDEAWERIDKKVEGLSKHIKLEEERRSEDAQSKAALTDWLRAKASFVIEGLKEADKDEFCRCELKLQKWYGDLRGKPFAIEAENSILDISGFSKQYNCAFIWQKDGVKKLNLYLIINYFKGGKLRFKKIKPEAFEANRFYTVINKKSGEIVPMEVNFNFDDPNLIILPLAFGKRQGREFIWNDLLSLETGSLKLANGRVIEKTLYNRRTRQDEPALFVALTFERREVLDSSNIKPMNLIGVDRGENIPAVIALTDPEGCPLSRFKDSLGNPTHILRIGESYKEKQRTIQAKKEVEQRRAGGYSRKYASKAKNLADDMVRNTARDLLYYAVTQDAMLIFENLSRGFGRQGKRTFMAERQYTRMEDWLTAKLAYEGLPSKTYLSKTLAQYTSKTCSNCGFTITSADYDRVLEKLKKTATGWMTTINGKELKVEGQITYYNRYKRQNVVKDLSVELDRLSEESVNNDISSWTKGRSGEALSLLKKRFSHRPVQEKFVCLNCGFETHADEQAALNIARSWLFLRSQEYKKYQTNKTTGNTDKRAFVETWQSFYRKKLKEVWKPAV

SEQ ID NO: 39049 - protein, 979 aa, synthetic construct
  REGION 1..979: note = engineered CasX variant
QEIKRINKIRRRLVKDSNTKKAGKTGPMKTLLVRVMTPDLRERLENLRKKPENIPQPISNTSRANLNKLLTDYTEMKKAILHVYWEEFQKDPVGLMSRVAQPASKKIDQNKLKPEMDEKGNLTTAGFACSQCGQPLFVYKLEQVSEKGKAYTNYFGRCNVAEHEKLILLAQLKPEKDSDEAVTYSLGKFGQRALDFYSIHVTKESTHPVKPLAQIAGNRYASYPVGKALSDACMGTIASFLSKYQDIIIEHQKVVKGNQKRLESLRELAGKENLEYPSVTLPPQPHTKEGVDAYNEVIARVRMWVNLNLWQKLKLSRDDAKPLLRLKGFPSFPLVERQANEVDWWDMVCNVKKLINEKKEDGKVFWQNLAGYKRQEALRPYLSSEEDVRKKGKKFARYQLGDLLLHLEKKHGEDWGKVYDEAWERIDKKVEGLSKHIKLEEERRSEDAQSKAALTDWLRAKASFVIEGLKEADKDEFCRCELKLQKWYGDLRGKPFAIEAENSILDISGFSKQYNCAFIWQKDGVKKLNLYLIINYFKGGKLRFKKIKPEAFEANRFYTVINKKSGEIVPMEVNFNFDDPNLIILPLAFGKRQGREFIWNDLLSLETGSLKLANGRVIEKTLYNRRTRQDEPALFVALTFERREVLDSSNIKPMNLIGVDRGENIPAVIALTDPEGCPLSRFKDSLGNPTHILRIGERYKEKQRTIQAKKEVEQRRAGGYSRKYASKAKNLADDMVRNTARDLLYYAVTQDAMLIFENLSRGFGRQGKRTFMAERQYTRMEDWLTAKLAYEGLPSKTYLSKTLAQYTSKTCSNCGFTITSADYDRVLEKLKKTATGWMTTINGKELKVEGQITYYNRYKRQNVVKDLSVELDRLSEESVNNDISSWTKGRSGEALSLLKKRFSHRPVQEKFVCLNCGFETHADEQAALNIARSWLFLRSQEYKKYQTNKTTGNTDKRAFVETWQSFYRKKLKEVWKPAV

SEQ ID NO: 39050 - protein, 979 aa, synthetic construct
  REGION 1..979: note = engineered CasX variant
QEIKRINKIRRRLVKDSNTKKAGKTGPMKTLLVRVMTPDLRERLENLRKKPENIPQPISNTSRANLNKLLTDYTEMKKAILHVYWEEFQKDPVGLMSRVAQPASKKIDQNKLKPEMDEKGNLTTAGFACSQCGQPLFVYKLEQVSEKGKAYTNYFGRCNVAEHEKLILLAQLKPEKDSDEAVTYSLGKFGQRALDFYSIHVTKESTHPVKPLAQIAGNRYASHPVGKALSDACMGTIASFLSKYQDIIIEHQKVVKGNQKRLESLRELAGKENLEYPSVTLPPQPHTKEGVDAYNEVIARVRMWVNLNLWQKLKLSRDDAKPLLRLKGFPSFPLVERQANEVDWWDMVCNVKKLINEKKEDGKVFWQNLAGYKRQEALRPYLSSEEDVRKKGKKFARYQLGDLLLHLEKKHGEDWGKVYDEAWERIDKKVEGLSKHIKLEEERRSEDAQSKAALTDWLRAKASFVIEGLKEADKDEFCRCELKLQKWYGDLRGKPFAIEAENSILDISGFSKQYNCAFIWQKDGVKKLNLYLIINYFKGGKLRFKKIKPEAFEANRFYTVINKKSGEIVPMEVNFNFDDPNLIILPLAFGKRQGREFIWNDLLSLETGSLKLANGRVIEKTLYNRRTRQDEPALFVALTFERREVLDSSNIKPMNLIGVDRGENIPAVIALTDPEGCPLSRFKDSLGNPTHILRIGERYKEKQRTIQAKKEVEQRRAGGYSRKYASKAKNLADDMVRNTARDLLYYAVTQDAMLIFENLSRGFGRQGKRTFMAERQYTRMEDWLTAKLAYEGLPSKTYLSKTLAQYTSKTCSNCGFTITSADYDRVLEKLKKTATGWMTTINGKELKVEGQITYYNRYKRQNVVKDLSVELDRLSEESVNNDISSWTKGRSGEALSLLKKRFSHRPVQEKFVCLNCGFETHADEQAALNIARSWLFLRSQEYKKYQTNKTTGNTDKRAFVETWQSFYRKKLKEVWKPAV

SEQ ID NO: 39051 - protein, 979 aa, synthetic construct
  REGION 1..979: note = engineered CasX variant
QEIKRINKIRRRLVKDSNTKKAGKTGPMKTLLVRVMTPDLRERLENLRKKPENIPQPISNTSRANLNKLLTDYTEMKKAILHVYWEEFQKDPVGLMSRVAQPASKKIDQNKLKPEMDEKGNLTTAGFACSQCGQPLFVYKLEQVSEKGKAYTNYFGRCNVAEHEKLILLAQLKPEKDSDEAVTYSLGKFGQRALDFYSIHVTKESTHPVKPLAQIAGNRYASSPVGKALSDACMGTIASFLSKYQDIIIEHQKVVKGNQKRLESLRELAGKENLEYPSVTLPPQPHTKEGVDAYNEVIARVRMWVNLNLWQKLKLSRDDAKPLLRLKGFPSFPLVERQANEVDWWDMVCNVKKLINEKKEDGKVFWQNLAGYKRQEALRPYLSSEEDVRKKGKKFARYQLGDLLLHLEKKHGEDWGKVYDEAWERIDKKVEGLSKHIKLEEERRSEDAQSKAALTDWLRAKASFVIEGLKEADKDEFCRCELKLQKWYGDLRGKPFAIEAENSILDISGFSKQYNCAFIWQKDGVKKLNLYLIINYFKGGKLRFKKIKPEAFEANRFYTVINKKSGEIVPMEVNFNFDDPNLIILPLAFGKRQGREFIWNDLLSLETGSLKLANGRVIEKTLYNRRTRQDEPALFVALTFERREVLDSSNIKPMNLIGVDRGENIPAVIALTDPEGCPLSRFKDSLGNPTHILRIGERYKEKQRTIQAKKEVEQRRAGGYSRKYASKAKNLADDMVRNTARDLLYYAVTQDAMLIFENLSRGFGRQGKRTFMAERQYTRMEDWLTAKLAYEGLPSKTYLSKTLAQYTSKTCSNCGFTITSADYDRVLEKLKKTATGWMTTINGKELKVEGQITYYNRYKRQNVVKDLSVELDRLSEESVNNDISSWTKGRSGEALSLLKKRFSHRPVQEKFVCLNCGFETHADEQAALNIARSWLFLRSQEYKKYQTNKTTGNTDKRAFVETWQSFYRKKLKEVWKPAV

SEQ ID NO: 39052 - protein, 979 aa, synthetic construct
  REGION 1..979: note = engineered CasX variant
QEIKRINKIRRRLVKDSNTKKAGKTGPMKTLLVRVMTPDLRERLENLRKKPENIPQPISNTSRANLNKLLTDYTEMKKAILHVYWEEFQKDPVGLMSRVAQPASKKIDQNKLKPEMDEKGNLTTAGFACSQCGQPLFVYKLEQVSEKGKAYTNYFGRCNVAEHEKLILLAQLKPEKDSDEAVTYSLGKFGQRALDFYSIHVTKESTHPVKPLAQIAGNRYASTPVGKALSDACMGTIASFLSKYQDIIIEHQKVVKGNQKRLESLRELAGKENLEYPSVTLPPQPHTKEGVDAYNEVIARVRMWVNLNLWQKLKLSRDDAKPLLRLKGFPSFPLVERQANEVDWWDMVCNVKKLINEKKEDGKVFWQNLAGYKRQEALRPYLSSEEDVRKKGKKFARYQLGDLLLHLEKKHGEDWGKVYDEAWERIDKKVEGLSKHIKLEEERRSEDAQSKAALTDWLRAKASFVIEGLKEADKDEFCRCELKLQKWYGDLRGKPFAIEAENSILDISGFSKQYNCAFIWQKDGVKKLNLYLIINYFKGGKLRFKKIKPEAFEANRFYTVINKKSGEIVPMEVNFNFDDPNLIILPLAFGKRQGREFIWNDLLSLETGSLKLANGRVIEKTLYNRRTRQDEPALFVALTFERREVLDSSNIKPMNLIGVDRGENIPAVIALTDPEGCPLSRFKDSLGNPTHILRIGERYKEKQRTIQAKKEVEQRRAGGYSRKYASKAKNLADDMVRNTARDLLYYAVTQDAMLIFENLSRGFGRQGKRTFMAERQYTRMEDWLTAKLAYEGLPSKTYLSKTLAQYTSKTCSNCGFTITSADYDRVLEKLKKTATGWMTTINGKELKVEGQITYYNRYKRQNVVKDLSVELDRLSEESVNNDISSWTKGRSGEALSLLKKRFSHRPVQEKFVCLNCGFETHADEQAALNIARSWLFLRSQEYKKYQTNKTTGNTDKRAFVETWQSFYRKKLKEVWKPAV

SEQ ID NO: 39053 - protein, 979 aa, synthetic construct
  REGION 1..979: note = engineered CasX variant
QEIKRINKIRRRLVKDSNTKKAGKTGPMKTLLVRVMTPDLRERLENLRKKPENIPQPISNTSRANLNKLLTDYTEMKKAILHVYWEEFQKDPVGLMSRVAQPASKKIDQNKLKPEMDEKGNLTTAGFACSQCGQPLFVYKLEQVSEKGKAYTNYFGRCNVAEHEKLILLAQLKPEKDSDEAVTYSLGKFGQRALDFYSIHVTKESTHPVKPLAQIAGNRYASAPVGKALSDACMGTIASFLSKYQDIIIEHQKVVKGNQKRLESLRELAGKENLEYPSVTLPPQPHTKEGVDAYNEVIARVRMWVNLNLWQKLKLSRDDAKPLLRLKGFPSFPLVERQANEVDWWDMVCNVKKLINEKKEDGKVFWQNLAGYKRQEALRPYLSSEEDVRKKGKKFARYQLGDLLLHLEKKHGEDWGKVYDEAWERIDKKVEGLSKHIKLEEERRSEDAQSKAALTDWLRAKASFVIEGLKEADKDEFCRCELKLQKWYGDLRGKPFAIEAENSILDISGFSKQYNCAFIWQKDGVKKLNLYLIINYFKGGKLRFKKIKPEAFEANRFYTVINKKSGEIVPMEVNFNFDDPNLIILPLAFGKRQGREFIWNDLLSLETGSLKLANGRVIEKTLYNRRTRQDEPALFVALTFERREVLDSSNIKPMNLIGVDRGENIPAVIALTDPEGCPLSRFKDSLGNPTHILRIGERYKEKQRTIQAKKEVEQRRAGGYSRKYASKAKNLADDMVRNTARDLLYYAVTQDAMLIFENLSRGFGRQGKRTFMAERQYTRMEDWLTAKLAYEGLPSKTYLSKTLAQYTSKTCSNCGFTITSADYDRVLEKLKKTATGWMTTINGKELKVEGQITYYNRYKRQNVVKDLSVELDRLSEESVNNDISSWTKGRSGEALSLLKKRFSHRPVQEKFVCLNCGFETHADEQAALNIARSWLFLRSQEYKKYQTNKTTGNTDKRAFVETWQSFYRKKLKEVWKPAV

SEQ ID NO: 39054 - protein, 979 aa, synthetic construct
  REGION 1..979: note = engineered CasX variant
QEIKRINKIRRRLVKDSNTKKAGKTGPMKTLLVRVMTPDLRERLENLRKKPENIPQPISNTSRANLNKLLTDYTEMKKAILHVYWEEFQKDPVGLMSRVAQPASKKIDQNKLKPEMDEKGNLTTAGFACSQCGQPLFVYKLEQVSEKGKAYTNYFGRCNVAEHEKLILLAQLKPEKDSDEAVTYSLGKFGQRALDFYSIHVTKESTHPVKPLAQIAGNRYASVPVGKALSDACMGTIASFLSKYQDIIIEHQKVVKGNQKRLESLRELAGKENLEYPSVTLPPQPHTKEGVDAYNEVIARVRMWVNLNLWQKLKLSRDDAKPLLRLKGFPSFPLVERQANEVDWWDMVCNVKKLINEKKEDGKVFWQNLAGYKRQEALRPYLSSEEDVRKKGKKFARYQLGDLLLHLEKKHGEDWGKVYDEAWERIDKKVEGLSKHIKLEEERRSEDAQSKAALTDWLRAKASFVIEGLKEADKDEFCRCELKLQKWYGDLRGKPFAIEAENSILDISGFSKQYNCAFIWQKDGVKKLNLYLIINYFKGGKLRFKKIKPEAFEANRFYTVINKKSGEIVPMEVNFNFDDPNLIILPLAFGKRQGREFIWNDLLSLETGSLKLANGRVIEKTLYNRRTRQDEPALFVALTFERREVLDSSNIKPMNLIGVDRGENIPAVIALTDPEGCPLSRFKDSLGNPTHILRIGERYKEKQRTIQAKKEVEQRRAGGYSRKYASKAKNLADDMVRNTARDLLYYAVTQDAMLIFENLSRGFGRQGKRTFMAERQYTRMEDWLTAKLAYEGLPSKTYLSKTLAQYTSKTCSNCGFTITSADYDRVLEKLKKTATGWMTTINGKELKVEGQITYYNRYKRQNVVKDLSVELDRLSEESVNNDISSWTKGRSGEALSLLKKRFSHRPVQEKFVCLNCGFETHADEQAALNIARSWLFLRSQEYKKYQTNKTTGNTDKRAFVETWQSFYRKKLKEVWKPAV

SEQ ID NO: 39055 - protein, 979 aa, synthetic construct
  REGION 1..979: note = engineered CasX variant
QEIKRINKIRRRLVKDSNTKKAGKTGPMKTLLVRVMTPDLRERLENLRKKPENIPQPISNTSRANLNKLLTDYTEMKKAILHVYWEEFQKDPVGLMSRVAQPASKKIDQNKLKPEMDEKGNLTTAGFACSQCGQPLFVYKLEQVSEKGKAYTNYFGRCNVAEHEKLIKLAQLKPEKDSDEAVTYSLGKFGQRALDFYSIHVTKESTHPVKPLAQIAGNRYASGPVGKALSDACMGTIASFLSKYQDIIIEHQKVVKGNQKRLESLRELAGKENLEYPSVTLPPQPHTKEGVDAYNEVIARVRMWVNLNLWQKLKLSRDDAKPLLRLKGFPSFPLVERQANEVDWWDMVCNVKKLINEKKEDGKVFWQNLAGYKRQEALRPYLSSEEDVRKKGKKFARYQLGDLLLHLEKKHGEDWGKVYDEAWERIDKKVEGLSKHIKLEEERRSEDAQSKAALTDWLRAKASFVIEGLKEADKDEFCRCELKLQKWYGDLRGKPFAIEAENSILDISGFSKQYNCAFIWQKDGVKKLNLYLIINYFKGGKLRFKKIKPEAFEANRFYTVINKKSGEIVPMEVNFNFDDPNLIILPLAFGKRQGREFIWNDLLSLETGSLKLANGRVIEKTLYNRRTRQDEPALFVALTFERREVLDSSNIKPMNLIGVDRGENIPAVIALTDPEGCPLSRFKDSLGNPTHILRIGERYKEKQRTIQAKKEVEQRRAGGYSRKYASKAKNLADDMVRNTARDLLYYAVTQDAMLIFENLSRGFGRQGKRTFMAERQYTRMEDWLTAKLAYEGLPSKTYLSKTLAQYTSKTCSNCGFTITSADYDRVLEKLKKTATGWMTTINGKELKVEGQITYYNRYKRQNVVKDLSVELDRLSEESVNNDISSWTKGRSGEALSLLKKRFSHRPVQEKFVCLNCGFETHADEQAALNIARSWLFLRSQEYKKYQTNKTTGNTDKRAFVETWQSFYRKKLKEVWKPAV

SEQ ID NO: 39056 - protein, 978 aa, synthetic construct
  REGION 1..978: note = engineered CasX variant
QEIKRINKIRRRLVKDSNTKKAGKTGPMKTLLVRVMTPDLRERLENLRKKPENIPQPISNTSRANLNKLLTDYTEMKKAILHVYWEEFQKDPVGLMSRVAQPASKKIDQNKLKPEMDEKGNLTTAGFACSQCGQPLFVYKLEQVSEKGKAYTNYFGRCNVAEHEKLILLAQLKPEKDSDEAVTYSLGKFGQRALDFYSIHVTKESTHPVKPLAQIAGNRYASPVGKALSDACMGTIASFLSKYQDIIIEHQKVVKGNQKRLESLRELAGKENLEYPSVTLPPQPHTKEGVDAYNEVIARVRMWVNLNLWQKLKLSRDDAKPLLRLKGFPSFPLVERQANEVDWWDMVCNVKKLINEKKEDGKVFWQNLAGYKRQEALRPYLSSEEDVRKKGKKFARYQLGDLLLHLEKKHGEDWGKVYDEAWERIDKKVEGLSKHIKLEEERRSEDAQSKAALTDWLRAKASFVIEGLKEADKDEFCRCELKLQKWYGDLRGKPFAIEAENSILDISGFSKQYNCAFIWQKDGVKKLNLYLIINYFKGGKLRFKKIKPEAFEANRFYTVINKKSGEIVPMEVNFNFDDPNLIILPLAFGKRQGREFIWNDLLSLETGSLKLANGRVIEKTLYNRRTRQDEPALFVALTFERREVLDSSNIKPMNLIGVDRGENIPAVIALTDPEGCPLSRFKDSLGNPTHILRIGERYKEKQRTIQAKKEVEQRRAGGYSRKYASKAKNLADDMVRNTARDLLYYAVTQDAMLIFENLSRGFGRQGKRTFMAERQYTRMEDWLTAKLAYEGLPSKTYLSKTLAQYTSKTCSNCGFTITSADYDRVLEKLKKTATGWMTTINGKELKVEGQITYYNRYKRQNVVKDLSVELDRLSEESVNNDISSWTKGRSGEALSLLKKRFSHRPVQEKFVCLNCGFETHADEQAALNIARSWLFLRSQEYKKYQTNKTTGNTDKRAFVETWQSFYRKKLKEVWKPAV

SEQ ID NO: 39057 - protein, 979 aa, synthetic construct
  REGION 1..979: note = engineered CasX variant
QEIKRINKIRRRLVKDSNTKKAGKTGPMKTLLVRVMTPDLRERLENLRKKPENIPQPISNTSRANLNKLLTDYTEMKKAILHVYWEEFQKDPVGLMSRVAQPASKKIDQNKLKPEMDEKGNLTTAGFACSQCGQPLFVYKLEQVSEKGKAYTNYFGRCNVAEHEKLILLAQLKPEKDSDEAVTYSLGKFGQRALDFYSIHVTKESTHPVKPLAQIAGNRYASYPVGKALSDACMGTIASFLSKYQDIIIEHQKVVKGNQKRLESLRELAGKENLEYPSVTLPPQPHTKEGVDAYNEVIARVRMWVNLNLWQKLKLSRDDAKPLLRLKGFPSFPLVERQANEVDWWDMVCNVKKLINEKKEDGKVFWQNLAGYKRQEALRPYLSSEEDVRKKGKKFARYQLGDLLLHLEKKHGEDWGKVYDEAWERIDKKVEGLSKHIKLEEERRSEDAQSKAALTDWLRAKASFVIEGLKEADKDEFCRCELKLQKWYGDLRGKPFAIEAENSILDISGFSKQYNCAFIWQKDGVKKLNLYLIINYFKGGKLRFKKIKPEAFEANRFYTVINKKSGEIVPMEVNFNFDDPNLIILPLAFGKRQGREFIWNDLLSLETGSLQLANGRVIEKTLYNRRTRQDEPALFVALTFERREVLDSSNIKPMNLIGVDRGENIPAVIALTDPEGCPLSRFKDSLGNPTHILRIGESYKEKQRTIQAKKEVEQRRAGGYSRKYASKAKNLADDMVRNTARDLLYYAVTQDAMLIFENLSRGFGRQGKRTFMAERQYTRMEDWLTAKLAYEGLPSKTYLSKTLAQYTSKTCSNCGFTITSADYDRVLEKLKKTATGWMTTINGKELKVEGQITYYNRYKRQNVVKDLSVELDRLSEESVNNDISSWTKGRSGEALSLLKKRFSHRPVQEKFVCLNCGFETHADEQAALNIARSWLFLRSQEYKKYQTNKTTGNTDKRAFVETWQSFYRKKLKEVWKPAV

SEQ ID NO: 39058 - protein, 979 aa, synthetic construct
  REGION 1..979: note = engineered CasX variant
QEIKRINKIRRRLVKDSNTKKAGKTGPMKTLLVRVMTPDLRERLENLRKKPENIPQPISNTSRANLNKLLTDYTEMKKAILHVYWEEFQKDPVGLMSRVAQPASKKIDQNKLKPEMDEKGNLTTAGFACSQCGQPLFVYKLEQVSEKGKAYTNYFGRCNVAEHEKLILLAQLKPEKDSDEAVTYSLGKFGQRALDFYSIHVTKESTHPVKPLAQIAGNRYASHPVGKALSDACMGTIASFLSKYQDIIIEHQKVVKGNQKRLESLRELAGKENLEYPSVTLPPQPHTKEGVDAYNEVIARVRMWVNLNLWQKLKLSRDDAKPLLRLKGFPSFPLVERQANEVDWWDMVCNVKKLINEKKEDGKVFWQNLAGYKRQEALRPYLSSEEDVRKKGKKFARYQLGDLLLHLEKKHGEDWGKVYDEAWERIDKKVEGLSKHIKLEEERRSEDAQSKAALTDWLRAKASFVIEGLKEADKDEFCRCELKLQKWYGDLRGKPFAIEAENSILDISGFSKQYNCAFIWQKDGVKKLNLYLIINYFKGGKLRFKKIKPEAFEANRFYTVINKKSGEIVPMEVNFNFDDPNLIILPLAFGKRQGREFIWNDLLSLETGSLQLANGRVIEKTLYNRRTRQDEPALFVALTFERREVLDSSNIKPMNLIGVDRGENIPAVIALTDPEGCPLSRFKDSLGNPTHILRIGESYKEKQRTIQAKKEVEQRRAGGYSRKYASKAKNLADDMVRNTARDLLYYAVTQDAMLIFENLSRGFGRQGKRTFMAERQYTRMEDWLTAKLAYEGLPSKTYLSKTLAQYTSKTCSNCGFTITSADYDRVLEKLKKTATGWMTTINGKELKVEGQITYYNRYKRQNVVKDLSVELDRLSEESVNNDISSWTKGRSGEALSLLKKRFSHRPVQEKFVCLNCGFETHADEQAALNIARSWLFLRSQEYKKYQTNKTTGNTDKRAFVETWQSFYRKKLKEVWKPAV

SEQ ID NO: 39059 - protein, 979 aa, synthetic construct
  REGION 1..979: note = engineered CasX variant
QEIKRINKIRRRLVKDSNTKKAGKTGPMKTLLVRVMTPDLRERLENLRKKPENIPQPISNTSRANLNKLLTDYTEMKKAILHVYWEEFQKDPVGLMSRVAQPASKKIDQNKLKPEMDEKGNLTTAGFACSQCGQPLFVYKLEQVSEKGKAYTNYFGRCNVAEHEKLILLAQLKPEKDSDEAVTYSLGKFGQRALDFYSIHVTKESTHPVKPLAQIAGNRYASSPVGKALSDACMGTIASFLSKYQDIIIEHQKVVKGNQKRLESLRELAGKENLEYPSVTLPPQPHTKEGVDAYNEVIARVRMWVNLNLWQKLKLSRDDAKPLLRLKGFPSFPLVERQANEVDWWDMVCNVKKLINEKKEDGKVFWQNLAGYKRQEALRPYLSSEEDVRKKGKKFARYQLGDLLLHLEKKHGEDWGKVYDEAWERIDKKVEGLSKHIKLEEERRSEDAQSKAALTDWLRAKASFVIEGLKEADKDEFCRCELKLQKWYGDLRGKPFAIEAENSILDISGFSKQYNCAFIWQKDGVKKLNLYLIINYFKGGKLRFKKIKPEAFEANRFYTVINKKSGEIVPMEVNFNFDDPNLIILPLAFGKRQGREFIWNDLLSLETGSLQLANGRVIEKTLYNRRTRQDEPALFVALTFERREVLDSSNIKPMNLIGVDRGENIPAVIALTDPEGCPLSRFKDSLGNPTHILRIGESYKEKQRTIQAKKEVEQRRAGGYSRKYASKAKNLADDMVRNTARDLLYYAVTQDAMLIFENLSRGFGRQGKRTFMAERQYTRMEDWLTAKLAYEGLPSKTYLSKTLAQYTSKTCSNCGFTITSADYDRVLEKLKKTATGWMTTINGKELKVEGQITYYNRYKRQNVVKDLSVELDRLSEESVNNDISSWTKGRSGEALSLLKKRFSHRPVQEKFVCLNCGFETHADEQAALNIARSWLFLRSQEYKKYQTNKTTGNTDKRAFVETWQSFYRKKLKEVWKPAV

SEQ ID NO: 39060 - protein, 979 aa, synthetic construct
  REGION 1..979: note = engineered CasX variant
QEIKRINKIRRRLVKDSNTKKAGKTGPMKTLLVRVMTPDLRERLENLRKKPENIPQPISNTSRANLNKLLTDYTEMKKAILHVYWEEFQKDPVGLMSRVAQPASKKIDQNKLKPEMDEKGNLTTAGFACSQCGQPLFVYKLEQVSEKGKAYTNYFGRCNVAEHEKLILLAQLKPEKDSDEAVTYSLGKFGQRALDFYSIHVTKESTHPVKPLAQIAGNRYASTPVGKALSDACMGTIASFLSKYQDIIIEHQKVVKGNQKRLESLRELAGKENLEYPSVTLPPQPHTKEGVDAYNEVIARVRMWVNLNLWQKLKLSRDDAKPLLRLKGFPSFPLVERQANEVDWWDMVCNVKKLINEKKEDGKVFWQNLAGYKRQEALRPYLSSEEDVRKKGKKFARYQLGDLLLHLEKKHGEDWGKVYDEAWERIDKKVEGLSKHIKLEEERRSEDAQSKAALTDWLRAKASFVIEGLKEADKDEFCRCELKLQKWYGDLRGKPFAIEAENSILDISGFSKQYNCAFIWQKDGVKKLNLYLIINYFKGGKLRFKKIKPEAFEANRFYTVINKKSGEIVPMEVNFNFDDPNLIILPLAFGKRQGREFIWNDLLSLETGSLQLANGRVIEKTLYNRRTRQDEPALFVALTFERREVLDSSNIKPMNLIGVDRGENIPAVIALTDPEGCPLSRFKDSLGNPTHILRIGESYKEKQRTIQAKKEVEQRRAGGYSRKYASKAKNLADDMVRNTARDLLYYAVTQDAMLIFENLSRGFGRQGKRTFMAERQYTRMEDWLTAKLAYEGLPSKTYLSKTLAQYTSKTCSNCGFTITSADYDRVLEKLKKTATGWMTTINGKELKVEGQITYYNRYKRQNVVKDLSVELDRLSEESVNNDISSWTKGRSGEALSLLKKRFSHRPVQEKFVCLNCGFETHADEQAALNIARSWLFLRSQEYKKYQTNKTTGNTDKRAFVETWQSFYRKKLKEVWKPAV

SEQ ID NO: 39061 - protein, 979 aa, synthetic construct
  REGION 1..979: note = engineered CasX variant
QEIKRINKIRRRLVKDSNTKKAGKTGPMKTLLVRVMTPDLRERLENLRKKPENIPQPISNTSRANLNKLLTDYTEMKKAILHVYWEEFQKDPVGLMSRVAQPASKKIDQNKLKPEMDEKGNLTTAGFACSQCGQPLFVYKLEQVSEKGKAYTNYFGRCNVAEHEKLILLAQLKPEKDSDEAVTYSLGKFGQRALDFYSIHVTKESTHPVKPLAQIAGNRYASAPVGKALSDACMGTIASFLSKYQDIIIEHQKVVKGNQKRLESLRELAGKENLEYPSVTLPPQPHTKEGVDAYNEVIARVRMWVNLNLWQKLKLSRDDAKPLLRLKGFPSFPLVERQANEVDWWDMVCNVKKLINEKKEDGKVFWQNLAGYKRQEALRPYLSSEEDVRKKGKKFARYQLGDLLLHLEKKHGEDWGKVYDEAWERIDKKVEGLSKHIKLEEERRSEDAQSKAALTDWLRAKASFVIEGLKEADKDEFCRCELKLQKWYGDLRGKPFAIEAENSILDISGFSKQYNCAFIWQKDGVKKLNLYLIINYFKGGKLRFKKIKPEAFEANRFYTVINKKSGEIVPMEVNFNFDDPNLIILPLAFGKRQGREFIWNDLLSLETGSLQLANGRVIEKTLYNRRTRQDEPALFVALTFERREVLDSSNIKPMNLIGVDRGENIPAVIALTDPEGCPLSRFKDSLGNPTHILRIGESYKEKQRTIQAKKEVEQRRAGGYSRKYASKAKNLADDMVRNTARDLLYYAVTQDAMLIFENLSRGFGRQGKRTFMAERQYTRMEDWLTAKLAYEGLPSKTYLSKTLAQYTSKTCSNCGFTITSADYDRVLEKLKKTATGWMTTINGKELKVEGQITYYNRYKRQNVVKDLSVELDRLSEESVNNDISSWTKGRSGEALSLLKKRFSHRPVQEKFVCLNCGFETHADEQAALNIARSWLFLRSQEYKKYQTNKTTGNTDKRAFVETWQSFYRKKLKEVWKPAV

SEQ ID NO: 39062 - protein, 979 aa, synthetic construct
  REGION 1..979: note = engineered CasX variant
QEIKRINKIRRRLVKDSNTKKAGKTGPMKTLLVRVMTPDLRERLENLRKKPENIPQPISNTSRANLNKLLTDYTEMKKAILHVYWEEFQKDPVGLMSRVAQPASKKIDQNKLKPEMDEKGNLTTAGFACSQCGQPLFVYKLEQVSEKGKAYTNYFGRCNVAEHEKLILLAQLKPEKDSDEAVTYSLGKFGQRALDFYSIHVTKESTHPVKPLAQIAGNRYASVPVGKALSDACMGTIASFLSKYQDIIIEHQKVVKGNQKRLESLRELAGKENLEYPSVTLPPQPHTKEGVDAYNEVIARVRMWVNLNLWQKLKLSRDDAKPLLRLKGFPSFPLVERQANEVDWWDMVCNVKKLINEKKEDGKVFWQNLAGYKRQEALRPYLSSEEDVRKKGKKFARYQLGDLLLHLEKKHGEDWGKVYDEAWERIDKKVEGLSKHIKLEEERRSEDAQSKAALTDWLRAKASFVIEGLKEADKDEFCRCELKLQKWYGDLRGKPFAIEAENSILDISGFSKQYNCAFIWQKDGVKKLNLYLIINYFKGGKLRFKKIKPEAFEANRFYTVINKKSGEIVPMEVNFNFDDPNLIILPLAFGKRQGREFIWNDLLSLETGSLQLANGRVIEKTLYNRRTRQDEPALFVALTFERREVLDSSNIKPMNLIGVDRGENIPAVIALTDPEGCPLSRFKDSLGNPTHILRIGESYKEKQRTIQAKKEVEQRRAGGYSRKYASKAKNLADDMVRNTARDLLYYAVTQDAMLIFENLSRGFGRQGKRTFMAERQYTRMEDWLTAKLAYEGLPSKTYLSKTLAQYTSKTCSNCGFTITSADYDRVLEKLKKTATGWMTTINGKELKVEGQITYYNRYKRQNVVKDLSVELDRLSEESVNNDISSWTKGRSGEALSLLKKRFSHRPVQEKFVCLNCGFETHADEQAALNIARSWLFLRSQEYKKYQTNKTTGNTDKRAFVETWQSFYRKKLKEVWKPAV

SEQ ID NO: 39063 - protein, 979 aa, synthetic construct
  REGION 1..979: note = engineered CasX variant
QEIKRINKIRRRLVKDSNTKKAGKTGPMKTLLVRVMTPDLRERLENLRKKPENIPQPISNTSRANLNKLLTDYTEMKKAILHVYWEEFQKDPVGLMSRVAQPASKKIDQNKLKPEMDEKGNLTTAGFACSQCGQPLFVYKLEQVSEKGKAYTNYFGRCNVAEHEKLIKLAQLKPEKDSDEAVTYSLGKFGQRALDFYSIHVTKESTHPVKPLAQIAGNRYASGPVGKALSDACMGTIASFLSKYQDIIIEHQKVVKGNQKRLESLRELAGKENLEYPSVTLPPQPHTKEGVDAYNEVIARVRMWVNLNLWQKLKLSRDDAKPLLRLKGFPSFPLVERQANEVDWWDMVCNVKKLINEKKEDGKVFWQNLAGYKRQEALRPYLSSEEDVRKKGKKFARYQLGDLLLHLEKKHGEDWGKVYDEAWERIDKKVEGLSKHIKLEEERRSEDAQSKAALTDWLRAKASFVIEGLKEADKDEFCRCELKLQKWYGDLRGKPFAIEAENSILDISGFSKQYNCAFIWQKDGVKKLNLYLIINYFKGGKLRFKKIKPEAFEANRFYTVINKKSGEIVPMEVNFNFDDPNLIILPLAFGKRQGREFIWNDLLSLETGSLQLANGRVIEKTLYNRRTRQDEPALFVALTFERREVLDSSNIKPMNLIGVDRGENIPAVIALTDPEGCPLSRFKDSLGNPTHILRIGESYKEKQRTIQAKKEVEQRRAGGYSRKYASKAKNLADDMVRNTARDLLYYAVTQDAMLIFENLSRGFGRQGKRTFMAERQYTRMEDWLTAKLAYEGLPSKTYLSKTLAQYTSKTCSNCGFTITSADYDRVLEKLKKTATGWMTTINGKELKVEGQITYYNRYKRQNVVKDLSVELDRLSEESVNNDISSWTKGRSGEALSLLKKRFSHRPVQEKFVCLNCGFETHADEQAALNIARSWLFLRSQEYKKYQTNKTTGNTDKRAFVETWQSFYRKKLKEVWKPAV

SEQ ID NO: 39064 - protein, 978 aa, synthetic construct
  REGION 1..978: note = engineered CasX variant
QEIKRINKIRRRLVKDSNTKKAGKTGPMKTLLVRVMTPDLRERLENLRKKPENIPQPISNTSRANLNKLLTDYTEMKKAILHVYWEEFQKDPVGLMSRVAQPASKKIDQNKLKPEMDEKGNLTTAGFACSQCGQPLFVYKLEQVSEKGKAYTNYFGRCNVAEHEKLILLAQLKPEKDSDEAVTYSLGKFGQRALDFYSIHVTKESTHPVKPLAQIAGNRYASPVGKALSDACMGTIASFLSKYQDIIIEHQKVVKGNQKRLESLRELAGKENLEYPSVTLPPQPHTKEGVDAYNEVIARVRMWVNLNLWQKLKLSRDDAKPLLRLKGFPSFPLVERQANEVDWWDMVCNVKKLINEKKEDGKVFWQNLAGYKRQEALRPYLSSEEDVRKKGKKFARYQLGDLLLHLEKKHGEDWGKVYDEAWERIDKKVEGLSKHIKLEEERRSEDAQSKAALTDWLRAKASFVIEGLKEADKDEFCRCELKLQKWYGDLRGKPFAIEAENSILDISGFSKQYNCAFIWQKDGVKKLNLYLIINYFKGGKLRFKKIKPEAFEANRFYTVINKKSGEIVPMEVNFNFDDPNLIILPLAFGKRQGREFIWNDLLSLETGSLQLANGRVIEKTLYNRRTRQDEPALFVALTFERREVLDSSNIKPMNLIGVDRGENIPAVIALTDPEGCPLSRFKDSLGNPTHILRIGESYKEKQRTIQAKKEVEQRRAGGYSRKYASKAKNLADDMVRNTARDLLYYAVTQDAMLIFENLSRGFGRQGKRTFMAERQYTRMEDWLTAKLAYEGLPSKTYLSKTLAQYTSKTCSNCGFTITSADYDRVLEKLKKTATGWMTTINGKELKVEGQITYYNRYKRQNVVKDLSVELDRLSEESVNNDISSWTKGRSGEALSLLKKRFSHRPVQEKFVCLNCGFETHADEQAALNIARSWLFLRSQEYKKYQTNKTTGNTDKRAFVETWQSFYRKKLKEVWKPAV

SEQ ID NO: 39065 - protein, 978 aa, synthetic construct
  REGION 1..978: note = engineered CasX variant
QEIKRINKIRRRLVKDSNTKKAGKTGPMKTLLVRVMTPDLRERLENLRKKPENIPQPISNTSRANLNKLLTDYTEMKKAILHVYWEEFQKDPVGLMSRVAQPASKKIDQNKLKPEMDEKGNLTTAGFACSQCGQPLFVYKLEQVSEKGKAYTNYFGRCNVAEHEKLILLAQLKPEKDSDEAVTYSLGKFGQRALDFYSIHVTKESTHPVKPLAQIAGNRYASYPVGKALSDACMGTIASFLSKYQDIIIEHQKVVKGNQKRLESLRELAGKENLEYPSVTLPPQPHTKEGVDAYNEVIARVRMWVNLNLWQKLKLSRDDAKPLLRLKGFPSFPLVERQANEVDWWDMVCNVKKLINEKKEDGKVFWQNLAGYKRQEALRPYLSSEEDRKKGKKFARYQLGDLLLHLEKKHGEDWGKVYDEAWERIDKKVEGLSKHIKLEEERRSEDAQSKAALTDWLRAKASFVIEGLKEADKDEFCRCELKLQKWYGDLRGKPFAIEAENSILDISGFSKQYNCAFIWQKDGVKKLNLYLIINYFKGGKLRFKKIKPEAFEANRFYTVINKKSGEIVPMEVNFNFDDPNLIILPLAFGKRQGREFIWNDLLSLETGSLKLANGRVIEKTLYNRRTRQDEPALFVALTFERREVLDSSNIKPMNLIGVDRGENIPAVIALTDPEGCPLSRFKDSLGNPTHILRIGESYKEKQRTIQAKKEVEQRRAGGYSRKYASKAKNLADDMVRNTARDLLYYAVTQDAMLIFENLSRGFGRQGKRTFMAERQYTRMEDWLTAKLAYEGLPSKTYLSKTLAQYTSKTCSNCGFTITSADYDRMLEKLKKTATGWMTTINGKELKVEGQITYYNRYKRQNVVKDLSVELDRLSEESVNNDISSWTKGRQGEALSLLKKRFSHRPVQEKFVCLNCGFETHADEQAALNIARSWLFLRSQEYKKYQTNKTTGNTDKRAFVETWQSFYRKKLKEVWKPAV

SEQ ID NO: 39066 - protein, 978 aa, synthetic construct
  REGION 1..978: note = engineered CasX variant
QEIKRINKIRRRLVKDSNTKKAGKTGPMKTLLVRVMTPDLRERLENLRKKPENIPQPISNTSRANLNKLLTDYTEMKKAILHVYWEEFQKDPVGLMSRVAQPASKKIDQNKLKPEMDEKGNLTTAGFACSQCGQPLFVYKLEQVSEKGKAYTNYFGRCNVAEHEKLILLAQLKPEKDSDEAVTYSLGKFGQRALDFYSIHVTKESTHPVKPLAQIAGNRYASHPVGKALSDACMGTIASFLSKYQDIIIEHQKVVKGNQKRLESLRELAGKENLEYPSVTLPPQPHTKEGVDAYNEVIARVRMWVNLNLWQKLKLSRDDAKPLLRLKGFPSFPLVERQANEVDWWDMVCNVKKLINEKKEDGKVFWQNLAGYKRQEALRPYLSSEEDRKKGKKFARYQLGDLLLHLEKKHGEDWGKVYDEAWERIDKKVEGLSKHIKLEEERRSEDAQSKAALTDWLRAKASFVIEGLKEADKDEFCRCELKLQKWYGDLRGKPFAIEAENSILDISGFSKQYNCAFIWQKDGVKKLNLYLIINYFKGGKLRFKKIKPEAFEANRFYTVINKKSGEIVPMEVNFNFDDPNLIILPLAFGKRQGREFIWNDLLSLETGSLKLANGRVIEKTLYNRRTRQDEPALFVALTFERREVLDSSNIKPMNLIGVDRGENIPAVIALTDPEGCPLSRFKDSLGNPTHILRIGESYKEKQRTIQAKKEVEQRRAGGYSRKYASKAKNLADDMVRNTARDLLYYAVTQDAMLIFENLSRGFGRQGKRTFMAERQYTRMEDWLTAKLAYEGLPSKTYLSKTLAQYTSKTCSNCGFTITSADYDRMLEKLKKTATGWMTTINGKELKVEGQITYYNRYKRQNVVKDLSVELDRLSEESVNNDISSWTKGRQGEALSLLKKRFSHRPVQEKFVCLNCGFETHADEQAALNIARSWLFLRSQEYKKYQTNKTTGNTDKRAFVETWQSFYRKKLKEVWKPAV

SEQ ID NO: 39067 - protein, 978 aa, synthetic construct
  REGION 1..978: note = engineered CasX variant
QEIKRINKIRRRLVKDSNTKKAGKTGPMKTLLVRVMTPDLRERLENLRKKPENIPQPISNTSRANLNKLLTDYTEMKKAILHVYWEEFQKDPVGLMSRVAQPASKKIDQNKLKPEMDEKGNLTTAGFACSQCGQPLFVYKLEQVSEKGKAYTNYFGRCNVAEHEKLILLAQLKPEKDSDEAVTYSLGKFGQRALDFYSIHVTKESTHPVKPLAQIAGNRYASSPVGKALSDACMGTIASFLSKYQDIIIEHQKVVKGNQKRLESLRELAGKENLEYPSVTLPPQPHTKEGVDAYNEVIARVRMWVNLNLWQKLKLSRDDAKPLLRLKGFPSFPLVERQANEVDWWDMVCNVKKLINEKKEDGKVFWQNLAGYKRQEALRPYLSSEEDRKKGKKFARYQLGDLLLHLEKKHGEDWGKVYDEAWERIDKKVEGLSKHIKLEEERRSEDAQSKAALTDWLRAKASFVIEGLKEADKDEFCRCELKLQKWYGDLRGKPFAIEAENSILDISGFSKQYNCAFIWQKDGVKKLNLYLIINYFKGGKLRFKKIKPEAFEANRFYTVINKKSGEIVPMEVNFNFDDPNLIILPLAFGKRQGREFIWNDLLSLETGSLKLANGRVIEKTLYNRRTRQDEPALFVALTFERREVLDSSNIKPMNLIGVDRGENIPAVIALTDPEGCPLSRFKDSLGNPTHILRIGESYKEKQRTIQAKKEVEQRRAGGYSRKYASKAKNLADDMVRNTARDLLYYAVTQDAMLIFENLSRGFGRQGKRTFMAERQYTRMEDWLTAKLAYEGLPSKTYLSKTLAQYTSKTCSNCGFTITSADYDRMLEKLKKTATGWMTTINGKELKVEGQITYYNRYKRQNVVKDLSVELDRLSEESVNNDISSWTKGRQGEALSLLKKRFSHRPVQEKFVCLNCGFETHADEQAALNIARSWLFLRSQEYKKYQTNKTTGNTDKRAFVETWQSFYRKKLKEVWKPAV

SEQ ID NO: 39068 - protein, 978 aa, synthetic construct
  REGION 1..978: note = engineered CasX variant
QEIKRINKIRRRLVKDSNTKKAGKTGPMKTLLVRVMTPDLRERLENLRKKPENIPQPISNTSRANLNKLLTDYTEMKKAILHVYWEEFQKDPVGLMSRVAQPASKKIDQNKLKPEMDEKGNLTTAGFACSQCGQPLFVYKLEQVSEKGKAYTNYFGRCNVAEHEKLILLAQLKPEKDSDEAVTYSLGKFGQRALDFYSIHVTKESTHPVKPLAQIAGNRYASTPVGKALSDACMGTIASFLSKYQDIIIEHQKVVKGNQKRLESLRELAGKENLEYPSVTLPPQPHTKEGVDAYNEVIARVRMWVNLNLWQKLKLSRDDAKPLLRLKGFPSFPLVERQANEVDWWDMVCNVKKLINEKKEDGKVFWQNLAGYKRQEALRPYLSSEEDRKKGKKFARYQLGDLLLHLEKKHGEDWGKVYDEAWERIDKKVEGLSKHIKLEEERRSEDAQSKAALTDWLRAKASFVIEGLKEADKDEFCRCELKLQKWYGDLRGKPFAIEAENSILDISGFSKQYNCAFIWQKDGVKKLNLYLIINYFKGGKLRFKKIKPEAFEANRFYTVINKKSGEIVPMEVNFNFDDPNLIILPLAFGKRQGREFIWNDLLSLETGSLKLANGRVIEKTLYNRRTRQDEPALFVALTFERREVLDSSNIKPMNLIGVDRGENIPAVIALTDPEGCPLSRFKDSLGNPTHILRIGESYKEKQRTIQAKKEVEQRRAGGYSRKYASKAKNLADDMVRNTARDLLYYAVTQDAMLIFENLSRGFGRQGKRTFMAERQYTRMEDWLTAKLAYEGLPSKTYLSKTLAQYTSKTCSNCGFTITSADYDRMLEKLKKTATGWMTTINGKELKVEGQITYYNRYKRQNVVKDLSVELDRLSEESVNNDISSWTKGRQGEALSLLKKRFSHRPVQEKFVCLNCGFETHADEQAALNIARSWLFLRSQEYKKYQTNKTTGNTDKRAFVETWQSFYRKKLKEVWKPAV

SEQ ID NO: 39069 - protein, 978 aa, synthetic construct
  REGION 1..978: note = engineered CasX variant
QEIKRINKIRRRLVKDSNTKKAGKTGPMKTLLVRVMTPDLRERLENLRKKPENIPQPISNTSRANLNKLLTDYTEMKKAILHVYWEEFQKDPVGLMSRVAQPASKKIDQNKLKPEMDEKGNLTTAGFACSQCGQPLFVYKLEQVSEKGKAYTNYFGRCNVAEHEKLILLAQLKPEKDSDEAVTYSLGKFGQRALDFYSIHVTKESTHPVKPLAQIAGNRYASAPVGKALSDACMGTIASFLSKYQDIIIEHQKVVKGNQKRLESLRELAGKENLEYPSVTLPPQPHTKEGVDAYNEVIARVRMWVNLNLWQKLKLSRDDAKPLLRLKGFPSFPLVERQANEVDWWDMVCNVKKLINEKKEDGKVFWQNLAGYKRQEALRPYLSSEEDRKKGKKFARYQLGDLLLHLEKKHGEDWGKVYDEAWERIDKKVEGLSKHIKLEEERRSEDAQSKAALTDWLRAKASFVIEGLKEADKDEFCRCELKLQKWYGDLRGKPFAIEAENSILDISGFSKQYNCAFIWQKDGVKKLNLYLIINYFKGGKLRFKKIKPEAFEANRFYTVINKKSGEIVPMEVNFNFDDPNLIILPLAFGKRQGREFIWNDLLSLETGSLKLANGRVIEKTLYNRRTRQDEPALFVALTFERREVLDSSNIKPMNLIGVDRGENIPAVIALTDPEGCPLSRFKDSLGNPTHILRIGESYKEKQRTIQAKKEVEQRRAGGYSRKYASKAKNLADDMVRNTARDLLYYAVTQDAMLIFENLSRGFGRQGKRTFMAERQYTRMEDWLTAKLAYEGLPSKTYLSKTLAQYTSKTCSNCGFTITSADYDRMLEKLKKTATGWMTTINGKELKVEGQITYYNRYKRQNVVKDLSVELDRLSEESVNNDISSWTKGRQGEALSLLKKRFSHRPVQEKFVCLNCGFETHADEQAALNIARSWLFLRSQEYKKYQTNKTTGNTDKRAFVETWQSFYRKKLKEVWKPAV

SEQ ID NO: 39070 - protein, 978 aa, synthetic construct
  REGION 1..978: note = engineered CasX variant
QEIKRINKIRRRLVKDSNTKKAGKTGPMKTLLVRVMTPDLRERLENLRKKPENIPQPISNTSRANLNKLLTDYTEMKKAILHVYWEEFQKDPVGLMSRVAQPASKKIDQNKLKPEMDEKGNLTTAGFACSQCGQPLFVYKLEQVSEKGKAYTNYFGRCNVAEHEKLILLAQLKPEKDSDEAVTYSLGKFGQRALDFYSIHVTKESTHPVKPLAQIAGNRYASVPVGKALSDACMGTIASFLSKYQDIIIEHQKVVKGNQKRLESLRELAGKENLEYPSVTLPPQPHTKEGVDAYNEVIARVRMWVNLNLWQKLKLSRDDAKPLLRLKGFPSFPLVERQANEVDWWDMVCNVKKLINEKKEDGKVFWQNLAGYKRQEALRPYLSSEEDRKKGKKFARYQLGDLLLHLEKKHGEDWGKVYDEAWERIDKKVEGLSKHIKLEEERRSEDAQSKAALTDWLRAKASFVIEGLKEADKDEFCRCELKLQKWYGDLRGKPFAIEAENSILDISGFSKQYNCAFIWQKDGVKKLNLYLIINYFKGGKLRFKKIKPEAFEANRFYTVINKKSGEIVPMEVNFNFDDPNLIILPLAFGKRQGREFIWNDLLSLETGSLKLANGRVIEKTLYNRRTRQDEPALFVALTFERREVLDSSNIKPMNLIGVDRGENIPAVIALTDPEGCPLSRFKDSLGNPTHILRIGESYKEKQRTIQAKKEVEQRRAGGYSRKYASKAKNLADDMVRNTARDLLYYAVTQDAMLIFENLSRGFGRQGKRTFMAERQYTRMEDWLTAKLAYEGLPSKTYLSKTLAQYTSKTCSNCGFTITSADYDRMLEKLKKTATGWMTTINGKELKVEGQITYYNRYKRQNVVKDLSVELDRLSEESVNNDISSWTKGRQGEALSLLKKRFSHRPVQEKFVCLNCGFETHADEQAALNIARSWLFLRSQEYKKYQTNKTTGNTDKRAFVETWQSFYRKKLKEVWKPAV

SEQ ID NO: 39071 - protein, 978 aa, synthetic construct
  REGION 1..978: note = engineered CasX variant
QEIKRINKIRRRLVKDSNTKKAGKTGPMKTLLVRVMTPDLRERLENLRKKPENIPQPISNTSRANLNKLLTDYTEMKKAILHVYWEEFQKDPVGLMSRVAQPASKKIDQNKLKPEMDEKGNLTTAGFACSQCGQPLFVYKLEQVSEKGKAYTNYFGRCNVAEHEKLIKLAQLKPEKDSDEAVTYSLGKFGQRALDFYSIHVTKESTHPVKPLAQIAGNRYASGPVGKALSDACMGTIASFLSKYQDIIIEHQKVVKGNQKRLESLRELAGKENLEYPSVTLPPQPHTKEGVDAYNEVIARVRMWVNLNLWQKLKLSRDDAKPLLRLKGFPSFPLVERQANEVDWWDMVCNVKKLINEKKEDGKVFWQNLAGYKRQEALRPYLSSEEDRKKGKKFARYQLGDLLLHLEKKHGEDWGKVYDEAWERIDKKVEGLSKHIKLEEERRSEDAQSKAALTDWLRAKASFVIEGLKEADKDEFCRCELKLQKWYGDLRGKPFAIEAENSILDISGFSKQYNCAFIWQKDGVKKLNLYLIINYFKGGKLRFKKIKPEAFEANRFYTVINKKSGEIVPMEVNFNFDDPNLIILPLAFGKRQGREFIWNDLLSLETGSLKLANGRVIEKTLYNRRTRQDEPALFVALTFERREVLDSSNIKPMNLIGVDRGENIPAVIALTDPEGCPLSRFKDSLGNPTHILRIGESYKEKQRTIQAKKEVEQRRAGGYSRKYASKAKNLADDMVRNTARDLLYYAVTQDAMLIFENLSRGFGRQGKRTFMAERQYTRMEDWLTAKLAYEGLPSKTYLSKTLAQYTSKTCSNCGFTITSADYDRMLEKLKKTATGWMTTINGKELKVEGQITYYNRYKRQNVVKDLSVELDRLSEESVNNDISSWTKGRQGEALSLLKKRFSHRPVQEKFVCLNCGFETHADEQAALNIARSWLFLRSQEYKKYQTNKTTGNTDKRAFVETWQSFYRKKLKEVWKPAV

SEQ ID NO: 39072 - protein, 977 aa, synthetic construct
  REGION 1..977: note = engineered CasX variant
QEIKRINKIRRRLVKDSNTKKAGKTGPMKTLLVRVMTPDLRERLENLRKKPENIPQPISNTSRANLNKLLTDYTEMKKAILHVYWEEFQKDPVGLMSRVAQPASKKIDQNKLKPEMDEKGNLTTAGFACSQCGQPLFVYKLEQVSEKGKAYTNYFGRCNVAEHEKLILLAQLKPEKDSDEAVTYSLGKFGQRALDFYSIHVTKESTHPVKPLAQIAGNRYASPVGKALSDACMGTIASFLSKYQDIIIEHQKVVKGNQKRLESLRELAGKENLEYPSVTLPPQPHTKEGVDAYNEVIARVRMWVNLNLWQKLKLSRDDAKPLLRLKGFPSFPLVERQANEVDWWDMVCNVKKLINEKKEDGKVFWQNLAGYKRQEALRPYLSSEEDRKKGKKFARYQLGDLLLHLEKKHGEDWGKVYDEAWERIDKKVEGLSKHIKLEEERRSEDAQSKAALTDWLRAKASFVIEGLKEADKDEFCRCELKLQKWYGDLRGKPFAIEAENSILDISGFSKQYNCAFIWQKDGVKKLNLYLIINYFKGGKLRFKKIKPEAFEANRFYTVINKKSGEIVPMEVNFNFDDPNLIILPLAFGKRQGREFIWNDLLSLETGSLKLANGRVIEKTLYNRRTRQDEPALFVALTFERREVLDSSNIKPMNLIGVDRGENIPAVIALTDPEGCPLSRFKDSLGNPTHILRIGESYKEKQRTIQAKKEVEQRRAGGYSRKYASKAKNLADDMVRNTARDLLYYAVTQDAMLIFENLSRGFGRQGKRTFMAERQYTRMEDWLTAKLAYEGLPSKTYLSKTLAQYTSKTCSNCGFTITSADYDRMLEKLKKTATGWMTTINGKELKVEGQITYYNRYKRQNVVKDLSVELDRLSEESVNNDISSWTKGRQGEALSLLKKRFSHRPVQEKFVCLNCGFETHADEQAALNIARSWLFLRSQEYKKYQTNKTTGNTDKRAFVETWQSFYRKKLKEVWKPAV

SEQ ID NO: 39073 - protein, 978 aa, synthetic construct
  REGION 1..978: note = engineered CasX variant
QEIKRINKIRRRLVKDSNTKKAGKTGPMKTLLVRVMTPDLRERLENLRKKPENIPQPISNTSRANLNKLLTDYTEMKKAILHVYWEEFQKDPVGLMSRVAQPASKKIDQNKLKPEMDEKGNLTTAGFACSQCGQPLFVYKLEQVSEKGKAYTNYFGRCNVAEHEKLILLAQLKPEKDSDEAVTYSLGKFGQRALDFYSIHVTKESTHPVKPLAQIAGNRYASYPVGKALSDACMGTIASFLSKYQDIIIEHQKVVKGNQKRLESLRELAGKENLEYPSVTLPPQPHTKEGVDAYNEVIARVRMWVNLNLWQKLKLSRDDAKPLLRLKGFPSFPLVERQANEVDWWDMVCNVKKLINEKKEDGKVFWQNLAGYKRQEALRPYLSSEEDRKKGKKFARYQLGDLLLHLEKKHGEDWGKVYDEAWERIDKKVEGLSKHIKLEEERRSEDAQSKAALTDWLRAKASFVIEGLKEADKDEFCRCELKLQKWYGDLRGKPFAIEAENSILDISGFSKQYNCAFIWQKDGVKKLNLYLIINYFKGGKLRFKKIKPEAFEANRFYTVINKKSGEIVPMEVNFNFDDPNLIILPLAFGKRQGREFIWNDLLSLETGSLKLANGRVIEKTLYNRRTRQDEPALFVALTFERREVLDSSNIKPMNLIGVDRGENIPAVIALTDPEGCPLSRFKDSLGNPTHILRIGESYKEKQRTIQAKKEVEQRRAGGYSRKYASKAKNLADDMVRNTARDLLYYAVTQDAMLIFENLSRGFGRQGKRTFMAERQYTRMEDWLTAKLAYEGLPSKTYLSKTLAQYTSKTCSNCGFTITSADYDRMLEKLKKTATGWMTTINGKELKVEGQITYYNRYKRQNVVKDLSVELDRLSEESVNNDISSWTKGRSGEALSLLKKRFSHRPVQEKFVCLNCEFETHADEQAALNIARSWLFLRSQEYKKYQTNKTTGNTDKRAFVETWQSFYRKKLKEVWKPAV

SEQ ID NO: 39074 - protein, 978 aa, synthetic construct
  REGION 1..978: note = engineered CasX variant
QEIKRINKIRRRLVKDSNTKKAGKTGPMKTLLVRVMTPDLRERLENLRKKPENIPQPISNTSRANLNKLLTDYTEMKKAILHVYWEEFQKDPVGLMSRVAQPASKKIDQNKLKPEMDEKGNLTTAGFACSQCGQPLFVYKLEQVSEKGKAYTNYFGRCNVAEHEKLILLAQLKPEKDSDEAVTYSLGKFGQRALDFYSIHVTKESTHPVKPLAQIAGNRYASHPVGKALSDACMGTIASFLSKYQDIIIEHQKVVKGNQKRLESLRELAGKENLEYPSVTLPPQPHTKEGVDAYNEVIARVRMWVNLNLWQKLKLSRDDAKPLLRLKGFPSFPLVERQANEVDWWDMVCNVKKLINEKKEDGKVFWQNLAGYKRQEALRPYLSSEEDRKKGKKFARYQLGDLLLHLEKKHGEDWGKVYDEAWERIDKKVEGLSKHIKLEEERRSEDAQSKAALTDWLRAKASFVIEGLKEADKDEFCRCELKLQKWYGDLRGKPFAIEAENSILDISGFSKQYNCAFIWQKDGVKKLNLYLIINYFKGGKLRFKKIKPEAFEANRFYTVINKKSGEIVPMEVNFNFDDPNLIILPLAFGKRQGREFIWNDLLSLETGSLKLANGRVIEKTLYNRRTRQDEPALFVALTFERREVLDSSNIKPMNLIGVDRGENIPAVIALTDPEGCPLSRFKDSLGNPTHILRIGESYKEKQRTIQAKKEVEQRRAGGYSRKYASKAKNLADDMVRNTARDLLYYAVTQDAMLIFENLSRGFGRQGKRTFMAERQYTRMEDWLTAKLAYEGLPSKTYLSKTLAQYTSKTCSNCGFTITSADYDRMLEKLKKTATGWMTTINGKELKVEGQITYYNRYKRQNVVKDLSVELDRLSEESVNNDISSWTKGRSGEALSLLKKRFSHRPVQEKFVCLNCEFETHADEQAALNIARSWLFLRSQEYKKYQTNKTTGNTDKRAFVETWQSFYRKKLKEVWKPAV

SEQ ID NO: 39075 - protein, 978 aa, synthetic construct
  REGION 1..978: note = engineered CasX variant
QEIKRINKIRRRLVKDSNTKKAGKTGPMKTLLVRVMTPDLRERLENLRKKPENIPQPISNTSRANLNKLLTDYTEMKKAILHVYWEEFQKDPVGLMSRVAQPASKKIDQNKLKPEMDEKGNLTTAGFACSQCGQPLFVYKLEQVSEKGKAYTNYFGRCNVAEHEKLILLAQLKPEKDSDEAVTYSLGKFGQRALDFYSIHVTKESTHPVKPLAQIAGNRYASSPVGKALSDACMGTIASFLSKYQDIIIEHQKVVKGNQKRLESLRELAGKENLEYPSVTLPPQPHTKEGVDAYNEVIARVRMWVNLNLWQKLKLSRDDAKPLLRLKGFPSFPLVERQANEVDWWDMVCNVKKLINEKKEDGKVFWQNLAGYKRQEALRPYLSSEEDRKKGKKFARYQLGDLLLHLEKKHGEDWGKVYDEAWERIDKKVEGLSKHIKLEEERRSEDAQSKAALTDWLRAKASFVIEGLKEADKDEFCRCELKLQKWYGDLRGKPFAIEAENSILDISGFSKQYNCAFIWQKDGVKKLNLYLIINYFKGGKLRFKKIKPEAFEANRFYTVINKKSGEIVPMEVNFNFDDPNLIILPLAFGKRQGREFIWNDLLSLETGSLKLANGRVIEKTLYNRRTRQDEPALFVALTFERREVLDSSNIKPMNLIGVDRGENIPAVIALTDPEGCPLSRFKDSLGNPTHILRIGESYKEKQRTIQAKKEVEQRRAGGYSRKYASKAKNLADDMVRNTARDLLYYAVTQDAMLIFENLSRGFGRQGKRTFMAERQYTRMEDWLTAKLAYEGLPSKTYLSKTLAQYTSKTCSNCGFTITSADYDRMLEKLKKTATGWMTTINGKELKVEGQITYYNRYKRQNVVKDLSVELDRLSEESVNNDISSWTKGRSGEALSLLKKRFSHRPVQEKFVCLNCEFETHADEQAALNIARSWLFLRSQEYKKYQTNKTTGNTDKRAFVETWQSFYRKKLKEVWKPAV

SEQ ID NO: 39076 - protein, 978 aa, synthetic construct
  REGION 1..978: note = engineered CasX variant
QEIKRINKIRRRLVKDSNTKKAGKTGPMKTLLVRVMTPDLRERLENLRKKPENIPQPISNTSRANLNKLLTDYTEMKKAILHVYWEEFQKDPVGLMSRVAQPASKKIDQNKLKPEMDEKGNLTTAGFACSQCGQPLFVYKLEQVSEKGKAYTNYFGRCNVAEHEKLILLAQLKPEKDSDEAVTYSLGKFGQRALDFYSIHVTKESTHPVKPLAQIAGNRYASTPVGKALSDACMGTIASFLSKYQDIIIEHQKVVKGNQKRLESLRELAGKENLEYPSVTLPPQPHTKEGVDAYNEVIARVRMWVNLNLWQKLKLSRDDAKPLLRLKGFPSFPLVERQANEVDWWDMVCNVKKLINEKKEDGKVFWQNLAGYKRQEALRPYLSSEEDRKKGKKFARYQLGDLLLHLEKKHGEDWGKVYDEAWERIDKKVEGLSKHIKLEEERRSEDAQSKAALTDWLRAKASFVIEGLKEADKDEFCRCELKLQKWYGDLRGKPFAIEAENSILDISGFSKQYNCAFIWQKDGVKKLNLYLIINYFKGGKLRFKKIKPEAFEANRFYTVINKKSGEIVPMEVNFNFDDPNLIILPLAFGKRQGREFIWNDLLSLETGSLKLANGRVIEKTLYNRRTRQDEPALFVALTFERREVLDSSNIKPMNLIGVDRGENIPAVIALTDPEGCPLSRFKDSLGNPTHILRIGESYKEKQRTIQAKKEVEQRRAGGYSRKYASKAKNLADDMVRNTARDLLYYAVTQDAMLIFENLSRGFGRQGKRTFMAERQYTRMEDWLTAKLAYEGLPSKTYLSKTLAQYTSKTCSNCGFTITSADYDRMLEKLKKTATGWMTTINGKELKVEGQITYYNRYKRQNVVKDLSVELDRLSEESVNNDISSWTKGRSGEALSLLKKRFSHRPVQEKFVCLNCEFETHADEQAALNIARSWLFLRSQEYKKYQTNKTTGNTDKRAFVETWQSFYRKKLKEVWKPAV

SEQ ID NO: 39077 - protein, 978 aa, synthetic construct
  REGION 1..978: note = engineered CasX variant
QEIKRINKIRRRLVKDSNTKKAGKTGPMKTLLVRVMTPDLRERLENLRKKPENIPQPISNTSRANLNKLLTDYTEMKKAILHVYWEEFQKDPVGLMSRVAQPASKKIDQNKLKPEMDEKGNLTTAGFACSQCGQPLFVYKLEQVSEKGKAYTNYFGRCNVAEHEKLILLAQLKPEKDSDEAVTYSLGKFGQRALDFYSIHVTKESTHPVKPLAQIAGNRYASAPVGKALSDACMGTIASFLSKYQDIIIEHQKVVKGNQKRLESLRELAGKENLEYPSVTLPPQPHTKEGVDAYNEVIARVRMWVNLNLWQKLKLSRDDAKPLLRLKGFPSFPLVERQANEVDWWDMVCNVKKLINEKKEDGKVFWQNLAGYKRQEALRPYLSSEEDRKKGKKFARYQLGDLLLHLEKKHGEDWGKVYDEAWERIDKKVEGLSKHIKLEEERRSEDAQSKAALTDWLRAKASFVIEGLKEADKDEFCRCELKLQKWYGDLRGKPFAIEAENSILDISGFSKQYNCAFIWQKDGVKKLNLYLIINYFKGGKLRFKKIKPEAFEANRFYTVINKKSGEIVPMEVNFNFDDPNLIILPLAFGKRQGREFIWNDLLSLETGSLKLANGRVIEKTLYNRRTRQDEPALFVALTFERREVLDSSNIKPMNLIGVDRGENIPAVIALTDPEGCPLSRFKDSLGNPTHILRIGESYKEKQRTIQAKKEVEQRRAGGYSRKYASKAKNLADDMVRNTARDLLYYAVTQDAMLIFENLSRGFGRQGKRTFMAERQYTRMEDWLTAKLAYEGLPSKTYLSKTLAQYTSKTCSNCGFTITSADYDRMLEKLKKTATGWMTTINGKELKVEGQITYYNRYKRQNVVKDLSVELDRLSEESVNNDISSWTKGRSGEALSLLKKRFSHRPVQEKFVCLNCEFETHADEQAALNIARSWLFLRSQEYKKYQTNKTTGNTDKRAFVETWQSFYRKKLKEVWKPAV

SEQ ID NO: 39078 - protein, 978 aa, synthetic construct
  REGION 1..978: note = engineered CasX variant
QEIKRINKIRRRLVKDSNTKKAGKTGPMKTLLVRVMTPDLRERLENLRKKPENIPQPISNTSRANLNKLLTDYTEMKKAILHVYWEEFQKDPVGLMSRVAQPASKKIDQNKLKPEMDEKGNLTTAGFACSQCGQPLFVYKLEQVSEKGKAYTNYFGRCNVAEHEKLILLAQLKPEKDSDEAVTYSLGKFGQRALDFYSIHVTKESTHPVKPLAQIAGNRYASVPVGKALSDACMGTIASFLSKYQDIIIEHQKVVKGNQKRLESLRELAGKENLEYPSVTLPPQPHTKEGVDAYNEVIARVRMWVNLNLWQKLKLSRDDAKPLLRLKGFPSFPLVERQANEVDWWDMVCNVKKLINEKKEDGKVFWQNLAGYKRQEALRPYLSSEEDRKKGKKFARYQLGDLLLHLEKKHGEDWGKVYDEAWERIDKKVEGLSKHIKLEEERRSEDAQSKAALTDWLRAKASFVIEGLKEADKDEFCRCELKLQKWYGDLRGKPFAIEAENSILDISGFSKQYNCAFIWQKDGVKKLNLYLIINYFKGGKLRFKKIKPEAFEANRFYTVINKKSGEIVPMEVNFNFDDPNLIILPLAFGKRQGREFIWNDLLSLETGSLKLANGRVIEKTLYNRRTRQDEPALFVALTFERREVLDSSNIKPMNLIGVDRGENIPAVIALTDPEGCPLSRFKDSLGNPTHILRIGESYKEKQRTIQAKKEVEQRRAGGYSRKYASKAKNLADDMVRNTARDLLYYAVTQDAMLIFENLSRGFGRQGKRTFMAERQYTRMEDWLTAKLAYEGLPSKTYLSKTLAQYTSKTCSNCGFTITSADYDRMLEKLKKTATGWMTTINGKELKVEGQITYYNRYKRQNVVKDLSVELDRLSEESVNNDISSWTKGRSGEALSLLKKRFSHRPVQEKFVCLNCEFETHADEQAALNIARSWLFLRSQEYKKYQTNKTTGNTDKRAFVETWQSFYRKKLKEVWKPAV

SEQ ID NO: 39079 - protein, 978 aa, synthetic construct
  REGION 1..978: note = engineered CasX variant
QEIKRINKIRRRLVKDSNTKKAGKTGPMKTLLVRVMTPDLRERLENLRKKPENIPQPISNTSRANLNKLLTDYTEMKKAILHVYWEEFQKDPVGLMSRVAQPASKKIDQNKLKPEMDEKGNLTTAGFACSQCGQPLFVYKLEQVSEKGKAYTNYFGRCNVAEHEKLIKLAQLKPEKDSDEAVTYSLGKFGQRALDFYSIHVTKESTHPVKPLAQIAGNRYASGPVGKALSDACMGTIASFLSKYQDIIIEHQKVVKGNQKRLESLRELAGKENLEYPSVTLPPQPHTKEGVDAYNEVIARVRMWVNLNLWQKLKLSRDDAKPLLRLKGFPSFPLVERQANEVDWWDMVCNVKKLINEKKEDGKVFWQNLAGYKRQEALRPYLSSEEDRKKGKKFARYQLGDLLLHLEKKHGEDWGKVYDEAWERIDKKVEGLSKHIKLEEERRSEDAQSKAALTDWLRAKASFVIEGLKEADKDEFCRCELKLQKWYGDLRGKPFAIEAENSILDISGFSKQYNCAFIWQKDGVKKLNLYLIINYFKGGKLRFKKIKPEAFEANRFYTVINKKSGEIVPMEVNFNFDDPNLIILPLAFGKRQGREFIWNDLLSLETGSLKLANGRVIEKTLYNRRTRQDEPALFVALTFERREVLDSSNIKPMNLIGVDRGENIPAVIALTDPEGCPLSRFKDSLGNPTHILRIGESYKEKQRTIQAKKEVEQRRAGGYSRKYASKAKNLADDMVRNTARDLLYYAVTQDAMLIFENLSRGFGRQGKRTFMAERQYTRMEDWLTAKLAYEGLPSKTYLSKTLAQYTSKTCSNCGFTITSADYDRMLEKLKKTATGWMTTINGKELKVEGQITYYNRYKRQNVVKDLSVELDRLSEESVNNDISSWTKGRSGEALSLLKKRFSHRPVQEKFVCLNCEFETHADEQAALNIARSWLFLRSQEYKKYQTNKTTGNTDKRAFVETWQSFYRKKLKEVWKPAV

SEQ ID NO: 39080 - protein, 977 aa, synthetic construct
  REGION 1..977: note = engineered CasX variant
QEIKRINKIRRRLVKDSNTKKAGKTGPMKTLLVRVMTPDLRERLENLRKKPENIPQPISNTSRANLNKLLTDYTEMKKAILHVYWEEFQKDPVGLMSRVAQPASKKIDQNKLKPEMDEKGNLTTAGFACSQCGQPLFVYKLEQVSEKGKAYTNYFGRCNVAEHEKLILLAQLKPEKDSDEAVTYSLGKFGQRALDFYSIHVTKESTHPVKPLAQIAGNRYASPVGKALSDACMGTIASFLSKYQDIIIEHQKVVKGNQKRLESLRELAGKENLEYPSVTLPPQPHTKEGVDAYNEVIARVRMWVNLNLWQKLKLSRDDAKPLLRLKGFPSFPLVERQANEVDWWDMVCNVKKLINEKKEDGKVFWQNLAGYKRQEALRPYLSSEEDRKKGKKFARYQLGDLLLHLEKKHGEDWGKVYDEAWERIDKKVEGLSKHIKLEEERRSEDAQSKAALTDWLRAKASFVIEGLKEADKDEFCRCELKLQKWYGDLRGKPFAIEAENSILDISGFSKQYNCAFIWQKDGVKKLNLYLIINYFKGGKLRFKKIKPEAFEANRFYTVINKKSGEIVPMEVNFNFDDPNLIILPLAFGKRQGREFIWNDLLSLETGSLKLANGRVIEKTLYNRRTRQDEPALFVALTFERREVLDSSNIKPMNLIGVDRGENIPAVIALTDPEGCPLSRFKDSLGNPTHILRIGESYKEKQRTIQAKKEVEQRRAGGYSRKYASKAKNLADDMVRNTARDLLYYAVTQDAMLIFENLSRGFGRQGKRTFMAERQYTRMEDWLTAKLAYEGLPSKTYLSKTLAQYTSKTCSNCGFTITSADYDRMLEKLKKTATGWMTTINGKELKVEGQITYYNRYKRQNVVKDLSVELDRLSEESVNNDISSWTKGRSGEALSLLKKRFSHRPVQEKFVCLNCEFETHADEQAALNIARSWLFLRSQEYKKYQTNKTTGNTDKRAFVETWQSFYRKKLKEVWKPAV

SEQ ID NO: 39081 - protein, 979 aa, synthetic construct
  REGION 1..979: note = engineered CasX variant
QEIKRINKIRRRLVKDSNTKKAGKTGPMKTLLVRVMTPDLRERLENLRKKPENIPQPISNTSRANLNKLLTDYTEMKKAILHVYWEEFQKDPVGLMSRVAQPASKKIDQNKLKPEMDEKGNLTTAGFACSQCGQPLFVYKLEQVSEKGKAYTNYFGRCNVAEHEKLILLAQLKPEKDSDEAVTYSLGKFGQRALDFYSIHVTKESTHPVKPLAQIAGNRYASYPVGKALSDACMGTIASFLSKYQDIIIEHQKVVKGNQKRLESLRELAGKENLEYPSVTLPPQPHTKEGVDAYNEVIARVRMWVNLNLWQKLKLSRDDAKPLLRLKGFPSFPLVERQANEVDWWDMVCNVKKLINEKKEDGKVFWQNLAGYKRQEALRPYLSSEEDRKKGKKFARYQLGDLLLHLEKKHGEDWGKVYDEAWERIDKKVEGLSKHIKLEEERRSEDAQSKAALTDWLRAKASFVIEGLKEADKDEFCRCELKLQKWYGDLRGKPFAIEAENSILDISGFSKQYNCAFIWQKDGVKKLNLYLIINYFKGGKLRFKKIKPEAFEANRFYTVINKKSGEIVPMEVNFNFDDPNLIILPLAFGKRQGREFIWNDLLSLETGSLKLANGRVIEKTLYNRRTRQDEPALFVALTFERREVLDSSNIKPMNLIGVDRGENIPAVIALTDPEGCPLSRFKDSLGNPTHILRIGESYKEKQRTIQAKKEVEQRRAGGYSRKYASKAKNLADDMVRNTARDLLYYAVTQDAMLIFENLSRGFGRQGKRTFMAERQYTRMEDWLTAKLAYEGLPSKTYLSKTLAQYTSKTCSNCGFTITSADYDRMLEKLKKTATGWMTTINGKELKVEGQITYYNRYKRQNVVKDLSVELDRLSEESVNNDISSWTKGRSGEALSLLKKRFSHRPVQEKFVCLNCGFETHADEQAALNIARSWLFLRSQEYKKYQTNKTSTGNTDKRAFVETWQSFYRKKLKEVWKPAV

SEQ ID NO: 39082 - protein, 979 aa, synthetic construct
  REGION 1..979: note = engineered CasX variant
QEIKRINKIRRRLVKDSNTKKAGKTGPMKTLLVRVMTPDLRERLENLRKKPENIPQPISNTSRANLNKLLTDYTEMKKAILHVYWEEFQKDPVGLMSRVAQPASKKIDQNKLKPEMDEKGNLTTAGFACSQCGQPLFVYKLEQVSEKGKAYTNYFGRCNVAEHEKLILLAQLKPEKDSDEAVTYSLGKFGQRALDFYSIHVTKESTHPVKPLAQIAGNRYASHPVGKALSDACMGTIASFLSKYQDIIIEHQKVVKGNQKRLESLRELAGKENLEYPSVTLPPQPHTKEGVDAYNEVIARVRMWVNLNLWQKLKLSRDDAKPLLRLKGFPSFPLVERQANEVDWWDMVCNVKKLINEKKEDGKVFWQNLAGYKRQEALRPYLSSEEDRKKGKKFARYQLGDLLLHLEKKHGEDWGKVYDEAWERIDKKVEGLSKHIKLEEERRSEDAQSKAALTDWLRAKASFVIEGLKEADKDEFCRCELKLQKWYGDLRGKPFAIEAENSILDISGFSKQYNCAFIWQKDGVKKLNLYLIINYFKGGKLRFKKIKPEAFEANRFYTVINKKSGEIVPMEVNFNFDDPNLIILPLAFGKRQGREFIWNDLLSLETGSLKLANGRVIEKTLYNRRTRQDEPALFVALTFERREVLDSSNIKPMNLIGVDRGENIPAVIALTDPEGCPLSRFKDSLGNPTHILRIGESYKEKQRTIQAKKEVEQRRAGGYSRKYASKAKNLADDMVRNTARDLLYYAVTQDAMLIFENLSRGFGRQGKRTFMAERQYTRMEDWLTAKLAYEGLPSKTYLSKTLAQYTSKTCSNCGFTITSADYDRMLEKLKKTATGWMTTINGKELKVEGQITYYNRYKRQNVVKDLSVELDRLSEESVNNDISSWTKGRSGEALSLLKKRFSHRPVQEKFVCLNCGFETHADEQAALNIARSWLFLRSQEYKKYQTNKTSTGNTDKRAFVETWQSFYRKKLKEVWKPAV

SEQ ID NO: 39083 - protein, 979 aa, synthetic construct
  REGION 1..979: note = engineered CasX variant
QEIKRINKIRRRLVKDSNTKKAGKTGPMKTLLVRVMTPDLRERLENLRKKPENIPQPISNTSRANLNKLLTDYTEMKKAILHVYWEEFQKDPVGLMSRVAQPASKKIDQNKLKPEMDEKGNLTTAGFACSQCGQPLFVYKLEQVSEKGKAYTNYFGRCNVAEHEKLILLAQLKPEKDSDEAVTYSLGKFGQRALDFYSIHVTKESTHPVKPLAQIAGNRYASSPVGKALSDACMGTIASFLSKYQDIIIEHQKVVKGNQKRLESLRELAGKENLEYPSVTLPPQPHTKEGVDAYNEVIARVRMWVNLNLWQKLKLSRDDAKPLLRLKGFPSFPLVERQANEVDWWDMVCNVKKLINEKKEDGKVFWQNLAGYKRQEALRPYLSSEEDRKKGKKFARYQLGDLLLHLEKKHGEDWGKVYDEAWERIDKKVEGLSKHIKLEEERRSEDAQSKAALTDWLRAKASFVIEGLKEADKDEFCRCELKLQKWYGDLRGKPFAIEAENSILDISGFSKQYNCAFIWQKDGVKKLNLYLIINYFKGGKLRFKKIKPEAFEANRFYTVINKKSGEIVPMEVNFNFDDPNLIILPLAFGKRQGREFIWNDLLSLETGSLKLANGRVIEKTLYNRRTRQDEPALFVALTFERREVLDSSNIKPMNLIGVDRGENIPAVIALTDPEGCPLSRFKDSLGNPTHILRIGESYKEKQRTIQAKKEVEQRRAGGYSRKYASKAKNLADDMVRNTARDLLYYAVTQDAMLIFENLSRGFGRQGKRTFMAERQYTRMEDWLTAKLAYEGLPSKTYLSKTLAQYTSKTCSNCGFTITSADYDRMLEKLKKTATGWMTTINGKELKVEGQITYYNRYKRQNVVKDLSVELDRLSEESVNNDISSWTKGRSGEALSLLKKRFSHRPVQEKFVCLNCGFETHADEQAALNIARSWLFLRSQEYKKYQTNKTSTGNTDKRAFVETWQSFYRKKLKEVWKPAV

SEQ ID NO: 39084 - protein, 979 aa, synthetic construct
  REGION 1..979: note = engineered CasX variant
QEIKRINKIRRRLVKDSNTKKAGKTGPMKTLLVRVMTPDLRERLENLRKKPENIPQPISNTSRANLNKLLTDYTEMKKAILHVYWEEFQKDPVGLMSRVAQPASKKIDQNKLKPEMDEKGNLTTAGFACSQCGQPLFVYKLEQVSEKGKAYTNYFGRCNVAEHEKLILLAQLKPEKDSDEAVTYSLGKFGQRALDFYSIHVTKESTHPVKPLAQIAGNRYASTPVGKALSDACMGTIASFLSKYQDIIIEHQKVVKGNQKRLESLRELAGKENLEYPSVTLPPQPHTKEGVDAYNEVIARVRMWVNLNLWQKLKLSRDDAKPLLRLKGFPSFPLVERQANEVDWWDMVCNVKKLINEKKEDGKVFWQNLAGYKRQEALRPYLSSEEDRKKGKKFARYQLGDLLLHLEKKHGEDWGKVYDEAWERIDKKVEGLSKHIKLEEERRSEDAQSKAALTDWLRAKASFVIEGLKEADKDEFCRCELKLQKWYGDLRGKPFAIEAENSILDISGFSKQYNCAFIWQKDGVKKLNLYLIINYFKGGKLRFKKIKPEAFEANRFYTVINKKSGEIVPMEVNFNFDDPNLIILPLAFGKRQGREFIWNDLLSLETGSLKLANGRVIEKTLYNRRTRQDEPALFVALTFERREVLDSSNIKPMNLIGVDRGENIPAVIALTDPEGCPLSRFKDSLGNPTHILRIGESYKEKQRTIQAKKEVEQRRAGGYSRKYASKAKNLADDMVRNTARDLLYYAVTQDAMLIFENLSRGFGRQGKRTFMAERQYTRMEDWLTAKLAYEGLPSKTYLSKTLAQYTSKTCSNCGFTITSADYDRMLEKLKKTATGWMTTINGKELKVEGQITYYNRYKRQNVVKDLSVELDRLSEESVNNDISSWTKGRSGEALSLLKKRFSHRPVQEKFVCLNCGFETHADEQAALNIARSWLFLRSQEYKKYQTNKTSTGNTDKRAFVETWQSFYRKKLKEVWKPAV

SEQ ID NO: 39085 - protein, 979 aa, synthetic construct
  REGION 1..979: note = engineered CasX variant
QEIKRINKIRRRLVKDSNTKKAGKTGPMKTLLVRVMTPDLRERLENLRKKPENIPQPISNTSRANLNKLLTDYTEMKKAILHVYWEEFQKDPVGLMSRVAQPASKKIDQNKLKPEMDEKGNLTTAGFACSQCGQPLFVYKLEQVSEKGKAYTNYFGRCNVAEHEKLILLAQLKPEKDSDEAVTYSLGKFGQRALDFYSIHVTKESTHPVKPLAQIAGNRYASAPVGKALSDACMGTIASFLSKYQDIIIEHQKVVKGNQKRLESLRELAGKENLEYPSVTLPPQPHTKEGVDAYNEVIARVRMWVNLNLWQKLKLSRDDAKPLLRLKGFPSFPLVERQANEVDWWDMVCNVKKLINEKKEDGKVFWQNLAGYKRQEALRPYLSSEEDRKKGKKFARYQLGDLLLHLEKKHGEDWGKVYDEAWERIDKKVEGLSKHIKLEEERRSEDAQSKAALTDWLRAKASFVIEGLKEADKDEFCRCELKLQKWYGDLRGKPFAIEAENSILDISGFSKQYNCAFIWQKDGVKKLNLYLIINYFKGGKLRFKKIKPEAFEANRFYTVINKKSGEIVPMEVNFNFDDPNLIILPLAFGKRQGREFIWNDLLSLETGSLKLANGRVIEKTLYNRRTRQDEPALFVALTFERREVLDSSNIKPMNLIGVDRGENIPAVIALTDPEGCPLSRFKDSLGNPTHILRIGESYKEKQRTIQAKKEVEQRRAGGYSRKYASKAKNLADDMVRNTARDLLYYAVTQDAMLIFENLSRGFGRQGKRTFMAERQYTRMEDWLTAKLAYEGLPSKTYLSKTLAQYTSKTCSNCGFTITSADYDRMLEKLKKTATGWMTTINGKELKVEGQITYYNRYKRQNVVKDLSVELDRLSEESVNNDISSWTKGRSGEALSLLKKRFSHRPVQEKFVCLNCGFETHADEQAALNIARSWLFLRSQEYKKYQTNKTSTGNTDKRAFVETWQSFYRKKLKEVWKPAV

SEQ ID NO: 39086 - protein, 979 aa, synthetic construct
  REGION 1..979: note = engineered CasX variant
QEIKRINKIRRRLVKDSNTKKAGKTGPMKTLLVRVMTPDLRERLENLRKKPENIPQPISNTSRANLNKLLTDYTEMKKAILHVYWEEFQKDPVGLMSRVAQPASKKIDQNKLKPEMDEKGNLTTAGFACSQCGQPLFVYKLEQVSEKGKAYTNYFGRCNVAEHEKLILLAQLKPEKDSDEAVTYSLGKFGQRALDFYSIHVTKESTHPVKPLAQIAGNRYASVPVGKALSDACMGTIASFLSKYQDIIIEHQKVVKGNQKRLESLRELAGKENLEYPSVTLPPQPHTKEGVDAYNEVIARVRMWVNLNLWQKLKLSRDDAKPLLRLKGFPSFPLVERQANEVDWWDMVCNVKKLINEKKEDGKVFWQNLAGYKRQEALRPYLSSEEDRKKGKKFARYQLGDLLLHLEKKHGEDWGKVYDEAWERIDKKVEGLSKHIKLEEERRSEDAQSKAALTDWLRAKASFVIEGLKEADKDEFCRCELKLQKWYGDLRGKPFAIEAENSILDISGFSKQYNCAFIWQKDGVKKLNLYLIINYFKGGKLRFKKIKPEAFEANRFYTVINKKSGEIVPMEVNFNFDDPNLIILPLAFGKRQGREFIWNDLLSLETGSLKLANGRVIEKTLYNRRTRQDEPALFVALTFERREVLDSSNIKPMNLIGVDRGENIPAVIALTDPEGCPLSRFKDSLGNPTHILRIGESYKEKQRTIQAKKEVEQRRAGGYSRKYASKAKNLADDMVRNTARDLLYYAVTQDAMLIFENLSRGFGRQGKRTFMAERQYTRMEDWLTAKLAYEGLPSKTYLSKTLAQYTSKTCSNCGFTITSADYDRMLEKLKKTATGWMTTINGKELKVEGQITYYNRYKRQNVVKDLSVELDRLSEESVNNDISSWTKGRSGEALSLLKKRFSHRPVQEKFVCLNCGFETHADEQAALNIARSWLFLRSQEYKKYQTNKTSTGNTDKRAFVETWQSFYRKKLKEVWKPAV

SEQ ID NO: 39087 - protein, 979 aa, synthetic construct
  REGION 1..979: note = engineered CasX variant
QEIKRINKIRRRLVKDSNTKKAGKTGPMKTLLVRVMTPDLRERLENLRKKPENIPQPISNTSRANLNKLLTDYTEMKKAILHVYWEEFQKDPVGLMSRVAQPASKKIDQNKLKPEMDEKGNLTTAGFACSQCGQPLFVYKLEQVSEKGKAYTNYFGRCNVAEHEKLIKLAQLKPEKDSDEAVTYSLGKFGQRALDFYSIHVTKESTHPVKPLAQIAGNRYASGPVGKALSDACMGTIASFLSKYQDIIIEHQKVVKGNQKRLESLRELAGKENLEYPSVTLPPQPHTKEGVDAYNEVIARVRMWVNLNLWQKLKLSRDDAKPLLRLKGFPSFPLVERQANEVDWWDMVCNVKKLINEKKEDGKVFWQNLAGYKRQEALRPYLSSEEDRKKGKKFARYQLGDLLLHLEKKHGEDWGKVYDEAWERIDKKVEGLSKHIKLEEERRSEDAQSKAALTDWLRAKASFVIEGLKEADKDEFCRCELKLQKWYGDLRGKPFAIEAENSILDISGFSKQYNCAFIWQKDGVKKLNLYLIINYFKGGKLRFKKIKPEAFEANRFYTVINKKSGEIVPMEVNFNFDDPNLIILPLAFGKRQGREFIWNDLLSLETGSLKLANGRVIEKTLYNRRTRQDEPALFVALTFERREVLDSSNIKPMNLIGVDRGENIPAVIALTDPEGCPLSRFKDSLGNPTHILRIGESYKEKQRTIQAKKEVEQRRAGGYSRKYASKAKNLADDMVRNTARDLLYYAVTQDAMLIFENLSRGFGRQGKRTFMAERQYTRMEDWLTAKLAYEGLPSKTYLSKTLAQYTSKTCSNCGFTITSADYDRMLEKLKKTATGWMTTINGKELKVEGQITYYNRYKRQNVVKDLSVELDRLSEESVNNDISSWTKGRSGEALSLLKKRFSHRPVQEKFVCLNCGFETHADEQAALNIARSWLFLRSQEYKKYQTNKTSTGNTDKRAFVETWQSFYRKKLKEVWKPAV

SEQ ID NO: 39088 - protein, 978 aa, synthetic construct
  REGION 1..978: note = engineered CasX variant
QEIKRINKIRRRLVKDSNTKKAGKTGPMKTLLVRVMTPDLRERLENLRKKPENIPQPISNTSRANLNKLLTDYTEMKKAILHVYWEEFQKDPVGLMSRVAQPASKKIDQNKLKPEMDEKGNLTTAGFACSQCGQPLFVYKLEQVSEKGKAYTNYFGRCNVAEHEKLILLAQLKPEKDSDEAVTYSLGKFGQRALDFYSIHVTKESTHPVKPLAQIAGNRYASPVGKALSDACMGTIASFLSKYQDIIIEHQKVVKGNQKRLESLRELAGKENLEYPSVTLPPQPHTKEGVDAYNEVIARVRMWVNLNLWQKLKLSRDDAKPLLRLKGFPSFPLVERQANEVDWWDMVCNVKKLINEKKEDGKVFWQNLAGYKRQEALRPYLSSEEDRKKGKKFARYQLGDLLLHLEKKHGEDWGKVYDEAWERIDKKVEGLSKHIKLEEERRSEDAQSKAALTDWLRAKASFVIEGLKEADKDEFCRCELKLQKWYGDLRGKPFAIEAENSILDISGFSKQYNCAFIWQKDGVKKLNLYLIINYFKGGKLRFKKIKPEAFEANRFYTVINKKSGEIVPMEVNFNFDDPNLIILPLAFGKRQGREFIWNDLLSLETGSLKLANGRVIEKTLYNRRTRQDEPALFVALTFERREVLDSSNIKPMNLIGVDRGENIPAVIALTDPEGCPLSRFKDSLGNPTHILRIGESYKEKQRTIQAKKEVEQRRAGGYSRKYASKAKNLADDMVRNTARDLLYYAVTQDAMLIFENLSRGFGRQGKRTFMAERQYTRMEDWLTAKLAYEGLPSKTYLSKTLAQYTSKTCSNCGFTITSADYDRMLEKLKKTATGWMTTINGKELKVEGQITYYNRYKRQNVVKDLSVELDRLSEESVNNDISSWTKGRSGEALSLLKKRFSHRPVQEKFVCLNCGFETHADEQAALNIARSWLFLRSQEYKKYQTNKTSTGNTDKRAFVETWQSFYRKKLKEVWKPAV

SEQ ID NO: 39089 - protein, 979 aa, synthetic construct
  REGION 1..979: note = engineered CasX variant
QEIKRINKIRRRLVKDSNTKKAGKTGPMKTLLVRVMTPDLRERLENLRKKPENIPQPISNTSRANLNKLLTDYTEMKKAILHVYWEEFQKDPVGLMSRVAQPASKKIDQNKLKPEMDEKGNLTTAGFACSQCGQPLFVYKLEQVSEKGKAYTNYFGRCNVAEHEKLILLAQLKPEKDSDEAVTYSLGKFGQRALDFYSIHVTKESTHPVKPLAQIAGNRYASYPVGKALSDACMGTIASFLSKYQDIIIEHQKVVKGNQKRLESLRELAGKENLEYPSVTLPPQPHTKEGVDAYNEVIARVRMWVNLNLWQKLKLSRDDAKPLLRLKGFPSFPLVERQANEVDWWDMVCNVKKLINEKKEDGKVFWQNLAGYKRQEALRPYLSSEEDRKKGKKFARYQLGDLLLHLEKKHGEDWGKVYDEAWERIDKKVEGLSKHIKLEEERRSEDAQSKAALTDWLRAKASFVIEGLKEADKDEFCRCELKLQKWYGDLRGKPFAIEAENSILDISGFSKQYNCAFIWQKDGVKKLNLYLIINYFKGGKLRFKKIKPEAFEANRFYTVINKKSGEIVPMEVNFNFDDPNLIILPLAFGKRQGREFIWNDLLSLETGSLKLANGRVIEKTLYNRRTRQDEPALFVALTFERREVLDSSNIKPMNLIGVDRGENIPAVIALTDPEGCPLSRFKDSLGNPTHILRIGESYKEKQRTIQAKKEVEQRRAGGYSRKYASKAKNLADDMVRNTARDLLYYAVTQDAMLIFENLSRGFGRQGKRTFMAERQYTRMEDWLTAKLAYEGLPSKTYLSKTLAQYTSKTCSNCGFTITSADYDRMLEKLKKTATGWMTTINGKELKVEGQITYYNRYKRQNVVKDLSVELDRLSEESVNNDISSWTKGRSGEALSLLKKRFSHRPVQEKFVCLNCGFETHADEQAALNIARSWLFLRSQEYKKYQTNKTTGKNTDKRAFVETWQSFYRKKLKEVWKPAV

SEQ ID NO: 39090 - protein, 979 aa, synthetic construct
  REGION 1..979: note = engineered CasX variant
QEIKRINKIRRRLVKDSNTKKAGKTGPMKTLLVRVMTPDLRERLENLRKKPENIPQPISNTSRANLNKLLTDYTEMKKAILHVYWEEFQKDPVGLMSRVAQPASKKIDQNKLKPEMDEKGNLTTAGFACSQCGQPLFVYKLEQVSEKGKAYTNYFGRCNVAEHEKLILLAQLKPEKDSDEAVTYSLGKFGQRALDFYSIHVTKESTHPVKPLAQIAGNRYASHPVGKALSDACMGTIASFLSKYQDIIIEHQKVVKGNQKRLESLRELAGKENLEYPSVTLPPQPHTKEGVDAYNEVIARVRMWVNLNLWQKLKLSRDDAKPLLRLKGFPSFPLVERQANEVDWWDMVCNVKKLINEKKEDGKVFWQNLAGYKRQEALRPYLSSEEDRKKGKKFARYQLGDLLLHLEKKHGEDWGKVYDEAWERIDKKVEGLSKHIKLEEERRSEDAQSKAALTDWLRAKASFVIEGLKEADKDEFCRCELKLQKWYGDLRGKPFAIEAENSILDISGFSKQYNCAFIWQKDGVKKLNLYLIINYFKGGKLRFKKIKPEAFEANRFYTVINKKSGEIVPMEVNFNFDDPNLIILPLAFGKRQGREFIWNDLLSLETGSLKLANGRVIEKTLYNRRTRQDEPALFVALTFERREVLDSSNIKPMNLIGVDRGENIPAVIALTDPEGCPLSRFKDSLGNPTHILRIGESYKEKQRTIQAKKEVEQRRAGGYSRKYASKAKNLADDMVRNTARDLLYYAVTQDAMLIFENLSRGFGRQGKRTFMAERQYTRMEDWLTAKLAYEGLPSKTYLSKTLAQYTSKTCSNCGFTITSADYDRMLEKLKKTATGWMTTINGKELKVEGQITYYNRYKRQNVVKDLSVELDRLSEESVNNDISSWTKGRSGEALSLLKKRFSHRPVQEKFVCLNCGFETHADEQAALNIARSWLFLRSQEYKKYQTNKTTGKNTDKRAFVETWQSFYRKKLKEVWKPAV

SEQ ID NO: 39091 - protein, 979 aa, synthetic construct
  REGION 1..979: note = engineered CasX variant
QEIKRINKIRRRLVKDSNTKKAGKTGPMKTLLVRVMTPDLRERLENLRKKPENIPQPISNTSRANLNKLLTDYTEMKKAILHVYWEEFQKDPVGLMSRVAQPASKKIDQNKLKPEMDEKGNLTTAGFACSQCGQPLFVYKLEQVSEKGKAYTNYFGRCNVAEHEKLILLAQLKPEKDSDEAVTYSLGKFGQRALDFYSIHVTKESTHPVKPLAQIAGNRYASSPVGKALSDACMGTIASFLSKYQDIIIEHQKVVKGNQKRLESLRELAGKENLEYPSVTLPPQPHTKEGVDAYNEVIARVRMWVNLNLWQKLKLSRDDAKPLLRLKGFPSFPLVERQANEVDWWDMVCNVKKLINEKKEDGKVFWQNLAGYKRQEALRPYLSSEEDRKKGKKFARYQLGDLLLHLEKKHGEDWGKVYDEAWERIDKKVEGLSKHIKLEEERRSEDAQSKAALTDWLRAKASFVIEGLKEADKDEFCRCELKLQKWYGDLRGKPFAIEAENSILDISGFSKQYNCAFIWQKDGVKKLNLYLIINYFKGGKLRFKKIKPEAFEANRFYTVINKKSGEIVPMEVNFNFDDPNLIILPLAFGKRQGREFIWNDLLSLETGSLKLANGRVIEKTLYNRRTRQDEPALFVALTFERREVLDSSNIKPMNLIGVDRGENIPAVIALTDPEGCPLSRFKDSLGNPTHILRIGESYKEKQRTIQAKKEVEQRRAGGYSRKYASKAKNLADDMVRNTARDLLYYAVTQDAMLIFENLSRGFGRQGKRTFMAERQYTRMEDWLTAKLAYEGLPSKTYLSKTLAQYTSKTCSNCGFTITSADYDRMLEKLKKTATGWMTTINGKELKVEGQITYYNRYKRQNVVKDLSVELDRLSEESVNNDISSWTKGRSGEALSLLKKRFSHRPVQEKFVCLNCGFETHADEQAALNIARSWLFLRSQEYKKYQTNKTTGKNTDKRAFVETWQSFYRKKLKEVWKPAV

SEQ ID NO: 39092 - protein, 979 aa, synthetic construct
  REGION 1..979: note = engineered CasX variant
QEIKRINKIRRRLVKDSNTKKAGKTGPMKTLLVRVMTPDLRERLENLRKKPENIPQPISNTSRANLNKLLTDYTEMKKAILHVYWEEFQKDPVGLMSRVAQPASKKIDQNKLKPEMDEKGNLTTAGFACSQCGQPLFVYKLEQVSEKGKAYTNYFGRCNVAEHEKLILLAQLKPEKDSDEAVTYSLGKFGQRALDFYSIHVTKESTHPVKPLAQIAGNRYASTPVGKALSDACMGTIASFLSKYQDIIIEHQKVVKGNQKRLESLRELAGKENLEYPSVTLPPQPHTKEGVDAYNEVIARVRMWVNLNLWQKLKLSRDDAKPLLRLKGFPSFPLVERQANEVDWWDMVCNVKKLINEKKEDGKVFWQNLAGYKRQEALRPYLSSEEDRKKGKKFARYQLGDLLLHLEKKHGEDWGKVYDEAWERIDKKVEGLSKHIKLEEERRSEDAQSKAALTDWLRAKASFVIEGLKEADKDEFCRCELKLQKWYGDLRGKPFAIEAENSILDISGFSKQYNCAFIWQKDGVKKLNLYLIINYFKGGKLRFKKIKPEAFEANRFYTVINKKSGEIVPMEVNFNFDDPNLIILPLAFGKRQGREFIWNDLLSLETGSLKLANGRVIEKTLYNRRTRQDEPALFVALTFERREVLDSSNIKPMNLIGVDRGENIPAVIALTDPEGCPLSRFKDSLGNPTHILRIGESYKEKQRTIQAKKEVEQRRAGGYSRKYASKAKNLADDMVRNTARDLLYYAVTQDAMLIFENLSRGFGRQGKRTFMAERQYTRMEDWLTAKLAYEGLPSKTYLSKTLAQYTSKTCSNCGFTITSADYDRMLEKLKKTATGWMTTINGKELKVEGQITYYNRYKRQNVVKDLSVELDRLSEESVNNDISSWTKGRSGEALSLLKKRFSHRPVQEKFVCLNCGFETHADEQAALNIARSWLFLRSQEYKKYQTNKTTGKNTDKRAFVETWQSFYRKKLKEVWKPAV

SEQ ID NO: 39093 - protein, 979 aa, synthetic construct
  REGION 1..979: note = engineered CasX variant
QEIKRINKIRRRLVKDSNTKKAGKTGPMKTLLVRVMTPDLRERLENLRKKPENIPQPISNTSRANLNKLLTDYTEMKKAILHVYWEEFQKDPVGLMSRVAQPASKKIDQNKLKPEMDEKGNLTTAGFACSQCGQPLFVYKLEQVSEKGKAYTNYFGRCNVAEHEKLILLAQLKPEKDSDEAVTYSLGKFGQRALDFYSIHVTKESTHPVKPLAQIAGNRYASAPVGKALSDACMGTIASFLSKYQDIIIEHQKVVKGNQKRLESLRELAGKENLEYPSVTLPPQPHTKEGVDAYNEVIARVRMWVNLNLWQKLKLSRDDAKPLLRLKGFPSFPLVERQANEVDWWDMVCNVKKLINEKKEDGKVFWQNLAGYKRQEALRPYLSSEEDRKKGKKFARYQLGDLLLHLEKKHGEDWGKVYDEAWERIDKKVEGLSKHIKLEEERRSEDAQSKAALTDWLRAKASFVIEGLKEADKDEFCRCELKLQKWYGDLRGKPFAIEAENSILDISGFSKQYNCAFIWQKDGVKKLNLYLIINYFKGGKLRFKKIKPEAFEANRFYTVINKKSGEIVPMEVNFNFDDPNLIILPLAFGKRQGREFIWNDLLSLETGSLKLANGRVIEKTLYNRRTRQDEPALFVALTFERREVLDSSNIKPMNLIGVDRGENIPAVIALTDPEGCPLSRFKDSLGNPTHILRIGESYKEKQRTIQAKKEVEQRRAGGYSRKYASKAKNLADDMVRNTARDLLYYAVTQDAMLIFENLSRGFGRQGKRTFMAERQYTRMEDWLTAKLAYEGLPSKTYLSKTLAQYTSKTCSNCGFTITSADYDRMLEKLKKTATGWMTTINGKELKVEGQITYYNRYKRQNVVKDLSVELDRLSEESVNNDISSWTKGRSGEALSLLKKRFSHRPVQEKFVCLNCGFETHADEQAALNIARSWLFLRSQEYKKYQTNKTTGKNTDKRAFVETWQSFYRKKLKEVWKPAV

SEQ ID NO: 39094 - protein, 979 aa, synthetic construct
  REGION 1..979: note = engineered CasX variant
QEIKRINKIRRRLVKDSNTKKAGKTGPMKTLLVRVMTPDLRERLENLRKKPENIPQPISNTSRANLNKLLTDYTEMKKAILHVYWEEFQKDPVGLMSRVAQPASKKIDQNKLKPEMDEKGNLTTAGFACSQCGQPLFVYKLEQVSEKGKAYTNYFGRCNVAEHEKLILLAQLKPEKDSDEAVTYSLGKFGQRALDFYSIHVTKESTHPVKPLAQIAGNRYASVPVGKALSDACMGTIASFLSKYQDIIIEHQKVVKGNQKRLESLRELAGKENLEYPSVTLPPQPHTKEGVDAYNEVIARVRMWVNLNLWQKLKLSRDDAKPLLRLKGFPSFPLVERQANEVDWWDMVCNVKKLINEKKEDGKVFWQNLAGYKRQEALRPYLSSEEDRKKGKKFARYQLGDLLLHLEKKHGEDWGKVYDEAWERIDKKVEGLSKHIKLEEERRSEDAQSKAALTDWLRAKASFVIEGLKEADKDEFCRCELKLQKWYGDLRGKPFAIEAENSILDISGFSKQYNCAFIWQKDGVKKLNLYLIINYFKGGKLRFKKIKPEAFEANRFYTVINKKSGEIVPMEVNFNFDDPNLIILPLAFGKRQGREFIWNDLLSLETGSLKLANGRVIEKTLYNRRTRQDEPALFVALTFERREVLDSSNIKPMNLIGVDRGENIPAVIALTDPEGCPLSRFKDSLGNPTHILRIGESYKEKQRTIQAKKEVEQRRAGGYSRKYASKAKNLADDMVRNTARDLLYYAVTQDAMLIFENLSRGFGRQGKRTFMAERQYTRMEDWLTAKLAYEGLPSKTYLSKTLAQYTSKTCSNCGFTITSADYDRMLEKLKKTATGWMTTINGKELKVEGQITYYNRYKRQNVVKDLSVELDRLSEESVNNDISSWTKGRSGEALSLLKKRFSHRPVQEKFVCLNCGFETHADEQAALNIARSWLFLRSQEYKKYQTNKTTGKNTDKRAFVETWQSFYRKKLKEVWKPAV

SEQ ID NO: 39095 - protein, 979 aa, synthetic construct
  REGION 1..979: note = engineered CasX variant
QEIKRINKIRRRLVKDSNTKKAGKTGPMKTLLVRVMTPDLRERLENLRKKPENIPQPISNTSRANLNKLLTDYTEMKKAILHVYWEEFQKDPVGLMSRVAQPASKKIDQNKLKPEMDEKGNLTTAGFACSQCGQPLFVYKLEQVSEKGKAYTNYFGRCNVAEHEKLIKLAQLKPEKDSDEAVTYSLGKFGQRALDFYSIHVTKESTHPVKPLAQIAGNRYASGPVGKALSDACMGTIASFLSKYQDIIIEHQKVVKGNQKRLESLRELAGKENLEYPSVTLPPQPHTKEGVDAYNEVIARVRMWVNLNLWQKLKLSRDDAKPLLRLKGFPSFPLVERQANEVDWWDMVCNVKKLINEKKEDGKVFWQNLAGYKRQEALRPYLSSEEDRKKGKKFARYQLGDLLLHLEKKHGEDWGKVYDEAWERIDKKVEGLSKHIKLEEERRSEDAQSKAALTDWLRAKASFVIEGLKEADKDEFCRCELKLQKWYGDLRGKPFAIEAENSILDISGFSKQYNCAFIWQKDGVKKLNLYLIINYFKGGKLRFKKIKPEAFEANRFYTVINKKSGEIVPMEVNFNFDDPNLIILPLAFGKRQGREFIWNDLLSLETGSLKLANGRVIEKTLYNRRTRQDEPALFVALTFERREVLDSSNIKPMNLIGVDRGENIPAVIALTDPEGCPLSRFKDSLGNPTHILRIGESYKEKQRTIQAKKEVEQRRAGGYSRKYASKAKNLADDMVRNTARDLLYYAVTQDAMLIFENLSRGFGRQGKRTFMAERQYTRMEDWLTAKLAYEGLPSKTYLSKTLAQYTSKTCSNCGFTITSADYDRMLEKLKKTATGWMTTINGKELKVEGQITYYNRYKRQNVVKDLSVELDRLSEESVNNDISSWTKGRSGEALSLLKKRFSHRPVQEKFVCLNCGFETHADEQAALNIARSWLFLRSQEYKKYQTNKTTGKNTDKRAFVETWQSFYRKKLKEVWKPAV

SEQ ID NO: 39096 - protein, 978 aa, synthetic construct
  REGION 1..978: note = engineered CasX variant
QEIKRINKIRRRLVKDSNTKKAGKTGPMKTLLVRVMTPDLRERLENLRKKPENIPQPISNTSRANLNKLLTDYTEMKKAILHVYWEEFQKDPVGLMSRVAQPASKKIDQNKLKPEMDEKGNLTTAGFACSQCGQPLFVYKLEQVSEKGKAYTNYFGRCNVAEHEKLILLAQLKPEKDSDEAVTYSLGKFGQRALDFYSIHVTKESTHPVKPLAQIAGNRYASPVGKALSDACMGTIASFLSKYQDIIIEHQKVVKGNQKRLESLRELAGKENLEYPSVTLPPQPHTKEGVDAYNEVIARVRMWVNLNLWQKLKLSRDDAKPLLRLKGFPSFPLVERQANEVDWWDMVCNVKKLINEKKEDGKVFWQNLAGYKRQEALRPYLSSEEDRKKGKKFARYQLGDLLLHLEKKHGEDWGKVYDEAWERIDKKVEGLSKHIKLEEERRSEDAQSKAALTDWLRAKASFVIEGLKEADKDEFCRCELKLQKWYGDLRGKPFAIEAENSILDISGFSKQYNCAFIWQKDGVKKLNLYLIINYFKGGKLRFKKIKPEAFEANRFYTVINKKSGEIVPMEVNFNFDDPNLIILPLAFGKRQGREFIWNDLLSLETGSLKLANGRVIEKTLYNRRTRQDEPALFVALTFERREVLDSSNIKPMNLIGVDRGENIPAVIALTDPEGCPLSRFKDSLGNPTHILRIGESYKEKQRTIQAKKEVEQRRAGGYSRKYASKAKNLADDMVRNTARDLLYYAVTQDAMLIFENLSRGFGRQGKRTFMAERQYTRMEDWLTAKLAYEGLPSKTYLSKTLAQYTSKTCSNCGFTITSADYDRMLEKLKKTATGWMTTINGKELKVEGQITYYNRYKRQNVVKDLSVELDRLSEESVNNDISSWTKGRSGEALSLLKKRFSHRPVQEKFVCLNCGFETHADEQAALNIARSWLFLRSQEYKKYQTNKTTGKNTDKRAFVETWQSFYRKKLKEVWKPAV

SEQ ID NO: 39097 - protein, 978 aa, synthetic construct
  REGION 1..978: note = engineered CasX variant
QEIKRINKIRRRLVKDSNTKKAGKTGPMKTLLVRVMTPDLRERLENLRKKPENIPQPISNTSRANLNKLLTDYTEMKKAILHVYWEEFQKDPVGLMSRVAQPASKKIDQNKLKPEMDEKGNLTTAGFACSQCGQPLFVYKLEQVSEKGKAYTNYFGRCNVAEHEKLILLAQLKPEKDSDEAVTYSLGKFGQRALDFYSIHVTKESTHPVKPLAQIAGNRYASYPVGKALSDACMGTIASFLSKYQDIIIEHQKVVKGNQKRLESLRELAGKENLEYPSVTLPPQPHTKEGVDAYNEVIARVRMWVNLNLWQKLKLSRDDAKPLLRLKKFPSFPLVERQANEVDWWDMVCNVKKLINEKKEDGKVFWQNLAGYKRQEALRPYLSSEEDRKKGKKFARYQLGDLLLHLEKKHGEDWGKVYDEAWERIDKKVEGLSKHIKLEEERRSEDAQSKAALTDWLRAKASFVIEGLKEADKDEFCRCELKLQKWYGDLRGKPFAIEAENSILDISGFSKQYNCAFIWQKDGVKKLNLYLIINYFKGGKLRFKKIKPEAFEANRFYTVINKKSGEIVPMEVNFNFDDPNLIILPLAFGKRQGREFIWNDLLSLETGSLKLANGRVIEKTLYNRRTRQDEPALFVALTFERREVLDSSNIKPMNLIGVDRGENIPAVIALTDPEGCPLSRFKDSLGNPTHILRIGESYKEKQRTIQAKKEVEQRRAGGYSRKYASKAKNLADDMVRNTARDLLYYAVTQDAMLIFENLSRGFGRQGKRTFMAERQYTRMEDWLTAKLAYEGLPSKTYLSKTLAQYTSKTCSNCGFTITSADYDRMLEKLKKTATGWMTTINGKELKVEGQITYYNRYKRQNVVKDLSVELDRLSEESVNNDISSWTKGRSGEALSLLKKRFSHRPVQEKFVCLNCGFETHADEQAALNIARSWLFLRSQEYKKYQTNKTTGNTDKRAFVETWQSFYRKKLKEVWKPAV

SEQ ID NO: 39098 - protein, 978 aa, synthetic construct
  REGION 1..978: note = engineered CasX variant
QEIKRINKIRRRLVKDSNTKKAGKTGPMKTLLVRVMTPDLRERLENLRKKPENIPQPISNTSRANLNKLLTDYTEMKKAILHVYWEEFQKDPVGLMSRVAQPASKKIDQNKLKPEMDEKGNLTTAGFACSQCGQPLFVYKLEQVSEKGKAYTNYFGRCNVAEHEKLILLAQLKPEKDSDEAVTYSLGKFGQRALDFYSIHVTKESTHPVKPLAQIAGNRYASHPVGKALSDACMGTIASFLSKYQDIIIEHQKVVKGNQKRLESLRELAGKENLEYPSVTLPPQPHTKEGVDAYNEVIARVRMWVNLNLWQKLKLSRDDAKPLLRLKKFPSFPLVERQANEVDWWDMVCNVKKLINEKKEDGKVFWQNLAGYKRQEALRPYLSSEEDRKKGKKFARYQLGDLLLHLEKKHGEDWGKVYDEAWERIDKKVEGLSKHIKLEEERRSEDAQSKAALTDWLRAKASFVIEGLKEADKDEFCRCELKLQKWYGDLRGKPFAIEAENSILDISGFSKQYNCAFIWQKDGVKKLNLYLIINYFKGGKLRFKKIKPEAFEANRFYTVINKKSGEIVPMEVNFNFDDPNLIILPLAFGKRQGREFIWNDLLSLETGSLKLANGRVIEKTLYNRRTRQDEPALFVALTFERREVLDSSNIKPMNLIGVDRGENIPAVIALTDPEGCPLSRFKDSLGNPTHILRIGESYKEKQRTIQAKKEVEQRRAGGYSRKYASKAKNLADDMVRNTARDLLYYAVTQDAMLIFENLSRGFGRQGKRTFMAERQYTRMEDWLTAKLAYEGLPSKTYLSKTLAQYTSKTCSNCGFTITSADYDRMLEKLKKTATGWMTTINGKELKVEGQITYYNRYKRQNVVKDLSVELDRLSEESVNNDISSWTKGRSGEALSLLKKRFSHRPVQEKFVCLNCGFETHADEQAALNIARSWLFLRSQEYKKYQTNKTTGNTDKRAFVETWQSFYRKKLKEVWKPAV

SEQ ID NO: 39099 - protein, 978 aa, synthetic construct
  REGION 1..978: note = engineered CasX variant
QEIKRINKIRRRLVKDSNTKKAGKTGPMKTLLVRVMTPDLRERLENLRKKPENIPQPISNTSRANLNKLLTDYTEMKKAILHVYWEEFQKDPVGLMSRVAQPASKKIDQNKLKPEMDEKGNLTTAGFACSQCGQPLFVYKLEQVSEKGKAYTNYFGRCNVAEHEKLILLAQLKPEKDSDEAVTYSLGKFGQRALDFYSIHVTKESTHPVKPLAQIAGNRYASSPVGKALSDACMGTIASFLSKYQDIIIEHQKVVKGNQKRLESLRELAGKENLEYPSVTLPPQPHTKEGVDAYNEVIARVRMWVNLNLWQKLKLSRDDAKPLLRLKKFPSFPLVERQANEVDWWDMVCNVKKLINEKKEDGKVFWQNLAGYKRQEALRPYLSSEEDRKKGKKFARYQLGDLLLHLEKKHGEDWGKVYDEAWERIDKKVEGLSKHIKLEEERRSEDAQSKAALTDWLRAKASFVIEGLKEADKDEFCRCELKLQKWYGDLRGKPFAIEAENSILDISGFSKQYNCAFIWQKDGVKKLNLYLIINYFKGGKLRFKKIKPEAFEANRFYTVINKKSGEIVPMEVNFNFDDPNLIILPLAFGKRQGREFIWNDLLSLETGSLKLANGRVIEKTLYNRRTRQDEPALFVALTFERREVLDSSNIKPMNLIGVDRGENIPAVIALTDPEGCPLSRFKDSLGNPTHILRIGESYKEKQRTIQAKKEVEQRRAGGYSRKYASKAKNLADDMVRNTARDLLYYAVTQDAMLIFENLSRGFGRQGKRTFMAERQYTRMEDWLTAKLAYEGLPSKTYLSKTLAQYTSKTCSNCGFTITSADYDRMLEKLKKTATGWMTTINGKELKVEGQITYYNRYKRQNVVKDLSVELDRLSEESVNNDISSWTKGRSGEALSLLKKRFSHRPVQEKFVCLNCGFETHADEQAALNIARSWLFLRSQEYKKYQTNKTTGNTDKRAFVETWQSFYRKKLKEVWKPAV

SEQ ID NO: 39100 - protein, 978 aa, synthetic construct
  REGION 1..978: note = engineered CasX variant
QEIKRINKIRRRLVKDSNTKKAGKTGPMKTLLVRVMTPDLRERLENLRKKPENIPQPISNTSRANLNKLLTDYTEMKKAILHVYWEEFQKDPVGLMSRVAQPASKKIDQNKLKPEMDEKGNLTTAGFACSQCGQPLFVYKLEQVSEKGKAYTNYFGRCNVAEHEKLILLAQLKPEKDSDEAVTYSLGKFGQRALDFYSIHVTKESTHPVKPLAQIAGNRYASTPVGKALSDACMGTIASFLSKYQDIIIEHQKVVKGNQKRLESLRELAGKENLEYPSVTLPPQPHTKEGVDAYNEVIARVRMWVNLNLWQKLKLSRDDAKPLLRLKKFPSFPLVERQANEVDWWDMVCNVKKLINEKKEDGKVFWQNLAGYKRQEALRPYLSSEEDRKKGKKFARYQLGDLLLHLEKKHGEDWGKVYDEAWERIDKKVEGLSKHIKLEEERRSEDAQSKAALTDWLRAKASFVIEGLKEADKDEFCRCELKLQKWYGDLRGKPFAIEAENSILDISGFSKQYNCAFIWQKDGVKKLNLYLIINYFKGGKLRFKKIKPEAFEANRFYTVINKKSGEIVPMEVNFNFDDPNLIILPLAFGKRQGREFIWNDLLSLETGSLKLANGRVIEKTLYNRRTRQDEPALFVALTFERREVLDSSNIKPMNLIGVDRGENIPAVIALTDPEGCPLSRFKDSLGNPTHILRIGESYKEKQRTIQAKKEVEQRRAGGYSRKYASKAKNLADDMVRNTARDLLYYAVTQDAMLIFENLSRGFGRQGKRTFMAERQYTRMEDWLTAKLAYEGLPSKTYLSKTLAQYTSKTCSNCGFTITSADYDRMLEKLKKTATGWMTTINGKELKVEGQITYYNRYKRQNVVKDLSVELDRLSEESVNNDISSWTKGRSGEALSLLKKRFSHRPVQEKFVCLNCGFETHADEQAALNIARSWLFLRSQEYKKYQTNKTTGNTDKRAFVETWQSFYRKKLKEVWKPAV

SEQ ID NO: 39101 - protein, 978 aa, synthetic construct
  REGION 1..978: note = engineered CasX variant
QEIKRINKIRRRLVKDSNTKKAGKTGPMKTLLVRVMTPDLRERLENLRKKPENIPQPISNTSRANLNKLLTDYTEMKKAILHVYWEEFQKDPVGLMSRVAQPASKKIDQNKLKPEMDEKGNLTTAGFACSQCGQPLFVYKLEQVSEKGKAYTNYFGRCNVAEHEKLILLAQLKPEKDSDEAVTYSLGKFGQRALDFYSIHVTKESTHPVKPLAQIAGNRYASAPVGKALSDACMGTIASFLSKYQDIIIEHQKVVKGNQKRLESLRELAGKENLEYPSVTLPPQPHTKEGVDAYNEVIARVRMWVNLNLWQKLKLSRDDAKPLLRLKKFPSFPLVERQANEVDWWDMVCNVKKLINEKKEDGKVFWQNLAGYKRQEALRPYLSSEEDRKKGKKFARYQLGDLLLHLEKKHGEDWGKVYDEAWERIDKKVEGLSKHIKLEEERRSEDAQSKAALTDWLRAKASFVIEGLKEADKDEFCRCELKLQKWYGDLRGKPFAIEAENSILDISGFSKQYNCAFIWQKDGVKKLNLYLIINYFKGGKLRFKKIKPEAFEANRFYTVINKKSGEIVPMEVNFNFDDPNLIILPLAFGKRQGREFIWNDLLSLETGSLKLANGRVIEKTLYNRRTRQDEPALFVALTFERREVLDSSNIKPMNLIGVDRGENIPAVIALTDPEGCPLSRFKDSLGNPTHILRIGESYKEKQRTIQAKKEVEQRRAGGYSRKYASKAKNLADDMVRNTARDLLYYAVTQDAMLIFENLSRGFGRQGKRTFMAERQYTRMEDWLTAKLAYEGLPSKTYLSKTLAQYTSKTCSNCGFTITSADYDRMLEKLKKTATGWMTTINGKELKVEGQITYYNRYKRQNVVKDLSVELDRLSEESVNNDISSWTKGRSGEALSLLKKRFSHRPVQEKFVCLNCGFETHADEQAALNIARSWLFLRSQEYKKYQTNKTTGNTDKRAFVETWQSFYRKKLKEVWKPAV

SEQ ID NO: 39102 - protein, 978 aa, synthetic construct
  REGION 1..978: note = engineered CasX variant
QEIKRINKIRRRLVKDSNTKKAGKTGPMKTLLVRVMTPDLRERLENLRKKPENIPQPISNTSRANLNKLLTDYTEMKKAILHVYWEEFQKDPVGLMSRVAQPASKKIDQNKLKPEMDEKGNLTTAGFACSQCGQPLFVYKLEQVSEKGKAYTNYFGRCNVAEHEKLILLAQLKPEKDSDEAVTYSLGKFGQRALDFYSIHVTKESTHPVKPLAQIAGNRYASVPVGKALSDACMGTIASFLSKYQDIIIEHQKVVKGNQKRLESLRELAGKENLEYPSVTLPPQPHTKEGVDAYNEVIARVRMWVNLNLWQKLKLSRDDAKPLLRLKKFPSFPLVERQANEVDWWDMVCNVKKLINEKKEDGKVFWQNLAGYKRQEALRPYLSSEEDRKKGKKFARYQLGDLLLHLEKKHGEDWGKVYDEAWERIDKKVEGLSKHIKLEEERRSEDAQSKAALTDWLRAKASFVIEGLKEADKDEFCRCELKLQKWYGDLRGKPFAIEAENSILDISGFSKQYNCAFIWQKDGVKKLNLYLIINYFKGGKLRFKKIKPEAFEANRFYTVINKKSGEIVPMEVNFNFDDPNLIILPLAFGKRQGREFIWNDLLSLETGSLKLANGRVIEKTLYNRRTRQDEPALFVALTFERREVLDSSNIKPMNLIGVDRGENIPAVIALTDPEGCPLSRFKDSLGNPTHILRIGESYKEKQRTIQAKKEVEQRRAGGYSRKYASKAKNLADDMVRNTARDLLYYAVTQDAMLIFENLSRGFGRQGKRTFMAERQYTRMEDWLTAKLAYEGLPSKTYLSKTLAQYTSKTCSNCGFTITSADYDRMLEKLKKTATGWMTTINGKELKVEGQITYYNRYKRQNVVKDLSVELDRLSEESVNNDISSWTKGRSGEALSLLKKRFSHRPVQEKFVCLNCGFETHADEQAALNIARSWLFLRSQEYKKYQTNKTTGNTDKRAFVETWQSFYRKKLKEVWKPAV

SEQ ID NO: 39103 - protein, 978 aa, synthetic construct
  REGION 1..978: note = engineered CasX variant
QEIKRINKIRRRLVKDSNTKKAGKTGPMKTLLVRVMTPDLRERLENLRKKPENIPQPISNTSRANLNKLLTDYTEMKKAILHVYWEEFQKDPVGLMSRVAQPASKKIDQNKLKPEMDEKGNLTTAGFACSQCGQPLFVYKLEQVSEKGKAYTNYFGRCNVAEHEKLIKLAQLKPEKDSDEAVTYSLGKFGQRALDFYSIHVTKESTHPVKPLAQIAGNRYASGPVGKALSDACMGTIASFLSKYQDIIIEHQKVVKGNQKRLESLRELAGKENLEYPSVTLPPQPHTKEGVDAYNEVIARVRMWVNLNLWQKLKLSRDDAKPLLRLKKFPSFPLVERQANEVDWWDMVCNVKKLINEKKEDGKVFWQNLAGYKRQEALRPYLSSEEDRKKGKKFARYQLGDLLLHLEKKHGEDWGKVYDEAWERIDKKVEGLSKHIKLEEERRSEDAQSKAALTDWLRAKASFVIEGLKEADKDEFCRCELKLQKWYGDLRGKPFAIEAENSILDISGFSKQYNCAFIWQKDGVKKLNLYLIINYFKGGKLRFKKIKPEAFEANRFYTVINKKSGEIVPMEVNFNFDDPNLIILPLAFGKRQGREFIWNDLLSLETGSLKLANGRVIEKTLYNRRTRQDEPALFVALTFERREVLDSSNIKPMNLIGVDRGENIPAVIALTDPEGCPLSRFKDSLGNPTHILRIGESYKEKQRTIQAKKEVEQRRAGGYSRKYASKAKNLADDMVRNTARDLLYYAVTQDAMLIFENLSRGFGRQGKRTFMAERQYTRMEDWLTAKLAYEGLPSKTYLSKTLAQYTSKTCSNCGFTITSADYDRMLEKLKKTATGWMTTINGKELKVEGQITYYNRYKRQNVVKDLSVELDRLSEESVNNDISSWTKGRSGEALSLLKKRFSHRPVQEKFVCLNCGFETHADEQAALNIARSWLFLRSQEYKKYQTNKTTGNTDKRAFVETWQSFYRKKLKEVWKPAV

SEQ ID NO: 39104 - protein, 977 aa, synthetic construct
  REGION 1..977: note = engineered CasX variant
QEIKRINKIRRRLVKDSNTKKAGKTGPMKTLLVRVMTPDLRERLENLRKKPENIPQPISNTSRANLNKLLTDYTEMKKAILHVYWEEFQKDPVGLMSRVAQPASKKIDQNKLKPEMDEKGNLTTAGFACSQCGQPLFVYKLEQVSEKGKAYTNYFGRCNVAEHEKLILLAQLKPEKDSDEAVTYSLGKFGQRALDFYSIHVTKESTHPVKPLAQIAGNRYASPVGKALSDACMGTIASFLSKYQDIIIEHQKVVKGNQKRLESLRELAGKENLEYPSVTLPPQPHTKEGVDAYNEVIARVRMWVNLNLWQKLKLSRDDAKPLLRLKKFPSFPLVERQANEVDWWDMVCNVKKLINEKKEDGKVFWQNLAGYKRQEALRPYLSSEEDRKKGKKFARYQLGDLLLHLEKKHGEDWGKVYDEAWERIDKKVEGLSKHIKLEEERRSEDAQSKAALTDWLRAKASFVIEGLKEADKDEFCRCELKLQKWYGDLRGKPFAIEAENSILDISGFSKQYNCAFIWQKDGVKKLNLYLIINYFKGGKLRFKKIKPEAFEANRFYTVINKKSGEIVPMEVNFNFDDPNLIILPLAFGKRQGREFIWNDLLSLETGSLKLANGRVIEKTLYNRRTRQDEPALFVALTFERREVLDSSNIKPMNLIGVDRGENIPAVIALTDPEGCPLSRFKDSLGNPTHILRIGESYKEKQRTIQAKKEVEQRRAGGYSRKYASKAKNLADDMVRNTARDLLYYAVTQDAMLIFENLSRGFGRQGKRTFMAERQYTRMEDWLTAKLAYEGLPSKTYLSKTLAQYTSKTCSNCGFTITSADYDRMLEKLKKTATGWMTTINGKELKVEGQITYYNRYKRQNVVKDLSVELDRLSEESVNNDISSWTKGRSGEALSLLKKRFSHRPVQEKFVCLNCGFETHADEQAALNIARSWLFLRSQEYKKYQTNKTTGNTDKRAFVETWQSFYRKKLKEVWKPAV

SEQ ID NO: 39105 - protein, 978 aa, synthetic construct
  REGION 1..978: note = engineered CasX variant
QEIKRINKIRRRLVKDSNTKKAGKTGPMKTLLVRVMTPDLRERLENLRKKPENIPQPISNTSRANLNKLLTDYTEMKKAILHVYWEEFQKDPVGLMSRVAQPASKKIDQNKLKPEMDEKGNLTTAGFACSQCGQPLFVYKLEQVSEKGKAYTNYFGRCNVAEHEKLILLAQLKPEKDSDEAVTYSLGKFGQRALDFYSIHVTKESTHPVKPLAQIAGNRYASYPVGKALSDACMGTIASFLSKYQDIIIEHQKVVKGNQKRLESLRELAGKENLEYPSVTLPPQPHTKEGVDAYNEVIARVRMWVNLNLWQKLKLSRDDAKPLLRLKGFPSFPLVERQANEVDWWDMVCNVKKLINEKKEDGKVFWQNLAGYKRQEALRPYLSSEEDRKKGKKFARYQLGDLLLHLEKKHGEDWGKVYDEAWERIDKKVEGLSKHIKLEEERRSEDAQSKAALTDWLRAKASFVIEGLKEADKDEFCRCELKLQKWYGDLRGKPFAIEAENSILDISGFSKQYNCAFIWQKDGVKKLNLYLIINYFKGGKLRFKKIKPEAFEANRFYTVINKKSGEIVPMEVNFNFDDPNLIILPLAFGKRQGREFIWNDLLSLETGSLKLANGRVIEKTLYNRRTRQDEPALFVALTFERREVLDSSNIKPMNLIGVDRGENIPAVIALTDPEGCPLSRFKDSLGNPTHILRIGERYKEKQRTIQAKKEVEQRRAGGYSRKYASKAKNLADDMVRNTARDLLYYAVTQDAMLIFENLSRGFGRQGKRTFMAERQYTRMEDWLTAKLAYEGLPSKTYLSKTLAQYTSKTCSNCGFTITSADYDRMLEKLKKTATGWMTTINGKELKVEGQITYYNRYKRQNVVKDLSVELDRLSEESVNNDISSWTKGRSGEALSLLKKRFSHRPVQEKFVCLNCGFETHADEQAALNIARSWLFLRSQEYKKYQTNKTTGNTDKRAFVETWQSFYRKKLKEVWKPAV

SEQ ID NO: 39106 - protein, 978 aa, synthetic construct
  REGION 1..978: note = engineered CasX variant
QEIKRINKIRRRLVKDSNTKKAGKTGPMKTLLVRVMTPDLRERLENLRKKPENIPQPISNTSRANLNKLLTDYTEMKKAILHVYWEEFQKDPVGLMSRVAQPASKKIDQNKLKPEMDEKGNLTTAGFACSQCGQPLFVYKLEQVSEKGKAYTNYFGRCNVAEHEKLILLAQLKPEKDSDEAVTYSLGKFGQRALDFYSIHVTKESTHPVKPLAQIAGNRYASHPVGKALSDACMGTIASFLSKYQDIIIEHQKVVKGNQKRLESLRELAGKENLEYPSVTLPPQPHTKEGVDAYNEVIARVRMWVNLNLWQKLKLSRDDAKPLLRLKGFPSFPLVERQANEVDWWDMVCNVKKLINEKKEDGKVFWQNLAGYKRQEALRPYLSSEEDRKKGKKFARYQLGDLLLHLEKKHGEDWGKVYDEAWERIDKKVEGLSKHIKLEEERRSEDAQSKAALTDWLRAKASFVIEGLKEADKDEFCRCELKLQKWYGDLRGKPFAIEAENSILDISGFSKQYNCAFIWQKDGVKKLNLYLIINYFKGGKLRFKKIKPEAFEANRFYTVINKKSGEIVPMEVNFNFDDPNLIILPLAFGKRQGREFIWNDLLSLETGSLKLANGRVIEKTLYNRRTRQDEPALFVALTFERREVLDSSNIKPMNLIGVDRGENIPAVIALTDPEGCPLSRFKDSLGNPTHILRIGERYKEKQRTIQAKKEVEQRRAGGYSRKYASKAKNLADDMVRNTARDLLYYAVTQDAMLIFENLSRGFGRQGKRTFMAERQYTRMEDWLTAKLAYEGLPSKTYLSKTLAQYTSKTCSNCGFTITSADYDRMLEKLKKTATGWMTTINGKELKVEGQITYYNRYKRQNVVKDLSVELDRLSEESVNNDISSWTKGRSGEALSLLKKRFSHRPVQEKFVCLNCGFETHADEQAALNIARSWLFLRSQEYKKYQTNKTTGNTDKRAFVETWQSFYRKKLKEVWKPAV

SEQ ID NO: 39107 - protein, 978 aa, synthetic construct
  REGION 1..978: note = engineered CasX variant
QEIKRINKIRRRLVKDSNTKKAGKTGPMKTLLVRVMTPDLRERLENLRKKPENIPQPISNTSRANLNKLLTDYTEMKKAILHVYWEEFQKDPVGLMSRVAQPASKKIDQNKLKPEMDEKGNLTTAGFACSQCGQPLFVYKLEQVSEKGKAYTNYFGRCNVAEHEKLILLAQLKPEKDSDEAVTYSLGKFGQRALDFYSIHVTKESTHPVKPLAQIAGNRYASSPVGKALSDACMGTIASFLSKYQDIIIEHQKVVKGNQKRLESLRELAGKENLEYPSVTLPPQPHTKEGVDAYNEVIARVRMWVNLNLWQKLKLSRDDAKPLLRLKGFPSFPLVERQANEVDWWDMVCNVKKLINEKKEDGKVFWQNLAGYKRQEALRPYLSSEEDRKKGKKFARYQLGDLLLHLEKKHGEDWGKVYDEAWERIDKKVEGLSKHIKLEEERRSEDAQSKAALTDWLRAKASFVIEGLKEADKDEFCRCELKLQKWYGDLRGKPFAIEAENSILDISGFSKQYNCAFIWQKDGVKKLNLYLIINYFKGGKLRFKKIKPEAFEANRFYTVINKKSGEIVPMEVNFNFDDPNLIILPLAFGKRQGREFIWNDLLSLETGSLKLANGRVIEKTLYNRRTRQDEPALFVALTFERREVLDSSNIKPMNLIGVDRGENIPAVIALTDPEGCPLSRFKDSLGNPTHILRIGERYKEKQRTIQAKKEVEQRRAGGYSRKYASKAKNLADDMVRNTARDLLYYAVTQDAMLIFENLSRGFGRQGKRTFMAERQYTRMEDWLTAKLAYEGLPSKTYLSKTLAQYTSKTCSNCGFTITSADYDRMLEKLKKTATGWMTTINGKELKVEGQITYYNRYKRQNVVKDLSVELDRLSEESVNNDISSWTKGRSGEALSLLKKRFSHRPVQEKFVCLNCGFETHADEQAALNIARSWLFLRSQEYKKYQTNKTTGNTDKRAFVETWQSFYRKKLKEVWKPAV

SEQ ID NO: 39108 - protein, 978 aa, synthetic construct
  REGION 1..978: note = engineered CasX variant
QEIKRINKIRRRLVKDSNTKKAGKTGPMKTLLVRVMTPDLRERLENLRKKPENIPQPISNTSRANLNKLLTDYTEMKKAILHVYWEEFQKDPVGLMSRVAQPASKKIDQNKLKPEMDEKGNLTTAGFACSQCGQPLFVYKLEQVSEKGKAYTNYFGRCNVAEHEKLILLAQLKPEKDSDEAVTYSLGKFGQRALDFYSIHVTKESTHPVKPLAQIAGNRYASTPVGKALSDACMGTIASFLSKYQDIIIEHQKVVKGNQKRLESLRELAGKENLEYPSVTLPPQPHTKEGVDAYNEVIARVRMWVNLNLWQKLKLSRDDAKPLLRLKGFPSFPLVERQANEVDWWDMVCNVKKLINEKKEDGKVFWQNLAGYKRQEALRPYLSSEEDRKKGKKFARYQLGDLLLHLEKKHGEDWGKVYDEAWERIDKKVEGLSKHIKLEEERRSEDAQSKAALTDWLRAKASFVIEGLKEADKDEFCRCELKLQKWYGDLRGKPFAIEAENSILDISGFSKQYNCAFIWQKDGVKKLNLYLIINYFKGGKLRFKKIKPEAFEANRFYTVINKKSGEIVPMEVNFNFDDPNLIILPLAFGKRQGREFIWNDLLSLETGSLKLANGRVIEKTLYNRRTRQDEPALFVALTFERREVLDSSNIKPMNLIGVDRGENIPAVIALTDPEGCPLSRFKDSLGNPTHILRIGERYKEKQRTIQAKKEVEQRRAGGYSRKYASKAKNLADDMVRNTARDLLYYAVTQDAMLIFENLSRGFGRQGKRTFMAERQYTRMEDWLTAKLAYEGLPSKTYLSKTLAQYTSKTCSNCGFTITSADYDRMLEKLKKTATGWMTTINGKELKVEGQITYYNRYKRQNVVKDLSVELDRLSEESVNNDISSWTKGRSGEALSLLKKRFSHRPVQEKFVCLNCGFETHADEQAALNIARSWLFLRSQEYKKYQTNKTTGNTDKRAFVETWQSFYRKKLKEVWKPAV

SEQ ID NO: 39109 - protein, 978 aa, synthetic construct
  REGION 1..978: note = engineered CasX variant
QEIKRINKIRRRLVKDSNTKKAGKTGPMKTLLVRVMTPDLRERLENLRKKPENIPQPISNTSRANLNKLLTDYTEMKKAILHVYWEEFQKDPVGLMSRVAQPASKKIDQNKLKPEMDEKGNLTTAGFACSQCGQPLFVYKLEQVSEKGKAYTNYFGRCNVAEHEKLILLAQLKPEKDSDEAVTYSLGKFGQRALDFYSIHVTKESTHPVKPLAQIAGNRYASAPVGKALSDACMGTIASFLSKYQDIIIEHQKVVKGNQKRLESLRELAGKENLEYPSVTLPPQPHTKEGVDAYNEVIARVRMWVNLNLWQKLKLSRDDAKPLLRLKGFPSFPLVERQANEVDWWDMVCNVKKLINEKKEDGKVFWQNLAGYKRQEALRPYLSSEEDRKKGKKFARYQLGDLLLHLEKKHGEDWGKVYDEAWERIDKKVEGLSKHIKLEEERRSEDAQSKAALTDWLRAKASFVIEGLKEADKDEFCRCELKLQKWYGDLRGKPFAIEAENSILDISGFSKQYNCAFIWQKDGVKKLNLYLIINYFKGGKLRFKKIKPEAFEANRFYTVINKKSGEIVPMEVNFNFDDPNLIILPLAFGKRQGREFIWNDLLSLETGSLKLANGRVIEKTLYNRRTRQDEPALFVALTFERREVLDSSNIKPMNLIGVDRGENIPAVIALTDPEGCPLSRFKDSLGNPTHILRIGERYKEKQRTIQAKKEVEQRRAGGYSRKYASKAKNLADDMVRNTARDLLYYAVTQDAMLIFENLSRGFGRQGKRTFMAERQYTRMEDWLTAKLAYEGLPSKTYLSKTLAQYTSKTCSNCGFTITSADYDRMLEKLKKTATGWMTTINGKELKVEGQITYYNRYKRQNVVKDLSVELDRLSEESVNNDISSWTKGRSGEALSLLKKRFSHRPVQEKFVCLNCGFETHADEQAALNIARSWLFLRSQEYKKYQTNKTTGNTDKRAFVETWQSFYRKKLKEVWKPAV

SEQ ID NO: 39110 - protein, 978 aa, synthetic construct
  REGION 1..978: note = engineered CasX variant
QEIKRINKIRRRLVKDSNTKKAGKTGPMKTLLVRVMTPDLRERLENLRKKPENIPQPISNTSRANLNKLLTDYTEMKKAILHVYWEEFQKDPVGLMSRVAQPASKKIDQNKLKPEMDEKGNLTTAGFACSQCGQPLFVYKLEQVSEKGKAYTNYFGRCNVAEHEKLILLAQLKPEKDSDEAVTYSLGKFGQRALDFYSIHVTKESTHPVKPLAQIAGNRYASVPVGKALSDACMGTIASFLSKYQDIIIEHQKVVKGNQKRLESLRELAGKENLEYPSVTLPPQPHTKEGVDAYNEVIARVRMWVNLNLWQKLKLSRDDAKPLLRLKGFPSFPLVERQANEVDWWDMVCNVKKLINEKKEDGKVFWQNLAGYKRQEALRPYLSSEEDRKKGKKFARYQLGDLLLHLEKKHGEDWGKVYDEAWERIDKKVEGLSKHIKLEEERRSEDAQSKAALTDWLRAKASFVIEGLKEADKDEFCRCELKLQKWYGDLRGKPFAIEAENSILDISGFSKQYNCAFIWQKDGVKKLNLYLIINYFKGGKLRFKKIKPEAFEANRFYTVINKKSGEIVPMEVNFNFDDPNLIILPLAFGKRQGREFIWNDLLSLETGSLKLANGRVIEKTLYNRRTRQDEPALFVALTFERREVLDSSNIKPMNLIGVDRGENIPAVIALTDPEGCPLSRFKDSLGNPTHILRIGERYKEKQRTIQAKKEVEQRRAGGYSRKYASKAKNLADDMVRNTARDLLYYAVTQDAMLIFENLSRGFGRQGKRTFMAERQYTRMEDWLTAKLAYEGLPSKTYLSKTLAQYTSKTCSNCGFTITSADYDRMLEKLKKTATGWMTTINGKELKVEGQITYYNRYKRQNVVKDLSVELDRLSEESVNNDISSWTKGRSGEALSLLKKRFSHRPVQEKFVCLNCGFETHADEQAALNIARSWLFLRSQEYKKYQTNKTTGNTDKRAFVETWQSFYRKKLKEVWKPAV

SEQ ID NO: 39111 - protein, 978 aa, synthetic construct
  REGION 1..978: note = engineered CasX variant
QEIKRINKIRRRLVKDSNTKKAGKTGPMKTLLVRVMTPDLRERLENLRKKPENIPQPISNTSRANLNKLLTDYTEMKKAILHVYWEEFQKDPVGLMSRVAQPASKKIDQNKLKPEMDEKGNLTTAGFACSQCGQPLFVYKLEQVSEKGKAYTNYFGRCNVAEHEKLIKLAQLKPEKDSDEAVTYSLGKFGQRALDFYSIHVTKESTHPVKPLAQIAGNRYASGPVGKALSDACMGTIASFLSKYQDIIIEHQKVVKGNQKRLESLRELAGKENLEYPSVTLPPQPHTKEGVDAYNEVIARVRMWVNLNLWQKLKLSRDDAKPLLRLKGFPSFPLVERQANEVDWWDMVCNVKKLINEKKEDGKVFWQNLAGYKRQEALRPYLSSEEDRKKGKKFARYQLGDLLLHLEKKHGEDWGKVYDEAWERIDKKVEGLSKHIKLEEERRSEDAQSKAALTDWLRAKASFVIEGLKEADKDEFCRCELKLQKWYGDLRGKPFAIEAENSILDISGFSKQYNCAFIWQKDGVKKLNLYLIINYFKGGKLRFKKIKPEAFEANRFYTVINKKSGEIVPMEVNFNFDDPNLIILPLAFGKRQGREFIWNDLLSLETGSLKLANGRVIEKTLYNRRTRQDEPALFVALTFERREVLDSSNIKPMNLIGVDRGENIPAVIALTDPEGCPLSRFKDSLGNPTHILRIGERYKEKQRTIQAKKEVEQRRAGGYSRKYASKAKNLADDMVRNTARDLLYYAVTQDAMLIFENLSRGFGRQGKRTFMAERQYTRMEDWLTAKLAYEGLPSKTYLSKTLAQYTSKTCSNCGFTITSADYDRMLEKLKKTATGWMTTINGKELKVEGQITYYNRYKRQNVVKDLSVELDRLSEESVNNDISSWTKGRSGEALSLLKKRFSHRPVQEKFVCLNCGFETHADEQAALNIARSWLFLRSQEYKKYQTNKTTGNTDKRAFVETWQSFYRKKLKEVWKPAV

SEQ ID NO: 39112 - protein, 977 aa, synthetic construct
  REGION 1..977: note = engineered CasX variant
QEIKRINKIRRRLVKDSNTKKAGKTGPMKTLLVRVMTPDLRERLENLRKKPENIPQPISNTSRANLNKLLTDYTEMKKAILHVYWEEFQKDPVGLMSRVAQPASKKIDQNKLKPEMDEKGNLTTAGFACSQCGQPLFVYKLEQVSEKGKAYTNYFGRCNVAEHEKLILLAQLKPEKDSDEAVTYSLGKFGQRALDFYSIHVTKESTHPVKPLAQIAGNRYASPVGKALSDACMGTIASFLSKYQDIIIEHQKVVKGNQKRLESLRELAGKENLEYPSVTLPPQPHTKEGVDAYNEVIARVRMWVNLNLWQKLKLSRDDAKPLLRLKGFPSFPLVERQANEVDWWDMVCNVKKLINEKKEDGKVFWQNLAGYKRQEALRPYLSSEEDRKKGKKFARYQLGDLLLHLEKKHGEDWGKVYDEAWERIDKKVEGLSKHIKLEEERRSEDAQSKAALTDWLRAKASFVIEGLKEADKDEFCRCELKLQKWYGDLRGKPFAIEAENSILDISGFSKQYNCAFIWQKDGVKKLNLYLIINYFKGGKLRFKKIKPEAFEANRFYTVINKKSGEIVPMEVNFNFDDPNLIILPLAFGKRQGREFIWNDLLSLETGSLKLANGRVIEKTLYNRRTRQDEPALFVALTFERREVLDSSNIKPMNLIGVDRGENIPAVIALTDPEGCPLSRFKDSLGNPTHILRIGERYKEKQRTIQAKKEVEQRRAGGYSRKYASKAKNLADDMVRNTARDLLYYAVTQDAMLIFENLSRGFGRQGKRTFMAERQYTRMEDWLTAKLAYEGLPSKTYLSKTLAQYTSKTCSNCGFTITSADYDRMLEKLKKTATGWMTTINGKELKVEGQITYYNRYKRQNVVKDLSVELDRLSEESVNNDISSWTKGRSGEALSLLKKRFSHRPVQEKFVCLNCGFETHADEQAALNIARSWLFLRSQEYKKYQTNKTTGNTDKRAFVETWQSFYRKKLKEVWKPAV

SEQ ID NO: 39113 - protein, 978 aa, synthetic construct
  REGION 1..978: note = engineered CasX variant
QEIKRINKIRRRLVKDSNTKKAGKTGPMKTLLVRVMTPDLRERLENLRKKPENIPQPISNTSRANLNKLLTDYTEMKKAILHVYWEEFQKDPVGLMSRVAQPASKKIDQNKLKPEMDEKGNLTTAGFACSQCGQPLFVYKLEQVSEKGKAYTNYFGRCNVAEHEKLILLAQLKPEKDSDEAVTYSLGKFGQRALDFYSIHVTKESTHPVKPLAQIAGNRYASYPVGKALSDACMGTIASFLSKYQDIIIEHQKVVKGNQKRLESLRELAGKENLEYPSVTLPPQPHTKEGVDAYNEVIARVRMWVNLNLWQKLKLSRDDAKPLLRLKGFPSFPLVERQANEVDWWDMVCNVKKLINEKKEDGKVFWQNLAGYKRQEALRPYLSSEEDRKKGKKFARYQLGDLLLHLEKKHGEDWGKVYDEAWERIDKKVEGLSKHIKLEEERRSEDAQSKAALTDWLRAKASFVIEGLKEADKDEFCRCELKLQKWYGDLRGKPFAIEAENSILDISGFSKQYNCAFIWQKDGVKKLNLYLIINYFKGGKLRFKKIKPEAFEANRFYTVINKKSGEIVPMEVNFNFDDPNLIILPLAFGKRQGREFIWNDLLSLETGSLQLANGRVIEKTLYNRRTRQDEPALFVALTFERREVLDSSNIKPMNLIGVDRGENIPAVIALTDPEGCPLSRFKDSLGNPTHILRIGESYKEKQRTIQAKKEVEQRRAGGYSRKYASKAKNLADDMVRNTARDLLYYAVTQDAMLIFENLSRGFGRQGKRTFMAERQYTRMEDWLTAKLAYEGLPSKTYLSKTLAQYTSKTCSNCGFTITSADYDRMLEKLKKTATGWMTTINGKELKVEGQITYYNRYKRQNVVKDLSVELDRLSEESVNNDISSWTKGRSGEALSLLKKRFSHRPVQEKFVCLNCGFETHADEQAALNIARSWLFLRSQEYKKYQTNKTTGNTDKRAFVETWQSFYRKKLKEVWKPAV

SEQ ID NO: 39114 - protein, 978 aa, synthetic construct
  REGION 1..978: note = engineered CasX variant
QEIKRINKIRRRLVKDSNTKKAGKTGPMKTLLVRVMTPDLRERLENLRKKPENIPQPISNTSRANLNKLLTDYTEMKKAILHVYWEEFQKDPVGLMSRVAQPASKKIDQNKLKPEMDEKGNLTTAGFACSQCGQPLFVYKLEQVSEKGKAYTNYFGRCNVAEHEKLILLAQLKPEKDSDEAVTYSLGKFGQRALDFYSIHVTKESTHPVKPLAQIAGNRYASHPVGKALSDACMGTIASFLSKYQDIIIEHQKVVKGNQKRLESLRELAGKENLEYPSVTLPPQPHTKEGVDAYNEVIARVRMWVNLNLWQKLKLSRDDAKPLLRLKGFPSFPLVERQANEVDWWDMVCNVKKLINEKKEDGKVFWQNLAGYKRQEALRPYLSSEEDRKKGKKFARYQLGDLLLHLEKKHGEDWGKVYDEAWERIDKKVEGLSKHIKLEEERRSEDAQSKAALTDWLRAKASFVIEGLKEADKDEFCRCELKLQKWYGDLRGKPFAIEAENSILDISGFSKQYNCAFIWQKDGVKKLNLYLIINYFKGGKLRFKKIKPEAFEANRFYTVINKKSGEIVPMEVNFNFDDPNLIILPLAFGKRQGREFIWNDLLSLETGSLQLANGRVIEKTLYNRRTRQDEPALFVALTFERREVLDSSNIKPMNLIGVDRGENIPAVIALTDPEGCPLSRFKDSLGNPTHILRIGESYKEKQRTIQAKKEVEQRRAGGYSRKYASKAKNLADDMVRNTARDLLYYAVTQDAMLIFENLSRGFGRQGKRTFMAERQYTRMEDWLTAKLAYEGLPSKTYLSKTLAQYTSKTCSNCGFTITSADYDRMLEKLKKTATGWMTTINGKELKVEGQITYYNRYKRQNVVKDLSVELDRLSEESVNNDISSWTKGRSGEALSLLKKRFSHRPVQEKFVCLNCGFETHADEQAALNIARSWLFLRSQEYKKYQTNKTTGNTDKRAFVETWQSFYRKKLKEVWKPAV

SEQ ID NO: 39115 - protein, 978 aa, synthetic construct
  REGION 1..978: note = engineered CasX variant
QEIKRINKIRRRLVKDSNTKKAGKTGPMKTLLVRVMTPDLRERLENLRKKPENIPQPISNTSRANLNKLLTDYTEMKKAILHVYWEEFQKDPVGLMSRVAQPASKKIDQNKLKPEMDEKGNLTTAGFACSQCGQPLFVYKLEQVSEKGKAYTNYFGRCNVAEHEKLILLAQLKPEKDSDEAVTYSLGKFGQRALDFYSIHVTKESTHPVKPLAQIAGNRYASSPVGKALSDACMGTIASFLSKYQDIIIEHQKVVKGNQKRLESLRELAGKENLEYPSVTLPPQPHTKEGVDAYNEVIARVRMWVNLNLWQKLKLSRDDAKPLLRLKGFPSFPLVERQANEVDWWDMVCNVKKLINEKKEDGKVFWQNLAGYKRQEALRPYLSSEEDRKKGKKFARYQLGDLLLHLEKKHGEDWGKVYDEAWERIDKKVEGLSKHIKLEEERRSEDAQSKAALTDWLRAKASFVIEGLKEADKDEFCRCELKLQKWYGDLRGKPFAIEAENSILDISGFSKQYNCAFIWQKDGVKKLNLYLIINYFKGGKLRFKKIKPEAFEANRFYTVINKKSGEIVPMEVNFNFDDPNLIILPLAFGKRQGREFIWNDLLSLETGSLQLANGRVIEKTLYNRRTRQDEPALFVALTFERREVLDSSNIKPMNLIGVDRGENIPAVIALTDPEGCPLSRFKDSLGNPTHILRIGESYKEKQRTIQAKKEVEQRRAGGYSRKYASKAKNLADDMVRNTARDLLYYAVTQDAMLIFENLSRGFGRQGKRTFMAERQYTRMEDWLTAKLAYEGLPSKTYLSKTLAQYTSKTCSNCGFTITSADYDRMLEKLKKTATGWMTTINGKELKVEGQITYYNRYKRQNVVKDLSVELDRLSEESVNNDISSWTKGRSGEALSLLKKRFSHRPVQEKFVCLNCGFETHADEQAALNIARSWLFLRSQEYKKYQTNKTTGNTDKRAFVETWQSFYRKKLKEVWKPAV

SEQ ID NO: 39116 - protein, 978 aa, synthetic construct
  REGION 1..978: note = engineered CasX variant
QEIKRINKIRRRLVKDSNTKKAGKTGPMKTLLVRVMTPDLRERLENLRKKPENIPQPISNTSRANLNKLLTDYTEMKKAILHVYWEEFQKDPVGLMSRVAQPASKKIDQNKLKPEMDEKGNLTTAGFACSQCGQPLFVYKLEQVSEKGKAYTNYFGRCNVAEHEKLILLAQLKPEKDSDEAVTYSLGKFGQRALDFYSIHVTKESTHPVKPLAQIAGNRYASTPVGKALSDACMGTIASFLSKYQDIIIEHQKVVKGNQKRLESLRELAGKENLEYPSVTLPPQPHTKEGVDAYNEVIARVRMWVNLNLWQKLKLSRDDAKPLLRLKGFPSFPLVERQANEVDWWDMVCNVKKLINEKKEDGKVFWQNLAGYKRQEALRPYLSSEEDRKKGKKFARYQLGDLLLHLEKKHGEDWGKVYDEAWERIDKKVEGLSKHIKLEEERRSEDAQSKAALTDWLRAKASFVIEGLKEADKDEFCRCELKLQKWYGDLRGKPFAIEAENSILDISGFSKQYNCAFIWQKDGVKKLNLYLIINYFKGGKLRFKKIKPEAFEANRFYTVINKKSGEIVPMEVNFNFDDPNLIILPLAFGKRQGREFIWNDLLSLETGSLQLANGRVIEKTLYNRRTRQDEPALFVALTFERREVLDSSNIKPMNLIGVDRGENIPAVIALTDPEGCPLSRFKDSLGNPTHILRIGESYKEKQRTIQAKKEVEQRRAGGYSRKYASKAKNLADDMVRNTARDLLYYAVTQDAMLIFENLSRGFGRQGKRTFMAERQYTRMEDWLTAKLAYEGLPSKTYLSKTLAQYTSKTCSNCGFTITSADYDRMLEKLKKTATGWMTTINGKELKVEGQITYYNRYKRQNVVKDLSVELDRLSEESVNNDISSWTKGRSGEALSLLKKRFSHRPVQEKFVCLNCGFETHADEQAALNIARSWLFLRSQEYKKYQTNKTTGNTDKRAFVETWQSFYRKKLKEVWKPAV

SEQ ID NO: 39117 - protein, 978 aa, synthetic construct
  REGION 1..978: note = engineered CasX variant
QEIKRINKIRRRLVKDSNTKKAGKTGPMKTLLVRVMTPDLRERLENLRKKPENIPQPISNTSRANLNKLLTDYTEMKKAILHVYWEEFQKDPVGLMSRVAQPASKKIDQNKLKPEMDEKGNLTTAGFACSQCGQPLFVYKLEQVSEKGKAYTNYFGRCNVAEHEKLILLAQLKPEKDSDEAVTYSLGKFGQRALDFYSIHVTKESTHPVKPLAQIAGNRYASAPVGKALSDACMGTIASFLSKYQDIIIEHQKVVKGNQKRLESLRELAGKENLEYPSVTLPPQPHTKEGVDAYNEVIARVRMWVNLNLWQKLKLSRDDAKPLLRLKGFPSFPLVERQANEVDWWDMVCNVKKLINEKKEDGKVFWQNLAGYKRQEALRPYLSSEEDRKKGKKFARYQLGDLLLHLEKKHGEDWGKVYDEAWERIDKKVEGLSKHIKLEEERRSEDAQSKAALTDWLRAKASFVIEGLKEADKDEFCRCELKLQKWYGDLRGKPFAIEAENSILDISGFSKQYNCAFIWQKDGVKKLNLYLIINYFKGGKLRFKKIKPEAFEANRFYTVINKKSGEIVPMEVNFNFDDPNLIILPLAFGKRQGREFIWNDLLSLETGSLQLANGRVIEKTLYNRRTRQDEPALFVALTFERREVLDSSNIKPMNLIGVDRGENIPAVIALTDPEGCPLSRFKDSLGNPTHILRIGESYKEKQRTIQAKKEVEQRRAGGYSRKYASKAKNLADDMVRNTARDLLYYAVTQDAMLIFENLSRGFGRQGKRTFMAERQYTRMEDWLTAKLAYEGLPSKTYLSKTLAQYTSKTCSNCGFTITSADYDRMLEKLKKTATGWMTTINGKELKVEGQITYYNRYKRQNVVKDLSVELDRLSEESVNNDISSWTKGRSGEALSLLKKRFSHRPVQEKFVCLNCGFETHADEQAALNIARSWLFLRSQEYKKYQTNKTTGNTDKRAFVETWQSFYRKKLKEVWKPAV

SEQ ID NO: 39118 - protein, 978 aa, synthetic construct
  REGION 1..978: note = engineered CasX variant
QEIKRINKIRRRLVKDSNTKKAGKTGPMKTLLVRVMTPDLRERLENLRKKPENIPQPISNTSRANLNKLLTDYTEMKKAILHVYWEEFQKDPVGLMSRVAQPASKKIDQNKLKPEMDEKGNLTTAGFACSQCGQPLFVYKLEQVSEKGKAYTNYFGRCNVAEHEKLILLAQLKPEKDSDEAVTYSLGKFGQRALDFYSIHVTKESTHPVKPLAQIAGNRYASVPVGKALSDACMGTIASFLSKYQDIIIEHQKVVKGNQKRLESLRELAGKENLEYPSVTLPPQPHTKEGVDAYNEVIARVRMWVNLNLWQKLKLSRDDAKPLLRLKGFPSFPLVERQANEVDWWDMVCNVKKLINEKKEDGKVFWQNLAGYKRQEALRPYLSSEEDRKKGKKFARYQLGDLLLHLEKKHGEDWGKVYDEAWERIDKKVEGLSKHIKLEEERRSEDAQSKAALTDWLRAKASFVIEGLKEADKDEFCRCELKLQKWYGDLRGKPFAIEAENSILDISGFSKQYNCAFIWQKDGVKKLNLYLIINYFKGGKLRFKKIKPEAFEANRFYTVINKKSGEIVPMEVNFNFDDPNLIILPLAFGKRQGREFIWNDLLSLETGSLQLANGRVIEKTLYNRRTRQDEPALFVALTFERREVLDSSNIKPMNLIGVDRGENIPAVIALTDPEGCPLSRFKDSLGNPTHILRIGESYKEKQRTIQAKKEVEQRRAGGYSRKYASKAKNLADDMVRNTARDLLYYAVTQDAMLIFENLSRGFGRQGKRTFMAERQYTRMEDWLTAKLAYEGLPSKTYLSKTLAQYTSKTCSNCGFTITSADYDRMLEKLKKTATGWMTTINGKELKVEGQITYYNRYKRQNVVKDLSVELDRLSEESVNNDISSWTKGRSGEALSLLKKRFSHRPVQEKFVCLNCGFETHADEQAALNIARSWLFLRSQEYKKYQTNKTTGNTDKRAFVETWQSFYRKKLKEVWKPAV

SEQ ID NO: 39119 - protein, 978 aa, synthetic construct
  REGION 1..978: note = engineered CasX variant
QEIKRINKIRRRLVKDSNTKKAGKTGPMKTLLVRVMTPDLRERLENLRKKPENIPQPISNTSRANLNKLLTDYTEMKKAILHVYWEEFQKDPVGLMSRVAQPASKKIDQNKLKPEMDEKGNLTTAGFACSQCGQPLFVYKLEQVSEKGKAYTNYFGRCNVAEHEKLIKLAQLKPEKDSDEAVTYSLGKFGQRALDFYSIHVTKESTHPVKPLAQIAGNRYASGPVGKALSDACMGTIASFLSKYQDIIIEHQKVVKGNQKRLESLRELAGKENLEYPSVTLPPQPHTKEGVDAYNEVIARVRMWVNLNLWQKLKLSRDDAKPLLRLKGFPSFPLVERQANEVDWWDMVCNVKKLINEKKEDGKVFWQNLAGYKRQEALRPYLSSEEDRKKGKKFARYQLGDLLLHLEKKHGEDWGKVYDEAWERIDKKVEGLSKHIKLEEERRSEDAQSKAALTDWLRAKASFVIEGLKEADKDEFCRCELKLQKWYGDLRGKPFAIEAENSILDISGFSKQYNCAFIWQKDGVKKLNLYLIINYFKGGKLRFKKIKPEAFEANRFYTVINKKSGEIVPMEVNFNFDDPNLIILPLAFGKRQGREFIWNDLLSLETGSLQLANGRVIEKTLYNRRTRQDEPALFVALTFERREVLDSSNIKPMNLIGVDRGENIPAVIALTDPEGCPLSRFKDSLGNPTHILRIGESYKEKQRTIQAKKEVEQRRAGGYSRKYASKAKNLADDMVRNTARDLLYYAVTQDAMLIFENLSRGFGRQGKRTFMAERQYTRMEDWLTAKLAYEGLPSKTYLSKTLAQYTSKTCSNCGFTITSADYDRMLEKLKKTATGWMTTINGKELKVEGQITYYNRYKRQNVVKDLSVELDRLSEESVNNDISSWTKGRSGEALSLLKKRFSHRPVQEKFVCLNCGFETHADEQAALNIARSWLFLRSQEYKKYQTNKTTGNTDKRAFVETWQSFYRKKLKEVWKPAV

SEQ ID NO: 39120 - protein, 977 aa, synthetic construct
  REGION 1..977: note = engineered CasX variant
QEIKRINKIRRRLVKDSNTKKAGKTGPMKTLLVRVMTPDLRERLENLRKKPENIPQPISNTSRANLNKLLTDYTEMKKAILHVYWEEFQKDPVGLMSRVAQPASKKIDQNKLKPEMDEKGNLTTAGFACSQCGQPLFVYKLEQVSEKGKAYTNYFGRCNVAEHEKLILLAQLKPEKDSDEAVTYSLGKFGQRALDFYSIHVTKESTHPVKPLAQIAGNRYASPVGKALSDACMGTIASFLSKYQDIIIEHQKVVKGNQKRLESLRELAGKENLEYPSVTLPPQPHTKEGVDAYNEVIARVRMWVNLNLWQKLKLSRDDAKPLLRLKGFPSFPLVERQANEVDWWDMVCNVKKLINEKKEDGKVFWQNLAGYKRQEALRPYLSSEEDRKKGKKFARYQLGDLLLHLEKKHGEDWGKVYDEAWERIDKKVEGLSKHIKLEEERRSEDAQSKAALTDWLRAKASFVIEGLKEADKDEFCRCELKLQKWYGDLRGKPFAIEAENSILDISGFSKQYNCAFIWQKDGVKKLNLYLIINYFKGGKLRFKKIKPEAFEANRFYTVINKKSGEIVPMEVNFNFDDPNLIILPLAFGKRQGREFIWNDLLSLETGSLQLANGRVIEKTLYNRRTRQDEPALFVALTFERREVLDSSNIKPMNLIGVDRGENIPAVIALTDPEGCPLSRFKDSLGNPTHILRIGESYKEKQRTIQAKKEVEQRRAGGYSRKYASKAKNLADDMVRNTARDLLYYAVTQDAMLIFENLSRGFGRQGKRTFMAERQYTRMEDWLTAKLAYEGLPSKTYLSKTLAQYTSKTCSNCGFTITSADYDRMLEKLKKTATGWMTTINGKELKVEGQITYYNRYKRQNVVKDLSVELDRLSEESVNNDISSWTKGRSGEALSLLKKRFSHRPVQEKFVCLNCGFETHADEQAALNIARSWLFLRSQEYKKYQTNKTTGNTDKRAFVETWQSFYRKKLKEVWKPAV

SEQ ID NO: 39121 - protein, 978 aa, synthetic construct
  REGION 1..978: note = engineered CasX variant
QEIKRINKIRRRLVKDSNTKKAGKTGPMKTLLVRVMTPDLRERLENLRKKPENIPQPISNTSRANLNKLLTDYTEMKKAILHVYWEEFQKDPVGLMSRVAQPASKKIDQNKLKPEMDEKGNLTTAGFACSQCGQPLFVYKLEQVSEKGKAYTNYFGRCNVAEHEKLILLAQLKPEKDSDEAVTYSLGKFGQRALDFYSIHVTKESTHPVKPLAQIAGNRYASYPVGKALSDACMGTIASFLSKYQDIIIEHQKVVKGNQKRLESLRELAGKENLEYPSVTLPPQPHTKEGVDAYNEVIARVRMWVNLNLWQKLKLSRDDAKPLLRLKGFPSFPLVERQANEVDWWDMVCNVKKLINEKKEDGKVFWQNLAGYKRQEALRPYLSSEEDRKKGKKFARYQLGDLLLHLEKKHGEDWGKVYDEAWERIDKKVEGLSKHIKLEEERRSEDAQSKAALTDWLRAKASFVIEGLKEADKDEFCRCELKLQKWYGDLRGKPFAIEAENSILDISGFSKQYNCAFIWQKDGVKKLNLYLIINYFKGGKLRFKKIKPEAFEANRFYTVINKKSGEIVPMEVNFNFDDPNLIILPLAFGKRQGREFIWNDLLSLETGSLKLANGRVIEKTLYNRRTRQDEPALFVALTFERREVLDSSNIKPMNLIGVDRGENIPAVIALTDPEGCPLSRFKDSLGNPTHILRIGESYKEKQRTIQAKKEVEQRRAGGYSRKYASKAKNLADDMVRNTARDLLYYAVTQDAMLIFENLSRGFGRQGKRTFMAERQYTRMEDWLTAKLAYEGLPSKTYLSKTLAQYTSKTCSNCGFTITSADYDRVLEKLKKTATGWMTTINGKELKVEGQITYYNRYKRQNVVKDLSVELDRLSEESVNNDISSWTKGRQGEALSLLKKRFSHRPVQEKFVCLNCEFETHADEQAALNIARSWLFLRSQEYKKYQTNKTTGNTDKRAFVETWQSFYRKKLKEVWKPAV

SEQ ID NO: 39122 - protein, 978 aa, synthetic construct
  REGION 1..978: note = engineered CasX variant
QEIKRINKIRRRLVKDSNTKKAGKTGPMKTLLVRVMTPDLRERLENLRKKPENIPQPISNTSRANLNKLLTDYTEMKKAILHVYWEEFQKDPVGLMSRVAQPASKKIDQNKLKPEMDEKGNLTTAGFACSQCGQPLFVYKLEQVSEKGKAYTNYFGRCNVAEHEKLILLAQLKPEKDSDEAVTYSLGKFGQRALDFYSIHVTKESTHPVKPLAQIAGNRYASHPVGKALSDACMGTIASFLSKYQDIIIEHQKVVKGNQKRLESLRELAGKENLEYPSVTLPPQPHTKEGVDAYNEVIARVRMWVNLNLWQKLKLSRDDAKPLLRLKGFPSFPLVERQANEVDWWDMVCNVKKLINEKKEDGKVFWQNLAGYKRQEALRPYLSSEEDRKKGKKFARYQLGDLLLHLEKKHGEDWGKVYDEAWERIDKKVEGLSKHIKLEEERRSEDAQSKAALTDWLRAKASFVIEGLKEADKDEFCRCELKLQKWYGDLRGKPFAIEAENSILDISGFSKQYNCAFIWQKDGVKKLNLYLIINYFKGGKLRFKKIKPEAFEANRFYTVINKKSGEIVPMEVNFNFDDPNLIILPLAFGKRQGREFIWNDLLSLETGSLKLANGRVIEKTLYNRRTRQDEPALFVALTFERREVLDSSNIKPMNLIGVDRGENIPAVIALTDPEGCPLSRFKDSLGNPTHILRIGESYKEKQRTIQAKKEVEQRRAGGYSRKYASKAKNLADDMVRNTARDLLYYAVTQDAMLIFENLSRGFGRQGKRTFMAERQYTRMEDWLTAKLAYEGLPSKTYLSKTLAQYTSKTCSNCGFTITSADYDRVLEKLKKTATGWMTTINGKELKVEGQITYYNRYKRQNVVKDLSVELDRLSEESVNNDISSWTKGRQGEALSLLKKRFSHRPVQEKFVCLNCEFETHADEQAALNIARSWLFLRSQEYKKYQTNKTTGNTDKRAFVETWQSFYRKKLKEVWKPAV

SEQ ID NO: 39123 - protein, 978 aa, synthetic construct
  REGION 1..978: note = engineered CasX variant
QEIKRINKIRRRLVKDSNTKKAGKTGPMKTLLVRVMTPDLRERLENLRKKPENIPQPISNTSRANLNKLLTDYTEMKKAILHVYWEEFQKDPVGLMSRVAQPASKKIDQNKLKPEMDEKGNLTTAGFACSQCGQPLFVYKLEQVSEKGKAYTNYFGRCNVAEHEKLILLAQLKPEKDSDEAVTYSLGKFGQRALDFYSIHVTKESTHPVKPLAQIAGNRYASSPVGKALSDACMGTIASFLSKYQDIIIEHQKVVKGNQKRLESLRELAGKENLEYPSVTLPPQPHTKEGVDAYNEVIARVRMWVNLNLWQKLKLSRDDAKPLLRLKGFPSFPLVERQANEVDWWDMVCNVKKLINEKKEDGKVFWQNLAGYKRQEALRPYLSSEEDRKKGKKFARYQLGDLLLHLEKKHGEDWGKVYDEAWERIDKKVEGLSKHIKLEEERRSEDAQSKAALTDWLRAKASFVIEGLKEADKDEFCRCELKLQKWYGDLRGKPFAIEAENSILDISGFSKQYNCAFIWQKDGVKKLNLYLIINYFKGGKLRFKKIKPEAFEANRFYTVINKKSGEIVPMEVNFNFDDPNLIILPLAFGKRQGREFIWNDLLSLETGSLKLANGRVIEKTLYNRRTRQDEPALFVALTFERREVLDSSNIKPMNLIGVDRGENIPAVIALTDPEGCPLSRFKDSLGNPTHILRIGESYKEKQRTIQAKKEVEQRRAGGYSRKYASKAKNLADDMVRNTARDLLYYAVTQDAMLIFENLSRGFGRQGKRTFMAERQYTRMEDWLTAKLAYEGLPSKTYLSKTLAQYTSKTCSNCGFTITSADYDRVLEKLKKTATGWMTTINGKELKVEGQITYYNRYKRQNVVKDLSVELDRLSEESVNNDISSWTKGRQGEALSLLKKRFSHRPVQEKFVCLNCEFETHADEQAALNIARSWLFLRSQEYKKYQTNKTTGNTDKRAFVETWQSFYRKKLKEVWKPAV

SEQ ID NO: 39124 - protein, 978 aa, synthetic construct
  REGION 1..978: note = engineered CasX variant
QEIKRINKIRRRLVKDSNTKKAGKTGPMKTLLVRVMTPDLRERLENLRKKPENIPQPISNTSRANLNKLLTDYTEMKKAILHVYWEEFQKDPVGLMSRVAQPASKKIDQNKLKPEMDEKGNLTTAGFACSQCGQPLFVYKLEQVSEKGKAYTNYFGRCNVAEHEKLILLAQLKPEKDSDEAVTYSLGKFGQRALDFYSIHVTKESTHPVKPLAQIAGNRYASTPVGKALSDACMGTIASFLSKYQDIIIEHQKVVKGNQKRLESLRELAGKENLEYPSVTLPPQPHTKEGVDAYNEVIARVRMWVNLNLWQKLKLSRDDAKPLLRLKGFPSFPLVERQANEVDWWDMVCNVKKLINEKKEDGKVFWQNLAGYKRQEALRPYLSSEEDRKKGKKFARYQLGDLLLHLEKKHGEDWGKVYDEAWERIDKKVEGLSKHIKLEEERRSEDAQSKAALTDWLRAKASFVIEGLKEADKDEFCRCELKLQKWYGDLRGKPFAIEAENSILDISGFSKQYNCAFIWQKDGVKKLNLYLIINYFKGGKLRFKKIKPEAFEANRFYTVINKKSGEIVPMEVNFNFDDPNLIILPLAFGKRQGREFIWNDLLSLETGSLKLANGRVIEKTLYNRRTRQDEPALFVALTFERREVLDSSNIKPMNLIGVDRGENIPAVIALTDPEGCPLSRFKDSLGNPTHILRIGESYKEKQRTIQAKKEVEQRRAGGYSRKYASKAKNLADDMVRNTARDLLYYAVTQDAMLIFENLSRGFGRQGKRTFMAERQYTRMEDWLTAKLAYEGLPSKTYLSKTLAQYTSKTCSNCGFTITSADYDRVLEKLKKTATGWMTTINGKELKVEGQITYYNRYKRQNVVKDLSVELDRLSEESVNNDISSWTKGRQGEALSLLKKRFSHRPVQEKFVCLNCEFETHADEQAALNIARSWLFLRSQEYKKYQTNKTTGNTDKRAFVETWQSFYRKKLKEVWKPAV

SEQ ID NO: 39125 - protein, 978 aa, synthetic construct
  REGION 1..978: note = engineered CasX variant
QEIKRINKIRRRLVKDSNTKKAGKTGPMKTLLVRVMTPDLRERLENLRKKPENIPQPISNTSRANLNKLLTDYTEMKKAILHVYWEEFQKDPVGLMSRVAQPASKKIDQNKLKPEMDEKGNLTTAGFACSQCGQPLFVYKLEQVSEKGKAYTNYFGRCNVAEHEKLILLAQLKPEKDSDEAVTYSLGKFGQRALDFYSIHVTKESTHPVKPLAQIAGNRYASAPVGKALSDACMGTIASFLSKYQDIIIEHQKVVKGNQKRLESLRELAGKENLEYPSVTLPPQPHTKEGVDAYNEVIARVRMWVNLNLWQKLKLSRDDAKPLLRLKGFPSFPLVERQANEVDWWDMVCNVKKLINEKKEDGKVFWQNLAGYKRQEALRPYLSSEEDRKKGKKFARYQLGDLLLHLEKKHGEDWGKVYDEAWERIDKKVEGLSKHIKLEEERRSEDAQSKAALTDWLRAKASFVIEGLKEADKDEFCRCELKLQKWYGDLRGKPFAIEAENSILDISGFSKQYNCAFIWQKDGVKKLNLYLIINYFKGGKLRFKKIKPEAFEANRFYTVINKKSGEIVPMEVNFNFDDPNLIILPLAFGKRQGREFIWNDLLSLETGSLKLANGRVIEKTLYNRRTRQDEPALFVALTFERREVLDSSNIKPMNLIGVDRGENIPAVIALTDPEGCPLSRFKDSLGNPTHILRIGESYKEKQRTIQAKKEVEQRRAGGYSRKYASKAKNLADDMVRNTARDLLYYAVTQDAMLIFENLSRGFGRQGKRTFMAERQYTRMEDWLTAKLAYEGLPSKTYLSKTLAQYTSKTCSNCGFTITSADYDRVLEKLKKTATGWMTTINGKELKVEGQITYYNRYKRQNVVKDLSVELDRLSEESVNNDISSWTKGRQGEALSLLKKRFSHRPVQEKFVCLNCEFETHADEQAALNIARSWLFLRSQEYKKYQTNKTTGNTDKRAFVETWQSFYRKKLKEVWKPAV

SEQ ID NO: 39126 - protein, 978 aa, synthetic construct
  REGION 1..978: note = engineered CasX variant
QEIKRINKIRRRLVKDSNTKKAGKTGPMKTLLVRVMTPDLRERLENLRKKPENIPQPISNTSRANLNKLLTDYTEMKKAILHVYWEEFQKDPVGLMSRVAQPASKKIDQNKLKPEMDEKGNLTTAGFACSQCGQPLFVYKLEQVSEKGKAYTNYFGRCNVAEHEKLILLAQLKPEKDSDEAVTYSLGKFGQRALDFYSIHVTKESTHPVKPLAQIAGNRYASVPVGKALSDACMGTIASFLSKYQDIIIEHQKVVKGNQKRLESLRELAGKENLEYPSVTLPPQPHTKEGVDAYNEVIARVRMWVNLNLWQKLKLSRDDAKPLLRLKGFPSFPLVERQANEVDWWDMVCNVKKLINEKKEDGKVFWQNLAGYKRQEALRPYLSSEEDRKKGKKFARYQLGDLLLHLEKKHGEDWGKVYDEAWERIDKKVEGLSKHIKLEEERRSEDAQSKAALTDWLRAKASFVIEGLKEADKDEFCRCELKLQKWYGDLRGKPFAIEAENSILDISGFSKQYNCAFIWQKDGVKKLNLYLIINYFKGGKLRFKKIKPEAFEANRFYTVINKKSGEIVPMEVNFNFDDPNLIILPLAFGKRQGREFIWNDLLSLETGSLKLANGRVIEKTLYNRRTRQDEPALFVALTFERREVLDSSNIKPMNLIGVDRGENIPAVIALTDPEGCPLSRFKDSLGNPTHILRIGESYKEKQRTIQAKKEVEQRRAGGYSRKYASKAKNLADDMVRNTARDLLYYAVTQDAMLIFENLSRGFGRQGKRTFMAERQYTRMEDWLTAKLAYEGLPSKTYLSKTLAQYTSKTCSNCGFTITSADYDRVLEKLKKTATGWMTTINGKELKVEGQITYYNRYKRQNVVKDLSVELDRLSEESVNNDISSWTKGRQGEALSLLKKRFSHRPVQEKFVCLNCEFETHADEQAALNIARSWLFLRSQEYKKYQTNKTTGNTDKRAFVETWQSFYRKKLKEVWKPAV

SEQ ID NO: 39127 - protein, 978 aa, synthetic construct
  REGION 1..978: note = engineered CasX variant
QEIKRINKIRRRLVKDSNTKKAGKTGPMKTLLVRVMTPDLRERLENLRKKPENIPQPISNTSRANLNKLLTDYTEMKKAILHVYWEEFQKDPVGLMSRVAQPASKKIDQNKLKPEMDEKGNLTTAGFACSQCGQPLFVYKLEQVSEKGKAYTNYFGRCNVAEHEKLIKLAQLKPEKDSDEAVTYSLGKFGQRALDFYSIHVTKESTHPVKPLAQIAGNRYASGPVGKALSDACMGTIASFLSKYQDIIIEHQKVVKGNQKRLESLRELAGKENLEYPSVTLPPQPHTKEGVDAYNEVIARVRMWVNLNLWQKLKLSRDDAKPLLRLKGFPSFPLVERQANEVDWWDMVCNVKKLINEKKEDGKVFWQNLAGYKRQEALRPYLSSEEDRKKGKKFARYQLGDLLLHLEKKHGEDWGKVYDEAWERIDKKVEGLSKHIKLEEERRSEDAQSKAALTDWLRAKASFVIEGLKEADKDEFCRCELKLQKWYGDLRGKPFAIEAENSILDISGFSKQYNCAFIWQKDGVKKLNLYLIINYFKGGKLRFKKIKPEAFEANRFYTVINKKSGEIVPMEVNFNFDDPNLIILPLAFGKRQGREFIWNDLLSLETGSLKLANGRVIEKTLYNRRTRQDEPALFVALTFERREVLDSSNIKPMNLIGVDRGENIPAVIALTDPEGCPLSRFKDSLGNPTHILRIGESYKEKQRTIQAKKEVEQRRAGGYSRKYASKAKNLADDMVRNTARDLLYYAVTQDAMLIFENLSRGFGRQGKRTFMAERQYTRMEDWLTAKLAYEGLPSKTYLSKTLAQYTSKTCSNCGFTITSADYDRVLEKLKKTATGWMTTINGKELKVEGQITYYNRYKRQNVVKDLSVELDRLSEESVNNDISSWTKGRQGEALSLLKKRFSHRPVQEKFVCLNCEFETHADEQAALNIARSWLFLRSQEYKKYQTNKTTGNTDKRAFVETWQSFYRKKLKEVWKPAV

SEQ ID NO: 39128 - protein, 977 aa, synthetic construct
  REGION 1..977: note = engineered CasX variant
QEIKRINKIRRRLVKDSNTKKAGKTGPMKTLLVRVMTPDLRERLENLRKKPENIPQPISNTSRANLNKLLTDYTEMKKAILHVYWEEFQKDPVGLMSRVAQPASKKIDQNKLKPEMDEKGNLTTAGFACSQCGQPLFVYKLEQVSEKGKAYTNYFGRCNVAEHEKLILLAQLKPEKDSDEAVTYSLGKFGQRALDFYSIHVTKESTHPVKPLAQIAGNRYASPVGKALSDACMGTIASFLSKYQDIIIEHQKVVKGNQKRLESLRELAGKENLEYPSVTLPPQPHTKEGVDAYNEVIARVRMWVNLNLWQKLKLSRDDAKPLLRLKGFPSFPLVERQANEVDWWDMVCNVKKLINEKKEDGKVFWQNLAGYKRQEALRPYLSSEEDRKKGKKFARYQLGDLLLHLEKKHGEDWGKVYDEAWERIDKKVEGLSKHIKLEEERRSEDAQSKAALTDWLRAKASFVIEGLKEADKDEFCRCELKLQKWYGDLRGKPFAIEAENSILDISGFSKQYNCAFIWQKDGVKKLNLYLIINYFKGGKLRFKKIKPEAFEANRFYTVINKKSGEIVPMEVNFNFDDPNLIILPLAFGKRQGREFIWNDLLSLETGSLKLANGRVIEKTLYNRRTRQDEPALFVALTFERREVLDSSNIKPMNLIGVDRGENIPAVIALTDPEGCPLSRFKDSLGNPTHILRIGESYKEKQRTIQAKKEVEQRRAGGYSRKYASKAKNLADDMVRNTARDLLYYAVTQDAMLIFENLSRGFGRQGKRTFMAERQYTRMEDWLTAKLAYEGLPSKTYLSKTLAQYTSKTCSNCGFTITSADYDRVLEKLKKTATGWMTTINGKELKVEGQITYYNRYKRQNVVKDLSVELDRLSEESVNNDISSWTKGRQGEALSLLKKRFSHRPVQEKFVCLNCEFETHADEQAALNIARSWLFLRSQEYKKYQTNKTTGNTDKRAFVETWQSFYRKKLKEVWKPAV

SEQ ID NO: 39129 - protein, 979 aa, synthetic construct
  REGION 1..979: note = engineered CasX variant
QEIKRINKIRRRLVKDSNTKKAGKTGPMKTLLVRVMTPDLRERLENLRKKPENIPQPISNTSRANLNKLLTDYTEMKKAILHVYWEEFQKDPVGLMSRVAQPASKKIDQNKLKPEMDEKGNLTTAGFACSQCGQPLFVYKLEQVSEKGKAYTNYFGRCNVAEHEKLILLAQLKPEKDSDEAVTYSLGKFGQRALDFYSIHVTKESTHPVKPLAQIAGNRYASYPVGKALSDACMGTIASFLSKYQDIIIEHQKVVKGNQKRLESLRELAGKENLEYPSVTLPPQPHTKEGVDAYNEVIARVRMWVNLNLWQKLKLSRDDAKPLLRLKGFPSFPLVERQANEVDWWDMVCNVKKLINEKKEDGKVFWQNLAGYKRQEALRPYLSSEEDRKKGKKFARYQLGDLLLHLEKKHGEDWGKVYDEAWERIDKKVEGLSKHIKLEEERRSEDAQSKAALTDWLRAKASFVIEGLKEADKDEFCRCELKLQKWYGDLRGKPFAIEAENSILDISGFSKQYNCAFIWQKDGVKKLNLYLIINYFKGGKLRFKKIKPEAFEANRFYTVINKKSGEIVPMEVNFNFDDPNLIILPLAFGKRQGREFIWNDLLSLETGSLKLANGRVIEKTLYNRRTRQDEPALFVALTFERREVLDSSNIKPMNLIGVDRGENIPAVIALTDPEGCPLSRFKDSLGNPTHILRIGESYKEKQRTIQAKKEVEQRRAGGYSRKYASKAKNLADDMVRNTARDLLYYAVTQDAMLIFENLSRGFGRQGKRTFMAERQYTRMEDWLTAKLAYEGLPSKTYLSKTLAQYTSKTCSNCGFTITSADYDRVLEKLKKTATGWMTTINGKELKVEGQITYYNRYKRQNVVKDLSVELDRLSEESVNNDISSWTKGRQGEALSLLKKRFSHRPVQEKFVCLNCGFETHADEQAALNIARSWLFLRSQEYKKYQTNKTSTGNTDKRAFVETWQSFYRKKLKEVWKPAV

SEQ ID NO: 39130 - protein, 979 aa, synthetic construct
  REGION 1..979: note = engineered CasX variant
QEIKRINKIRRRLVKDSNTKKAGKTGPMKTLLVRVMTPDLRERLENLRKKPENIPQPISNTSRANLNKLLTDYTEMKKAILHVYWEEFQKDPVGLMSRVAQPASKKIDQNKLKPEMDEKGNLTTAGFACSQCGQPLFVYKLEQVSEKGKAYTNYFGRCNVAEHEKLILLAQLKPEKDSDEAVTYSLGKFGQRALDFYSIHVTKESTHPVKPLAQIAGNRYASHPVGKALSDACMGTIASFLSKYQDIIIEHQKVVKGNQKRLESLRELAGKENLEYPSVTLPPQPHTKEGVDAYNEVIARVRMWVNLNLWQKLKLSRDDAKPLLRLKGFPSFPLVERQANEVDWWDMVCNVKKLINEKKEDGKVFWQNLAGYKRQEALRPYLSSEEDRKKGKKFARYQLGDLLLHLEKKHGEDWGKVYDEAWERIDKKVEGLSKHIKLEEERRSEDAQSKAALTDWLRAKASFVIEGLKEADKDEFCRCELKLQKWYGDLRGKPFAIEAENSILDISGFSKQYNCAFIWQKDGVKKLNLYLIINYFKGGKLRFKKIKPEAFEANRFYTVINKKSGEIVPMEVNFNFDDPNLIILPLAFGKRQGREFIWNDLLSLETGSLKLANGRVIEKTLYNRRTRQDEPALFVALTFERREVLDSSNIKPMNLIGVDRGENIPAVIALTDPEGCPLSRFKDSLGNPTHILRIGESYKEKQRTIQAKKEVEQRRAGGYSRKYASKAKNLADDMVRNTARDLLYYAVTQDAMLIFENLSRGFGRQGKRTFMAERQYTRMEDWLTAKLAYEGLPSKTYLSKTLAQYTSKTCSNCGFTITSADYDRVLEKLKKTATGWMTTINGKELKVEGQITYYNRYKRQNVVKDLSVELDRLSEESVNNDISSWTKGRQGEALSLLKKRFSHRPVQEKFVCLNCGFETHADEQAALNIARSWLFLRSQEYKKYQTNKTSTGNTDKRAFVETWQSFYRKKLKEVWKPAV

SEQ ID NO: 39131 - protein, 979 aa, synthetic construct
  REGION 1..979: note = engineered CasX variant
QEIKRINKIRRRLVKDSNTKKAGKTGPMKTLLVRVMTPDLRERLENLRKKPENIPQPISNTSRANLNKLLTDYTEMKKAILHVYWEEFQKDPVGLMSRVAQPASKKIDQNKLKPEMDEKGNLTTAGFACSQCGQPLFVYKLEQVSEKGKAYTNYFGRCNVAEHEKLILLAQLKPEKDSDEAVTYSLGKFGQRALDFYSIHVTKESTHPVKPLAQIAGNRYASSPVGKALSDACMGTIASFLSKYQDIIIEHQKVVKGNQKRLESLRELAGKENLEYPSVTLPPQPHTKEGVDAYNEVIARVRMWVNLNLWQKLKLSRDDAKPLLRLKGFPSFPLVERQANEVDWWDMVCNVKKLINEKKEDGKVFWQNLAGYKRQEALRPYLSSEEDRKKGKKFARYQLGDLLLHLEKKHGEDWGKVYDEAWERIDKKVEGLSKHIKLEEERRSEDAQSKAALTDWLRAKASFVIEGLKEADKDEFCRCELKLQKWYGDLRGKPFAIEAENSILDISGFSKQYNCAFIWQKDGVKKLNLYLIINYFKGGKLRFKKIKPEAFEANRFYTVINKKSGEIVPMEVNFNFDDPNLIILPLAFGKRQGREFIWNDLLSLETGSLKLANGRVIEKTLYNRRTRQDEPALFVALTFERREVLDSSNIKPMNLIGVDRGENIPAVIALTDPEGCPLSRFKDSLGNPTHILRIGESYKEKQRTIQAKKEVEQRRAGGYSRKYASKAKNLADDMVRNTARDLLYYAVTQDAMLIFENLSRGFGRQGKRTFMAERQYTRMEDWLTAKLAYEGLPSKTYLSKTLAQYTSKTCSNCGFTITSADYDRVLEKLKKTATGWMTTINGKELKVEGQITYYNRYKRQNVVKDLSVELDRLSEESVNNDISSWTKGRQGEALSLLKKRFSHRPVQEKFVCLNCGFETHADEQAALNIARSWLFLRSQEYKKYQTNKTSTGNTDKRAFVETWQSFYRKKLKEVWKPAV

SEQ ID NO: 39132 - protein, 979 aa, synthetic construct
  REGION 1..979: note = engineered CasX variant
QEIKRINKIRRRLVKDSNTKKAGKTGPMKTLLVRVMTPDLRERLENLRKKPENIPQPISNTSRANLNKLLTDYTEMKKAILHVYWEEFQKDPVGLMSRVAQPASKKIDQNKLKPEMDEKGNLTTAGFACSQCGQPLFVYKLEQVSEKGKAYTNYFGRCNVAEHEKLILLAQLKPEKDSDEAVTYSLGKFGQRALDFYSIHVTKESTHPVKPLAQIAGNRYASTPVGKALSDACMGTIASFLSKYQDIIIEHQKVVKGNQKRLESLRELAGKENLEYPSVTLPPQPHTKEGVDAYNEVIARVRMWVNLNLWQKLKLSRDDAKPLLRLKGFPSFPLVERQANEVDWWDMVCNVKKLINEKKEDGKVFWQNLAGYKRQEALRPYLSSEEDRKKGKKFARYQLGDLLLHLEKKHGEDWGKVYDEAWERIDKKVEGLSKHIKLEEERRSEDAQSKAALTDWLRAKASFVIEGLKEADKDEFCRCELKLQKWYGDLRGKPFAIEAENSILDISGFSKQYNCAFIWQKDGVKKLNLYLIINYFKGGKLRFKKIKPEAFEANRFYTVINKKSGEIVPMEVNFNFDDPNLIILPLAFGKRQGREFIWNDLLSLETGSLKLANGRVIEKTLYNRRTRQDEPALFVALTFERREVLDSSNIKPMNLIGVDRGENIPAVIALTDPEGCPLSRFKDSLGNPTHILRIGESYKEKQRTIQAKKEVEQRRAGGYSRKYASKAKNLADDMVRNTARDLLYYAVTQDAMLIFENLSRGFGRQGKRTFMAERQYTRMEDWLTAKLAYEGLPSKTYLSKTLAQYTSKTCSNCGFTITSADYDRVLEKLKKTATGWMTTINGKELKVEGQITYYNRYKRQNVVKDLSVELDRLSEESVNNDISSWTKGRQGEALSLLKKRFSHRPVQEKFVCLNCGFETHADEQAALNIARSWLFLRSQEYKKYQTNKTSTGNTDKRAFVETWQSFYRKKLKEVWKPAV

SEQ ID NO: 39133 - protein, 979 aa, synthetic construct
  REGION 1..979: note = engineered CasX variant
QEIKRINKIRRRLVKDSNTKKAGKTGPMKTLLVRVMTPDLRERLENLRKKPENIPQPISNTSRANLNKLLTDYTEMKKAILHVYWEEFQKDPVGLMSRVAQPASKKIDQNKLKPEMDEKGNLTTAGFACSQCGQPLFVYKLEQVSEKGKAYTNYFGRCNVAEHEKLILLAQLKPEKDSDEAVTYSLGKFGQRALDFYSIHVTKESTHPVKPLAQIAGNRYASAPVGKALSDACMGTIASFLSKYQDIIIEHQKVVKGNQKRLESLRELAGKENLEYPSVTLPPQPHTKEGVDAYNEVIARVRMWVNLNLWQKLKLSRDDAKPLLRLKGFPSFPLVERQANEVDWWDMVCNVKKLINEKKEDGKVFWQNLAGYKRQEALRPYLSSEEDRKKGKKFARYQLGDLLLHLEKKHGEDWGKVYDEAWERIDKKVEGLSKHIKLEEERRSEDAQSKAALTDWLRAKASFVIEGLKEADKDEFCRCELKLQKWYGDLRGKPFAIEAENSILDISGFSKQYNCAFIWQKDGVKKLNLYLIINYFKGGKLRFKKIKPEAFEANRFYTVINKKSGEIVPMEVNFNFDDPNLIILPLAFGKRQGREFIWNDLLSLETGSLKLANGRVIEKTLYNRRTRQDEPALFVALTFERREVLDSSNIKPMNLIGVDRGENIPAVIALTDPEGCPLSRFKDSLGNPTHILRIGESYKEKQRTIQAKKEVEQRRAGGYSRKYASKAKNLADDMVRNTARDLLYYAVTQDAMLIFENLSRGFGRQGKRTFMAERQYTRMEDWLTAKLAYEGLPSKTYLSKTLAQYTSKTCSNCGFTITSADYDRVLEKLKKTATGWMTTINGKELKVEGQITYYNRYKRQNVVKDLSVELDRLSEESVNNDISSWTKGRQGEALSLLKKRFSHRPVQEKFVCLNCGFETHADEQAALNIARSWLFLRSQEYKKYQTNKTSTGNTDKRAFVETWQSFYRKKLKEVWKPAV

SEQ ID NO: 39134 - protein, 979 aa, synthetic construct
  REGION 1..979: note = engineered CasX variant
QEIKRINKIRRRLVKDSNTKKAGKTGPMKTLLVRVMTPDLRERLENLRKKPENIPQPISNTSRANLNKLLTDYTEMKKAILHVYWEEFQKDPVGLMSRVAQPASKKIDQNKLKPEMDEKGNLTTAGFACSQCGQPLFVYKLEQVSEKGKAYTNYFGRCNVAEHEKLILLAQLKPEKDSDEAVTYSLGKFGQRALDFYSIHVTKESTHPVKPLAQIAGNRYASVPVGKALSDACMGTIASFLSKYQDIIIEHQKVVKGNQKRLESLRELAGKENLEYPSVTLPPQPHTKEGVDAYNEVIARVRMWVNLNLWQKLKLSRDDAKPLLRLKGFPSFPLVERQANEVDWWDMVCNVKKLINEKKEDGKVFWQNLAGYKRQEALRPYLSSEEDRKKGKKFARYQLGDLLLHLEKKHGEDWGKVYDEAWERIDKKVEGLSKHIKLEEERRSEDAQSKAALTDWLRAKASFVIEGLKEADKDEFCRCELKLQKWYGDLRGKPFAIEAENSILDISGFSKQYNCAFIWQKDGVKKLNLYLIINYFKGGKLRFKKIKPEAFEANRFYTVINKKSGEIVPMEVNFNFDDPNLIILPLAFGKRQGREFIWNDLLSLETGSLKLANGRVIEKTLYNRRTRQDEPALFVALTFERREVLDSSNIKPMNLIGVDRGENIPAVIALTDPEGCPLSRFKDSLGNPTHILRIGESYKEKQRTIQAKKEVEQRRAGGYSRKYASKAKNLADDMVRNTARDLLYYAVTQDAMLIFENLSRGFGRQGKRTFMAERQYTRMEDWLTAKLAYEGLPSKTYLSKTLAQYTSKTCSNCGFTITSADYDRVLEKLKKTATGWMTTINGKELKVEGQITYYNRYKRQNVVKDLSVELDRLSEESVNNDISSWTKGRQGEALSLLKKRFSHRPVQEKFVCLNCGFETHADEQAALNIARSWLFLRSQEYKKYQTNKTSTGNTDKRAFVETWQSFYRKKLKEVWKPAV

SEQ ID NO: 39135 - protein, 979 aa, synthetic construct
  REGION 1..979: note = engineered CasX variant
QEIKRINKIRRRLVKDSNTKKAGKTGPMKTLLVRVMTPDLRERLENLRKKPENIPQPISNTSRANLNKLLTDYTEMKKAILHVYWEEFQKDPVGLMSRVAQPASKKIDQNKLKPEMDEKGNLTTAGFACSQCGQPLFVYKLEQVSEKGKAYTNYFGRCNVAEHEKLIKLAQLKPEKDSDEAVTYSLGKFGQRALDFYSIHVTKESTHPVKPLAQIAGNRYASGPVGKALSDACMGTIASFLSKYQDIIIEHQKVVKGNQKRLESLRELAGKENLEYPSVTLPPQPHTKEGVDAYNEVIARVRMWVNLNLWQKLKLSRDDAKPLLRLKGFPSFPLVERQANEVDWWDMVCNVKKLINEKKEDGKVFWQNLAGYKRQEALRPYLSSEEDRKKGKKFARYQLGDLLLHLEKKHGEDWGKVYDEAWERIDKKVEGLSKHIKLEEERRSEDAQSKAALTDWLRAKASFVIEGLKEADKDEFCRCELKLQKWYGDLRGKPFAIEAENSILDISGFSKQYNCAFIWQKDGVKKLNLYLIINYFKGGKLRFKKIKPEAFEANRFYTVINKKSGEIVPMEVNFNFDDPNLIILPLAFGKRQGREFIWNDLLSLETGSLKLANGRVIEKTLYNRRTRQDEPALFVALTFERREVLDSSNIKPMNLIGVDRGENIPAVIALTDPEGCPLSRFKDSLGNPTHILRIGESYKEKQRTIQAKKEVEQRRAGGYSRKYASKAKNLADDMVRNTARDLLYYAVTQDAMLIFENLSRGFGRQGKRTFMAERQYTRMEDWLTAKLAYEGLPSKTYLSKTLAQYTSKTCSNCGFTITSADYDRVLEKLKKTATGWMTTINGKELKVEGQITYYNRYKRQNVVKDLSVELDRLSEESVNNDISSWTKGRQGEALSLLKKRFSHRPVQEKFVCLNCGFETHADEQAALNIARSWLFLRSQEYKKYQTNKTSTGNTDKRAFVETWQSFYRKKLKEVWKPAV

SEQ ID NO: 39136 - protein, 978 aa, synthetic construct
  REGION 1..978: note = engineered CasX variant
QEIKRINKIRRRLVKDSNTKKAGKTGPMKTLLVRVMTPDLRERLENLRKKPENIPQPISNTSRANLNKLLTDYTEMKKAILHVYWEEFQKDPVGLMSRVAQPASKKIDQNKLKPEMDEKGNLTTAGFACSQCGQPLFVYKLEQVSEKGKAYTNYFGRCNVAEHEKLILLAQLKPEKDSDEAVTYSLGKFGQRALDFYSIHVTKESTHPVKPLAQIAGNRYASPVGKALSDACMGTIASFLSKYQDIIIEHQKVVKGNQKRLESLRELAGKENLEYPSVTLPPQPHTKEGVDAYNEVIARVRMWVNLNLWQKLKLSRDDAKPLLRLKGFPSFPLVERQANEVDWWDMVCNVKKLINEKKEDGKVFWQNLAGYKRQEALRPYLSSEEDRKKGKKFARYQLGDLLLHLEKKHGEDWGKVYDEAWERIDKKVEGLSKHIKLEEERRSEDAQSKAALTDWLRAKASFVIEGLKEADKDEFCRCELKLQKWYGDLRGKPFAIEAENSILDISGFSKQYNCAFIWQKDGVKKLNLYLIINYFKGGKLRFKKIKPEAFEANRFYTVINKKSGEIVPMEVNFNFDDPNLIILPLAFGKRQGREFIWNDLLSLETGSLKLANGRVIEKTLYNRRTRQDEPALFVALTFERREVLDSSNIKPMNLIGVDRGENIPAVIALTDPEGCPLSRFKDSLGNPTHILRIGESYKEKQRTIQAKKEVEQRRAGGYSRKYASKAKNLADDMVRNTARDLLYYAVTQDAMLIFENLSRGFGRQGKRTFMAERQYTRMEDWLTAKLAYEGLPSKTYLSKTLAQYTSKTCSNCGFTITSADYDRVLEKLKKTATGWMTTINGKELKVEGQITYYNRYKRQNVVKDLSVELDRLSEESVNNDISSWTKGRQGEALSLLKKRFSHRPVQEKFVCLNCGFETHADEQAALNIARSWLFLRSQEYKKYQTNKTSTGNTDKRAFVETWQSFYRKKLKEVWKPAV

SEQ ID NO: 39137 - protein, 979 aa, synthetic construct
  REGION 1..979: note = engineered CasX variant
QEIKRINKIRRRLVKDSNTKKAGKTGPMKTLLVRVMTPDLRERLENLRKKPENIPQPISNTSRANLNKLLTDYTEMKKAILHVYWEEFQKDPVGLMSRVAQPASKKIDQNKLKPEMDEKGNLTTAGFACSQCGQPLFVYKLEQVSEKGKAYTNYFGRCNVAEHEKLILLAQLKPEKDSDEAVTYSLGKFGQRALDFYSIHVTKESTHPVKPLAQIAGNRYASYPVGKALSDACMGTIASFLSKYQDIIIEHQKVVKGNQKRLESLRELAGKENLEYPSVTLPPQPHTKEGVDAYNEVIARVRMWVNLNLWQKLKLSRDDAKPLLRLKGFPSFPLVERQANEVDWWDMVCNVKKLINEKKEDGKVFWQNLAGYKRQEALRPYLSSEEDRKKGKKFARYQLGDLLLHLEKKHGEDWGKVYDEAWERIDKKVEGLSKHIKLEEERRSEDAQSKAALTDWLRAKASFVIEGLKEADKDEFCRCELKLQKWYGDLRGKPFAIEAENSILDISGFSKQYNCAFIWQKDGVKKLNLYLIINYFKGGKLRFKKIKPEAFEANRFYTVINKKSGEIVPMEVNFNFDDPNLIILPLAFGKRQGREFIWNDLLSLETGSLKLANGRVIEKTLYNRRTRQDEPALFVALTFERREVLDSSNIKPMNLIGVDRGENIPAVIALTDPEGCPLSRFKDSLGNPTHILRIGESYKEKQRTIQAKKEVEQRRAGGYSRKYASKAKNLADDMVRNTARDLLYYAVTQDAMLIFENLSRGFGRQGKRTFMAERQYTRMEDWLTAKLAYEGLPSKTYLSKTLAQYTSKTCSNCGFTITSADYDRVLEKLKKTATGWMTTINGKELKVEGQITYYNRYKRQNVVKDLSVELDRLSEESVNNDISSWTKGRQGEALSLLKKRFSHRPVQEKFVCLNCGFETHADEQAALNIARSWLFLRSQEYKKYQTNKTTGKNTDKRAFVETWQSFYRKKLKEVWKPAV

SEQ ID NO: 39138 - protein, 979 aa, synthetic construct
  REGION 1..979: note = engineered CasX variant
QEIKRINKIRRRLVKDSNTKKAGKTGPMKTLLVRVMTPDLRERLENLRKKPENIPQPISNTSRANLNKLLTDYTEMKKAILHVYWEEFQKDPVGLMSRVAQPASKKIDQNKLKPEMDEKGNLTTAGFACSQCGQPLFVYKLEQVSEKGKAYTNYFGRCNVAEHEKLILLAQLKPEKDSDEAVTYSLGKFGQRALDFYSIHVTKESTHPVKPLAQIAGNRYASHPVGKALSDACMGTIASFLSKYQDIIIEHQKVVKGNQKRLESLRELAGKENLEYPSVTLPPQPHTKEGVDAYNEVIARVRMWVNLNLWQKLKLSRDDAKPLLRLKGFPSFPLVERQANEVDWWDMVCNVKKLINEKKEDGKVFWQNLAGYKRQEALRPYLSSEEDRKKGKKFARYQLGDLLLHLEKKHGEDWGKVYDEAWERIDKKVEGLSKHIKLEEERRSEDAQSKAALTDWLRAKASFVIEGLKEADKDEFCRCELKLQKWYGDLRGKPFAIEAENSILDISGFSKQYNCAFIWQKDGVKKLNLYLIINYFKGGKLRFKKIKPEAFEANRFYTVINKKSGEIVPMEVNFNFDDPNLIILPLAFGKRQGREFIWNDLLSLETGSLKLANGRVIEKTLYNRRTRQDEPALFVALTFERREVLDSSNIKPMNLIGVDRGENIPAVIALTDPEGCPLSRFKDSLGNPTHILRIGESYKEKQRTIQAKKEVEQRRAGGYSRKYASKAKNLADDMVRNTARDLLYYAVTQDAMLIFENLSRGFGRQGKRTFMAERQYTRMEDWLTAKLAYEGLPSKTYLSKTLAQYTSKTCSNCGFTITSADYDRVLEKLKKTATGWMTTINGKELKVEGQITYYNRYKRQNVVKDLSVELDRLSEESVNNDISSWTKGRQGEALSLLKKRFSHRPVQEKFVCLNCGFETHADEQAALNIARSWLFLRSQEYKKYQTNKTTGKNTDKRAFVETWQSFYRKKLKEVWKPAV

SEQ ID NO: 39139 - protein, 979 aa, synthetic construct
  REGION 1..979: note = engineered CasX variant
QEIKRINKIRRRLVKDSNTKKAGKTGPMKTLLVRVMTPDLRERLENLRKKPENIPQPISNTSRANLNKLLTDYTEMKKAILHVYWEEFQKDPVGLMSRVAQPASKKIDQNKLKPEMDEKGNLTTAGFACSQCGQPLFVYKLEQVSEKGKAYTNYFGRCNVAEHEKLILLAQLKPEKDSDEAVTYSLGKFGQRALDFYSIHVTKESTHPVKPLAQIAGNRYASSPVGKALSDACMGTIASFLSKYQDIIIEHQKVVKGNQKRLESLRELAGKENLEYPSVTLPPQPHTKEGVDAYNEVIARVRMWVNLNLWQKLKLSRDDAKPLLRLKGFPSFPLVERQANEVDWWDMVCNVKKLINEKKEDGKVFWQNLAGYKRQEALRPYLSSEEDRKKGKKFARYQLGDLLLHLEKKHGEDWGKVYDEAWERIDKKVEGLSKHIKLEEERRSEDAQSKAALTDWLRAKASFVIEGLKEADKDEFCRCELKLQKWYGDLRGKPFAIEAENSILDISGFSKQYNCAFIWQKDGVKKLNLYLIINYFKGGKLRFKKIKPEAFEANRFYTVINKKSGEIVPMEVNFNFDDPNLIILPLAFGKRQGREFIWNDLLSLETGSLKLANGRVIEKTLYNRRTRQDEPALFVALTFERREVLDSSNIKPMNLIGVDRGENIPAVIALTDPEGCPLSRFKDSLGNPTHILRIGESYKEKQRTIQAKKEVEQRRAGGYSRKYASKAKNLADDMVRNTARDLLYYAVTQDAMLIFENLSRGFGRQGKRTFMAERQYTRMEDWLTAKLAYEGLPSKTYLSKTLAQYTSKTCSNCGFTITSADYDRVLEKLKKTATGWMTTINGKELKVEGQITYYNRYKRQNVVKDLSVELDRLSEESVNNDISSWTKGRQGEALSLLKKRFSHRPVQEKFVCLNCGFETHADEQAALNIARSWLFLRSQEYKKYQTNKTTGKNTDKRAFVETWQSFYRKKLKEVWKPAV

SEQ ID NO: 39140 - protein, 979 aa, synthetic construct
  REGION 1..979: note = engineered CasX variant
QEIKRINKIRRRLVKDSNTKKAGKTGPMKTLLVRVMTPDLRERLENLRKKPENIPQPISNTSRANLNKLLTDYTEMKKAILHVYWEEFQKDPVGLMSRVAQPASKKIDQNKLKPEMDEKGNLTTAGFACSQCGQPLFVYKLEQVSEKGKAYTNYFGRCNVAEHEKLILLAQLKPEKDSDEAVTYSLGKFGQRALDFYSIHVTKESTHPVKPLAQIAGNRYASTPVGKALSDACMGTIASFLSKYQDIIIEHQKVVKGNQKRLESLRELAGKENLEYPSVTLPPQPHTKEGVDAYNEVIARVRMWVNLNLWQKLKLSRDDAKPLLRLKGFPSFPLVERQANEVDWWDMVCNVKKLINEKKEDGKVFWQNLAGYKRQEALRPYLSSEEDRKKGKKFARYQLGDLLLHLEKKHGEDWGKVYDEAWERIDKKVEGLSKHIKLEEERRSEDAQSKAALTDWLRAKASFVIEGLKEADKDEFCRCELKLQKWYGDLRGKPFAIEAENSILDISGFSKQYNCAFIWQKDGVKKLNLYLIINYFKGGKLRFKKIKPEAFEANRFYTVINKKSGEIVPMEVNFNFDDPNLIILPLAFGKRQGREFIWNDLLSLETGSLKLANGRVIEKTLYNRRTRQDEPALFVALTFERREVLDSSNIKPMNLIGVDRGENIPAVIALTDPEGCPLSRFKDSLGNPTHILRIGESYKEKQRTIQAKKEVEQRRAGGYSRKYASKAKNLADDMVRNTARDLLYYAVTQDAMLIFENLSRGFGRQGKRTFMAERQYTRMEDWLTAKLAYEGLPSKTYLSKTLAQYTSKTCSNCGFTITSADYDRVLEKLKKTATGWMTTINGKELKVEGQITYYNRYKRQNVVKDLSVELDRLSEESVNNDISSWTKGRQGEALSLLKKRFSHRPVQEKFVCLNCGFETHADEQAALNIARSWLFLRSQEYKKYQTNKTTGKNTDKRAFVETWQSFYRKKLKEVWKPAV

SEQ ID NO: 39141 - protein, 979 aa, synthetic construct
  REGION 1..979: note = engineered CasX variant
QEIKRINKIRRRLVKDSNTKKAGKTGPMKTLLVRVMTPDLRERLENLRKKPENIPQPISNTSRANLNKLLTDYTEMKKAILHVYWEEFQKDPVGLMSRVAQPASKKIDQNKLKPEMDEKGNLTTAGFACSQCGQPLFVYKLEQVSEKGKAYTNYFGRCNVAEHEKLILLAQLKPEKDSDEAVTYSLGKFGQRALDFYSIHVTKESTHPVKPLAQIAGNRYASAPVGKALSDACMGTIASFLSKYQDIIIEHQKVVKGNQKRLESLRELAGKENLEYPSVTLPPQPHTKEGVDAYNEVIARVRMWVNLNLWQKLKLSRDDAKPLLRLKGFPSFPLVERQANEVDWWDMVCNVKKLINEKKEDGKVFWQNLAGYKRQEALRPYLSSEEDRKKGKKFARYQLGDLLLHLEKKHGEDWGKVYDEAWERIDKKVEGLSKHIKLEEERRSEDAQSKAALTDWLRAKASFVIEGLKEADKDEFCRCELKLQKWYGDLRGKPFAIEAENSILDISGFSKQYNCAFIWQKDGVKKLNLYLIINYFKGGKLRFKKIKPEAFEANRFYTVINKKSGEIVPMEVNFNFDDPNLIILPLAFGKRQGREFIWNDLLSLETGSLKLANGRVIEKTLYNRRTRQDEPALFVALTFERREVLDSSNIKPMNLIGVDRGENIPAVIALTDPEGCPLSRFKDSLGNPTHILRIGESYKEKQRTIQAKKEVEQRRAGGYSRKYASKAKNLADDMVRNTARDLLYYAVTQDAMLIFENLSRGFGRQGKRTFMAERQYTRMEDWLTAKLAYEGLPSKTYLSKTLAQYTSKTCSNCGFTITSADYDRVLEKLKKTATGWMTTINGKELKVEGQITYYNRYKRQNVVKDLSVELDRLSEESVNNDISSWTKGRQGEALSLLKKRFSHRPVQEKFVCLNCGFETHADEQAALNIARSWLFLRSQEYKKYQTNKTTGKNTDKRAFVETWQSFYRKKLKEVWKPAV

SEQ ID NO: 39142 - protein, 979 aa, synthetic construct
  REGION 1..979: note = engineered CasX variant
QEIKRINKIRRRLVKDSNTKKAGKTGPMKTLLVRVMTPDLRERLENLRKKPENIPQPISNTSRANLNKLLTDYTEMKKAILHVYWEEFQKDPVGLMSRVAQPASKKIDQNKLKPEMDEKGNLTTAGFACSQCGQPLFVYKLEQVSEKGKAYTNYFGRCNVAEHEKLILLAQLKPEKDSDEAVTYSLGKFGQRALDFYSIHVTKESTHPVKPLAQIAGNRYASVPVGKALSDACMGTIASFLSKYQDIIIEHQKVVKGNQKRLESLRELAGKENLEYPSVTLPPQPHTKEGVDAYNEVIARVRMWVNLNLWQKLKLSRDDAKPLLRLKGFPSFPLVERQANEVDWWDMVCNVKKLINEKKEDGKVFWQNLAGYKRQEALRPYLSSEEDRKKGKKFARYQLGDLLLHLEKKHGEDWGKVYDEAWERIDKKVEGLSKHIKLEEERRSEDAQSKAALTDWLRAKASFVIEGLKEADKDEFCRCELKLQKWYGDLRGKPFAIEAENSILDISGFSKQYNCAFIWQKDGVKKLNLYLIINYFKGGKLRFKKIKPEAFEANRFYTVINKKSGEIVPMEVNFNFDDPNLIILPLAFGKRQGREFIWNDLLSLETGSLKLANGRVIEKTLYNRRTRQDEPALFVALTFERREVLDSSNIKPMNLIGVDRGENIPAVIALTDPEGCPLSRFKDSLGNPTHILRIGESYKEKQRTIQAKKEVEQRRAGGYSRKYASKAKNLADDMVRNTARDLLYYAVTQDAMLIFENLSRGFGRQGKRTFMAERQYTRMEDWLTAKLAYEGLPSKTYLSKTLAQYTSKTCSNCGFTITSADYDRVLEKLKKTATGWMTTINGKELKVEGQITYYNRYKRQNVVKDLSVELDRLSEESVNNDISSWTKGRQGEALSLLKKRFSHRPVQEKFVCLNCGFETHADEQAALNIARSWLFLRSQEYKKYQTNKTTGKNTDKRAFVETWQSFYRKKLKEVWKPAV

SEQ ID NO: 39143 - protein, 979 aa, synthetic construct
  REGION 1..979: note = engineered CasX variant
QEIKRINKIRRRLVKDSNTKKAGKTGPMKTLLVRVMTPDLRERLENLRKKPENIPQPISNTSRANLNKLLTDYTEMKKAILHVYWEEFQKDPVGLMSRVAQPASKKIDQNKLKPEMDEKGNLTTAGFACSQCGQPLFVYKLEQVSEKGKAYTNYFGRCNVAEHEKLIKLAQLKPEKDSDEAVTYSLGKFGQRALDFYSIHVTKESTHPVKPLAQIAGNRYASGPVGKALSDACMGTIASFLSKYQDIIIEHQKVVKGNQKRLESLRELAGKENLEYPSVTLPPQPHTKEGVDAYNEVIARVRMWVNLNLWQKLKLSRDDAKPLLRLKGFPSFPLVERQANEVDWWDMVCNVKKLINEKKEDGKVFWQNLAGYKRQEALRPYLSSEEDRKKGKKFARYQLGDLLLHLEKKHGEDWGKVYDEAWERIDKKVEGLSKHIKLEEERRSEDAQSKAALTDWLRAKASFVIEGLKEADKDEFCRCELKLQKWYGDLRGKPFAIEAENSILDISGFSKQYNCAFIWQKDGVKKLNLYLIINYFKGGKLRFKKIKPEAFEANRFYTVINKKSGEIVPMEVNFNFDDPNLIILPLAFGKRQGREFIWNDLLSLETGSLKLANGRVIEKTLYNRRTRQDEPALFVALTFERREVLDSSNIKPMNLIGVDRGENIPAVIALTDPEGCPLSRFKDSLGNPTHILRIGESYKEKQRTIQAKKEVEQRRAGGYSRKYASKAKNLADDMVRNTARDLLYYAVTQDAMLIFENLSRGFGRQGKRTFMAERQYTRMEDWLTAKLAYEGLPSKTYLSKTLAQYTSKTCSNCGFTITSADYDRVLEKLKKTATGWMTTINGKELKVEGQITYYNRYKRQNVVKDLSVELDRLSEESVNNDISSWTKGRQGEALSLLKKRFSHRPVQEKFVCLNCGFETHADEQAALNIARSWLFLRSQEYKKYQTNKTTGKNTDKRAFVETWQSFYRKKLKEVWKPAV

SEQ ID NO: 39144 - protein, 978 aa, synthetic construct
  REGION 1..978: note = engineered CasX variant
QEIKRINKIRRRLVKDSNTKKAGKTGPMKTLLVRVMTPDLRERLENLRKKPENIPQPISNTSRANLNKLLTDYTEMKKAILHVYWEEFQKDPVGLMSRVAQPASKKIDQNKLKPEMDEKGNLTTAGFACSQCGQPLFVYKLEQVSEKGKAYTNYFGRCNVAEHEKLILLAQLKPEKDSDEAVTYSLGKFGQRALDFYSIHVTKESTHPVKPLAQIAGNRYASPVGKALSDACMGTIASFLSKYQDIIIEHQKVVKGNQKRLESLRELAGKENLEYPSVTLPPQPHTKEGVDAYNEVIARVRMWVNLNLWQKLKLSRDDAKPLLRLKGFPSFPLVERQANEVDWWDMVCNVKKLINEKKEDGKVFWQNLAGYKRQEALRPYLSSEEDRKKGKKFARYQLGDLLLHLEKKHGEDWGKVYDEAWERIDKKVEGLSKHIKLEEERRSEDAQSKAALTDWLRAKASFVIEGLKEADKDEFCRCELKLQKWYGDLRGKPFAIEAENSILDISGFSKQYNCAFIWQKDGVKKLNLYLIINYFKGGKLRFKKIKPEAFEANRFYTVINKKSGEIVPMEVNFNFDDPNLIILPLAFGKRQGREFIWNDLLSLETGSLKLANGRVIEKTLYNRRTRQDEPALFVALTFERREVLDSSNIKPMNLIGVDRGENIPAVIALTDPEGCPLSRFKDSLGNPTHILRIGESYKEKQRTIQAKKEVEQRRAGGYSRKYASKAKNLADDMVRNTARDLLYYAVTQDAMLIFENLSRGFGRQGKRTFMAERQYTRMEDWLTAKLAYEGLPSKTYLSKTLAQYTSKTCSNCGFTITSADYDRVLEKLKKTATGWMTTINGKELKVEGQITYYNRYKRQNVVKDLSVELDRLSEESVNNDISSWTKGRQGEALSLLKKRFSHRPVQEKFVCLNCGFETHADEQAALNIARSWLFLRSQEYKKYQTNKTTGKNTDKRAFVETWQSFYRKKLKEVWKPAV

SEQ ID NO: 39145 - protein, 978 aa, synthetic construct
  REGION 1..978: note = engineered CasX variant
QEIKRINKIRRRLVKDSNTKKAGKTGPMKTLLVRVMTPDLRERLENLRKKPENIPQPISNTSRANLNKLLTDYTEMKKAILHVYWEEFQKDPVGLMSRVAQPASKKIDQNKLKPEMDEKGNLTTAGFACSQCGQPLFVYKLEQVSEKGKAYTNYFGRCNVAEHEKLILLAQLKPEKDSDEAVTYSLGKFGQRALDFYSIHVTKESTHPVKPLAQIAGNRYASYPVGKALSDACMGTIASFLSKYQDIIIEHQKVVKGNQKRLESLRELAGKENLEYPSVTLPPQPHTKEGVDAYNEVIARVRMWVNLNLWQKLKLSRDDAKPLLRLKKFPSFPLVERQANEVDWWDMVCNVKKLINEKKEDGKVFWQNLAGYKRQEALRPYLSSEEDRKKGKKFARYQLGDLLLHLEKKHGEDWGKVYDEAWERIDKKVEGLSKHIKLEEERRSEDAQSKAALTDWLRAKASFVIEGLKEADKDEFCRCELKLQKWYGDLRGKPFAIEAENSILDISGFSKQYNCAFIWQKDGVKKLNLYLIINYFKGGKLRFKKIKPEAFEANRFYTVINKKSGEIVPMEVNFNFDDPNLIILPLAFGKRQGREFIWNDLLSLETGSLKLANGRVIEKTLYNRRTRQDEPALFVALTFERREVLDSSNIKPMNLIGVDRGENIPAVIALTDPEGCPLSRFKDSLGNPTHILRIGESYKEKQRTIQAKKEVEQRRAGGYSRKYASKAKNLADDMVRNTARDLLYYAVTQDAMLIFENLSRGFGRQGKRTFMAERQYTRMEDWLTAKLAYEGLPSKTYLSKTLAQYTSKTCSNCGFTITSADYDRVLEKLKKTATGWMTTINGKELKVEGQITYYNRYKRQNVVKDLSVELDRLSEESVNNDISSWTKGRQGEALSLLKKRFSHRPVQEKFVCLNCGFETHADEQAALNIARSWLFLRSQEYKKYQTNKTTGNTDKRAFVETWQSFYRKKLKEVWKPAV

SEQ ID NO: 39146 - protein, 978 aa, synthetic construct
  REGION 1..978: note = engineered CasX variant
QEIKRINKIRRRLVKDSNTKKAGKTGPMKTLLVRVMTPDLRERLENLRKKPENIPQPISNTSRANLNKLLTDYTEMKKAILHVYWEEFQKDPVGLMSRVAQPASKKIDQNKLKPEMDEKGNLTTAGFACSQCGQPLFVYKLEQVSEKGKAYTNYFGRCNVAEHEKLILLAQLKPEKDSDEAVTYSLGKFGQRALDFYSIHVTKESTHPVKPLAQIAGNRYASHPVGKALSDACMGTIASFLSKYQDIIIEHQKVVKGNQKRLESLRELAGKENLEYPSVTLPPQPHTKEGVDAYNEVIARVRMWVNLNLWQKLKLSRDDAKPLLRLKKFPSFPLVERQANEVDWWDMVCNVKKLINEKKEDGKVFWQNLAGYKRQEALRPYLSSEEDRKKGKKFARYQLGDLLLHLEKKHGEDWGKVYDEAWERIDKKVEGLSKHIKLEEERRSEDAQSKAALTDWLRAKASFVIEGLKEADKDEFCRCELKLQKWYGDLRGKPFAIEAENSILDISGFSKQYNCAFIWQKDGVKKLNLYLIINYFKGGKLRFKKIKPEAFEANRFYTVINKKSGEIVPMEVNFNFDDPNLIILPLAFGKRQGREFIWNDLLSLETGSLKLANGRVIEKTLYNRRTRQDEPALFVALTFERREVLDSSNIKPMNLIGVDRGENIPAVIALTDPEGCPLSRFKDSLGNPTHILRIGESYKEKQRTIQAKKEVEQRRAGGYSRKYASKAKNLADDMVRNTARDLLYYAVTQDAMLIFENLSRGFGRQGKRTFMAERQYTRMEDWLTAKLAYEGLPSKTYLSKTLAQYTSKTCSNCGFTITSADYDRVLEKLKKTATGWMTTINGKELKVEGQITYYNRYKRQNVVKDLSVELDRLSEESVNNDISSWTKGRQGEALSLLKKRFSHRPVQEKFVCLNCGFETHADEQAALNIARSWLFLRSQEYKKYQTNKTTGNTDKRAFVETWQSFYRKKLKEVWKPAV

SEQ ID NO: 39147 - protein, 978 aa, synthetic construct
  REGION 1..978: note = engineered CasX variant
QEIKRINKIRRRLVKDSNTKKAGKTGPMKTLLVRVMTPDLRERLENLRKKPENIPQPISNTSRANLNKLLTDYTEMKKAILHVYWEEFQKDPVGLMSRVAQPASKKIDQNKLKPEMDEKGNLTTAGFACSQCGQPLFVYKLEQVSEKGKAYTNYFGRCNVAEHEKLILLAQLKPEKDSDEAVTYSLGKFGQRALDFYSIHVTKESTHPVKPLAQIAGNRYASSPVGKALSDACMGTIASFLSKYQDIIIEHQKVVKGNQKRLESLRELAGKENLEYPSVTLPPQPHTKEGVDAYNEVIARVRMWVNLNLWQKLKLSRDDAKPLLRLKKFPSFPLVERQANEVDWWDMVCNVKKLINEKKEDGKVFWQNLAGYKRQEALRPYLSSEEDRKKGKKFARYQLGDLLLHLEKKHGEDWGKVYDEAWERIDKKVEGLSKHIKLEEERRSEDAQSKAALTDWLRAKASFVIEGLKEADKDEFCRCELKLQKWYGDLRGKPFAIEAENSILDISGFSKQYNCAFIWQKDGVKKLNLYLIINYFKGGKLRFKKIKPEAFEANRFYTVINKKSGEIVPMEVNFNFDDPNLIILPLAFGKRQGREFIWNDLLSLETGSLKLANGRVIEKTLYNRRTRQDEPALFVALTFERREVLDSSNIKPMNLIGVDRGENIPAVIALTDPEGCPLSRFKDSLGNPTHILRIGESYKEKQRTIQAKKEVEQRRAGGYSRKYASKAKNLADDMVRNTARDLLYYAVTQDAMLIFENLSRGFGRQGKRTFMAERQYTRMEDWLTAKLAYEGLPSKTYLSKTLAQYTSKTCSNCGFTITSADYDRVLEKLKKTATGWMTTINGKELKVEGQITYYNRYKRQNVVKDLSVELDRLSEESVNNDISSWTKGRQGEALSLLKKRFSHRPVQEKFVCLNCGFETHADEQAALNIARSWLFLRSQEYKKYQTNKTTGNTDKRAFVETWQSFYRKKLKEVWKPAV

SEQ ID NO: 39148 - protein, 978 aa, synthetic construct
  REGION 1..978: note = engineered CasX variant
QEIKRINKIRRRLVKDSNTKKAGKTGPMKTLLVRVMTPDLRERLENLRKKPENIPQPISNTSRANLNKLLTDYTEMKKAILHVYWEEFQKDPVGLMSRVAQPASKKIDQNKLKPEMDEKGNLTTAGFACSQCGQPLFVYKLEQVSEKGKAYTNYFGRCNVAEHEKLILLAQLKPEKDSDEAVTYSLGKFGQRALDFYSIHVTKESTHPVKPLAQIAGNRYASTPVGKALSDACMGTIASFLSKYQDIIIEHQKVVKGNQKRLESLRELAGKENLEYPSVTLPPQPHTKEGVDAYNEVIARVRMWVNLNLWQKLKLSRDDAKPLLRLKKFPSFPLVERQANEVDWWDMVCNVKKLINEKKEDGKVFWQNLAGYKRQEALRPYLSSEEDRKKGKKFARYQLGDLLLHLEKKHGEDWGKVYDEAWERIDKKVEGLSKHIKLEEERRSEDAQSKAALTDWLRAKASFVIEGLKEADKDEFCRCELKLQKWYGDLRGKPFAIEAENSILDISGFSKQYNCAFIWQKDGVKKLNLYLIINYFKGGKLRFKKIKPEAFEANRFYTVINKKSGEIVPMEVNFNFDDPNLIILPLAFGKRQGREFIWNDLLSLETGSLKLANGRVIEKTLYNRRTRQDEPALFVALTFERREVLDSSNIKPMNLIGVDRGENIPAVIALTDPEGCPLSRFKDSLGNPTHILRIGESYKEKQRTIQAKKEVEQRRAGGYSRKYASKAKNLADDMVRNTARDLLYYAVTQDAMLIFENLSRGFGRQGKRTFMAERQYTRMEDWLTAKLAYEGLPSKTYLSKTLAQYTSKTCSNCGFTITSADYDRVLEKLKKTATGWMTTINGKELKVEGQITYYNRYKRQNVVKDLSVELDRLSEESVNNDISSWTKGRQGEALSLLKKRFSHRPVQEKFVCLNCGFETHADEQAALNIARSWLFLRSQEYKKYQTNKTTGNTDKRAFVETWQSFYRKKLKEVWKPAV

SEQ ID NO: 39149 - protein, 978 aa, synthetic construct
  REGION 1..978: note = engineered CasX variant
QEIKRINKIRRRLVKDSNTKKAGKTGPMKTLLVRVMTPDLRERLENLRKKPENIPQPISNTSRANLNKLLTDYTEMKKAILHVYWEEFQKDPVGLMSRVAQPASKKIDQNKLKPEMDEKGNLTTAGFACSQCGQPLFVYKLEQVSEKGKAYTNYFGRCNVAEHEKLILLAQLKPEKDSDEAVTYSLGKFGQRALDFYSIHVTKESTHPVKPLAQIAGNRYASAPVGKALSDACMGTIASFLSKYQDIIIEHQKVVKGNQKRLESLRELAGKENLEYPSVTLPPQPHTKEGVDAYNEVIARVRMWVNLNLWQKLKLSRDDAKPLLRLKKFPSFPLVERQANEVDWWDMVCNVKKLINEKKEDGKVFWQNLAGYKRQEALRPYLSSEEDRKKGKKFARYQLGDLLLHLEKKHGEDWGKVYDEAWERIDKKVEGLSKHIKLEEERRSEDAQSKAALTDWLRAKASFVIEGLKEADKDEFCRCELKLQKWYGDLRGKPFAIEAENSILDISGFSKQYNCAFIWQKDGVKKLNLYLIINYFKGGKLRFKKIKPEAFEANRFYTVINKKSGEIVPMEVNFNFDDPNLIILPLAFGKRQGREFIWNDLLSLETGSLKLANGRVIEKTLYNRRTRQDEPALFVALTFERREVLDSSNIKPMNLIGVDRGENIPAVIALTDPEGCPLSRFKDSLGNPTHILRIGESYKEKQRTIQAKKEVEQRRAGGYSRKYASKAKNLADDMVRNTARDLLYYAVTQDAMLIFENLSRGFGRQGKRTFMAERQYTRMEDWLTAKLAYEGLPSKTYLSKTLAQYTSKTCSNCGFTITSADYDRVLEKLKKTATGWMTTINGKELKVEGQITYYNRYKRQNVVKDLSVELDRLSEESVNNDISSWTKGRQGEALSLLKKRFSHRPVQEKFVCLNCGFETHADEQAALNIARSWLFLRSQEYKKYQTNKTTGNTDKRAFVETWQSFYRKKLKEVWKPAV

SEQ ID NO: 39150 - protein, 978 aa, synthetic construct
  REGION 1..978: note = engineered CasX variant
QEIKRINKIRRRLVKDSNTKKAGKTGPMKTLLVRVMTPDLRERLENLRKKPENIPQPISNTSRANLNKLLTDYTEMKKAILHVYWEEFQKDPVGLMSRVAQPASKKIDQNKLKPEMDEKGNLTTAGFACSQCGQPLFVYKLEQVSEKGKAYTNYFGRCNVAEHEKLILLAQLKPEKDSDEAVTYSLGKFGQRALDFYSIHVTKESTHPVKPLAQIAGNRYASVPVGKALSDACMGTIASFLSKYQDIIIEHQKVVKGNQKRLESLRELAGKENLEYPSVTLPPQPHTKEGVDAYNEVIARVRMWVNLNLWQKLKLSRDDAKPLLRLKKFPSFPLVERQANEVDWWDMVCNVKKLINEKKEDGKVFWQNLAGYKRQEALRPYLSSEEDRKKGKKFARYQLGDLLLHLEKKHGEDWGKVYDEAWERIDKKVEGLSKHIKLEEERRSEDAQSKAALTDWLRAKASFVIEGLKEADKDEFCRCELKLQKWYGDLRGKPFAIEAENSILDISGFSKQYNCAFIWQKDGVKKLNLYLIINYFKGGKLRFKKIKPEAFEANRFYTVINKKSGEIVPMEVNFNFDDPNLIILPLAFGKRQGREFIWNDLLSLETGSLKLANGRVIEKTLYNRRTRQDEPALFVALTFERREVLDSSNIKPMNLIGVDRGENIPAVIALTDPEGCPLSRFKDSLGNPTHILRIGESYKEKQRTIQAKKEVEQRRAGGYSRKYASKAKNLADDMVRNTARDLLYYAVTQDAMLIFENLSRGFGRQGKRTFMAERQYTRMEDWLTAKLAYEGLPSKTYLSKTLAQYTSKTCSNCGFTITSADYDRVLEKLKKTATGWMTTINGKELKVEGQITYYNRYKRQNVVKDLSVELDRLSEESVNNDISSWTKGRQGEALSLLKKRFSHRPVQEKFVCLNCGFETHADEQAALNIARSWLFLRSQEYKKYQTNKTTGNTDKRAFVETWQSFYRKKLKEVWKPAV

SEQ ID NO: 39151 - protein, 978 aa, synthetic construct
  REGION 1..978: note = engineered CasX variant
QEIKRINKIRRRLVKDSNTKKAGKTGPMKTLLVRVMTPDLRERLENLRKKPENIPQPISNTSRANLNKLLTDYTEMKKAILHVYWEEFQKDPVGLMSRVAQPASKKIDQNKLKPEMDEKGNLTTAGFACSQCGQPLFVYKLEQVSEKGKAYTNYFGRCNVAEHEKLIKLAQLKPEKDSDEAVTYSLGKFGQRALDFYSIHVTKESTHPVKPLAQIAGNRYASGPVGKALSDACMGTIASFLSKYQDIIIEHQKVVKGNQKRLESLRELAGKENLEYPSVTLPPQPHTKEGVDAYNEVIARVRMWVNLNLWQKLKLSRDDAKPLLRLKKFPSFPLVERQANEVDWWDMVCNVKKLINEKKEDGKVFWQNLAGYKRQEALRPYLSSEEDRKKGKKFARYQLGDLLLHLEKKHGEDWGKVYDEAWERIDKKVEGLSKHIKLEEERRSEDAQSKAALTDWLRAKASFVIEGLKEADKDEFCRCELKLQKWYGDLRGKPFAIEAENSILDISGFSKQYNCAFIWQKDGVKKLNLYLIINYFKGGKLRFKKIKPEAFEANRFYTVINKKSGEIVPMEVNFNFDDPNLIILPLAFGKRQGREFIWNDLLSLETGSLKLANGRVIEKTLYNRRTRQDEPALFVALTFERREVLDSSNIKPMNLIGVDRGENIPAVIALTDPEGCPLSRFKDSLGNPTHILRIGESYKEKQRTIQAKKEVEQRRAGGYSRKYASKAKNLADDMVRNTARDLLYYAVTQDAMLIFENLSRGFGRQGKRTFMAERQYTRMEDWLTAKLAYEGLPSKTYLSKTLAQYTSKTCSNCGFTITSADYDRVLEKLKKTATGWMTTINGKELKVEGQITYYNRYKRQNVVKDLSVELDRLSEESVNNDISSWTKGRQGEALSLLKKRFSHRPVQEKFVCLNCGFETHADEQAALNIARSWLFLRSQEYKKYQTNKTTGNTDKRAFVETWQSFYRKKLKEVWKPAV

SEQ ID NO: 39152 - protein, 977 aa, synthetic construct
  REGION 1..977: note = engineered CasX variant
QEIKRINKIRRRLVKDSNTKKAGKTGPMKTLLVRVMTPDLRERLENLRKKPENIPQPISNTSRANLNKLLTDYTEMKKAILHVYWEEFQKDPVGLMSRVAQPASKKIDQNKLKPEMDEKGNLTTAGFACSQCGQPLFVYKLEQVSEKGKAYTNYFGRCNVAEHEKLILLAQLKPEKDSDEAVTYSLGKFGQRALDFYSIHVTKESTHPVKPLAQIAGNRYASPVGKALSDACMGTIASFLSKYQDIIIEHQKVVKGNQKRLESLRELAGKENLEYPSVTLPPQPHTKEGVDAYNEVIARVRMWVNLNLWQKLKLSRDDAKPLLRLKKFPSFPLVERQANEVDWWDMVCNVKKLINEKKEDGKVFWQNLAGYKRQEALRPYLSSEEDRKKGKKFARYQLGDLLLHLEKKHGEDWGKVYDEAWERIDKKVEGLSKHIKLEEERRSEDAQSKAALTDWLRAKASFVIEGLKEADKDEFCRCELKLQKWYGDLRGKPFAIEAENSILDISGFSKQYNCAFIWQKDGVKKLNLYLIINYFKGGKLRFKKIKPEAFEANRFYTVINKKSGEIVPMEVNFNFDDPNLIILPLAFGKRQGREFIWNDLLSLETGSLKLANGRVIEKTLYNRRTRQDEPALFVALTFERREVLDSSNIKPMNLIGVDRGENIPAVIALTDPEGCPLSRFKDSLGNPTHILRIGESYKEKQRTIQAKKEVEQRRAGGYSRKYASKAKNLADDMVRNTARDLLYYAVTQDAMLIFENLSRGFGRQGKRTFMAERQYTRMEDWLTAKLAYEGLPSKTYLSKTLAQYTSKTCSNCGFTITSADYDRVLEKLKKTATGWMTTINGKELKVEGQITYYNRYKRQNVVKDLSVELDRLSEESVNNDISSWTKGRQGEALSLLKKRFSHRPVQEKFVCLNCGFETHADEQAALNIARSWLFLRSQEYKKYQTNKTTGNTDKRAFVETWQSFYRKKLKEVWKPAV

SEQ ID NO: 39153 - protein, 978 aa, synthetic construct
  REGION 1..978: note = engineered CasX variant
QEIKRINKIRRRLVKDSNTKKAGKTGPMKTLLVRVMTPDLRERLENLRKKPENIPQPISNTSRANLNKLLTDYTEMKKAILHVYWEEFQKDPVGLMSRVAQPASKKIDQNKLKPEMDEKGNLTTAGFACSQCGQPLFVYKLEQVSEKGKAYTNYFGRCNVAEHEKLILLAQLKPEKDSDEAVTYSLGKFGQRALDFYSIHVTKESTHPVKPLAQIAGNRYASYPVGKALSDACMGTIASFLSKYQDIIIEHQKVVKGNQKRLESLRELAGKENLEYPSVTLPPQPHTKEGVDAYNEVIARVRMWVNLNLWQKLKLSRDDAKPLLRLKGFPSFPLVERQANEVDWWDMVCNVKKLINEKKEDGKVFWQNLAGYKRQEALRPYLSSEEDRKKGKKFARYQLGDLLLHLEKKHGEDWGKVYDEAWERIDKKVEGLSKHIKLEEERRSEDAQSKAALTDWLRAKASFVIEGLKEADKDEFCRCELKLQKWYGDLRGKPFAIEAENSILDISGFSKQYNCAFIWQKDGVKKLNLYLIINYFKGGKLRFKKIKPEAFEANRFYTVINKKSGEIVPMEVNFNFDDPNLIILPLAFGKRQGREFIWNDLLSLETGSLKLANGRVIEKTLYNRRTRQDEPALFVALTFERREVLDSSNIKPMNLIGVDRGENIPAVIALTDPEGCPLSRFKDSLGNPTHILRIGERYKEKQRTIQAKKEVEQRRAGGYSRKYASKAKNLADDMVRNTARDLLYYAVTQDAMLIFENLSRGFGRQGKRTFMAERQYTRMEDWLTAKLAYEGLPSKTYLSKTLAQYTSKTCSNCGFTITSADYDRVLEKLKKTATGWMTTINGKELKVEGQITYYNRYKRQNVVKDLSVELDRLSEESVNNDISSWTKGRQGEALSLLKKRFSHRPVQEKFVCLNCGFETHADEQAALNIARSWLFLRSQEYKKYQTNKTTGNTDKRAFVETWQSFYRKKLKEVWKPAV

SEQ ID NO: 39154 - protein, 978 aa, synthetic construct
  REGION 1..978: note = engineered CasX variant
QEIKRINKIRRRLVKDSNTKKAGKTGPMKTLLVRVMTPDLRERLENLRKKPENIPQPISNTSRANLNKLLTDYTEMKKAILHVYWEEFQKDPVGLMSRVAQPASKKIDQNKLKPEMDEKGNLTTAGFACSQCGQPLFVYKLEQVSEKGKAYTNYFGRCNVAEHEKLILLAQLKPEKDSDEAVTYSLGKFGQRALDFYSIHVTKESTHPVKPLAQIAGNRYASHPVGKALSDACMGTIASFLSKYQDIIIEHQKVVKGNQKRLESLRELAGKENLEYPSVTLPPQPHTKEGVDAYNEVIARVRMWVNLNLWQKLKLSRDDAKPLLRLKGFPSFPLVERQANEVDWWDMVCNVKKLINEKKEDGKVFWQNLAGYKRQEALRPYLSSEEDRKKGKKFARYQLGDLLLHLEKKHGEDWGKVYDEAWERIDKKVEGLSKHIKLEEERRSEDAQSKAALTDWLRAKASFVIEGLKEADKDEFCRCELKLQKWYGDLRGKPFAIEAENSILDISGFSKQYNCAFIWQKDGVKKLNLYLIINYFKGGKLRFKKIKPEAFEANRFYTVINKKSGEIVPMEVNFNFDDPNLIILPLAFGKRQGREFIWNDLLSLETGSLKLANGRVIEKTLYNRRTRQDEPALFVALTFERREVLDSSNIKPMNLIGVDRGENIPAVIALTDPEGCPLSRFKDSLGNPTHILRIGERYKEKQRTIQAKKEVEQRRAGGYSRKYASKAKNLADDMVRNTARDLLYYAVTQDAMLIFENLSRGFGRQGKRTFMAERQYTRMEDWLTAKLAYEGLPSKTYLSKTLAQYTSKTCSNCGFTITSADYDRVLEKLKKTATGWMTTINGKELKVEGQITYYNRYKRQNVVKDLSVELDRLSEESVNNDISSWTKGRQGEALSLLKKRFSHRPVQEKFVCLNCGFETHADEQAALNIARSWLFLRSQEYKKYQTNKTTGNTDKRAFVETWQSFYRKKLKEVWKPAV

SEQ ID NO: 39155 - protein, 978 aa, synthetic construct
  REGION 1..978: note = engineered CasX variant
QEIKRINKIRRRLVKDSNTKKAGKTGPMKTLLVRVMTPDLRERLENLRKKPENIPQPISNTSRANLNKLLTDYTEMKKAILHVYWEEFQKDPVGLMSRVAQPASKKIDQNKLKPEMDEKGNLTTAGFACSQCGQPLFVYKLEQVSEKGKAYTNYFGRCNVAEHEKLILLAQLKPEKDSDEAVTYSLGKFGQRALDFYSIHVTKESTHPVKPLAQIAGNRYASSPVGKALSDACMGTIASFLSKYQDIIIEHQKVVKGNQKRLESLRELAGKENLEYPSVTLPPQPHTKEGVDAYNEVIARVRMWVNLNLWQKLKLSRDDAKPLLRLKGFPSFPLVERQANEVDWWDMVCNVKKLINEKKEDGKVFWQNLAGYKRQEALRPYLSSEEDRKKGKKFARYQLGDLLLHLEKKHGEDWGKVYDEAWERIDKKVEGLSKHIKLEEERRSEDAQSKAALTDWLRAKASFVIEGLKEADKDEFCRCELKLQKWYGDLRGKPFAIEAENSILDISGFSKQYNCAFIWQKDGVKKLNLYLIINYFKGGKLRFKKIKPEAFEANRFYTVINKKSGEIVPMEVNFNFDDPNLIILPLAFGKRQGREFIWNDLLSLETGSLKLANGRVIEKTLYNRRTRQDEPALFVALTFERREVLDSSNIKPMNLIGVDRGENIPAVIALTDPEGCPLSRFKDSLGNPTHILRIGERYKEKQRTIQAKKEVEQRRAGGYSRKYASKAKNLADDMVRNTARDLLYYAVTQDAMLIFENLSRGFGRQGKRTFMAERQYTRMEDWLTAKLAYEGLPSKTYLSKTLAQYTSKTCSNCGFTITSADYDRVLEKLKKTATGWMTTINGKELKVEGQITYYNRYKRQNVVKDLSVELDRLSEESVNNDISSWTKGRQGEALSLLKKRFSHRPVQEKFVCLNCGFETHADEQAALNIARSWLFLRSQEYKKYQTNKTTGNTDKRAFVETWQSFYRKKLKEVWKPAV

SEQ ID NO: 39156 - protein, 978 aa, synthetic construct
  REGION 1..978: note = engineered CasX variant
QEIKRINKIRRRLVKDSNTKKAGKTGPMKTLLVRVMTPDLRERLENLRKKPENIPQPISNTSRANLNKLLTDYTEMKKAILHVYWEEFQKDPVGLMSRVAQPASKKIDQNKLKPEMDEKGNLTTAGFACSQCGQPLFVYKLEQVSEKGKAYTNYFGRCNVAEHEKLILLAQLKPEKDSDEAVTYSLGKFGQRALDFYSIHVTKESTHPVKPLAQIAGNRYASTPVGKALSDACMGTIASFLSKYQDIIIEHQKVVKGNQKRLESLRELAGKENLEYPSVTLPPQPHTKEGVDAYNEVIARVRMWVNLNLWQKLKLSRDDAKPLLRLKGFPSFPLVERQANEVDWWDMVCNVKKLINEKKEDGKVFWQNLAGYKRQEALRPYLSSEEDRKKGKKFARYQLGDLLLHLEKKHGEDWGKVYDEAWERIDKKVEGLSKHIKLEEERRSEDAQSKAALTDWLRAKASFVIEGLKEADKDEFCRCELKLQKWYGDLRGKPFAIEAENSILDISGFSKQYNCAFIWQKDGVKKLNLYLIINYFKGGKLRFKKIKPEAFEANRFYTVINKKSGEIVPMEVNFNFDDPNLIILPLAFGKRQGREFIWNDLLSLETGSLKLANGRVIEKTLYNRRTRQDEPALFVALTFERREVLDSSNIKPMNLIGVDRGENIPAVIALTDPEGCPLSRFKDSLGNPTHILRIGERYKEKQRTIQAKKEVEQRRAGGYSRKYASKAKNLADDMVRNTARDLLYYAVTQDAMLIFENLSRGFGRQGKRTFMAERQYTRMEDWLTAKLAYEGLPSKTYLSKTLAQYTSKTCSNCGFTITSADYDRVLEKLKKTATGWMTTINGKELKVEGQITYYNRYKRQNVVKDLSVELDRLSEESVNNDISSWTKGRQGEALSLLKKRFSHRPVQEKFVCLNCGFETHADEQAALNIARSWLFLRSQEYKKYQTNKTTGNTDKRAFVETWQSFYRKKLKEVWKPAV

SEQ ID NO: 39157 - protein, 978 aa, synthetic construct
  REGION 1..978: note = engineered CasX variant
QEIKRINKIRRRLVKDSNTKKAGKTGPMKTLLVRVMTPDLRERLENLRKKPENIPQPISNTSRANLNKLLTDYTEMKKAILHVYWEEFQKDPVGLMSRVAQPASKKIDQNKLKPEMDEKGNLTTAGFACSQCGQPLFVYKLEQVSEKGKAYTNYFGRCNVAEHEKLILLAQLKPEKDSDEAVTYSLGKFGQRALDFYSIHVTKESTHPVKPLAQIAGNRYASAPVGKALSDACMGTIASFLSKYQDIIIEHQKVVKGNQKRLESLRELAGKENLEYPSVTLPPQPHTKEGVDAYNEVIARVRMWVNLNLWQKLKLSRDDAKPLLRLKGFPSFPLVERQANEVDWWDMVCNVKKLINEKKEDGKVFWQNLAGYKRQEALRPYLSSEEDRKKGKKFARYQLGDLLLHLEKKHGEDWGKVYDEAWERIDKKVEGLSKHIKLEEERRSEDAQSKAALTDWLRAKASFVIEGLKEADKDEFCRCELKLQKWYGDLRGKPFAIEAENSILDISGFSKQYNCAFIWQKDGVKKLNLYLIINYFKGGKLRFKKIKPEAFEANRFYTVINKKSGEIVPMEVNFNFDDPNLIILPLAFGKRQGREFIWNDLLSLETGSLKLANGRVIEKTLYNRRTRQDEPALFVALTFERREVLDSSNIKPMNLIGVDRGENIPAVIALTDPEGCPLSRFKDSLGNPTHILRIGERYKEKQRTIQAKKEVEQRRAGGYSRKYASKAKNLADDMVRNTARDLLYYAVTQDAMLIFENLSRGFGRQGKRTFMAERQYTRMEDWLTAKLAYEGLPSKTYLSKTLAQYTSKTCSNCGFTITSADYDRVLEKLKKTATGWMTTINGKELKVEGQITYYNRYKRQNVVKDLSVELDRLSEESVNNDISSWTKGRQGEALSLLKKRFSHRPVQEKFVCLNCGFETHADEQAALNIARSWLFLRSQEYKKYQTNKTTGNTDKRAFVETWQSFYRKKLKEVWKPAV

SEQ ID NO: 39158 - protein, 978 aa, synthetic construct
  REGION 1..978: note = engineered CasX variant
QEIKRINKIRRRLVKDSNTKKAGKTGPMKTLLVRVMTPDLRERLENLRKKPENIPQPISNTSRANLNKLLTDYTEMKKAILHVYWEEFQKDPVGLMSRVAQPASKKIDQNKLKPEMDEKGNLTTAGFACSQCGQPLFVYKLEQVSEKGKAYTNYFGRCNVAEHEKLILLAQLKPEKDSDEAVTYSLGKFGQRALDFYSIHVTKESTHPVKPLAQIAGNRYASVPVGKALSDACMGTIASFLSKYQDIIIEHQKVVKGNQKRLESLRELAGKENLEYPSVTLPPQPHTKEGVDAYNEVIARVRMWVNLNLWQKLKLSRDDAKPLLRLKGFPSFPLVERQANEVDWWDMVCNVKKLINEKKEDGKVFWQNLAGYKRQEALRPYLSSEEDRKKGKKFARYQLGDLLLHLEKKHGEDWGKVYDEAWERIDKKVEGLSKHIKLEEERRSEDAQSKAALTDWLRAKASFVIEGLKEADKDEFCRCELKLQKWYGDLRGKPFAIEAENSILDISGFSKQYNCAFIWQKDGVKKLNLYLIINYFKGGKLRFKKIKPEAFEANRFYTVINKKSGEIVPMEVNFNFDDPNLIILPLAFGKRQGREFIWNDLLSLETGSLKLANGRVIEKTLYNRRTRQDEPALFVALTFERREVLDSSNIKPMNLIGVDRGENIPAVIALTDPEGCPLSRFKDSLGNPTHILRIGERYKEKQRTIQAKKEVEQRRAGGYSRKYASKAKNLADDMVRNTARDLLYYAVTQDAMLIFENLSRGFGRQGKRTFMAERQYTRMEDWLTAKLAYEGLPSKTYLSKTLAQYTSKTCSNCGFTITSADYDRVLEKLKKTATGWMTTINGKELKVEGQITYYNRYKRQNVVKDLSVELDRLSEESVNNDISSWTKGRQGEALSLLKKRFSHRPVQEKFVCLNCGFETHADEQAALNIARSWLFLRSQEYKKYQTNKTTGNTDKRAFVETWQSFYRKKLKEVWKPAV

SEQ ID NO: 39159 - protein, 978 aa, synthetic construct
  REGION 1..978: note = engineered CasX variant
QEIKRINKIRRRLVKDSNTKKAGKTGPMKTLLVRVMTPDLRERLENLRKKPENIPQPISNTSRANLNKLLTDYTEMKKAILHVYWEEFQKDPVGLMSRVAQPASKKIDQNKLKPEMDEKGNLTTAGFACSQCGQPLFVYKLEQVSEKGKAYTNYFGRCNVAEHEKLIKLAQLKPEKDSDEAVTYSLGKFGQRALDFYSIHVTKESTHPVKPLAQIAGNRYASGPVGKALSDACMGTIASFLSKYQDIIIEHQKVVKGNQKRLESLRELAGKENLEYPSVTLPPQPHTKEGVDAYNEVIARVRMWVNLNLWQKLKLSRDDAKPLLRLKGFPSFPLVERQANEVDWWDMVCNVKKLINEKKEDGKVFWQNLAGYKRQEALRPYLSSEEDRKKGKKFARYQLGDLLLHLEKKHGEDWGKVYDEAWERIDKKVEGLSKHIKLEEERRSEDAQSKAALTDWLRAKASFVIEGLKEADKDEFCRCELKLQKWYGDLRGKPFAIEAENSILDISGFSKQYNCAFIWQKDGVKKLNLYLIINYFKGGKLRFKKIKPEAFEANRFYTVINKKSGEIVPMEVNFNFDDPNLIILPLAFGKRQGREFIWNDLLSLETGSLKLANGRVIEKTLYNRRTRQDEPALFVALTFERREVLDSSNIKPMNLIGVDRGENIPAVIALTDPEGCPLSRFKDSLGNPTHILRIGERYKEKQRTIQAKKEVEQRRAGGYSRKYASKAKNLADDMVRNTARDLLYYAVTQDAMLIFENLSRGFGRQGKRTFMAERQYTRMEDWLTAKLAYEGLPSKTYLSKTLAQYTSKTCSNCGFTITSADYDRVLEKLKKTATGWMTTINGKELKVEGQITYYNRYKRQNVVKDLSVELDRLSEESVNNDISSWTKGRQGEALSLLKKRFSHRPVQEKFVCLNCGFETHADEQAALNIARSWLFLRSQEYKKYQTNKTTGNTDKRAFVETWQSFYRKKLKEVWKPAV

SEQ ID NO: 39160 - protein, 977 aa, synthetic construct
  REGION 1..977: note = engineered CasX variant
QEIKRINKIRRRLVKDSNTKKAGKTGPMKTLLVRVMTPDLRERLENLRKKPENIPQPISNTSRANLNKLLTDYTEMKKAILHVYWEEFQKDPVGLMSRVAQPASKKIDQNKLKPEMDEKGNLTTAGFACSQCGQPLFVYKLEQVSEKGKAYTNYFGRCNVAEHEKLILLAQLKPEKDSDEAVTYSLGKFGQRALDFYSIHVTKESTHPVKPLAQIAGNRYASPVGKALSDACMGTIASFLSKYQDIIIEHQKVVKGNQKRLESLRELAGKENLEYPSVTLPPQPHTKEGVDAYNEVIARVRMWVNLNLWQKLKLSRDDAKPLLRLKGFPSFPLVERQANEVDWWDMVCNVKKLINEKKEDGKVFWQNLAGYKRQEALRPYLSSEEDRKKGKKFARYQLGDLLLHLEKKHGEDWGKVYDEAWERIDKKVEGLSKHIKLEEERRSEDAQSKAALTDWLRAKASFVIEGLKEADKDEFCRCELKLQKWYGDLRGKPFAIEAENSILDISGFSKQYNCAFIWQKDGVKKLNLYLIINYFKGGKLRFKKIKPEAFEANRFYTVINKKSGEIVPMEVNFNFDDPNLIILPLAFGKRQGREFIWNDLLSLETGSLKLANGRVIEKTLYNRRTRQDEPALFVALTFERREVLDSSNIKPMNLIGVDRGENIPAVIALTDPEGCPLSRFKDSLGNPTHILRIGERYKEKQRTIQAKKEVEQRRAGGYSRKYASKAKNLADDMVRNTARDLLYYAVTQDAMLIFENLSRGFGRQGKRTFMAERQYTRMEDWLTAKLAYEGLPSKTYLSKTLAQYTSKTCSNCGFTITSADYDRVLEKLKKTATGWMTTINGKELKVEGQITYYNRYKRQNVVKDLSVELDRLSEESVNNDISSWTKGRQGEALSLLKKRFSHRPVQEKFVCLNCGFETHADEQAALNIARSWLFLRSQEYKKYQTNKTTGNTDKRAFVETWQSFYRKKLKEVWKPAV

SEQ ID NO: 39161 - protein, 978 aa, synthetic construct
  REGION 1..978: note = engineered CasX variant
QEIKRINKIRRRLVKDSNTKKAGKTGPMKTLLVRVMTPDLRERLENLRKKPENIPQPISNTSRANLNKLLTDYTEMKKAILHVYWEEFQKDPVGLMSRVAQPASKKIDQNKLKPEMDEKGNLTTAGFACSQCGQPLFVYKLEQVSEKGKAYTNYFGRCNVAEHEKLILLAQLKPEKDSDEAVTYSLGKFGQRALDFYSIHVTKESTHPVKPLAQIAGNRYASYPVGKALSDACMGTIASFLSKYQDIIIEHQKVVKGNQKRLESLRELAGKENLEYPSVTLPPQPHTKEGVDAYNEVIARVRMWVNLNLWQKLKLSRDDAKPLLRLKGFPSFPLVERQANEVDWWDMVCNVKKLINEKKEDGKVFWQNLAGYKRQEALRPYLSSEEDRKKGKKFARYQLGDLLLHLEKKHGEDWGKVYDEAWERIDKKVEGLSKHIKLEEERRSEDAQSKAALTDWLRAKASFVIEGLKEADKDEFCRCELKLQKWYGDLRGKPFAIEAENSILDISGFSKQYNCAFIWQKDGVKKLNLYLIINYFKGGKLRFKKIKPEAFEANRFYTVINKKSGEIVPMEVNFNFDDPNLIILPLAFGKRQGREFIWNDLLSLETGSLQLANGRVIEKTLYNRRTRQDEPALFVALTFERREVLDSSNIKPMNLIGVDRGENIPAVIALTDPEGCPLSRFKDSLGNPTHILRIGESYKEKQRTIQAKKEVEQRRAGGYSRKYASKAKNLADDMVRNTARDLLYYAVTQDAMLIFENLSRGFGRQGKRTFMAERQYTRMEDWLTAKLAYEGLPSKTYLSKTLAQYTSKTCSNCGFTITSADYDRVLEKLKKTATGWMTTINGKELKVEGQITYYNRYKRQNVVKDLSVELDRLSEESVNNDISSWTKGRQGEALSLLKKRFSHRPVQEKFVCLNCGFETHADEQAALNIARSWLFLRSQEYKKYQTNKTTGNTDKRAFVETWQSFYRKKLKEVWKPAV

SEQ ID NO: 39162 - protein, 978 aa, synthetic construct
  REGION 1..978: note = engineered CasX variant
QEIKRINKIRRRLVKDSNTKKAGKTGPMKTLLVRVMTPDLRERLENLRKKPENIPQPISNTSRANLNKLLTDYTEMKKAILHVYWEEFQKDPVGLMSRVAQPASKKIDQNKLKPEMDEKGNLTTAGFACSQCGQPLFVYKLEQVSEKGKAYTNYFGRCNVAEHEKLILLAQLKPEKDSDEAVTYSLGKFGQRALDFYSIHVTKESTHPVKPLAQIAGNRYASHPVGKALSDACMGTIASFLSKYQDIIIEHQKVVKGNQKRLESLRELAGKENLEYPSVTLPPQPHTKEGVDAYNEVIARVRMWVNLNLWQKLKLSRDDAKPLLRLKGFPSFPLVERQANEVDWWDMVCNVKKLINEKKEDGKVFWQNLAGYKRQEALRPYLSSEEDRKKGKKFARYQLGDLLLHLEKKHGEDWGKVYDEAWERIDKKVEGLSKHIKLEEERRSEDAQSKAALTDWLRAKASFVIEGLKEADKDEFCRCELKLQKWYGDLRGKPFAIEAENSILDISGFSKQYNCAFIWQKDGVKKLNLYLIINYFKGGKLRFKKIKPEAFEANRFYTVINKKSGEIVPMEVNFNFDDPNLIILPLAFGKRQGREFIWNDLLSLETGSLQLANGRVIEKTLYNRRTRQDEPALFVALTFERREVLDSSNIKPMNLIGVDRGENIPAVIALTDPEGCPLSRFKDSLGNPTHILRIGESYKEKQRTIQAKKEVEQRRAGGYSRKYASKAKNLADDMVRNTARDLLYYAVTQDAMLIFENLSRGFGRQGKRTFMAERQYTRMEDWLTAKLAYEGLPSKTYLSKTLAQYTSKTCSNCGFTITSADYDRVLEKLKKTATGWMTTINGKELKVEGQITYYNRYKRQNVVKDLSVELDRLSEESVNNDISSWTKGRQGEALSLLKKRFSHRPVQEKFVCLNCGFETHADEQAALNIARSWLFLRSQEYKKYQTNKTTGNTDKRAFVETWQSFYRKKLKEVWKPAV

SEQ ID NO: 39163 - protein, 978 aa, synthetic construct
  REGION 1..978: note = engineered CasX variant
QEIKRINKIRRRLVKDSNTKKAGKTGPMKTLLVRVMTPDLRERLENLRKKPENIPQPISNTSRANLNKLLTDYTEMKKAILHVYWEEFQKDPVGLMSRVAQPASKKIDQNKLKPEMDEKGNLTTAGFACSQCGQPLFVYKLEQVSEKGKAYTNYFGRCNVAEHEKLILLAQLKPEKDSDEAVTYSLGKFGQRALDFYSIHVTKESTHPVKPLAQIAGNRYASSPVGKALSDACMGTIASFLSKYQDIIIEHQKVVKGNQKRLESLRELAGKENLEYPSVTLPPQPHTKEGVDAYNEVIARVRMWVNLNLWQKLKLSRDDAKPLLRLKGFPSFPLVERQANEVDWWDMVCNVKKLINEKKEDGKVFWQNLAGYKRQEALRPYLSSEEDRKKGKKFARYQLGDLLLHLEKKHGEDWGKVYDEAWERIDKKVEGLSKHIKLEEERRSEDAQSKAALTDWLRAKASFVIEGLKEADKDEFCRCELKLQKWYGDLRGKPFAIEAENSILDISGFSKQYNCAFIWQKDGVKKLNLYLIINYFKGGKLRFKKIKPEAFEANRFYTVINKKSGEIVPMEVNFNFDDPNLIILPLAFGKRQGREFIWNDLLSLETGSLQLANGRVIEKTLYNRRTRQDEPALFVALTFERREVLDSSNIKPMNLIGVDRGENIPAVIALTDPEGCPLSRFKDSLGNPTHILRIGESYKEKQRTIQAKKEVEQRRAGGYSRKYASKAKNLADDMVRNTARDLLYYAVTQDAMLIFENLSRGFGRQGKRTFMAERQYTRMEDWLTAKLAYEGLPSKTYLSKTLAQYTSKTCSNCGFTITSADYDRVLEKLKKTATGWMTTINGKELKVEGQITYYNRYKRQNVVKDLSVELDRLSEESVNNDISSWTKGRQGEALSLLKKRFSHRPVQEKFVCLNCGFETHADEQAALNIARSWLFLRSQEYKKYQTNKTTGNTDKRAFVETWQSFYRKKLKEVWKPAV

SEQ ID NO: 39164 - protein, 978 aa, synthetic construct
  REGION 1..978: note = engineered CasX variant
QEIKRINKIRRRLVKDSNTKKAGKTGPMKTLLVRVMTPDLRERLENLRKKPENIPQPISNTSRANLNKLLTDYTEMKKAILHVYWEEFQKDPVGLMSRVAQPASKKIDQNKLKPEMDEKGNLTTAGFACSQCGQPLFVYKLEQVSEKGKAYTNYFGRCNVAEHEKLILLAQLKPEKDSDEAVTYSLGKFGQRALDFYSIHVTKESTHPVKPLAQIAGNRYASTPVGKALSDACMGTIASFLSKYQDIIIEHQKVVKGNQKRLESLRELAGKENLEYPSVTLPPQPHTKEGVDAYNEVIARVRMWVNLNLWQKLKLSRDDAKPLLRLKGFPSFPLVERQANEVDWWDMVCNVKKLINEKKEDGKVFWQNLAGYKRQEALRPYLSSEEDRKKGKKFARYQLGDLLLHLEKKHGEDWGKVYDEAWERIDKKVEGLSKHIKLEEERRSEDAQSKAALTDWLRAKASFVIEGLKEADKDEFCRCELKLQKWYGDLRGKPFAIEAENSILDISGFSKQYNCAFIWQKDGVKKLNLYLIINYFKGGKLRFKKIKPEAFEANRFYTVINKKSGEIVPMEVNFNFDDPNLIILPLAFGKRQGREFIWNDLLSLETGSLQLANGRVIEKTLYNRRTRQDEPALFVALTFERREVLDSSNIKPMNLIGVDRGENIPAVIALTDPEGCPLSRFKDSLGNPTHILRIGESYKEKQRTIQAKKEVEQRRAGGYSRKYASKAKNLADDMVRNTARDLLYYAVTQDAMLIFENLSRGFGRQGKRTFMAERQYTRMEDWLTAKLAYEGLPSKTYLSKTLAQYTSKTCSNCGFTITSADYDRVLEKLKKTATGWMTTINGKELKVEGQITYYNRYKRQNVVKDLSVELDRLSEESVNNDISSWTKGRQGEALSLLKKRFSHRPVQEKFVCLNCGFETHADEQAALNIARSWLFLRSQEYKKYQTNKTTGNTDKRAFVETWQSFYRKKLKEVWKPAV

SEQ ID NO: 39165 - protein, 978 aa, synthetic construct
  REGION 1..978: note = engineered CasX variant
QEIKRINKIRRRLVKDSNTKKAGKTGPMKTLLVRVMTPDLRERLENLRKKPENIPQPISNTSRANLNKLLTDYTEMKKAILHVYWEEFQKDPVGLMSRVAQPASKKIDQNKLKPEMDEKGNLTTAGFACSQCGQPLFVYKLEQVSEKGKAYTNYFGRCNVAEHEKLILLAQLKPEKDSDEAVTYSLGKFGQRALDFYSIHVTKESTHPVKPLAQIAGNRYASAPVGKALSDACMGTIASFLSKYQDIIIEHQKVVKGNQKRLESLRELAGKENLEYPSVTLPPQPHTKEGVDAYNEVIARVRMWVNLNLWQKLKLSRDDAKPLLRLKGFPSFPLVERQANEVDWWDMVCNVKKLINEKKEDGKVFWQNLAGYKRQEALRPYLSSEEDRKKGKKFARYQLGDLLLHLEKKHGEDWGKVYDEAWERIDKKVEGLSKHIKLEEERRSEDAQSKAALTDWLRAKASFVIEGLKEADKDEFCRCELKLQKWYGDLRGKPFAIEAENSILDISGFSKQYNCAFIWQKDGVKKLNLYLIINYFKGGKLRFKKIKPEAFEANRFYTVINKKSGEIVPMEVNFNFDDPNLIILPLAFGKRQGREFIWNDLLSLETGSLQLANGRVIEKTLYNRRTRQDEPALFVALTFERREVLDSSNIKPMNLIGVDRGENIPAVIALTDPEGCPLSRFKDSLGNPTHILRIGESYKEKQRTIQAKKEVEQRRAGGYSRKYASKAKNLADDMVRNTARDLLYYAVTQDAMLIFENLSRGFGRQGKRTFMAERQYTRMEDWLTAKLAYEGLPSKTYLSKTLAQYTSKTCSNCGFTITSADYDRVLEKLKKTATGWMTTINGKELKVEGQITYYNRYKRQNVVKDLSVELDRLSEESVNNDISSWTKGRQGEALSLLKKRFSHRPVQEKFVCLNCGFETHADEQAALNIARSWLFLRSQEYKKYQTNKTTGNTDKRAFVETWQSFYRKKLKEVWKPAV

SEQ ID NO: 39166 - protein, 978 aa, synthetic construct
  REGION 1..978: note = engineered CasX variant
QEIKRINKIRRRLVKDSNTKKAGKTGPMKTLLVRVMTPDLRERLENLRKKPENIPQPISNTSRANLNKLLTDYTEMKKAILHVYWEEFQKDPVGLMSRVAQPASKKIDQNKLKPEMDEKGNLTTAGFACSQCGQPLFVYKLEQVSEKGKAYTNYFGRCNVAEHEKLILLAQLKPEKDSDEAVTYSLGKFGQRALDFYSIHVTKESTHPVKPLAQIAGNRYASVPVGKALSDACMGTIASFLSKYQDIIIEHQKVVKGNQKRLESLRELAGKENLEYPSVTLPPQPHTKEGVDAYNEVIARVRMWVNLNLWQKLKLSRDDAKPLLRLKGFPSFPLVERQANEVDWWDMVCNVKKLINEKKEDGKVFWQNLAGYKRQEALRPYLSSEEDRKKGKKFARYQLGDLLLHLEKKHGEDWGKVYDEAWERIDKKVEGLSKHIKLEEERRSEDAQSKAALTDWLRAKASFVIEGLKEADKDEFCRCELKLQKWYGDLRGKPFAIEAENSILDISGFSKQYNCAFIWQKDGVKKLNLYLIINYFKGGKLRFKKIKPEAFEANRFYTVINKKSGEIVPMEVNFNFDDPNLIILPLAFGKRQGREFIWNDLLSLETGSLQLANGRVIEKTLYNRRTRQDEPALFVALTFERREVLDSSNIKPMNLIGVDRGENIPAVIALTDPEGCPLSRFKDSLGNPTHILRIGESYKEKQRTIQAKKEVEQRRAGGYSRKYASKAKNLADDMVRNTARDLLYYAVTQDAMLIFENLSRGFGRQGKRTFMAERQYTRMEDWLTAKLAYEGLPSKTYLSKTLAQYTSKTCSNCGFTITSADYDRVLEKLKKTATGWMTTINGKELKVEGQITYYNRYKRQNVVKDLSVELDRLSEESVNNDISSWTKGRQGEALSLLKKRFSHRPVQEKFVCLNCGFETHADEQAALNIARSWLFLRSQEYKKYQTNKTTGNTDKRAFVETWQSFYRKKLKEVWKPAV

SEQ ID NO: 39167 - protein, 978 aa, synthetic construct
  REGION 1..978: note = engineered CasX variant
QEIKRINKIRRRLVKDSNTKKAGKTGPMKTLLVRVMTPDLRERLENLRKKPENIPQPISNTSRANLNKLLTDYTEMKKAILHVYWEEFQKDPVGLMSRVAQPASKKIDQNKLKPEMDEKGNLTTAGFACSQCGQPLFVYKLEQVSEKGKAYTNYFGRCNVAEHEKLIKLAQLKPEKDSDEAVTYSLGKFGQRALDFYSIHVTKESTHPVKPLAQIAGNRYASGPVGKALSDACMGTIASFLSKYQDIIIEHQKVVKGNQKRLESLRELAGKENLEYPSVTLPPQPHTKEGVDAYNEVIARVRMWVNLNLWQKLKLSRDDAKPLLRLKGFPSFPLVERQANEVDWWDMVCNVKKLINEKKEDGKVFWQNLAGYKRQEALRPYLSSEEDRKKGKKFARYQLGDLLLHLEKKHGEDWGKVYDEAWERIDKKVEGLSKHIKLEEERRSEDAQSKAALTDWLRAKASFVIEGLKEADKDEFCRCELKLQKWYGDLRGKPFAIEAENSILDISGFSKQYNCAFIWQKDGVKKLNLYLIINYFKGGKLRFKKIKPEAFEANRFYTVINKKSGEIVPMEVNFNFDDPNLIILPLAFGKRQGREFIWNDLLSLETGSLQLANGRVIEKTLYNRRTRQDEPALFVALTFERREVLDSSNIKPMNLIGVDRGENIPAVIALTDPEGCPLSRFKDSLGNPTHILRIGESYKEKQRTIQAKKEVEQRRAGGYSRKYASKAKNLADDMVRNTARDLLYYAVTQDAMLIFENLSRGFGRQGKRTFMAERQYTRMEDWLTAKLAYEGLPSKTYLSKTLAQYTSKTCSNCGFTITSADYDRVLEKLKKTATGWMTTINGKELKVEGQITYYNRYKRQNVVKDLSVELDRLSEESVNNDISSWTKGRQGEALSLLKKRFSHRPVQEKFVCLNCGFETHADEQAALNIARSWLFLRSQEYKKYQTNKTTGNTDKRAFVETWQSFYRKKLKEVWKPAV

SEQ ID NO: 39168 - protein, 977 aa, synthetic construct
  REGION 1..977: note = engineered CasX variant
QEIKRINKIRRRLVKDSNTKKAGKTGPMKTLLVRVMTPDLRERLENLRKKPENIPQPISNTSRANLNKLLTDYTEMKKAILHVYWEEFQKDPVGLMSRVAQPASKKIDQNKLKPEMDEKGNLTTAGFACSQCGQPLFVYKLEQVSEKGKAYTNYFGRCNVAEHEKLILLAQLKPEKDSDEAVTYSLGKFGQRALDFYSIHVTKESTHPVKPLAQIAGNRYASPVGKALSDACMGTIASFLSKYQDIIIEHQKVVKGNQKRLESLRELAGKENLEYPSVTLPPQPHTKEGVDAYNEVIARVRMWVNLNLWQKLKLSRDDAKPLLRLKGFPSFPLVERQANEVDWWDMVCNVKKLINEKKEDGKVFWQNLAGYKRQEALRPYLSSEEDRKKGKKFARYQLGDLLLHLEKKHGEDWGKVYDEAWERIDKKVEGLSKHIKLEEERRSEDAQSKAALTDWLRAKASFVIEGLKEADKDEFCRCELKLQKWYGDLRGKPFAIEAENSILDISGFSKQYNCAFIWQKDGVKKLNLYLIINYFKGGKLRFKKIKPEAFEANRFYTVINKKSGEIVPMEVNFNFDDPNLIILPLAFGKRQGREFIWNDLLSLETGSLQLANGRVIEKTLYNRRTRQDEPALFVALTFERREVLDSSNIKPMNLIGVDRGENIPAVIALTDPEGCPLSRFKDSLGNPTHILRIGESYKEKQRTIQAKKEVEQRRAGGYSRKYASKAKNLADDMVRNTARDLLYYAVTQDAMLIFENLSRGFGRQGKRTFMAERQYTRMEDWLTAKLAYEGLPSKTYLSKTLAQYTSKTCSNCGFTITSADYDRVLEKLKKTATGWMTTINGKELKVEGQITYYNRYKRQNVVKDLSVELDRLSEESVNNDISSWTKGRQGEALSLLKKRFSHRPVQEKFVCLNCGFETHADEQAALNIARSWLFLRSQEYKKYQTNKTTGNTDKRAFVETWQSFYRKKLKEVWKPAV

SEQ ID NO: 39169 - protein, 979 aa, synthetic construct
  REGION 1..979: note = engineered CasX variant
QEIKRINKIRRRLVKDSNTKKAGKTGPMKTLLVRVMTPDLRERLENLRKKPENIPQPISNTSRANLNKLLTDYTEMKKAILHVYWEEFQKDPVGLMSRVAQPASKKIDQNKLKPEMDEKGNLTTAGFACSQCGQPLFVYKLEQVSEKGKAYTNYFGRCNVAEHEKLILLAQLKPEKDSDEAVTYSLGKFGQRALDFYSIHVTKESTHPVKPLAQIAGNRYASYPVGKALSDACMGTIASFLSKYQDIIIEHQKVVKGNQKRLESLRELAGKENLEYPSVTLPPQPHTKEGVDAYNEVIARVRMWVNLNLWQKLKLSRDDAKPLLRLKGFPSFPLVERQANEVDWWDMVCNVKKLINEKKEDGKVFWQNLAGYKRQEALRPYLSSEEDRKKGKKFARYQLGDLLLHLEKKHGEDWGKVYDEAWERIDKKVEGLSKHIKLEEERRSEDAQSKAALTDWLRAKASFVIEGLKEADKDEFCRCELKLQKWYGDLRGKPFAIEAENSILDISGFSKQYNCAFIWQKDGVKKLNLYLIINYFKGGKLRFKKIKPEAFEANRFYTVINKKSGEIVPMEVNFNFDDPNLIILPLAFGKRQGREFIWNDLLSLETGSLKLANGRVIEKTLYNRRTRQDEPALFVALTFERREVLDSSNIKPMNLIGVDRGENIPAVIALTDPEGCPLSRFKDSLGNPTHILRIGESYKEKQRTIQAKKEVEQRRAGGYSRKYASKAKNLADDMVRNTARDLLYYAVTQDAMLIFENLSRGFGRQGKRTFMAERQYTRMEDWLTAKLAYEGLPSKTYLSKTLAQYTSKTCSNCGFTITSADYDRVLEKLKKTATGWMTTINGKELKVEGQITYYNRYKRQNVVKDLSVELDRLSEESVNNDISSWTKGRSGEALSLLKKRFSHRPVQEKFVCLNCEFETHADEQAALNIARSWLFLRSQEYKKYQTNKTSTGNTDKRAFVETWQSFYRKKLKEVWKPAV

SEQ ID NO: 39170 - protein, 979 aa, synthetic construct
  REGION 1..979: note = engineered CasX variant
QEIKRINKIRRRLVKDSNTKKAGKTGPMKTLLVRVMTPDLRERLENLRKKPENIPQPISNTSRANLNKLLTDYTEMKKAILHVYWEEFQKDPVGLMSRVAQPASKKIDQNKLKPEMDEKGNLTTAGFACSQCGQPLFVYKLEQVSEKGKAYTNYFGRCNVAEHEKLILLAQLKPEKDSDEAVTYSLGKFGQRALDFYSIHVTKESTHPVKPLAQIAGNRYASHPVGKALSDACMGTIASFLSKYQDIIIEHQKVVKGNQKRLESLRELAGKENLEYPSVTLPPQPHTKEGVDAYNEVIARVRMWVNLNLWQKLKLSRDDAKPLLRLKGFPSFPLVERQANEVDWWDMVCNVKKLINEKKEDGKVFWQNLAGYKRQEALRPYLSSEEDRKKGKKFARYQLGDLLLHLEKKHGEDWGKVYDEAWERIDKKVEGLSKHIKLEEERRSEDAQSKAALTDWLRAKASFVIEGLKEADKDEFCRCELKLQKWYGDLRGKPFAIEAENSILDISGFSKQYNCAFIWQKDGVKKLNLYLIINYFKGGKLRFKKIKPEAFEANRFYTVINKKSGEIVPMEVNFNFDDPNLIILPLAFGKRQGREFIWNDLLSLETGSLKLANGRVIEKTLYNRRTRQDEPALFVALTFERREVLDSSNIKPMNLIGVDRGENIPAVIALTDPEGCPLSRFKDSLGNPTHILRIGESYKEKQRTIQAKKEVEQRRAGGYSRKYASKAKNLADDMVRNTARDLLYYAVTQDAMLIFENLSRGFGRQGKRTFMAERQYTRMEDWLTAKLAYEGLPSKTYLSKTLAQYTSKTCSNCGFTITSADYDRVLEKLKKTATGWMTTINGKELKVEGQITYYNRYKRQNVVKDLSVELDRLSEESVNNDISSWTKGRSGEALSLLKKRFSHRPVQEKFVCLNCEFETHADEQAALNIARSWLFLRSQEYKKYQTNKTSTGNTDKRAFVETWQSFYRKKLKEVWKPAV

SEQ ID NO: 39171 - protein, 979 aa, synthetic construct
  REGION 1..979: note = engineered CasX variant
QEIKRINKIRRRLVKDSNTKKAGKTGPMKTLLVRVMTPDLRERLENLRKKPENIPQPISNTSRANLNKLLTDYTEMKKAILHVYWEEFQKDPVGLMSRVAQPASKKIDQNKLKPEMDEKGNLTTAGFACSQCGQPLFVYKLEQVSEKGKAYTNYFGRCNVAEHEKLILLAQLKPEKDSDEAVTYSLGKFGQRALDFYSIHVTKESTHPVKPLAQIAGNRYASSPVGKALSDACMGTIASFLSKYQDIIIEHQKVVKGNQKRLESLRELAGKENLEYPSVTLPPQPHTKEGVDAYNEVIARVRMWVNLNLWQKLKLSRDDAKPLLRLKGFPSFPLVERQANEVDWWDMVCNVKKLINEKKEDGKVFWQNLAGYKRQEALRPYLSSEEDRKKGKKFARYQLGDLLLHLEKKHGEDWGKVYDEAWERIDKKVEGLSKHIKLEEERRSEDAQSKAALTDWLRAKASFVIEGLKEADKDEFCRCELKLQKWYGDLRGKPFAIEAENSILDISGFSKQYNCAFIWQKDGVKKLNLYLIINYFKGGKLRFKKIKPEAFEANRFYTVINKKSGEIVPMEVNFNFDDPNLIILPLAFGKRQGREFIWNDLLSLETGSLKLANGRVIEKTLYNRRTRQDEPALFVALTFERREVLDSSNIKPMNLIGVDRGENIPAVIALTDPEGCPLSRFKDSLGNPTHILRIGESYKEKQRTIQAKKEVEQRRAGGYSRKYASKAKNLADDMVRNTARDLLYYAVTQDAMLIFENLSRGFGRQGKRTFMAERQYTRMEDWLTAKLAYEGLPSKTYLSKTLAQYTSKTCSNCGFTITSADYDRVLEKLKKTATGWMTTINGKELKVEGQITYYNRYKRQNVVKDLSVELDRLSEESVNNDISSWTKGRSGEALSLLKKRFSHRPVQEKFVCLNCEFETHADEQAALNIARSWLFLRSQEYKKYQTNKTSTGNTDKRAFVETWQSFYRKKLKEVWKPAV

SEQ ID NO: 39172 - protein, 979 aa, synthetic construct
  REGION 1..979: note = engineered CasX variant
QEIKRINKIRRRLVKDSNTKKAGKTGPMKTLLVRVMTPDLRERLENLRKKPENIPQPISNTSRANLNKLLTDYTEMKKAILHVYWEEFQKDPVGLMSRVAQPASKKIDQNKLKPEMDEKGNLTTAGFACSQCGQPLFVYKLEQVSEKGKAYTNYFGRCNVAEHEKLILLAQLKPEKDSDEAVTYSLGKFGQRALDFYSIHVTKESTHPVKPLAQIAGNRYASTPVGKALSDACMGTIASFLSKYQDIIIEHQKVVKGNQKRLESLRELAGKENLEYPSVTLPPQPHTKEGVDAYNEVIARVRMWVNLNLWQKLKLSRDDAKPLLRLKGFPSFPLVERQANEVDWWDMVCNVKKLINEKKEDGKVFWQNLAGYKRQEALRPYLSSEEDRKKGKKFARYQLGDLLLHLEKKHGEDWGKVYDEAWERIDKKVEGLSKHIKLEEERRSEDAQSKAALTDWLRAKASFVIEGLKEADKDEFCRCELKLQKWYGDLRGKPFAIEAENSILDISGFSKQYNCAFIWQKDGVKKLNLYLIINYFKGGKLRFKKIKPEAFEANRFYTVINKKSGEIVPMEVNFNFDDPNLIILPLAFGKRQGREFIWNDLLSLETGSLKLANGRVIEKTLYNRRTRQDEPALFVALTFERREVLDSSNIKPMNLIGVDRGENIPAVIALTDPEGCPLSRFKDSLGNPTHILRIGESYKEKQRTIQAKKEVEQRRAGGYSRKYASKAKNLADDMVRNTARDLLYYAVTQDAMLIFENLSRGFGRQGKRTFMAERQYTRMEDWLTAKLAYEGLPSKTYLSKTLAQYTSKTCSNCGFTITSADYDRVLEKLKKTATGWMTTINGKELKVEGQITYYNRYKRQNVVKDLSVELDRLSEESVNNDISSWTKGRSGEALSLLKKRFSHRPVQEKFVCLNCEFETHADEQAALNIARSWLFLRSQEYKKYQTNKTSTGNTDKRAFVETWQSFYRKKLKEVWKPAV

SEQ ID NO: 39173 - protein, 979 aa, synthetic construct
  REGION 1..979: note = engineered CasX variant
QEIKRINKIRRRLVKDSNTKKAGKTGPMKTLLVRVMTPDLRERLENLRKKPENIPQPISNTSRANLNKLLTDYTEMKKAILHVYWEEFQKDPVGLMSRVAQPASKKIDQNKLKPEMDEKGNLTTAGFACSQCGQPLFVYKLEQVSEKGKAYTNYFGRCNVAEHEKLILLAQLKPEKDSDEAVTYSLGKFGQRALDFYSIHVTKESTHPVKPLAQIAGNRYASAPVGKALSDACMGTIASFLSKYQDIIIEHQKVVKGNQKRLESLRELAGKENLEYPSVTLPPQPHTKEGVDAYNEVIARVRMWVNLNLWQKLKLSRDDAKPLLRLKGFPSFPLVERQANEVDWWDMVCNVKKLINEKKEDGKVFWQNLAGYKRQEALRPYLSSEEDRKKGKKFARYQLGDLLLHLEKKHGEDWGKVYDEAWERIDKKVEGLSKHIKLEEERRSEDAQSKAALTDWLRAKASFVIEGLKEADKDEFCRCELKLQKWYGDLRGKPFAIEAENSILDISGFSKQYNCAFIWQKDGVKKLNLYLIINYFKGGKLRFKKIKPEAFEANRFYTVINKKSGEIVPMEVNFNFDDPNLIILPLAFGKRQGREFIWNDLLSLETGSLKLANGRVIEKTLYNRRTRQDEPALFVALTFERREVLDSSNIKPMNLIGVDRGENIPAVIALTDPEGCPLSRFKDSLGNPTHILRIGESYKEKQRTIQAKKEVEQRRAGGYSRKYASKAKNLADDMVRNTARDLLYYAVTQDAMLIFENLSRGFGRQGKRTFMAERQYTRMEDWLTAKLAYEGLPSKTYLSKTLAQYTSKTCSNCGFTITSADYDRVLEKLKKTATGWMTTINGKELKVEGQITYYNRYKRQNVVKDLSVELDRLSEESVNNDISSWTKGRSGEALSLLKKRFSHRPVQEKFVCLNCEFETHADEQAALNIARSWLFLRSQEYKKYQTNKTSTGNTDKRAFVETWQSFYRKKLKEVWKPAV

SEQ ID NO: 39174 - protein, 979 aa, synthetic construct
  REGION 1..979: note = engineered CasX variant
QEIKRINKIRRRLVKDSNTKKAGKTGPMKTLLVRVMTPDLRERLENLRKKPENIPQPISNTSRANLNKLLTDYTEMKKAILHVYWEEFQKDPVGLMSRVAQPASKKIDQNKLKPEMDEKGNLTTAGFACSQCGQPLFVYKLEQVSEKGKAYTNYFGRCNVAEHEKLILLAQLKPEKDSDEAVTYSLGKFGQRALDFYSIHVTKESTHPVKPLAQIAGNRYASVPVGKALSDACMGTIASFLSKYQDIIIEHQKVVKGNQKRLESLRELAGKENLEYPSVTLPPQPHTKEGVDAYNEVIARVRMWVNLNLWQKLKLSRDDAKPLLRLKGFPSFPLVERQANEVDWWDMVCNVKKLINEKKEDGKVFWQNLAGYKRQEALRPYLSSEEDRKKGKKFARYQLGDLLLHLEKKHGEDWGKVYDEAWERIDKKVEGLSKHIKLEEERRSEDAQSKAALTDWLRAKASFVIEGLKEADKDEFCRCELKLQKWYGDLRGKPFAIEAENSILDISGFSKQYNCAFIWQKDGVKKLNLYLIINYFKGGKLRFKKIKPEAFEANRFYTVINKKSGEIVPMEVNFNFDDPNLIILPLAFGKRQGREFIWNDLLSLETGSLKLANGRVIEKTLYNRRTRQDEPALFVALTFERREVLDSSNIKPMNLIGVDRGENIPAVIALTDPEGCPLSRFKDSLGNPTHILRIGESYKEKQRTIQAKKEVEQRRAGGYSRKYASKAKNLADDMVRNTARDLLYYAVTQDAMLIFENLSRGFGRQGKRTFMAERQYTRMEDWLTAKLAYEGLPSKTYLSKTLAQYTSKTCSNCGFTITSADYDRVLEKLKKTATGWMTTINGKELKVEGQITYYNRYKRQNVVKDLSVELDRLSEESVNNDISSWTKGRSGEALSLLKKRFSHRPVQEKFVCLNCEFETHADEQAALNIARSWLFLRSQEYKKYQTNKTSTGNTDKRAFVETWQSFYRKKLKEVWKPAV

SEQ ID NO: 39175 - protein, 979 aa, synthetic construct
  REGION 1..979: note = engineered CasX variant
QEIKRINKIRRRLVKDSNTKKAGKTGPMKTLLVRVMTPDLRERLENLRKKPENIPQPISNTSRANLNKLLTDYTEMKKAILHVYWEEFQKDPVGLMSRVAQPASKKIDQNKLKPEMDEKGNLTTAGFACSQCGQPLFVYKLEQVSEKGKAYTNYFGRCNVAEHEKLIKLAQLKPEKDSDEAVTYSLGKFGQRALDFYSIHVTKESTHPVKPLAQIAGNRYASGPVGKALSDACMGTIASFLSKYQDIIIEHQKVVKGNQKRLESLRELAGKENLEYPSVTLPPQPHTKEGVDAYNEVIARVRMWVNLNLWQKLKLSRDDAKPLLRLKGFPSFPLVERQANEVDWWDMVCNVKKLINEKKEDGKVFWQNLAGYKRQEALRPYLSSEEDRKKGKKFARYQLGDLLLHLEKKHGEDWGKVYDEAWERIDKKVEGLSKHIKLEEERRSEDAQSKAALTDWLRAKASFVIEGLKEADKDEFCRCELKLQKWYGDLRGKPFAIEAENSILDISGFSKQYNCAFIWQKDGVKKLNLYLIINYFKGGKLRFKKIKPEAFEANRFYTVINKKSGEIVPMEVNFNFDDPNLIILPLAFGKRQGREFIWNDLLSLETGSLKLANGRVIEKTLYNRRTRQDEPALFVALTFERREVLDSSNIKPMNLIGVDRGENIPAVIALTDPEGCPLSRFKDSLGNPTHILRIGESYKEKQRTIQAKKEVEQRRAGGYSRKYASKAKNLADDMVRNTARDLLYYAVTQDAMLIFENLSRGFGRQGKRTFMAERQYTRMEDWLTAKLAYEGLPSKTYLSKTLAQYTSKTCSNCGFTITSADYDRVLEKLKKTATGWMTTINGKELKVEGQITYYNRYKRQNVVKDLSVELDRLSEESVNNDISSWTKGRSGEALSLLKKRFSHRPVQEKFVCLNCEFETHADEQAALNIARSWLFLRSQEYKKYQTNKTSTGNTDKRAFVETWQSFYRKKLKEVWKPAV

SEQ ID NO: 39176 - protein, 978 aa, synthetic construct
  REGION 1..978: note = engineered CasX variant
QEIKRINKIRRRLVKDSNTKKAGKTGPMKTLLVRVMTPDLRERLENLRKKPENIPQPISNTSRANLNKLLTDYTEMKKAILHVYWEEFQKDPVGLMSRVAQPASKKIDQNKLKPEMDEKGNLTTAGFACSQCGQPLFVYKLEQVSEKGKAYTNYFGRCNVAEHEKLILLAQLKPEKDSDEAVTYSLGKFGQRALDFYSIHVTKESTHPVKPLAQIAGNRYASPVGKALSDACMGTIASFLSKYQDIIIEHQKVVKGNQKRLESLRELAGKENLEYPSVTLPPQPHTKEGVDAYNEVIARVRMWVNLNLWQKLKLSRDDAKPLLRLKGFPSFPLVERQANEVDWWDMVCNVKKLINEKKEDGKVFWQNLAGYKRQEALRPYLSSEEDRKKGKKFARYQLGDLLLHLEKKHGEDWGKVYDEAWERIDKKVEGLSKHIKLEEERRSEDAQSKAALTDWLRAKASFVIEGLKEADKDEFCRCELKLQKWYGDLRGKPFAIEAENSILDISGFSKQYNCAFIWQKDGVKKLNLYLIINYFKGGKLRFKKIKPEAFEANRFYTVINKKSGEIVPMEVNFNFDDPNLIILPLAFGKRQGREFIWNDLLSLETGSLKLANGRVIEKTLYNRRTRQDEPALFVALTFERREVLDSSNIKPMNLIGVDRGENIPAVIALTDPEGCPLSRFKDSLGNPTHILRIGESYKEKQRTIQAKKEVEQRRAGGYSRKYASKAKNLADDMVRNTARDLLYYAVTQDAMLIFENLSRGFGRQGKRTFMAERQYTRMEDWLTAKLAYEGLPSKTYLSKTLAQYTSKTCSNCGFTITSADYDRVLEKLKKTATGWMTTINGKELKVEGQITYYNRYKRQNVVKDLSVELDRLSEESVNNDISSWTKGRSGEALSLLKKRFSHRPVQEKFVCLNCEFETHADEQAALNIARSWLFLRSQEYKKYQTNKTSTGNTDKRAFVETWQSFYRKKLKEVWKPAV

SEQ ID NO: 39177 - protein, 979 aa, synthetic construct
  REGION 1..979: note = engineered CasX variant
QEIKRINKIRRRLVKDSNTKKAGKTGPMKTLLVRVMTPDLRERLENLRKKPENIPQPISNTSRANLNKLLTDYTEMKKAILHVYWEEFQKDPVGLMSRVAQPASKKIDQNKLKPEMDEKGNLTTAGFACSQCGQPLFVYKLEQVSEKGKAYTNYFGRCNVAEHEKLILLAQLKPEKDSDEAVTYSLGKFGQRALDFYSIHVTKESTHPVKPLAQIAGNRYASYPVGKALSDACMGTIASFLSKYQDIIIEHQKVVKGNQKRLESLRELAGKENLEYPSVTLPPQPHTKEGVDAYNEVIARVRMWVNLNLWQKLKLSRDDAKPLLRLKGFPSFPLVERQANEVDWWDMVCNVKKLINEKKEDGKVFWQNLAGYKRQEALRPYLSSEEDRKKGKKFARYQLGDLLLHLEKKHGEDWGKVYDEAWERIDKKVEGLSKHIKLEEERRSEDAQSKAALTDWLRAKASFVIEGLKEADKDEFCRCELKLQKWYGDLRGKPFAIEAENSILDISGFSKQYNCAFIWQKDGVKKLNLYLIINYFKGGKLRFKKIKPEAFEANRFYTVINKKSGEIVPMEVNFNFDDPNLIILPLAFGKRQGREFIWNDLLSLETGSLKLANGRVIEKTLYNRRTRQDEPALFVALTFERREVLDSSNIKPMNLIGVDRGENIPAVIALTDPEGCPLSRFKDSLGNPTHILRIGESYKEKQRTIQAKKEVEQRRAGGYSRKYASKAKNLADDMVRNTARDLLYYAVTQDAMLIFENLSRGFGRQGKRTFMAERQYTRMEDWLTAKLAYEGLPSKTYLSKTLAQYTSKTCSNCGFTITSADYDRVLEKLKKTATGWMTTINGKELKVEGQITYYNRYKRQNVVKDLSVELDRLSEESVNNDISSWTKGRSGEALSLLKKRFSHRPVQEKFVCLNCEFETHADEQAALNIARSWLFLRSQEYKKYQTNKTTGKNTDKRAFVETWQSFYRKKLKEVWKPAV

SEQ ID NO: 39178 - protein, 979 aa, synthetic construct
  REGION 1..979: note = engineered CasX variant
QEIKRINKIRRRLVKDSNTKKAGKTGPMKTLLVRVMTPDLRERLENLRKKPENIPQPISNTSRANLNKLLTDYTEMKKAILHVYWEEFQKDPVGLMSRVAQPASKKIDQNKLKPEMDEKGNLTTAGFACSQCGQPLFVYKLEQVSEKGKAYTNYFGRCNVAEHEKLILLAQLKPEKDSDEAVTYSLGKFGQRALDFYSIHVTKESTHPVKPLAQIAGNRYASHPVGKALSDACMGTIASFLSKYQDIIIEHQKVVKGNQKRLESLRELAGKENLEYPSVTLPPQPHTKEGVDAYNEVIARVRMWVNLNLWQKLKLSRDDAKPLLRLKGFPSFPLVERQANEVDWWDMVCNVKKLINEKKEDGKVFWQNLAGYKRQEALRPYLSSEEDRKKGKKFARYQLGDLLLHLEKKHGEDWGKVYDEAWERIDKKVEGLSKHIKLEEERRSEDAQSKAALTDWLRAKASFVIEGLKEADKDEFCRCELKLQKWYGDLRGKPFAIEAENSILDISGFSKQYNCAFIWQKDGVKKLNLYLIINYFKGGKLRFKKIKPEAFEANRFYTVINKKSGEIVPMEVNFNFDDPNLIILPLAFGKRQGREFIWNDLLSLETGSLKLANGRVIEKTLYNRRTRQDEPALFVALTFERREVLDSSNIKPMNLIGVDRGENIPAVIALTDPEGCPLSRFKDSLGNPTHILRIGESYKEKQRTIQAKKEVEQRRAGGYSRKYASKAKNLADDMVRNTARDLLYYAVTQDAMLIFENLSRGFGRQGKRTFMAERQYTRMEDWLTAKLAYEGLPSKTYLSKTLAQYTSKTCSNCGFTITSADYDRVLEKLKKTATGWMTTINGKELKVEGQITYYNRYKRQNVVKDLSVELDRLSEESVNNDISSWTKGRSGEALSLLKKRFSHRPVQEKFVCLNCEFETHADEQAALNIARSWLFLRSQEYKKYQTNKTTGKNTDKRAFVETWQSFYRKKLKEVWKPAV

SEQ ID NO: 39179 - protein, 979 aa, synthetic construct
  REGION 1..979: note = engineered CasX variant
QEIKRINKIRRRLVKDSNTKKAGKTGPMKTLLVRVMTPDLRERLENLRKKPENIPQPISNTSRANLNKLLTDYTEMKKAILHVYWEEFQKDPVGLMSRVAQPASKKIDQNKLKPEMDEKGNLTTAGFACSQCGQPLFVYKLEQVSEKGKAYTNYFGRCNVAEHEKLILLAQLKPEKDSDEAVTYSLGKFGQRALDFYSIHVTKESTHPVKPLAQIAGNRYASSPVGKALSDACMGTIASFLSKYQDIIIEHQKVVKGNQKRLESLRELAGKENLEYPSVTLPPQPHTKEGVDAYNEVIARVRMWVNLNLWQKLKLSRDDAKPLLRLKGFPSFPLVERQANEVDWWDMVCNVKKLINEKKEDGKVFWQNLAGYKRQEALRPYLSSEEDRKKGKKFARYQLGDLLLHLEKKHGEDWGKVYDEAWERIDKKVEGLSKHIKLEEERRSEDAQSKAALTDWLRAKASFVIEGLKEADKDEFCRCELKLQKWYGDLRGKPFAIEAENSILDISGFSKQYNCAFIWQKDGVKKLNLYLIINYFKGGKLRFKKIKPEAFEANRFYTVINKKSGEIVPMEVNFNFDDPNLIILPLAFGKRQGREFIWNDLLSLETGSLKLANGRVIEKTLYNRRTRQDEPALFVALTFERREVLDSSNIKPMNLIGVDRGENIPAVIALTDPEGCPLSRFKDSLGNPTHILRIGESYKEKQRTIQAKKEVEQRRAGGYSRKYASKAKNLADDMVRNTARDLLYYAVTQDAMLIFENLSRGFGRQGKRTFMAERQYTRMEDWLTAKLAYEGLPSKTYLSKTLAQYTSKTCSNCGFTITSADYDRVLEKLKKTATGWMTTINGKELKVEGQITYYNRYKRQNVVKDLSVELDRLSEESVNNDISSWTKGRSGEALSLLKKRFSHRPVQEKFVCLNCEFETHADEQAALNIARSWLFLRSQEYKKYQTNKTTGKNTDKRAFVETWQSFYRKKLKEVWKPAV

SEQ ID NO: 39180 - protein, 979 aa, synthetic construct
  REGION 1..979: note = engineered CasX variant
QEIKRINKIRRRLVKDSNTKKAGKTGPMKTLLVRVMTPDLRERLENLRKKPENIPQPISNTSRANLNKLLTDYTEMKKAILHVYWEEFQKDPVGLMSRVAQPASKKIDQNKLKPEMDEKGNLTTAGFACSQCGQPLFVYKLEQVSEKGKAYTNYFGRCNVAEHEKLILLAQLKPEKDSDEAVTYSLGKFGQRALDFYSIHVTKESTHPVKPLAQIAGNRYASTPVGKALSDACMGTIASFLSKYQDIIIEHQKVVKGNQKRLESLRELAGKENLEYPSVTLPPQPHTKEGVDAYNEVIARVRMWVNLNLWQKLKLSRDDAKPLLRLKGFPSFPLVERQANEVDWWDMVCNVKKLINEKKEDGKVFWQNLAGYKRQEALRPYLSSEEDRKKGKKFARYQLGDLLLHLEKKHGEDWGKVYDEAWERIDKKVEGLSKHIKLEEERRSEDAQSKAALTDWLRAKASFVIEGLKEADKDEFCRCELKLQKWYGDLRGKPFAIEAENSILDISGFSKQYNCAFIWQKDGVKKLNLYLIINYFKGGKLRFKKIKPEAFEANRFYTVINKKSGEIVPMEVNFNFDDPNLIILPLAFGKRQGREFIWNDLLSLETGSLKLANGRVIEKTLYNRRTRQDEPALFVALTFERREVLDSSNIKPMNLIGVDRGENIPAVIALTDPEGCPLSRFKDSLGNPTHILRIGESYKEKQRTIQAKKEVEQRRAGGYSRKYASKAKNLADDMVRNTARDLLYYAVTQDAMLIFENLSRGFGRQGKRTFMAERQYTRMEDWLTAKLAYEGLPSKTYLSKTLAQYTSKTCSNCGFTITSADYDRVLEKLKKTATGWMTTINGKELKVEGQITYYNRYKRQNVVKDLSVELDRLSEESVNNDISSWTKGRSGEALSLLKKRFSHRPVQEKFVCLNCEFETHADEQAALNIARSWLFLRSQEYKKYQTNKTTGKNTDKRAFVETWQSFYRKKLKEVWKPAV

SEQ ID NO: 39181 - protein, 979 aa, synthetic construct
  REGION 1..979: note = engineered CasX variant
QEIKRINKIRRRLVKDSNTKKAGKTGPMKTLLVRVMTPDLRERLENLRKKPENIPQPISNTSRANLNKLLTDYTEMKKAILHVYWEEFQKDPVGLMSRVAQPASKKIDQNKLKPEMDEKGNLTTAGFACSQCGQPLFVYKLEQVSEKGKAYTNYFGRCNVAEHEKLILLAQLKPEKDSDEAVTYSLGKFGQRALDFYSIHVTKESTHPVKPLAQIAGNRYASAPVGKALSDACMGTIASFLSKYQDIIIEHQKVVKGNQKRLESLRELAGKENLEYPSVTLPPQPHTKEGVDAYNEVIARVRMWVNLNLWQKLKLSRDDAKPLLRLKGFPSFPLVERQANEVDWWDMVCNVKKLINEKKEDGKVFWQNLAGYKRQEALRPYLSSEEDRKKGKKFARYQLGDLLLHLEKKHGEDWGKVYDEAWERIDKKVEGLSKHIKLEEERRSEDAQSKAALTDWLRAKASFVIEGLKEADKDEFCRCELKLQKWYGDLRGKPFAIEAENSILDISGFSKQYNCAFIWQKDGVKKLNLYLIINYFKGGKLRFKKIKPEAFEANRFYTVINKKSGEIVPMEVNFNFDDPNLIILPLAFGKRQGREFIWNDLLSLETGSLKLANGRVIEKTLYNRRTRQDEPALFVALTFERREVLDSSNIKPMNLIGVDRGENIPAVIALTDPEGCPLSRFKDSLGNPTHILRIGESYKEKQRTIQAKKEVEQRRAGGYSRKYASKAKNLADDMVRNTARDLLYYAVTQDAMLIFENLSRGFGRQGKRTFMAERQYTRMEDWLTAKLAYEGLPSKTYLSKTLAQYTSKTCSNCGFTITSADYDRVLEKLKKTATGWMTTINGKELKVEGQITYYNRYKRQNVVKDLSVELDRLSEESVNNDISSWTKGRSGEALSLLKKRFSHRPVQEKFVCLNCEFETHADEQAALNIARSWLFLRSQEYKKYQTNKTTGKNTDKRAFVETWQSFYRKKLKEVWKPAV

SEQ ID NO: 39182 - protein, 979 aa, synthetic construct
  REGION 1..979: note = engineered CasX variant
QEIKRINKIRRRLVKDSNTKKAGKTGPMKTLLVRVMTPDLRERLENLRKKPENIPQPISNTSRANLNKLLTDYTEMKKAILHVYWEEFQKDPVGLMSRVAQPASKKIDQNKLKPEMDEKGNLTTAGFACSQCGQPLFVYKLEQVSEKGKAYTNYFGRCNVAEHEKLILLAQLKPEKDSDEAVTYSLGKFGQRALDFYSIHVTKESTHPVKPLAQIAGNRYASVPVGKALSDACMGTIASFLSKYQDIIIEHQKVVKGNQKRLESLRELAGKENLEYPSVTLPPQPHTKEGVDAYNEVIARVRMWVNLNLWQKLKLSRDDAKPLLRLKGFPSFPLVERQANEVDWWDMVCNVKKLINEKKEDGKVFWQNLAGYKRQEALRPYLSSEEDRKKGKKFARYQLGDLLLHLEKKHGEDWGKVYDEAWERIDKKVEGLSKHIKLEEERRSEDAQSKAALTDWLRAKASFVIEGLKEADKDEFCRCELKLQKWYGDLRGKPFAIEAENSILDISGFSKQYNCAFIWQKDGVKKLNLYLIINYFKGGKLRFKKIKPEAFEANRFYTVINKKSGEIVPMEVNFNFDDPNLIILPLAFGKRQGREFIWNDLLSLETGSLKLANGRVIEKTLYNRRTRQDEPALFVALTFERREVLDSSNIKPMNLIGVDRGENIPAVIALTDPEGCPLSRFKDSLGNPTHILRIGESYKEKQRTIQAKKEVEQRRAGGYSRKYASKAKNLADDMVRNTARDLLYYAVTQDAMLIFENLSRGFGRQGKRTFMAERQYTRMEDWLTAKLAYEGLPSKTYLSKTLAQYTSKTCSNCGFTITSADYDRVLEKLKKTATGWMTTINGKELKVEGQITYYNRYKRQNVVKDLSVELDRLSEESVNNDISSWTKGRSGEALSLLKKRFSHRPVQEKFVCLNCEFETHADEQAALNIARSWLFLRSQEYKKYQTNKTTGKNTDKRAFVETWQSFYRKKLKEVWKPAV

SEQ ID NO: 39183 - protein, 979 aa, synthetic construct
  REGION 1..979: note = engineered CasX variant
QEIKRINKIRRRLVKDSNTKKAGKTGPMKTLLVRVMTPDLRERLENLRKKPENIPQPISNTSRANLNKLLTDYTEMKKAILHVYWEEFQKDPVGLMSRVAQPASKKIDQNKLKPEMDEKGNLTTAGFACSQCGQPLFVYKLEQVSEKGKAYTNYFGRCNVAEHEKLIKLAQLKPEKDSDEAVTYSLGKFGQRALDFYSIHVTKESTHPVKPLAQIAGNRYASGPVGKALSDACMGTIASFLSKYQDIIIEHQKVVKGNQKRLESLRELAGKENLEYPSVTLPPQPHTKEGVDAYNEVIARVRMWVNLNLWQKLKLSRDDAKPLLRLKGFPSFPLVERQANEVDWWDMVCNVKKLINEKKEDGKVFWQNLAGYKRQEALRPYLSSEEDRKKGKKFARYQLGDLLLHLEKKHGEDWGKVYDEAWERIDKKVEGLSKHIKLEEERRSEDAQSKAALTDWLRAKASFVIEGLKEADKDEFCRCELKLQKWYGDLRGKPFAIEAENSILDISGFSKQYNCAFIWQKDGVKKLNLYLIINYFKGGKLRFKKIKPEAFEANRFYTVINKKSGEIVPMEVNFNFDDPNLIILPLAFGKRQGREFIWNDLLSLETGSLKLANGRVIEKTLYNRRTRQDEPALFVALTFERREVLDSSNIKPMNLIGVDRGENIPAVIALTDPEGCPLSRFKDSLGNPTHILRIGESYKEKQRTIQAKKEVEQRRAGGYSRKYASKAKNLADDMVRNTARDLLYYAVTQDAMLIFENLSRGFGRQGKRTFMAERQYTRMEDWLTAKLAYEGLPSKTYLSKTLAQYTSKTCSNCGFTITSADYDRVLEKLKKTATGWMTTINGKELKVEGQITYYNRYKRQNVVKDLSVELDRLSEESVNNDISSWTKGRSGEALSLLKKRFSHRPVQEKFVCLNCEFETHADEQAALNIARSWLFLRSQEYKKYQTNKTTGKNTDKRAFVETWQSFYRKKLKEVWKPAV

SEQ ID NO: 39184 - protein, 978 aa, synthetic construct
  REGION 1..978: note = engineered CasX variant
QEIKRINKIRRRLVKDSNTKKAGKTGPMKTLLVRVMTPDLRERLENLRKKPENIPQPISNTSRANLNKLLTDYTEMKKAILHVYWEEFQKDPVGLMSRVAQPASKKIDQNKLKPEMDEKGNLTTAGFACSQCGQPLFVYKLEQVSEKGKAYTNYFGRCNVAEHEKLILLAQLKPEKDSDEAVTYSLGKFGQRALDFYSIHVTKESTHPVKPLAQIAGNRYASPVGKALSDACMGTIASFLSKYQDIIIEHQKVVKGNQKRLESLRELAGKENLEYPSVTLPPQPHTKEGVDAYNEVIARVRMWVNLNLWQKLKLSRDDAKPLLRLKGFPSFPLVERQANEVDWWDMVCNVKKLINEKKEDGKVFWQNLAGYKRQEALRPYLSSEEDRKKGKKFARYQLGDLLLHLEKKHGEDWGKVYDEAWERIDKKVEGLSKHIKLEEERRSEDAQSKAALTDWLRAKASFVIEGLKEADKDEFCRCELKLQKWYGDLRGKPFAIEAENSILDISGFSKQYNCAFIWQKDGVKKLNLYLIINYFKGGKLRFKKIKPEAFEANRFYTVINKKSGEIVPMEVNFNFDDPNLIILPLAFGKRQGREFIWNDLLSLETGSLKLANGRVIEKTLYNRRTRQDEPALFVALTFERREVLDSSNIKPMNLIGVDRGENIPAVIALTDPEGCPLSRFKDSLGNPTHILRIGESYKEKQRTIQAKKEVEQRRAGGYSRKYASKAKNLADDMVRNTARDLLYYAVTQDAMLIFENLSRGFGRQGKRTFMAERQYTRMEDWLTAKLAYEGLPSKTYLSKTLAQYTSKTCSNCGFTITSADYDRVLEKLKKTATGWMTTINGKELKVEGQITYYNRYKRQNVVKDLSVELDRLSEESVNNDISSWTKGRSGEALSLLKKRFSHRPVQEKFVCLNCEFETHADEQAALNIARSWLFLRSQEYKKYQTNKTTGKNTDKRAFVETWQSFYRKKLKEVWKPAV

SEQ ID NO: 39185 - protein, 978 aa, synthetic construct
  REGION 1..978: note = engineered CasX variant
QEIKRINKIRRRLVKDSNTKKAGKTGPMKTLLVRVMTPDLRERLENLRKKPENIPQPISNTSRANLNKLLTDYTEMKKAILHVYWEEFQKDPVGLMSRVAQPASKKIDQNKLKPEMDEKGNLTTAGFACSQCGQPLFVYKLEQVSEKGKAYTNYFGRCNVAEHEKLILLAQLKPEKDSDEAVTYSLGKFGQRALDFYSIHVTKESTHPVKPLAQIAGNRYASYPVGKALSDACMGTIASFLSKYQDIIIEHQKVVKGNQKRLESLRELAGKENLEYPSVTLPPQPHTKEGVDAYNEVIARVRMWVNLNLWQKLKLSRDDAKPLLRLKKFPSFPLVERQANEVDWWDMVCNVKKLINEKKEDGKVFWQNLAGYKRQEALRPYLSSEEDRKKGKKFARYQLGDLLLHLEKKHGEDWGKVYDEAWERIDKKVEGLSKHIKLEEERRSEDAQSKAALTDWLRAKASFVIEGLKEADKDEFCRCELKLQKWYGDLRGKPFAIEAENSILDISGFSKQYNCAFIWQKDGVKKLNLYLIINYFKGGKLRFKKIKPEAFEANRFYTVINKKSGEIVPMEVNFNFDDPNLIILPLAFGKRQGREFIWNDLLSLETGSLKLANGRVIEKTLYNRRTRQDEPALFVALTFERREVLDSSNIKPMNLIGVDRGENIPAVIALTDPEGCPLSRFKDSLGNPTHILRIGESYKEKQRTIQAKKEVEQRRAGGYSRKYASKAKNLADDMVRNTARDLLYYAVTQDAMLIFENLSRGFGRQGKRTFMAERQYTRMEDWLTAKLAYEGLPSKTYLSKTLAQYTSKTCSNCGFTITSADYDRVLEKLKKTATGWMTTINGKELKVEGQITYYNRYKRQNVVKDLSVELDRLSEESVNNDISSWTKGRSGEALSLLKKRFSHRPVQEKFVCLNCEFETHADEQAALNIARSWLFLRSQEYKKYQTNKTTGNTDKRAFVETWQSFYRKKLKEVWKPAV

SEQ ID NO: 39186 - protein, 978 aa, synthetic construct
  REGION 1..978: note = engineered CasX variant
QEIKRINKIRRRLVKDSNTKKAGKTGPMKTLLVRVMTPDLRERLENLRKKPENIPQPISNTSRANLNKLLTDYTEMKKAILHVYWEEFQKDPVGLMSRVAQPASKKIDQNKLKPEMDEKGNLTTAGFACSQCGQPLFVYKLEQVSEKGKAYTNYFGRCNVAEHEKLILLAQLKPEKDSDEAVTYSLGKFGQRALDFYSIHVTKESTHPVKPLAQIAGNRYASHPVGKALSDACMGTIASFLSKYQDIIIEHQKVVKGNQKRLESLRELAGKENLEYPSVTLPPQPHTKEGVDAYNEVIARVRMWVNLNLWQKLKLSRDDAKPLLRLKKFPSFPLVERQANEVDWWDMVCNVKKLINEKKEDGKVFWQNLAGYKRQEALRPYLSSEEDRKKGKKFARYQLGDLLLHLEKKHGEDWGKVYDEAWERIDKKVEGLSKHIKLEEERRSEDAQSKAALTDWLRAKASFVIEGLKEADKDEFCRCELKLQKWYGDLRGKPFAIEAENSILDISGFSKQYNCAFIWQKDGVKKLNLYLIINYFKGGKLRFKKIKPEAFEANRFYTVINKKSGEIVPMEVNFNFDDPNLIILPLAFGKRQGREFIWNDLLSLETGSLKLANGRVIEKTLYNRRTRQDEPALFVALTFERREVLDSSNIKPMNLIGVDRGENIPAVIALTDPEGCPLSRFKDSLGNPTHILRIGESYKEKQRTIQAKKEVEQRRAGGYSRKYASKAKNLADDMVRNTARDLLYYAVTQDAMLIFENLSRGFGRQGKRTFMAERQYTRMEDWLTAKLAYEGLPSKTYLSKTLAQYTSKTCSNCGFTITSADYDRVLEKLKKTATGWMTTINGKELKVEGQITYYNRYKRQNVVKDLSVELDRLSEESVNNDISSWTKGRSGEALSLLKKRFSHRPVQEKFVCLNCEFETHADEQAALNIARSWLFLRSQEYKKYQTNKTTGNTDKRAFVETWQSFYRKKLKEVWKPAV

SEQ ID NO: 39187 - protein, 978 aa, synthetic construct
  REGION 1..978: note = engineered CasX variant
QEIKRINKIRRRLVKDSNTKKAGKTGPMKTLLVRVMTPDLRERLENLRKKPENIPQPISNTSRANLNKLLTDYTEMKKAILHVYWEEFQKDPVGLMSRVAQPASKKIDQNKLKPEMDEKGNLTTAGFACSQCGQPLFVYKLEQVSEKGKAYTNYFGRCNVAEHEKLILLAQLKPEKDSDEAVTYSLGKFGQRALDFYSIHVTKESTHPVKPLAQIAGNRYASSPVGKALSDACMGTIASFLSKYQDIIIEHQKVVKGNQKRLESLRELAGKENLEYPSVTLPPQPHTKEGVDAYNEVIARVRMWVNLNLWQKLKLSRDDAKPLLRLKKFPSFPLVERQANEVDWWDMVCNVKKLINEKKEDGKVFWQNLAGYKRQEALRPYLSSEEDRKKGKKFARYQLGDLLLHLEKKHGEDWGKVYDEAWERIDKKVEGLSKHIKLEEERRSEDAQSKAALTDWLRAKASFVIEGLKEADKDEFCRCELKLQKWYGDLRGKPFAIEAENSILDISGFSKQYNCAFIWQKDGVKKLNLYLIINYFKGGKLRFKKIKPEAFEANRFYTVINKKSGEIVPMEVNFNFDDPNLIILPLAFGKRQGREFIWNDLLSLETGSLKLANGRVIEKTLYNRRTRQDEPALFVALTFERREVLDSSNIKPMNLIGVDRGENIPAVIALTDPEGCPLSRFKDSLGNPTHILRIGESYKEKQRTIQAKKEVEQRRAGGYSRKYASKAKNLADDMVRNTARDLLYYAVTQDAMLIFENLSRGFGRQGKRTFMAERQYTRMEDWLTAKLAYEGLPSKTYLSKTLAQYTSKTCSNCGFTITSADYDRVLEKLKKTATGWMTTINGKELKVEGQITYYNRYKRQNVVKDLSVELDRLSEESVNNDISSWTKGRSGEALSLLKKRFSHRPVQEKFVCLNCEFETHADEQAALNIARSWLFLRSQEYKKYQTNKTTGNTDKRAFVETWQSFYRKKLKEVWKPAV

SEQ ID NO: 39188 - protein, 978 aa, synthetic construct
  REGION 1..978: note = engineered CasX variant
QEIKRINKIRRRLVKDSNTKKAGKTGPMKTLLVRVMTPDLRERLENLRKKPENIPQPISNTSRANLNKLLTDYTEMKKAILHVYWEEFQKDPVGLMSRVAQPASKKIDQNKLKPEMDEKGNLTTAGFACSQCGQPLFVYKLEQVSEKGKAYTNYFGRCNVAEHEKLILLAQLKPEKDSDEAVTYSLGKFGQRALDFYSIHVTKESTHPVKPLAQIAGNRYASTPVGKALSDACMGTIASFLSKYQDIIIEHQKVVKGNQKRLESLRELAGKENLEYPSVTLPPQPHTKEGVDAYNEVIARVRMWVNLNLWQKLKLSRDDAKPLLRLKKFPSFPLVERQANEVDWWDMVCNVKKLINEKKEDGKVFWQNLAGYKRQEALRPYLSSEEDRKKGKKFARYQLGDLLLHLEKKHGEDWGKVYDEAWERIDKKVEGLSKHIKLEEERRSEDAQSKAALTDWLRAKASFVIEGLKEADKDEFCRCELKLQKWYGDLRGKPFAIEAENSILDISGFSKQYNCAFIWQKDGVKKLNLYLIINYFKGGKLRFKKIKPEAFEANRFYTVINKKSGEIVPMEVNFNFDDPNLIILPLAFGKRQGREFIWNDLLSLETGSLKLANGRVIEKTLYNRRTRQDEPALFVALTFERREVLDSSNIKPMNLIGVDRGENIPAVIALTDPEGCPLSRFKDSLGNPTHILRIGESYKEKQRTIQAKKEVEQRRAGGYSRKYASKAKNLADDMVRNTARDLLYYAVTQDAMLIFENLSRGFGRQGKRTFMAERQYTRMEDWLTAKLAYEGLPSKTYLSKTLAQYTSKTCSNCGFTITSADYDRVLEKLKKTATGWMTTINGKELKVEGQITYYNRYKRQNVVKDLSVELDRLSEESVNNDISSWTKGRSGEALSLLKKRFSHRPVQEKFVCLNCEFETHADEQAALNIARSWLFLRSQEYKKYQTNKTTGNTDKRAFVETWQSFYRKKLKEVWKPAV

SEQ ID NO: 39189 - protein, 978 aa, synthetic construct
  REGION 1..978: note = engineered CasX variant
QEIKRINKIRRRLVKDSNTKKAGKTGPMKTLLVRVMTPDLRERLENLRKKPENIPQPISNTSRANLNKLLTDYTEMKKAILHVYWEEFQKDPVGLMSRVAQPASKKIDQNKLKPEMDEKGNLTTAGFACSQCGQPLFVYKLEQVSEKGKAYTNYFGRCNVAEHEKLILLAQLKPEKDSDEAVTYSLGKFGQRALDFYSIHVTKESTHPVKPLAQIAGNRYASAPVGKALSDACMGTIASFLSKYQDIIIEHQKVVKGNQKRLESLRELAGKENLEYPSVTLPPQPHTKEGVDAYNEVIARVRMWVNLNLWQKLKLSRDDAKPLLRLKKFPSFPLVERQANEVDWWDMVCNVKKLINEKKEDGKVFWQNLAGYKRQEALRPYLSSEEDRKKGKKFARYQLGDLLLHLEKKHGEDWGKVYDEAWERIDKKVEGLSKHIKLEEERRSEDAQSKAALTDWLRAKASFVIEGLKEADKDEFCRCELKLQKWYGDLRGKPFAIEAENSILDISGFSKQYNCAFIWQKDGVKKLNLYLIINYFKGGKLRFKKIKPEAFEANRFYTVINKKSGEIVPMEVNFNFDDPNLIILPLAFGKRQGREFIWNDLLSLETGSLKLANGRVIEKTLYNRRTRQDEPALFVALTFERREVLDSSNIKPMNLIGVDRGENIPAVIALTDPEGCPLSRFKDSLGNPTHILRIGESYKEKQRTIQAKKEVEQRRAGGYSRKYASKAKNLADDMVRNTARDLLYYAVTQDAMLIFENLSRGFGRQGKRTFMAERQYTRMEDWLTAKLAYEGLPSKTYLSKTLAQYTSKTCSNCGFTITSADYDRVLEKLKKTATGWMTTINGKELKVEGQITYYNRYKRQNVVKDLSVELDRLSEESVNNDISSWTKGRSGEALSLLKKRFSHRPVQEKFVCLNCEFETHADEQAALNIARSWLFLRSQEYKKYQTNKTTGNTDKRAFVETWQSFYRKKLKEVWKPAV

SEQ ID NO: 39190 - protein, 978 aa, synthetic construct
  REGION 1..978: note = engineered CasX variant
QEIKRINKIRRRLVKDSNTKKAGKTGPMKTLLVRVMTPDLRERLENLRKKPENIPQPISNTSRANLNKLLTDYTEMKKAILHVYWEEFQKDPVGLMSRVAQPASKKIDQNKLKPEMDEKGNLTTAGFACSQCGQPLFVYKLEQVSEKGKAYTNYFGRCNVAEHEKLILLAQLKPEKDSDEAVTYSLGKFGQRALDFYSIHVTKESTHPVKPLAQIAGNRYASVPVGKALSDACMGTIASFLSKYQDIIIEHQKVVKGNQKRLESLRELAGKENLEYPSVTLPPQPHTKEGVDAYNEVIARVRMWVNLNLWQKLKLSRDDAKPLLRLKKFPSFPLVERQANEVDWWDMVCNVKKLINEKKEDGKVFWQNLAGYKRQEALRPYLSSEEDRKKGKKFARYQLGDLLLHLEKKHGEDWGKVYDEAWERIDKKVEGLSKHIKLEEERRSEDAQSKAALTDWLRAKASFVIEGLKEADKDEFCRCELKLQKWYGDLRGKPFAIEAENSILDISGFSKQYNCAFIWQKDGVKKLNLYLIINYFKGGKLRFKKIKPEAFEANRFYTVINKKSGEIVPMEVNFNFDDPNLIILPLAFGKRQGREFIWNDLLSLETGSLKLANGRVIEKTLYNRRTRQDEPALFVALTFERREVLDSSNIKPMNLIGVDRGENIPAVIALTDPEGCPLSRFKDSLGNPTHILRIGESYKEKQRTIQAKKEVEQRRAGGYSRKYASKAKNLADDMVRNTARDLLYYAVTQDAMLIFENLSRGFGRQGKRTFMAERQYTRMEDWLTAKLAYEGLPSKTYLSKTLAQYTSKTCSNCGFTITSADYDRVLEKLKKTATGWMTTINGKELKVEGQITYYNRYKRQNVVKDLSVELDRLSEESVNNDISSWTKGRSGEALSLLKKRFSHRPVQEKFVCLNCEFETHADEQAALNIARSWLFLRSQEYKKYQTNKTTGNTDKRAFVETWQSFYRKKLKEVWKPAV

SEQ ID NO: 39191 - protein, 978 aa, synthetic construct
  REGION 1..978: note = engineered CasX variant
QEIKRINKIRRRLVKDSNTKKAGKTGPMKTLLVRVMTPDLRERLENLRKKPENIPQPISNTSRANLNKLLTDYTEMKKAILHVYWEEFQKDPVGLMSRVAQPASKKIDQNKLKPEMDEKGNLTTAGFACSQCGQPLFVYKLEQVSEKGKAYTNYFGRCNVAEHEKLIKLAQLKPEKDSDEAVTYSLGKFGQRALDFYSIHVTKESTHPVKPLAQIAGNRYASGPVGKALSDACMGTIASFLSKYQDIIIEHQKVVKGNQKRLESLRELAGKENLEYPSVTLPPQPHTKEGVDAYNEVIARVRMWVNLNLWQKLKLSRDDAKPLLRLKKFPSFPLVERQANEVDWWDMVCNVKKLINEKKEDGKVFWQNLAGYKRQEALRPYLSSEEDRKKGKKFARYQLGDLLLHLEKKHGEDWGKVYDEAWERIDKKVEGLSKHIKLEEERRSEDAQSKAALTDWLRAKASFVIEGLKEADKDEFCRCELKLQKWYGDLRGKPFAIEAENSILDISGFSKQYNCAFIWQKDGVKKLNLYLIINYFKGGKLRFKKIKPEAFEANRFYTVINKKSGEIVPMEVNFNFDDPNLIILPLAFGKRQGREFIWNDLLSLETGSLKLANGRVIEKTLYNRRTRQDEPALFVALTFERREVLDSSNIKPMNLIGVDRGENIPAVIALTDPEGCPLSRFKDSLGNPTHILRIGESYKEKQRTIQAKKEVEQRRAGGYSRKYASKAKNLADDMVRNTARDLLYYAVTQDAMLIFENLSRGFGRQGKRTFMAERQYTRMEDWLTAKLAYEGLPSKTYLSKTLAQYTSKTCSNCGFTITSADYDRVLEKLKKTATGWMTTINGKELKVEGQITYYNRYKRQNVVKDLSVELDRLSEESVNNDISSWTKGRSGEALSLLKKRFSHRPVQEKFVCLNCEFETHADEQAALNIARSWLFLRSQEYKKYQTNKTTGNTDKRAFVETWQSFYRKKLKEVWKPAV

SEQ ID NO: 39192 - protein, 977 aa, synthetic construct
  REGION 1..977: note = engineered CasX variant
QEIKRINKIRRRLVKDSNTKKAGKTGPMKTLLVRVMTPDLRERLENLRKKPENIPQPISNTSRANLNKLLTDYTEMKKAILHVYWEEFQKDPVGLMSRVAQPASKKIDQNKLKPEMDEKGNLTTAGFACSQCGQPLFVYKLEQVSEKGKAYTNYFGRCNVAEHEKLILLAQLKPEKDSDEAVTYSLGKFGQRALDFYSIHVTKESTHPVKPLAQIAGNRYASPVGKALSDACMGTIASFLSKYQDIIIEHQKVVKGNQKRLESLRELAGKENLEYPSVTLPPQPHTKEGVDAYNEVIARVRMWVNLNLWQKLKLSRDDAKPLLRLKKFPSFPLVERQANEVDWWDMVCNVKKLINEKKEDGKVFWQNLAGYKRQEALRPYLSSEEDRKKGKKFARYQLGDLLLHLEKKHGEDWGKVYDEAWERIDKKVEGLSKHIKLEEERRSEDAQSKAALTDWLRAKASFVIEGLKEADKDEFCRCELKLQKWYGDLRGKPFAIEAENSILDISGFSKQYNCAFIWQKDGVKKLNLYLIINYFKGGKLRFKKIKPEAFEANRFYTVINKKSGEIVPMEVNFNFDDPNLIILPLAFGKRQGREFIWNDLLSLETGSLKLANGRVIEKTLYNRRTRQDEPALFVALTFERREVLDSSNIKPMNLIGVDRGENIPAVIALTDPEGCPLSRFKDSLGNPTHILRIGESYKEKQRTIQAKKEVEQRRAGGYSRKYASKAKNLADDMVRNTARDLLYYAVTQDAMLIFENLSRGFGRQGKRTFMAERQYTRMEDWLTAKLAYEGLPSKTYLSKTLAQYTSKTCSNCGFTITSADYDRVLEKLKKTATGWMTTINGKELKVEGQITYYNRYKRQNVVKDLSVELDRLSEESVNNDISSWTKGRSGEALSLLKKRFSHRPVQEKFVCLNCEFETHADEQAALNIARSWLFLRSQEYKKYQTNKTTGNTDKRAFVETWQSFYRKKLKEVWKPAV

SEQ ID NO: 39193 - protein, 978 aa, synthetic construct
  REGION 1..978: note = engineered CasX variant
QEIKRINKIRRRLVKDSNTKKAGKTGPMKTLLVRVMTPDLRERLENLRKKPENIPQPISNTSRANLNKLLTDYTEMKKAILHVYWEEFQKDPVGLMSRVAQPASKKIDQNKLKPEMDEKGNLTTAGFACSQCGQPLFVYKLEQVSEKGKAYTNYFGRCNVAEHEKLILLAQLKPEKDSDEAVTYSLGKFGQRALDFYSIHVTKESTHPVKPLAQIAGNRYASYPVGKALSDACMGTIASFLSKYQDIIIEHQKVVKGNQKRLESLRELAGKENLEYPSVTLPPQPHTKEGVDAYNEVIARVRMWVNLNLWQKLKLSRDDAKPLLRLKGFPSFPLVERQANEVDWWDMVCNVKKLINEKKEDGKVFWQNLAGYKRQEALRPYLSSEEDRKKGKKFARYQLGDLLLHLEKKHGEDWGKVYDEAWERIDKKVEGLSKHIKLEEERRSEDAQSKAALTDWLRAKASFVIEGLKEADKDEFCRCELKLQKWYGDLRGKPFAIEAENSILDISGFSKQYNCAFIWQKDGVKKLNLYLIINYFKGGKLRFKKIKPEAFEANRFYTVINKKSGEIVPMEVNFNFDDPNLIILPLAFGKRQGREFIWNDLLSLETGSLKLANGRVIEKTLYNRRTRQDEPALFVALTFERREVLDSSNIKPMNLIGVDRGENIPAVIALTDPEGCPLSRFKDSLGNPTHILRIGERYKEKQRTIQAKKEVEQRRAGGYSRKYASKAKNLADDMVRNTARDLLYYAVTQDAMLIFENLSRGFGRQGKRTFMAERQYTRMEDWLTAKLAYEGLPSKTYLSKTLAQYTSKTCSNCGFTITSADYDRVLEKLKKTATGWMTTINGKELKVEGQITYYNRYKRQNVVKDLSVELDRLSEESVNNDISSWTKGRSGEALSLLKKRFSHRPVQEKFVCLNCEFETHADEQAALNIARSWLFLRSQEYKKYQTNKTTGNTDKRAFVETWQSFYRKKLKEVWKPAV

SEQ ID NO: 39194 - protein, 978 aa, synthetic construct
  REGION 1..978: note = engineered CasX variant
QEIKRINKIRRRLVKDSNTKKAGKTGPMKTLLVRVMTPDLRERLENLRKKPENIPQPISNTSRANLNKLLTDYTEMKKAILHVYWEEFQKDPVGLMSRVAQPASKKIDQNKLKPEMDEKGNLTTAGFACSQCGQPLFVYKLEQVSEKGKAYTNYFGRCNVAEHEKLILLAQLKPEKDSDEAVTYSLGKFGQRALDFYSIHVTKESTHPVKPLAQIAGNRYASHPVGKALSDACMGTIASFLSKYQDIIIEHQKVVKGNQKRLESLRELAGKENLEYPSVTLPPQPHTKEGVDAYNEVIARVRMWVNLNLWQKLKLSRDDAKPLLRLKGFPSFPLVERQANEVDWWDMVCNVKKLINEKKEDGKVFWQNLAGYKRQEALRPYLSSEEDRKKGKKFARYQLGDLLLHLEKKHGEDWGKVYDEAWERIDKKVEGLSKHIKLEEERRSEDAQSKAALTDWLRAKASFVIEGLKEADKDEFCRCELKLQKWYGDLRGKPFAIEAENSILDISGFSKQYNCAFIWQKDGVKKLNLYLIINYFKGGKLRFKKIKPEAFEANRFYTVINKKSGEIVPMEVNFNFDDPNLIILPLAFGKRQGREFIWNDLLSLETGSLKLANGRVIEKTLYNRRTRQDEPALFVALTFERREVLDSSNIKPMNLIGVDRGENIPAVIALTDPEGCPLSRFKDSLGNPTHILRIGERYKEKQRTIQAKKEVEQRRAGGYSRKYASKAKNLADDMVRNTARDLLYYAVTQDAMLIFENLSRGFGRQGKRTFMAERQYTRMEDWLTAKLAYEGLPSKTYLSKTLAQYTSKTCSNCGFTITSADYDRVLEKLKKTATGWMTTINGKELKVEGQITYYNRYKRQNVVKDLSVELDRLSEESVNNDISSWTKGRSGEALSLLKKRFSHRPVQEKFVCLNCEFETHADEQAALNIARSWLFLRSQEYKKYQTNKTTGNTDKRAFVETWQSFYRKKLKEVWKPAV

SEQ ID NO: 39195 - protein, 978 aa, synthetic construct
  REGION 1..978: note = engineered CasX variant
QEIKRINKIRRRLVKDSNTKKAGKTGPMKTLLVRVMTPDLRERLENLRKKPENIPQPISNTSRANLNKLLTDYTEMKKAILHVYWEEFQKDPVGLMSRVAQPASKKIDQNKLKPEMDEKGNLTTAGFACSQCGQPLFVYKLEQVSEKGKAYTNYFGRCNVAEHEKLILLAQLKPEKDSDEAVTYSLGKFGQRALDFYSIHVTKESTHPVKPLAQIAGNRYASSPVGKALSDACMGTIASFLSKYQDIIIEHQKVVKGNQKRLESLRELAGKENLEYPSVTLPPQPHTKEGVDAYNEVIARVRMWVNLNLWQKLKLSRDDAKPLLRLKGFPSFPLVERQANEVDWWDMVCNVKKLINEKKEDGKVFWQNLAGYKRQEALRPYLSSEEDRKKGKKFARYQLGDLLLHLEKKHGEDWGKVYDEAWERIDKKVEGLSKHIKLEEERRSEDAQSKAALTDWLRAKASFVIEGLKEADKDEFCRCELKLQKWYGDLRGKPFAIEAENSILDISGFSKQYNCAFIWQKDGVKKLNLYLIINYFKGGKLRFKKIKPEAFEANRFYTVINKKSGEIVPMEVNFNFDDPNLIILPLAFGKRQGREFIWNDLLSLETGSLKLANGRVIEKTLYNRRTRQDEPALFVALTFERREVLDSSNIKPMNLIGVDRGENIPAVIALTDPEGCPLSRFKDSLGNPTHILRIGERYKEKQRTIQAKKEVEQRRAGGYSRKYASKAKNLADDMVRNTARDLLYYAVTQDAMLIFENLSRGFGRQGKRTFMAERQYTRMEDWLTAKLAYEGLPSKTYLSKTLAQYTSKTCSNCGFTITSADYDRVLEKLKKTATGWMTTINGKELKVEGQITYYNRYKRQNVVKDLSVELDRLSEESVNNDISSWTKGRSGEALSLLKKRFSHRPVQEKFVCLNCEFETHADEQAALNIARSWLFLRSQEYKKYQTNKTTGNTDKRAFVETWQSFYRKKLKEVWKPAV

SEQ ID NO: 39196 - protein, 978 aa, synthetic construct
  REGION 1..978: note = engineered CasX variant
QEIKRINKIRRRLVKDSNTKKAGKTGPMKTLLVRVMTPDLRERLENLRKKPENIPQPISNTSRANLNKLLTDYTEMKKAILHVYWEEFQKDPVGLMSRVAQPASKKIDQNKLKPEMDEKGNLTTAGFACSQCGQPLFVYKLEQVSEKGKAYTNYFGRCNVAEHEKLILLAQLKPEKDSDEAVTYSLGKFGQRALDFYSIHVTKESTHPVKPLAQIAGNRYASTPVGKALSDACMGTIASFLSKYQDIIIEHQKVVKGNQKRLESLRELAGKENLEYPSVTLPPQPHTKEGVDAYNEVIARVRMWVNLNLWQKLKLSRDDAKPLLRLKGFPSFPLVERQANEVDWWDMVCNVKKLINEKKEDGKVFWQNLAGYKRQEALRPYLSSEEDRKKGKKFARYQLGDLLLHLEKKHGEDWGKVYDEAWERIDKKVEGLSKHIKLEEERRSEDAQSKAALTDWLRAKASFVIEGLKEADKDEFCRCELKLQKWYGDLRGKPFAIEAENSILDISGFSKQYNCAFIWQKDGVKKLNLYLIINYFKGGKLRFKKIKPEAFEANRFYTVINKKSGEIVPMEVNFNFDDPNLIILPLAFGKRQGREFIWNDLLSLETGSLKLANGRVIEKTLYNRRTRQDEPALFVALTFERREVLDSSNIKPMNLIGVDRGENIPAVIALTDPEGCPLSRFKDSLGNPTHILRIGERYKEKQRTIQAKKEVEQRRAGGYSRKYASKAKNLADDMVRNTARDLLYYAVTQDAMLIFENLSRGFGRQGKRTFMAERQYTRMEDWLTAKLAYEGLPSKTYLSKTLAQYTSKTCSNCGFTITSADYDRVLEKLKKTATGWMTTINGKELKVEGQITYYNRYKRQNVVKDLSVELDRLSEESVNNDISSWTKGRSGEALSLLKKRFSHRPVQEKFVCLNCEFETHADEQAALNIARSWLFLRSQEYKKYQTNKTTGNTDKRAFVETWQSFYRKKLKEVWKPAV

SEQ ID NO: 39197 - protein, 978 aa, synthetic construct
  REGION 1..978: note = engineered CasX variant
QEIKRINKIRRRLVKDSNTKKAGKTGPMKTLLVRVMTPDLRERLENLRKKPENIPQPISNTSRANLNKLLTDYTEMKKAILHVYWEEFQKDPVGLMSRVAQPASKKIDQNKLKPEMDEKGNLTTAGFACSQCGQPLFVYKLEQVSEKGKAYTNYFGRCNVAEHEKLILLAQLKPEKDSDEAVTYSLGKFGQRALDFYSIHVTKESTHPVKPLAQIAGNRYASAPVGKALSDACMGTIASFLSKYQDIIIEHQKVVKGNQKRLESLRELAGKENLEYPSVTLPPQPHTKEGVDAYNEVIARVRMWVNLNLWQKLKLSRDDAKPLLRLKGFPSFPLVERQANEVDWWDMVCNVKKLINEKKEDGKVFWQNLAGYKRQEALRPYLSSEEDRKKGKKFARYQLGDLLLHLEKKHGEDWGKVYDEAWERIDKKVEGLSKHIKLEEERRSEDAQSKAALTDWLRAKASFVIEGLKEADKDEFCRCELKLQKWYGDLRGKPFAIEAENSILDISGFSKQYNCAFIWQKDGVKKLNLYLIINYFKGGKLRFKKIKPEAFEANRFYTVINKKSGEIVPMEVNFNFDDPNLIILPLAFGKRQGREFIWNDLLSLETGSLKLANGRVIEKTLYNRRTRQDEPALFVALTFERREVLDSSNIKPMNLIGVDRGENIPAVIALTDPEGCPLSRFKDSLGNPTHILRIGERYKEKQRTIQAKKEVEQRRAGGYSRKYASKAKNLADDMVRNTARDLLYYAVTQDAMLIFENLSRGFGRQGKRTFMAERQYTRMEDWLTAKLAYEGLPSKTYLSKTLAQYTSKTCSNCGFTITSADYDRVLEKLKKTATGWMTTINGKELKVEGQITYYNRYKRQNVVKDLSVELDRLSEESVNNDISSWTKGRSGEALSLLKKRFSHRPVQEKFVCLNCEFETHADEQAALNIARSWLFLRSQEYKKYQTNKTTGNTDKRAFVETWQSFYRKKLKEVWKPAV

SEQ ID NO: 39198 - protein, 978 aa, synthetic construct
  REGION 1..978: note = engineered CasX variant
QEIKRINKIRRRLVKDSNTKKAGKTGPMKTLLVRVMTPDLRERLENLRKKPENIPQPISNTSRANLNKLLTDYTEMKKAILHVYWEEFQKDPVGLMSRVAQPASKKIDQNKLKPEMDEKGNLTTAGFACSQCGQPLFVYKLEQVSEKGKAYTNYFGRCNVAEHEKLILLAQLKPEKDSDEAVTYSLGKFGQRALDFYSIHVTKESTHPVKPLAQIAGNRYASVPVGKALSDACMGTIASFLSKYQDIIIEHQKVVKGNQKRLESLRELAGKENLEYPSVTLPPQPHTKEGVDAYNEVIARVRMWVNLNLWQKLKLSRDDAKPLLRLKGFPSFPLVERQANEVDWWDMVCNVKKLINEKKEDGKVFWQNLAGYKRQEALRPYLSSEEDRKKGKKFARYQLGDLLLHLEKKHGEDWGKVYDEAWERIDKKVEGLSKHIKLEEERRSEDAQSKAALTDWLRAKASFVIEGLKEADKDEFCRCELKLQKWYGDLRGKPFAIEAENSILDISGFSKQYNCAFIWQKDGVKKLNLYLIINYFKGGKLRFKKIKPEAFEANRFYTVINKKSGEIVPMEVNFNFDDPNLIILPLAFGKRQGREFIWNDLLSLETGSLKLANGRVIEKTLYNRRTRQDEPALFVALTFERREVLDSSNIKPMNLIGVDRGENIPAVIALTDPEGCPLSRFKDSLGNPTHILRIGERYKEKQRTIQAKKEVEQRRAGGYSRKYASKAKNLADDMVRNTARDLLYYAVTQDAMLIFENLSRGFGRQGKRTFMAERQYTRMEDWLTAKLAYEGLPSKTYLSKTLAQYTSKTCSNCGFTITSADYDRVLEKLKKTATGWMTTINGKELKVEGQITYYNRYKRQNVVKDLSVELDRLSEESVNNDISSWTKGRSGEALSLLKKRFSHRPVQEKFVCLNCEFETHADEQAALNIARSWLFLRSQEYKKYQTNKTTGNTDKRAFVETWQSFYRKKLKEVWKPAV

SEQ ID NO: 39199 - protein, 978 aa, synthetic construct
  REGION 1..978: note = engineered CasX variant
QEIKRINKIRRRLVKDSNTKKAGKTGPMKTLLVRVMTPDLRERLENLRKKPENIPQPISNTSRANLNKLLTDYTEMKKAILHVYWEEFQKDPVGLMSRVAQPASKKIDQNKLKPEMDEKGNLTTAGFACSQCGQPLFVYKLEQVSEKGKAYTNYFGRCNVAEHEKLIKLAQLKPEKDSDEAVTYSLGKFGQRALDFYSIHVTKESTHPVKPLAQIAGNRYASGPVGKALSDACMGTIASFLSKYQDIIIEHQKVVKGNQKRLESLRELAGKENLEYPSVTLPPQPHTKEGVDAYNEVIARVRMWVNLNLWQKLKLSRDDAKPLLRLKGFPSFPLVERQANEVDWWDMVCNVKKLINEKKEDGKVFWQNLAGYKRQEALRPYLSSEEDRKKGKKFARYQLGDLLLHLEKKHGEDWGKVYDEAWERIDKKVEGLSKHIKLEEERRSEDAQSKAALTDWLRAKASFVIEGLKEADKDEFCRCELKLQKWYGDLRGKPFAIEAENSILDISGFSKQYNCAFIWQKDGVKKLNLYLIINYFKGGKLRFKKIKPEAFEANRFYTVINKKSGEIVPMEVNFNFDDPNLIILPLAFGKRQGREFIWNDLLSLETGSLKLANGRVIEKTLYNRRTRQDEPALFVALTFERREVLDSSNIKPMNLIGVDRGENIPAVIALTDPEGCPLSRFKDSLGNPTHILRIGERYKEKQRTIQAKKEVEQRRAGGYSRKYASKAKNLADDMVRNTARDLLYYAVTQDAMLIFENLSRGFGRQGKRTFMAERQYTRMEDWLTAKLAYEGLPSKTYLSKTLAQYTSKTCSNCGFTITSADYDRVLEKLKKTATGWMTTINGKELKVEGQITYYNRYKRQNVVKDLSVELDRLSEESVNNDISSWTKGRSGEALSLLKKRFSHRPVQEKFVCLNCEFETHADEQAALNIARSWLFLRSQEYKKYQTNKTTGNTDKRAFVETWQSFYRKKLKEVWKPAV

SEQ ID NO: 39200 - protein, 977 aa, synthetic construct
  REGION 1..977: note = engineered CasX variant
QEIKRINKIRRRLVKDSNTKKAGKTGPMKTLLVRVMTPDLRERLENLRKKPENIPQPISNTSRANLNKLLTDYTEMKKAILHVYWEEFQKDPVGLMSRVAQPASKKIDQNKLKPEMDEKGNLTTAGFACSQCGQPLFVYKLEQVSEKGKAYTNYFGRCNVAEHEKLILLAQLKPEKDSDEAVTYSLGKFGQRALDFYSIHVTKESTHPVKPLAQIAGNRYASPVGKALSDACMGTIASFLSKYQDIIIEHQKVVKGNQKRLESLRELAGKENLEYPSVTLPPQPHTKEGVDAYNEVIARVRMWVNLNLWQKLKLSRDDAKPLLRLKGFPSFPLVERQANEVDWWDMVCNVKKLINEKKEDGKVFWQNLAGYKRQEALRPYLSSEEDRKKGKKFARYQLGDLLLHLEKKHGEDWGKVYDEAWERIDKKVEGLSKHIKLEEERRSEDAQSKAALTDWLRAKASFVIEGLKEADKDEFCRCELKLQKWYGDLRGKPFAIEAENSILDISGFSKQYNCAFIWQKDGVKKLNLYLIINYFKGGKLRFKKIKPEAFEANRFYTVINKKSGEIVPMEVNFNFDDPNLIILPLAFGKRQGREFIWNDLLSLETGSLKLANGRVIEKTLYNRRTRQDEPALFVALTFERREVLDSSNIKPMNLIGVDRGENIPAVIALTDPEGCPLSRFKDSLGNPTHILRIGERYKEKQRTIQAKKEVEQRRAGGYSRKYASKAKNLADDMVRNTARDLLYYAVTQDAMLIFENLSRGFGRQGKRTFMAERQYTRMEDWLTAKLAYEGLPSKTYLSKTLAQYTSKTCSNCGFTITSADYDRVLEKLKKTATGWMTTINGKELKVEGQITYYNRYKRQNVVKDLSVELDRLSEESVNNDISSWTKGRSGEALSLLKKRFSHRPVQEKFVCLNCEFETHADEQAALNIARSWLFLRSQEYKKYQTNKTTGNTDKRAFVETWQSFYRKKLKEVWKPAV

SEQ ID NO: 39201 - protein, 978 aa, synthetic construct
  REGION 1..978: note = engineered CasX variant
QEIKRINKIRRRLVKDSNTKKAGKTGPMKTLLVRVMTPDLRERLENLRKKPENIPQPISNTSRANLNKLLTDYTEMKKAILHVYWEEFQKDPVGLMSRVAQPASKKIDQNKLKPEMDEKGNLTTAGFACSQCGQPLFVYKLEQVSEKGKAYTNYFGRCNVAEHEKLILLAQLKPEKDSDEAVTYSLGKFGQRALDFYSIHVTKESTHPVKPLAQIAGNRYASYPVGKALSDACMGTIASFLSKYQDIIIEHQKVVKGNQKRLESLRELAGKENLEYPSVTLPPQPHTKEGVDAYNEVIARVRMWVNLNLWQKLKLSRDDAKPLLRLKGFPSFPLVERQANEVDWWDMVCNVKKLINEKKEDGKVFWQNLAGYKRQEALRPYLSSEEDRKKGKKFARYQLGDLLLHLEKKHGEDWGKVYDEAWERIDKKVEGLSKHIKLEEERRSEDAQSKAALTDWLRAKASFVIEGLKEADKDEFCRCELKLQKWYGDLRGKPFAIEAENSILDISGFSKQYNCAFIWQKDGVKKLNLYLIINYFKGGKLRFKKIKPEAFEANRFYTVINKKSGEIVPMEVNFNFDDPNLIILPLAFGKRQGREFIWNDLLSLETGSLQLANGRVIEKTLYNRRTRQDEPALFVALTFERREVLDSSNIKPMNLIGVDRGENIPAVIALTDPEGCPLSRFKDSLGNPTHILRIGESYKEKQRTIQAKKEVEQRRAGGYSRKYASKAKNLADDMVRNTARDLLYYAVTQDAMLIFENLSRGFGRQGKRTFMAERQYTRMEDWLTAKLAYEGLPSKTYLSKTLAQYTSKTCSNCGFTITSADYDRVLEKLKKTATGWMTTINGKELKVEGQITYYNRYKRQNVVKDLSVELDRLSEESVNNDISSWTKGRSGEALSLLKKRFSHRPVQEKFVCLNCEFETHADEQAALNIARSWLFLRSQEYKKYQTNKTTGNTDKRAFVETWQSFYRKKLKEVWKPAV

SEQ ID NO: 39202 - protein, 978 aa, synthetic construct
  REGION 1..978: note = engineered CasX variant
QEIKRINKIRRRLVKDSNTKKAGKTGPMKTLLVRVMTPDLRERLENLRKKPENIPQPISNTSRANLNKLLTDYTEMKKAILHVYWEEFQKDPVGLMSRVAQPASKKIDQNKLKPEMDEKGNLTTAGFACSQCGQPLFVYKLEQVSEKGKAYTNYFGRCNVAEHEKLILLAQLKPEKDSDEAVTYSLGKFGQRALDFYSIHVTKESTHPVKPLAQIAGNRYASHPVGKALSDACMGTIASFLSKYQDIIIEHQKVVKGNQKRLESLRELAGKENLEYPSVTLPPQPHTKEGVDAYNEVIARVRMWVNLNLWQKLKLSRDDAKPLLRLKGFPSFPLVERQANEVDWWDMVCNVKKLINEKKEDGKVFWQNLAGYKRQEALRPYLSSEEDRKKGKKFARYQLGDLLLHLEKKHGEDWGKVYDEAWERIDKKVEGLSKHIKLEEERRSEDAQSKAALTDWLRAKASFVIEGLKEADKDEFCRCELKLQKWYGDLRGKPFAIEAENSILDISGFSKQYNCAFIWQKDGVKKLNLYLIINYFKGGKLRFKKIKPEAFEANRFYTVINKKSGEIVPMEVNFNFDDPNLIILPLAFGKRQGREFIWNDLLSLETGSLQLANGRVIEKTLYNRRTRQDEPALFVALTFERREVLDSSNIKPMNLIGVDRGENIPAVIALTDPEGCPLSRFKDSLGNPTHILRIGESYKEKQRTIQAKKEVEQRRAGGYSRKYASKAKNLADDMVRNTARDLLYYAVTQDAMLIFENLSRGFGRQGKRTFMAERQYTRMEDWLTAKLAYEGLPSKTYLSKTLAQYTSKTCSNCGFTITSADYDRVLEKLKKTATGWMTTINGKELKVEGQITYYNRYKRQNVVKDLSVELDRLSEESVNNDISSWTKGRSGEALSLLKKRFSHRPVQEKFVCLNCEFETHADEQAALNIARSWLFLRSQEYKKYQTNKTTGNTDKRAFVETWQSFYRKKLKEVWKPAV

SEQ ID NO: 39203 - protein, 978 aa, synthetic construct
  REGION 1..978: note = engineered CasX variant
QEIKRINKIRRRLVKDSNTKKAGKTGPMKTLLVRVMTPDLRERLENLRKKPENIPQPISNTSRANLNKLLTDYTEMKKAILHVYWEEFQKDPVGLMSRVAQPASKKIDQNKLKPEMDEKGNLTTAGFACSQCGQPLFVYKLEQVSEKGKAYTNYFGRCNVAEHEKLILLAQLKPEKDSDEAVTYSLGKFGQRALDFYSIHVTKESTHPVKPLAQIAGNRYASSPVGKALSDACMGTIASFLSKYQDIIIEHQKVVKGNQKRLESLRELAGKENLEYPSVTLPPQPHTKEGVDAYNEVIARVRMWVNLNLWQKLKLSRDDAKPLLRLKGFPSFPLVERQANEVDWWDMVCNVKKLINEKKEDGKVFWQNLAGYKRQEALRPYLSSEEDRKKGKKFARYQLGDLLLHLEKKHGEDWGKVYDEAWERIDKKVEGLSKHIKLEEERRSEDAQSKAALTDWLRAKASFVIEGLKEADKDEFCRCELKLQKWYGDLRGKPFAIEAENSILDISGFSKQYNCAFIWQKDGVKKLNLYLIINYFKGGKLRFKKIKPEAFEANRFYTVINKKSGEIVPMEVNFNFDDPNLIILPLAFGKRQGREFIWNDLLSLETGSLQLANGRVIEKTLYNRRTRQDEPALFVALTFERREVLDSSNIKPMNLIGVDRGENIPAVIALTDPEGCPLSRFKDSLGNPTHILRIGESYKEKQRTIQAKKEVEQRRAGGYSRKYASKAKNLADDMVRNTARDLLYYAVTQDAMLIFENLSRGFGRQGKRTFMAERQYTRMEDWLTAKLAYEGLPSKTYLSKTLAQYTSKTCSNCGFTITSADYDRVLEKLKKTATGWMTTINGKELKVEGQITYYNRYKRQNVVKDLSVELDRLSEESVNNDISSWTKGRSGEALSLLKKRFSHRPVQEKFVCLNCEFETHADEQAALNIARSWLFLRSQEYKKYQTNKTTGNTDKRAFVETWQSFYRKKLKEVWKPAV

SEQ ID NO: 39204 - protein, 978 aa, synthetic construct
  REGION 1..978: note = engineered CasX variant
QEIKRINKIRRRLVKDSNTKKAGKTGPMKTLLVRVMTPDLRERLENLRKKPENIPQPISNTSRANLNKLLTDYTEMKKAILHVYWEEFQKDPVGLMSRVAQPASKKIDQNKLKPEMDEKGNLTTAGFACSQCGQPLFVYKLEQVSEKGKAYTNYFGRCNVAEHEKLILLAQLKPEKDSDEAVTYSLGKFGQRALDFYSIHVTKESTHPVKPLAQIAGNRYASTPVGKALSDACMGTIASFLSKYQDIIIEHQKVVKGNQKRLESLRELAGKENLEYPSVTLPPQPHTKEGVDAYNEVIARVRMWVNLNLWQKLKLSRDDAKPLLRLKGFPSFPLVERQANEVDWWDMVCNVKKLINEKKEDGKVFWQNLAGYKRQEALRPYLSSEEDRKKGKKFARYQLGDLLLHLEKKHGEDWGKVYDEAWERIDKKVEGLSKHIKLEEERRSEDAQSKAALTDWLRAKASFVIEGLKEADKDEFCRCELKLQKWYGDLRGKPFAIEAENSILDISGFSKQYNCAFIWQKDGVKKLNLYLIINYFKGGKLRFKKIKPEAFEANRFYTVINKKSGEIVPMEVNFNFDDPNLIILPLAFGKRQGREFIWNDLLSLETGSLQLANGRVIEKTLYNRRTRQDEPALFVALTFERREVLDSSNIKPMNLIGVDRGENIPAVIALTDPEGCPLSRFKDSLGNPTHILRIGESYKEKQRTIQAKKEVEQRRAGGYSRKYASKAKNLADDMVRNTARDLLYYAVTQDAMLIFENLSRGFGRQGKRTFMAERQYTRMEDWLTAKLAYEGLPSKTYLSKTLAQYTSKTCSNCGFTITSADYDRVLEKLKKTATGWMTTINGKELKVEGQITYYNRYKRQNVVKDLSVELDRLSEESVNNDISSWTKGRSGEALSLLKKRFSHRPVQEKFVCLNCEFETHADEQAALNIARSWLFLRSQEYKKYQTNKTTGNTDKRAFVETWQSFYRKKLKEVWKPAV

SEQ ID NO: 39205 - protein, 978 aa, synthetic construct
  REGION 1..978: note = engineered CasX variant
QEIKRINKIRRRLVKDSNTKKAGKTGPMKTLLVRVMTPDLRERLENLRKKPENIPQPISNTSRANLNKLLTDYTEMKKAILHVYWEEFQKDPVGLMSRVAQPASKKIDQNKLKPEMDEKGNLTTAGFACSQCGQPLFVYKLEQVSEKGKAYTNYFGRCNVAEHEKLILLAQLKPEKDSDEAVTYSLGKFGQRALDFYSIHVTKESTHPVKPLAQIAGNRYASAPVGKALSDACMGTIASFLSKYQDIIIEHQKVVKGNQKRLESLRELAGKENLEYPSVTLPPQPHTKEGVDAYNEVIARVRMWVNLNLWQKLKLSRDDAKPLLRLKGFPSFPLVERQANEVDWWDMVCNVKKLINEKKEDGKVFWQNLAGYKRQEALRPYLSSEEDRKKGKKFARYQLGDLLLHLEKKHGEDWGKVYDEAWERIDKKVEGLSKHIKLEEERRSEDAQSKAALTDWLRAKASFVIEGLKEADKDEFCRCELKLQKWYGDLRGKPFAIEAENSILDISGFSKQYNCAFIWQKDGVKKLNLYLIINYFKGGKLRFKKIKPEAFEANRFYTVINKKSGEIVPMEVNFNFDDPNLIILPLAFGKRQGREFIWNDLLSLETGSLQLANGRVIEKTLYNRRTRQDEPALFVALTFERREVLDSSNIKPMNLIGVDRGENIPAVIALTDPEGCPLSRFKDSLGNPTHILRIGESYKEKQRTIQAKKEVEQRRAGGYSRKYASKAKNLADDMVRNTARDLLYYAVTQDAMLIFENLSRGFGRQGKRTFMAERQYTRMEDWLTAKLAYEGLPSKTYLSKTLAQYTSKTCSNCGFTITSADYDRVLEKLKKTATGWMTTINGKELKVEGQITYYNRYKRQNVVKDLSVELDRLSEESVNNDISSWTKGRSGEALSLLKKRFSHRPVQEKFVCLNCEFETHADEQAALNIARSWLFLRSQEYKKYQTNKTTGNTDKRAFVETWQSFYRKKLKEVWKPAV

SEQ ID NO: 39206 - protein, 978 aa, synthetic construct
  REGION 1..978: note = engineered CasX variant
QEIKRINKIRRRLVKDSNTKKAGKTGPMKTLLVRVMTPDLRERLENLRKKPENIPQPISNTSRANLNKLLTDYTEMKKAILHVYWEEFQKDPVGLMSRVAQPASKKIDQNKLKPEMDEKGNLTTAGFACSQCGQPLFVYKLEQVSEKGKAYTNYFGRCNVAEHEKLILLAQLKPEKDSDEAVTYSLGKFGQRALDFYSIHVTKESTHPVKPLAQIAGNRYASVPVGKALSDACMGTIASFLSKYQDIIIEHQKVVKGNQKRLESLRELAGKENLEYPSVTLPPQPHTKEGVDAYNEVIARVRMWVNLNLWQKLKLSRDDAKPLLRLKGFPSFPLVERQANEVDWWDMVCNVKKLINEKKEDGKVFWQNLAGYKRQEALRPYLSSEEDRKKGKKFARYQLGDLLLHLEKKHGEDWGKVYDEAWERIDKKVEGLSKHIKLEEERRSEDAQSKAALTDWLRAKASFVIEGLKEADKDEFCRCELKLQKWYGDLRGKPFAIEAENSILDISGFSKQYNCAFIWQKDGVKKLNLYLIINYFKGGKLRFKKIKPEAFEANRFYTVINKKSGEIVPMEVNFNFDDPNLIILPLAFGKRQGREFIWNDLLSLETGSLQLANGRVIEKTLYNRRTRQDEPALFVALTFERREVLDSSNIKPMNLIGVDRGENIPAVIALTDPEGCPLSRFKDSLGNPTHILRIGESYKEKQRTIQAKKEVEQRRAGGYSRKYASKAKNLADDMVRNTARDLLYYAVTQDAMLIFENLSRGFGRQGKRTFMAERQYTRMEDWLTAKLAYEGLPSKTYLSKTLAQYTSKTCSNCGFTITSADYDRVLEKLKKTATGWMTTINGKELKVEGQITYYNRYKRQNVVKDLSVELDRLSEESVNNDISSWTKGRSGEALSLLKKRFSHRPVQEKFVCLNCEFETHADEQAALNIARSWLFLRSQEYKKYQTNKTTGNTDKRAFVETWQSFYRKKLKEVWKPAV

SEQ ID NO: 39207 - protein, 978 aa, synthetic construct
  REGION 1..978: note = engineered CasX variant
QEIKRINKIRRRLVKDSNTKKAGKTGPMKTLLVRVMTPDLRERLENLRKKPENIPQPISNTSRANLNKLLTDYTEMKKAILHVYWEEFQKDPVGLMSRVAQPASKKIDQNKLKPEMDEKGNLTTAGFACSQCGQPLFVYKLEQVSEKGKAYTNYFGRCNVAEHEKLIKLAQLKPEKDSDEAVTYSLGKFGQRALDFYSIHVTKESTHPVKPLAQIAGNRYASGPVGKALSDACMGTIASFLSKYQDIIIEHQKVVKGNQKRLESLRELAGKENLEYPSVTLPPQPHTKEGVDAYNEVIARVRMWVNLNLWQKLKLSRDDAKPLLRLKGFPSFPLVERQANEVDWWDMVCNVKKLINEKKEDGKVFWQNLAGYKRQEALRPYLSSEEDRKKGKKFARYQLGDLLLHLEKKHGEDWGKVYDEAWERIDKKVEGLSKHIKLEEERRSEDAQSKAALTDWLRAKASFVIEGLKEADKDEFCRCELKLQKWYGDLRGKPFAIEAENSILDISGFSKQYNCAFIWQKDGVKKLNLYLIINYFKGGKLRFKKIKPEAFEANRFYTVINKKSGEIVPMEVNFNFDDPNLIILPLAFGKRQGREFIWNDLLSLETGSLQLANGRVIEKTLYNRRTRQDEPALFVALTFERREVLDSSNIKPMNLIGVDRGENIPAVIALTDPEGCPLSRFKDSLGNPTHILRIGESYKEKQRTIQAKKEVEQRRAGGYSRKYASKAKNLADDMVRNTARDLLYYAVTQDAMLIFENLSRGFGRQGKRTFMAERQYTRMEDWLTAKLAYEGLPSKTYLSKTLAQYTSKTCSNCGFTITSADYDRVLEKLKKTATGWMTTINGKELKVEGQITYYNRYKRQNVVKDLSVELDRLSEESVNNDISSWTKGRSGEALSLLKKRFSHRPVQEKFVCLNCEFETHADEQAALNIARSWLFLRSQEYKKYQTNKTTGNTDKRAFVETWQSFYRKKLKEVWKPAV

SEQ ID NO: 39208 - protein, 977 aa, synthetic construct
  REGION 1..977: note = engineered CasX variant
QEIKRINKIRRRLVKDSNTKKAGKTGPMKTLLVRVMTPDLRERLENLRKKPENIPQPISNTSRANLNKLLTDYTEMKKAILHVYWEEFQKDPVGLMSRVAQPASKKIDQNKLKPEMDEKGNLTTAGFACSQCGQPLFVYKLEQVSEKGKAYTNYFGRCNVAEHEKLILLAQLKPEKDSDEAVTYSLGKFGQRALDFYSIHVTKESTHPVKPLAQIAGNRYASPVGKALSDACMGTIASFLSKYQDIIIEHQKVVKGNQKRLESLRELAGKENLEYPSVTLPPQPHTKEGVDAYNEVIARVRMWVNLNLWQKLKLSRDDAKPLLRLKGFPSFPLVERQANEVDWWDMVCNVKKLINEKKEDGKVFWQNLAGYKRQEALRPYLSSEEDRKKGKKFARYQLGDLLLHLEKKHGEDWGKVYDEAWERIDKKVEGLSKHIKLEEERRSEDAQSKAALTDWLRAKASFVIEGLKEADKDEFCRCELKLQKWYGDLRGKPFAIEAENSILDISGFSKQYNCAFIWQKDGVKKLNLYLIINYFKGGKLRFKKIKPEAFEANRFYTVINKKSGEIVPMEVNFNFDDPNLIILPLAFGKRQGREFIWNDLLSLETGSLQLANGRVIEKTLYNRRTRQDEPALFVALTFERREVLDSSNIKPMNLIGVDRGENIPAVIALTDPEGCPLSRFKDSLGNPTHILRIGESYKEKQRTIQAKKEVEQRRAGGYSRKYASKAKNLADDMVRNTARDLLYYAVTQDAMLIFENLSRGFGRQGKRTFMAERQYTRMEDWLTAKLAYEGLPSKTYLSKTLAQYTSKTCSNCGFTITSADYDRVLEKLKKTATGWMTTINGKELKVEGQITYYNRYKRQNVVKDLSVELDRLSEESVNNDISSWTKGRSGEALSLLKKRFSHRPVQEKFVCLNCEFETHADEQAALNIARSWLFLRSQEYKKYQTNKTTGNTDKRAFVETWQSFYRKKLKEVWKPAV

SEQ ID NO: 39209 - protein, 980 aa, synthetic construct
  REGION 1..980: note = engineered CasX variant
QEIKRINKIRRRLVKDSNTKKAGKTGPMKTLLVRVMTPDLRERLENLRKKPENIPQPISNTSRANLNKLLTDYTEMKKAILHVYWEEFQKDPVGLMSRVAQPASKKIDQNKLKPEMDEKGNLTTAGFACSQCGQPLFVYKLEQVSEKGKAYTNYFGRCNVAEHEKLILLAQLKPEKDSDEAVTYSLGKFGQRALDFYSIHVTKESTHPVKPLAQIAGNRYASYPVGKALSDACMGTIASFLSKYQDIIIEHQKVVKGNQKRLESLRELAGKENLEYPSVTLPPQPHTKEGVDAYNEVIARVRMWVNLNLWQKLKLSRDDAKPLLRLKGFPSFPLVERQANEVDWWDMVCNVKKLINEKKEDGKVFWQNLAGYKRQEALRPYLSSEEDRKKGKKFARYQLGDLLLHLEKKHGEDWGKVYDEAWERIDKKVEGLSKHIKLEEERRSEDAQSKAALTDWLRAKASFVIEGLKEADKDEFCRCELKLQKWYGDLRGKPFAIEAENSILDISGFSKQYNCAFIWQKDGVKKLNLYLIINYFKGGKLRFKKIKPEAFEANRFYTVINKKSGEIVPMEVNFNFDDPNLIILPLAFGKRQGREFIWNDLLSLETGSLKLANGRVIEKTLYNRRTRQDEPALFVALTFERREVLDSSNIKPMNLIGVDRGENIPAVIALTDPEGCPLSRFKDSLGNPTHILRIGESYKEKQRTIQAKKEVEQRRAGGYSRKYASKAKNLADDMVRNTARDLLYYAVTQDAMLIFENLSRGFGRQGKRTFMAERQYTRMEDWLTAKLAYEGLPSKTYLSKTLAQYTSKTCSNCGFTITSADYDRVLEKLKKTATGWMTTINGKELKVEGQITYYNRYKRQNVVKDLSVELDRLSEESVNNDISSWTKGRSGEALSLLKKRFSHRPVQEKFVCLNCGFETHADEQAALNIARSWLFLRSQEYKKYQTNKTSTGKNTDKRAFVETWQSFYRKKLKEVWKPAV

SEQ ID NO: 39210 - protein, 980 aa, synthetic construct
  REGION 1..980: note = engineered CasX variant
QEIKRINKIRRRLVKDSNTKKAGKTGPMKTLLVRVMTPDLRERLENLRKKPENIPQPISNTSRANLNKLLTDYTEMKKAILHVYWEEFQKDPVGLMSRVAQPASKKIDQNKLKPEMDEKGNLTTAGFACSQCGQPLFVYKLEQVSEKGKAYTNYFGRCNVAEHEKLILLAQLKPEKDSDEAVTYSLGKFGQRALDFYSIHVTKESTHPVKPLAQIAGNRYASHPVGKALSDACMGTIASFLSKYQDIIIEHQKVVKGNQKRLESLRELAGKENLEYPSVTLPPQPHTKEGVDAYNEVIARVRMWVNLNLWQKLKLSRDDAKPLLRLKGFPSFPLVERQANEVDWWDMVCNVKKLINEKKEDGKVFWQNLAGYKRQEALRPYLSSEEDRKKGKKFARYQLGDLLLHLEKKHGEDWGKVYDEAWERIDKKVEGLSKHIKLEEERRSEDAQSKAALTDWLRAKASFVIEGLKEADKDEFCRCELKLQKWYGDLRGKPFAIEAENSILDISGFSKQYNCAFIWQKDGVKKLNLYLIINYFKGGKLRFKKIKPEAFEANRFYTVINKKSGEIVPMEVNFNFDDPNLIILPLAFGKRQGREFIWNDLLSLETGSLKLANGRVIEKTLYNRRTRQDEPALFVALTFERREVLDSSNIKPMNLIGVDRGENIPAVIALTDPEGCPLSRFKDSLGNPTHILRIGESYKEKQRTIQAKKEVEQRRAGGYSRKYASKAKNLADDMVRNTARDLLYYAVTQDAMLIFENLSRGFGRQGKRTFMAERQYTRMEDWLTAKLAYEGLPSKTYLSKTLAQYTSKTCSNCGFTITSADYDRVLEKLKKTATGWMTTINGKELKVEGQITYYNRYKRQNVVKDLSVELDRLSEESVNNDISSWTKGRSGEALSLLKKRFSHRPVQEKFVCLNCGFETHADEQAALNIARSWLFLRSQEYKKYQTNKTSTGKNTDKRAFVETWQSFYRKKLKEVWKPAV

SEQ ID NO: 39211 - protein, 980 aa, synthetic construct
  REGION 1..980: note = engineered CasX variant
QEIKRINKIRRRLVKDSNTKKAGKTGPMKTLLVRVMTPDLRERLENLRKKPENIPQPISNTSRANLNKLLTDYTEMKKAILHVYWEEFQKDPVGLMSRVAQPASKKIDQNKLKPEMDEKGNLTTAGFACSQCGQPLFVYKLEQVSEKGKAYTNYFGRCNVAEHEKLILLAQLKPEKDSDEAVTYSLGKFGQRALDFYSIHVTKESTHPVKPLAQIAGNRYASSPVGKALSDACMGTIASFLSKYQDIIIEHQKVVKGNQKRLESLRELAGKENLEYPSVTLPPQPHTKEGVDAYNEVIARVRMWVNLNLWQKLKLSRDDAKPLLRLKGFPSFPLVERQANEVDWWDMVCNVKKLINEKKEDGKVFWQNLAGYKRQEALRPYLSSEEDRKKGKKFARYQLGDLLLHLEKKHGEDWGKVYDEAWERIDKKVEGLSKHIKLEEERRSEDAQSKAALTDWLRAKASFVIEGLKEADKDEFCRCELKLQKWYGDLRGKPFAIEAENSILDISGFSKQYNCAFIWQKDGVKKLNLYLIINYFKGGKLRFKKIKPEAFEANRFYTVINKKSGEIVPMEVNFNFDDPNLIILPLAFGKRQGREFIWNDLLSLETGSLKLANGRVIEKTLYNRRTRQDEPALFVALTFERREVLDSSNIKPMNLIGVDRGENIPAVIALTDPEGCPLSRFKDSLGNPTHILRIGESYKEKQRTIQAKKEVEQRRAGGYSRKYASKAKNLADDMVRNTARDLLYYAVTQDAMLIFENLSRGFGRQGKRTFMAERQYTRMEDWLTAKLAYEGLPSKTYLSKTLAQYTSKTCSNCGFTITSADYDRVLEKLKKTATGWMTTINGKELKVEGQITYYNRYKRQNVVKDLSVELDRLSEESVNNDISSWTKGRSGEALSLLKKRFSHRPVQEKFVCLNCGFETHADEQAALNIARSWLFLRSQEYKKYQTNKTSTGKNTDKRAFVETWQSFYRKKLKEVWKPAV

SEQ ID NO: 39212 - protein, 980 aa, synthetic construct
  REGION 1..980: note = engineered CasX variant
QEIKRINKIRRRLVKDSNTKKAGKTGPMKTLLVRVMTPDLRERLENLRKKPENIPQPISNTSRANLNKLLTDYTEMKKAILHVYWEEFQKDPVGLMSRVAQPASKKIDQNKLKPEMDEKGNLTTAGFACSQCGQPLFVYKLEQVSEKGKAYTNYFGRCNVAEHEKLILLAQLKPEKDSDEAVTYSLGKFGQRALDFYSIHVTKESTHPVKPLAQIAGNRYASTPVGKALSDACMGTIASFLSKYQDIIIEHQKVVKGNQKRLESLRELAGKENLEYPSVTLPPQPHTKEGVDAYNEVIARVRMWVNLNLWQKLKLSRDDAKPLLRLKGFPSFPLVERQANEVDWWDMVCNVKKLINEKKEDGKVFWQNLAGYKRQEALRPYLSSEEDRKKGKKFARYQLGDLLLHLEKKHGEDWGKVYDEAWERIDKKVEGLSKHIKLEEERRSEDAQSKAALTDWLRAKASFVIEGLKEADKDEFCRCELKLQKWYGDLRGKPFAIEAENSILDISGFSKQYNCAFIWQKDGVKKLNLYLIINYFKGGKLRFKKIKPEAFEANRFYTVINKKSGEIVPMEVNFNFDDPNLIILPLAFGKRQGREFIWNDLLSLETGSLKLANGRVIEKTLYNRRTRQDEPALFVALTFERREVLDSSNIKPMNLIGVDRGENIPAVIALTDPEGCPLSRFKDSLGNPTHILRIGESYKEKQRTIQAKKEVEQRRAGGYSRKYASKAKNLADDMVRNTARDLLYYAVTQDAMLIFENLSRGFGRQGKRTFMAERQYTRMEDWLTAKLAYEGLPSKTYLSKTLAQYTSKTCSNCGFTITSADYDRVLEKLKKTATGWMTTINGKELKVEGQITYYNRYKRQNVVKDLSVELDRLSEESVNNDISSWTKGRSGEALSLLKKRFSHRPVQEKFVCLNCGFETHADEQAALNIARSWLFLRSQEYKKYQTNKTSTGKNTDKRAFVETWQSFYRKKLKEVWKPAV

SEQ ID NO: 39213 - protein, 980 aa, synthetic construct
  REGION 1..980: note = engineered CasX variant
QEIKRINKIRRRLVKDSNTKKAGKTGPMKTLLVRVMTPDLRERLENLRKKPENIPQPISNTSRANLNKLLTDYTEMKKAILHVYWEEFQKDPVGLMSRVAQPASKKIDQNKLKPEMDEKGNLTTAGFACSQCGQPLFVYKLEQVSEKGKAYTNYFGRCNVAEHEKLILLAQLKPEKDSDEAVTYSLGKFGQRALDFYSIHVTKESTHPVKPLAQIAGNRYASAPVGKALSDACMGTIASFLSKYQDIIIEHQKVVKGNQKRLESLRELAGKENLEYPSVTLPPQPHTKEGVDAYNEVIARVRMWVNLNLWQKLKLSRDDAKPLLRLKGFPSFPLVERQANEVDWWDMVCNVKKLINEKKEDGKVFWQNLAGYKRQEALRPYLSSEEDRKKGKKFARYQLGDLLLHLEKKHGEDWGKVYDEAWERIDKKVEGLSKHIKLEEERRSEDAQSKAALTDWLRAKASFVIEGLKEADKDEFCRCELKLQKWYGDLRGKPFAIEAENSILDISGFSKQYNCAFIWQKDGVKKLNLYLIINYFKGGKLRFKKIKPEAFEANRFYTVINKKSGEIVPMEVNFNFDDPNLIILPLAFGKRQGREFIWNDLLSLETGSLKLANGRVIEKTLYNRRTRQDEPALFVALTFERREVLDSSNIKPMNLIGVDRGENIPAVIALTDPEGCPLSRFKDSLGNPTHILRIGESYKEKQRTIQAKKEVEQRRAGGYSRKYASKAKNLADDMVRNTARDLLYYAVTQDAMLIFENLSRGFGRQGKRTFMAERQYTRMEDWLTAKLAYEGLPSKTYLSKTLAQYTSKTCSNCGFTITSADYDRVLEKLKKTATGWMTTINGKELKVEGQITYYNRYKRQNVVKDLSVELDRLSEESVNNDISSWTKGRSGEALSLLKKRFSHRPVQEKFVCLNCGFETHADEQAALNIARSWLFLRSQEYKKYQTNKTSTGKNTDKRAFVETWQSFYRKKLKEVWKPAV

SEQ ID NO: 39214 - protein, 980 aa, synthetic construct
  REGION 1..980: note = engineered CasX variant
QEIKRINKIRRRLVKDSNTKKAGKTGPMKTLLVRVMTPDLRERLENLRKKPENIPQPISNTSRANLNKLLTDYTEMKKAILHVYWEEFQKDPVGLMSRVAQPASKKIDQNKLKPEMDEKGNLTTAGFACSQCGQPLFVYKLEQVSEKGKAYTNYFGRCNVAEHEKLILLAQLKPEKDSDEAVTYSLGKFGQRALDFYSIHVTKESTHPVKPLAQIAGNRYASVPVGKALSDACMGTIASFLSKYQDIIIEHQKVVKGNQKRLESLRELAGKENLEYPSVTLPPQPHTKEGVDAYNEVIARVRMWVNLNLWQKLKLSRDDAKPLLRLKGFPSFPLVERQANEVDWWDMVCNVKKLINEKKEDGKVFWQNLAGYKRQEALRPYLSSEEDRKKGKKFARYQLGDLLLHLEKKHGEDWGKVYDEAWERIDKKVEGLSKHIKLEEERRSEDAQSKAALTDWLRAKASFVIEGLKEADKDEFCRCELKLQKWYGDLRGKPFAIEAENSILDISGFSKQYNCAFIWQKDGVKKLNLYLIINYFKGGKLRFKKIKPEAFEANRFYTVINKKSGEIVPMEVNFNFDDPNLIILPLAFGKRQGREFIWNDLLSLETGSLKLANGRVIEKTLYNRRTRQDEPALFVALTFERREVLDSSNIKPMNLIGVDRGENIPAVIALTDPEGCPLSRFKDSLGNPTHILRIGESYKEKQRTIQAKKEVEQRRAGGYSRKYASKAKNLADDMVRNTARDLLYYAVTQDAMLIFENLSRGFGRQGKRTFMAERQYTRMEDWLTAKLAYEGLPSKTYLSKTLAQYTSKTCSNCGFTITSADYDRVLEKLKKTATGWMTTINGKELKVEGQITYYNRYKRQNVVKDLSVELDRLSEESVNNDISSWTKGRSGEALSLLKKRFSHRPVQEKFVCLNCGFETHADEQAALNIARSWLFLRSQEYKKYQTNKTSTGKNTDKRAFVETWQSFYRKKLKEVWKPAV

SEQ ID NO: 39215 - protein, 980 aa, synthetic construct
  REGION 1..980: note = engineered CasX variant
QEIKRINKIRRRLVKDSNTKKAGKTGPMKTLLVRVMTPDLRERLENLRKKPENIPQPISNTSRANLNKLLTDYTEMKKAILHVYWEEFQKDPVGLMSRVAQPASKKIDQNKLKPEMDEKGNLTTAGFACSQCGQPLFVYKLEQVSEKGKAYTNYFGRCNVAEHEKLIKLAQLKPEKDSDEAVTYSLGKFGQRALDFYSIHVTKESTHPVKPLAQIAGNRYASGPVGKALSDACMGTIASFLSKYQDIIIEHQKVVKGNQKRLESLRELAGKENLEYPSVTLPPQPHTKEGVDAYNEVIARVRMWVNLNLWQKLKLSRDDAKPLLRLKGFPSFPLVERQANEVDWWDMVCNVKKLINEKKEDGKVFWQNLAGYKRQEALRPYLSSEEDRKKGKKFARYQLGDLLLHLEKKHGEDWGKVYDEAWERIDKKVEGLSKHIKLEEERRSEDAQSKAALTDWLRAKASFVIEGLKEADKDEFCRCELKLQKWYGDLRGKPFAIEAENSILDISGFSKQYNCAFIWQKDGVKKLNLYLIINYFKGGKLRFKKIKPEAFEANRFYTVINKKSGEIVPMEVNFNFDDPNLIILPLAFGKRQGREFIWNDLLSLETGSLKLANGRVIEKTLYNRRTRQDEPALFVALTFERREVLDSSNIKPMNLIGVDRGENIPAVIALTDPEGCPLSRFKDSLGNPTHILRIGESYKEKQRTIQAKKEVEQRRAGGYSRKYASKAKNLADDMVRNTARDLLYYAVTQDAMLIFENLSRGFGRQGKRTFMAERQYTRMEDWLTAKLAYEGLPSKTYLSKTLAQYTSKTCSNCGFTITSADYDRVLEKLKKTATGWMTTINGKELKVEGQITYYNRYKRQNVVKDLSVELDRLSEESVNNDISSWTKGRSGEALSLLKKRFSHRPVQEKFVCLNCGFETHADEQAALNIARSWLFLRSQEYKKYQTNKTSTGKNTDKRAFVETWQSFYRKKLKEVWKPAV

SEQ ID NO: 39216 - protein, 979 aa, synthetic construct
  REGION 1..979: note = engineered CasX variant
QEIKRINKIRRRLVKDSNTKKAGKTGPMKTLLVRVMTPDLRERLENLRKKPENIPQPISNTSRANLNKLLTDYTEMKKAILHVYWEEFQKDPVGLMSRVAQPASKKIDQNKLKPEMDEKGNLTTAGFACSQCGQPLFVYKLEQVSEKGKAYTNYFGRCNVAEHEKLILLAQLKPEKDSDEAVTYSLGKFGQRALDFYSIHVTKESTHPVKPLAQIAGNRYASPVGKALSDACMGTIASFLSKYQDIIIEHQKVVKGNQKRLESLRELAGKENLEYPSVTLPPQPHTKEGVDAYNEVIARVRMWVNLNLWQKLKLSRDDAKPLLRLKGFPSFPLVERQANEVDWWDMVCNVKKLINEKKEDGKVFWQNLAGYKRQEALRPYLSSEEDRKKGKKFARYQLGDLLLHLEKKHGEDWGKVYDEAWERIDKKVEGLSKHIKLEEERRSEDAQSKAALTDWLRAKASFVIEGLKEADKDEFCRCELKLQKWYGDLRGKPFAIEAENSILDISGFSKQYNCAFIWQKDGVKKLNLYLIINYFKGGKLRFKKIKPEAFEANRFYTVINKKSGEIVPMEVNFNFDDPNLIILPLAFGKRQGREFIWNDLLSLETGSLKLANGRVIEKTLYNRRTRQDEPALFVALTFERREVLDSSNIKPMNLIGVDRGENIPAVIALTDPEGCPLSRFKDSLGNPTHILRIGESYKEKQRTIQAKKEVEQRRAGGYSRKYASKAKNLADDMVRNTARDLLYYAVTQDAMLIFENLSRGFGRQGKRTFMAERQYTRMEDWLTAKLAYEGLPSKTYLSKTLAQYTSKTCSNCGFTITSADYDRVLEKLKKTATGWMTTINGKELKVEGQITYYNRYKRQNVVKDLSVELDRLSEESVNNDISSWTKGRSGEALSLLKKRFSHRPVQEKFVCLNCGFETHADEQAALNIARSWLFLRSQEYKKYQTNKTSTGKNTDKRAFVETWQSFYRKKLKEVWKPAV

SEQ ID NO: 39217 - protein, 979 aa, synthetic construct
  REGION 1..979: note = engineered CasX variant
QEIKRINKIRRRLVKDSNTKKAGKTGPMKTLLVRVMTPDLRERLENLRKKPENIPQPISNTSRANLNKLLTDYTEMKKAILHVYWEEFQKDPVGLMSRVAQPASKKIDQNKLKPEMDEKGNLTTAGFACSQCGQPLFVYKLEQVSEKGKAYTNYFGRCNVAEHEKLILLAQLKPEKDSDEAVTYSLGKFGQRALDFYSIHVTKESTHPVKPLAQIAGNRYASYPVGKALSDACMGTIASFLSKYQDIIIEHQKVVKGNQKRLESLRELAGKENLEYPSVTLPPQPHTKEGVDAYNEVIARVRMWVNLNLWQKLKLSRDDAKPLLRLKKFPSFPLVERQANEVDWWDMVCNVKKLINEKKEDGKVFWQNLAGYKRQEALRPYLSSEEDRKKGKKFARYQLGDLLLHLEKKHGEDWGKVYDEAWERIDKKVEGLSKHIKLEEERRSEDAQSKAALTDWLRAKASFVIEGLKEADKDEFCRCELKLQKWYGDLRGKPFAIEAENSILDISGFSKQYNCAFIWQKDGVKKLNLYLIINYFKGGKLRFKKIKPEAFEANRFYTVINKKSGEIVPMEVNFNFDDPNLIILPLAFGKRQGREFIWNDLLSLETGSLKLANGRVIEKTLYNRRTRQDEPALFVALTFERREVLDSSNIKPMNLIGVDRGENIPAVIALTDPEGCPLSRFKDSLGNPTHILRIGESYKEKQRTIQAKKEVEQRRAGGYSRKYASKAKNLADDMVRNTARDLLYYAVTQDAMLIFENLSRGFGRQGKRTFMAERQYTRMEDWLTAKLAYEGLPSKTYLSKTLAQYTSKTCSNCGFTITSADYDRVLEKLKKTATGWMTTINGKELKVEGQITYYNRYKRQNVVKDLSVELDRLSEESVNNDISSWTKGRSGEALSLLKKRFSHRPVQEKFVCLNCGFETHADEQAALNIARSWLFLRSQEYKKYQTNKTSTGNTDKRAFVETWQSFYRKKLKEVWKPAV

SEQ ID NO: 39218 - protein, 979 aa, synthetic construct
  REGION 1..979: note = engineered CasX variant
QEIKRINKIRRRLVKDSNTKKAGKTGPMKTLLVRVMTPDLRERLENLRKKPENIPQPISNTSRANLNKLLTDYTEMKKAILHVYWEEFQKDPVGLMSRVAQPASKKIDQNKLKPEMDEKGNLTTAGFACSQCGQPLFVYKLEQVSEKGKAYTNYFGRCNVAEHEKLILLAQLKPEKDSDEAVTYSLGKFGQRALDFYSIHVTKESTHPVKPLAQIAGNRYASHPVGKALSDACMGTIASFLSKYQDIIIEHQKVVKGNQKRLESLRELAGKENLEYPSVTLPPQPHTKEGVDAYNEVIARVRMWVNLNLWQKLKLSRDDAKPLLRLKKFPSFPLVERQANEVDWWDMVCNVKKLINEKKEDGKVFWQNLAGYKRQEALRPYLSSEEDRKKGKKFARYQLGDLLLHLEKKHGEDWGKVYDEAWERIDKKVEGLSKHIKLEEERRSEDAQSKAALTDWLRAKASFVIEGLKEADKDEFCRCELKLQKWYGDLRGKPFAIEAENSILDISGFSKQYNCAFIWQKDGVKKLNLYLIINYFKGGKLRFKKIKPEAFEANRFYTVINKKSGEIVPMEVNFNFDDPNLIILPLAFGKRQGREFIWNDLLSLETGSLKLANGRVIEKTLYNRRTRQDEPALFVALTFERREVLDSSNIKPMNLIGVDRGENIPAVIALTDPEGCPLSRFKDSLGNPTHILRIGESYKEKQRTIQAKKEVEQRRAGGYSRKYASKAKNLADDMVRNTARDLLYYAVTQDAMLIFENLSRGFGRQGKRTFMAERQYTRMEDWLTAKLAYEGLPSKTYLSKTLAQYTSKTCSNCGFTITSADYDRVLEKLKKTATGWMTTINGKELKVEGQITYYNRYKRQNVVKDLSVELDRLSEESVNNDISSWTKGRSGEALSLLKKRFSHRPVQEKFVCLNCGFETHADEQAALNIARSWLFLRSQEYKKYQTNKTSTGNTDKRAFVETWQSFYRKKLKEVWKPAV

SEQ ID NO: 39219 - protein, 979 aa, synthetic construct
  REGION 1..979: note = engineered CasX variant
QEIKRINKIRRRLVKDSNTKKAGKTGPMKTLLVRVMTPDLRERLENLRKKPENIPQPISNTSRANLNKLLTDYTEMKKAILHVYWEEFQKDPVGLMSRVAQPASKKIDQNKLKPEMDEKGNLTTAGFACSQCGQPLFVYKLEQVSEKGKAYTNYFGRCNVAEHEKLILLAQLKPEKDSDEAVTYSLGKFGQRALDFYSIHVTKESTHPVKPLAQIAGNRYASSPVGKALSDACMGTIASFLSKYQDIIIEHQKVVKGNQKRLESLRELAGKENLEYPSVTLPPQPHTKEGVDAYNEVIARVRMWVNLNLWQKLKLSRDDAKPLLRLKKFPSFPLVERQANEVDWWDMVCNVKKLINEKKEDGKVFWQNLAGYKRQEALRPYLSSEEDRKKGKKFARYQLGDLLLHLEKKHGEDWGKVYDEAWERIDKKVEGLSKHIKLEEERRSEDAQSKAALTDWLRAKASFVIEGLKEADKDEFCRCELKLQKWYGDLRGKPFAIEAENSILDISGFSKQYNCAFIWQKDGVKKLNLYLIINYFKGGKLRFKKIKPEAFEANRFYTVINKKSGEIVPMEVNFNFDDPNLIILPLAFGKRQGREFIWNDLLSLETGSLKLANGRVIEKTLYNRRTRQDEPALFVALTFERREVLDSSNIKPMNLIGVDRGENIPAVIALTDPEGCPLSRFKDSLGNPTHILRIGESYKEKQRTIQAKKEVEQRRAGGYSRKYASKAKNLADDMVRNTARDLLYYAVTQDAMLIFENLSRGFGRQGKRTFMAERQYTRMEDWLTAKLAYEGLPSKTYLSKTLAQYTSKTCSNCGFTITSADYDRVLEKLKKTATGWMTTINGKELKVEGQITYYNRYKRQNVVKDLSVELDRLSEESVNNDISSWTKGRSGEALSLLKKRFSHRPVQEKFVCLNCGFETHADEQAALNIARSWLFLRSQEYKKYQTNKTSTGNTDKRAFVETWQSFYRKKLKEVWKPAV

SEQ ID NO: 39220 - protein, 979 aa, synthetic construct
  REGION 1..979: note = engineered CasX variant
QEIKRINKIRRRLVKDSNTKKAGKTGPMKTLLVRVMTPDLRERLENLRKKPENIPQPISNTSRANLNKLLTDYTEMKKAILHVYWEEFQKDPVGLMSRVAQPASKKIDQNKLKPEMDEKGNLTTAGFACSQCGQPLFVYKLEQVSEKGKAYTNYFGRCNVAEHEKLILLAQLKPEKDSDEAVTYSLGKFGQRALDFYSIHVTKESTHPVKPLAQIAGNRYASTPVGKALSDACMGTIASFLSKYQDIIIEHQKVVKGNQKRLESLRELAGKENLEYPSVTLPPQPHTKEGVDAYNEVIARVRMWVNLNLWQKLKLSRDDAKPLLRLKKFPSFPLVERQANEVDWWDMVCNVKKLINEKKEDGKVFWQNLAGYKRQEALRPYLSSEEDRKKGKKFARYQLGDLLLHLEKKHGEDWGKVYDEAWERIDKKVEGLSKHIKLEEERRSEDAQSKAALTDWLRAKASFVIEGLKEADKDEFCRCELKLQKWYGDLRGKPFAIEAENSILDISGFSKQYNCAFIWQKDGVKKLNLYLIINYFKGGKLRFKKIKPEAFEANRFYTVINKKSGEIVPMEVNFNFDDPNLIILPLAFGKRQGREFIWNDLLSLETGSLKLANGRVIEKTLYNRRTRQDEPALFVALTFERREVLDSSNIKPMNLIGVDRGENIPAVIALTDPEGCPLSRFKDSLGNPTHILRIGESYKEKQRTIQAKKEVEQRRAGGYSRKYASKAKNLADDMVRNTARDLLYYAVTQDAMLIFENLSRGFGRQGKRTFMAERQYTRMEDWLTAKLAYEGLPSKTYLSKTLAQYTSKTCSNCGFTITSADYDRVLEKLKKTATGWMTTINGKELKVEGQITYYNRYKRQNVVKDLSVELDRLSEESVNNDISSWTKGRSGEALSLLKKRFSHRPVQEKFVCLNCGFETHADEQAALNIARSWLFLRSQEYKKYQTNKTSTGNTDKRAFVETWQSFYRKKLKEVWKPAV

SEQ ID NO: 39221 - protein, 979 aa, synthetic construct
  REGION 1..979: note = engineered CasX variant
QEIKRINKIRRRLVKDSNTKKAGKTGPMKTLLVRVMTPDLRERLENLRKKPENIPQPISNTSRANLNKLLTDYTEMKKAILHVYWEEFQKDPVGLMSRVAQPASKKIDQNKLKPEMDEKGNLTTAGFACSQCGQPLFVYKLEQVSEKGKAYTNYFGRCNVAEHEKLILLAQLKPEKDSDEAVTYSLGKFGQRALDFYSIHVTKESTHPVKPLAQIAGNRYASAPVGKALSDACMGTIASFLSKYQDIIIEHQKVVKGNQKRLESLRELAGKENLEYPSVTLPPQPHTKEGVDAYNEVIARVRMWVNLNLWQKLKLSRDDAKPLLRLKKFPSFPLVERQANEVDWWDMVCNVKKLINEKKEDGKVFWQNLAGYKRQEALRPYLSSEEDRKKGKKFARYQLGDLLLHLEKKHGEDWGKVYDEAWERIDKKVEGLSKHIKLEEERRSEDAQSKAALTDWLRAKASFVIEGLKEADKDEFCRCELKLQKWYGDLRGKPFAIEAENSILDISGFSKQYNCAFIWQKDGVKKLNLYLIINYFKGGKLRFKKIKPEAFEANRFYTVINKKSGEIVPMEVNFNFDDPNLIILPLAFGKRQGREFIWNDLLSLETGSLKLANGRVIEKTLYNRRTRQDEPALFVALTFERREVLDSSNIKPMNLIGVDRGENIPAVIALTDPEGCPLSRFKDSLGNPTHILRIGESYKEKQRTIQAKKEVEQRRAGGYSRKYASKAKNLADDMVRNTARDLLYYAVTQDAMLIFENLSRGFGRQGKRTFMAERQYTRMEDWLTAKLAYEGLPSKTYLSKTLAQYTSKTCSNCGFTITSADYDRVLEKLKKTATGWMTTINGKELKVEGQITYYNRYKRQNVVKDLSVELDRLSEESVNNDISSWTKGRSGEALSLLKKRFSHRPVQEKFVCLNCGFETHADEQAALNIARSWLFLRSQEYKKYQTNKTSTGNTDKRAFVETWQSFYRKKLKEVWKPAV

SEQ ID NO: 39222 - protein, 979 aa, synthetic construct
  REGION 1..979: note = engineered CasX variant
QEIKRINKIRRRLVKDSNTKKAGKTGPMKTLLVRVMTPDLRERLENLRKKPENIPQPISNTSRANLNKLLTDYTEMKKAILHVYWEEFQKDPVGLMSRVAQPASKKIDQNKLKPEMDEKGNLTTAGFACSQCGQPLFVYKLEQVSEKGKAYTNYFGRCNVAEHEKLILLAQLKPEKDSDEAVTYSLGKFGQRALDFYSIHVTKESTHPVKPLAQIAGNRYASVPVGKALSDACMGTIASFLSKYQDIIIEHQKVVKGNQKRLESLRELAGKENLEYPSVTLPPQPHTKEGVDAYNEVIARVRMWVNLNLWQKLKLSRDDAKPLLRLKKFPSFPLVERQANEVDWWDMVCNVKKLINEKKEDGKVFWQNLAGYKRQEALRPYLSSEEDRKKGKKFARYQLGDLLLHLEKKHGEDWGKVYDEAWERIDKKVEGLSKHIKLEEERRSEDAQSKAALTDWLRAKASFVIEGLKEADKDEFCRCELKLQKWYGDLRGKPFAIEAENSILDISGFSKQYNCAFIWQKDGVKKLNLYLIINYFKGGKLRFKKIKPEAFEANRFYTVINKKSGEIVPMEVNFNFDDPNLIILPLAFGKRQGREFIWNDLLSLETGSLKLANGRVIEKTLYNRRTRQDEPALFVALTFERREVLDSSNIKPMNLIGVDRGENIPAVIALTDPEGCPLSRFKDSLGNPTHILRIGESYKEKQRTIQAKKEVEQRRAGGYSRKYASKAKNLADDMVRNTARDLLYYAVTQDAMLIFENLSRGFGRQGKRTFMAERQYTRMEDWLTAKLAYEGLPSKTYLSKTLAQYTSKTCSNCGFTITSADYDRVLEKLKKTATGWMTTINGKELKVEGQITYYNRYKRQNVVKDLSVELDRLSEESVNNDISSWTKGRSGEALSLLKKRFSHRPVQEKFVCLNCGFETHADEQAALNIARSWLFLRSQEYKKYQTNKTSTGNTDKRAFVETWQSFYRKKLKEVWKPAV

SEQ ID NO: 39223 - protein, 979 aa, synthetic construct
  REGION 1..979: note = engineered CasX variant
QEIKRINKIRRRLVKDSNTKKAGKTGPMKTLLVRVMTPDLRERLENLRKKPENIPQPISNTSRANLNKLLTDYTEMKKAILHVYWEEFQKDPVGLMSRVAQPASKKIDQNKLKPEMDEKGNLTTAGFACSQCGQPLFVYKLEQVSEKGKAYTNYFGRCNVAEHEKLIKLAQLKPEKDSDEAVTYSLGKFGQRALDFYSIHVTKESTHPVKPLAQIAGNRYASGPVGKALSDACMGTIASFLSKYQDIIIEHQKVVKGNQKRLESLRELAGKENLEYPSVTLPPQPHTKEGVDAYNEVIARVRMWVNLNLWQKLKLSRDDAKPLLRLKKFPSFPLVERQANEVDWWDMVCNVKKLINEKKEDGKVFWQNLAGYKRQEALRPYLSSEEDRKKGKKFARYQLGDLLLHLEKKHGEDWGKVYDEAWERIDKKVEGLSKHIKLEEERRSEDAQSKAALTDWLRAKASFVIEGLKEADKDEFCRCELKLQKWYGDLRGKPFAIEAENSILDISGFSKQYNCAFIWQKDGVKKLNLYLIINYFKGGKLRFKKIKPEAFEANRFYTVINKKSGEIVPMEVNFNFDDPNLIILPLAFGKRQGREFIWNDLLSLETGSLKLANGRVIEKTLYNRRTRQDEPALFVALTFERREVLDSSNIKPMNLIGVDRGENIPAVIALTDPEGCPLSRFKDSLGNPTHILRIGESYKEKQRTIQAKKEVEQRRAGGYSRKYASKAKNLADDMVRNTARDLLYYAVTQDAMLIFENLSRGFGRQGKRTFMAERQYTRMEDWLTAKLAYEGLPSKTYLSKTLAQYTSKTCSNCGFTITSADYDRVLEKLKKTATGWMTTINGKELKVEGQITYYNRYKRQNVVKDLSVELDRLSEESVNNDISSWTKGRSGEALSLLKKRFSHRPVQEKFVCLNCGFETHADEQAALNIARSWLFLRSQEYKKYQTNKTSTGNTDKRAFVETWQSFYRKKLKEVWKPAV

SEQ ID NO: 39224 - protein, 978 aa, synthetic construct
  REGION 1..978: note = engineered CasX variant
QEIKRINKIRRRLVKDSNTKKAGKTGPMKTLLVRVMTPDLRERLENLRKKPENIPQPISNTSRANLNKLLTDYTEMKKAILHVYWEEFQKDPVGLMSRVAQPASKKIDQNKLKPEMDEKGNLTTAGFACSQCGQPLFVYKLEQVSEKGKAYTNYFGRCNVAEHEKLILLAQLKPEKDSDEAVTYSLGKFGQRALDFYSIHVTKESTHPVKPLAQIAGNRYASPVGKALSDACMGTIASFLSKYQDIIIEHQKVVKGNQKRLESLRELAGKENLEYPSVTLPPQPHTKEGVDAYNEVIARVRMWVNLNLWQKLKLSRDDAKPLLRLKKFPSFPLVERQANEVDWWDMVCNVKKLINEKKEDGKVFWQNLAGYKRQEALRPYLSSEEDRKKGKKFARYQLGDLLLHLEKKHGEDWGKVYDEAWERIDKKVEGLSKHIKLEEERRSEDAQSKAALTDWLRAKASFVIEGLKEADKDEFCRCELKLQKWYGDLRGKPFAIEAENSILDISGFSKQYNCAFIWQKDGVKKLNLYLIINYFKGGKLRFKKIKPEAFEANRFYTVINKKSGEIVPMEVNFNFDDPNLIILPLAFGKRQGREFIWNDLLSLETGSLKLANGRVIEKTLYNRRTRQDEPALFVALTFERREVLDSSNIKPMNLIGVDRGENIPAVIALTDPEGCPLSRFKDSLGNPTHILRIGESYKEKQRTIQAKKEVEQRRAGGYSRKYASKAKNLADDMVRNTARDLLYYAVTQDAMLIFENLSRGFGRQGKRTFMAERQYTRMEDWLTAKLAYEGLPSKTYLSKTLAQYTSKTCSNCGFTITSADYDRVLEKLKKTATGWMTTINGKELKVEGQITYYNRYKRQNVVKDLSVELDRLSEESVNNDISSWTKGRSGEALSLLKKRFSHRPVQEKFVCLNCGFETHADEQAALNIARSWLFLRSQEYKKYQTNKTSTGNTDKRAFVETWQSFYRKKLKEVWKPAV

SEQ ID NO: 39225 - protein, 979 aa, synthetic construct
  REGION 1..979: note = engineered CasX variant
QEIKRINKIRRRLVKDSNTKKAGKTGPMKTLLVRVMTPDLRERLENLRKKPENIPQPISNTSRANLNKLLTDYTEMKKAILHVYWEEFQKDPVGLMSRVAQPASKKIDQNKLKPEMDEKGNLTTAGFACSQCGQPLFVYKLEQVSEKGKAYTNYFGRCNVAEHEKLILLAQLKPEKDSDEAVTYSLGKFGQRALDFYSIHVTKESTHPVKPLAQIAGNRYASYPVGKALSDACMGTIASFLSKYQDIIIEHQKVVKGNQKRLESLRELAGKENLEYPSVTLPPQPHTKEGVDAYNEVIARVRMWVNLNLWQKLKLSRDDAKPLLRLKGFPSFPLVERQANEVDWWDMVCNVKKLINEKKEDGKVFWQNLAGYKRQEALRPYLSSEEDRKKGKKFARYQLGDLLLHLEKKHGEDWGKVYDEAWERIDKKVEGLSKHIKLEEERRSEDAQSKAALTDWLRAKASFVIEGLKEADKDEFCRCELKLQKWYGDLRGKPFAIEAENSILDISGFSKQYNCAFIWQKDGVKKLNLYLIINYFKGGKLRFKKIKPEAFEANRFYTVINKKSGEIVPMEVNFNFDDPNLIILPLAFGKRQGREFIWNDLLSLETGSLKLANGRVIEKTLYNRRTRQDEPALFVALTFERREVLDSSNIKPMNLIGVDRGENIPAVIALTDPEGCPLSRFKDSLGNPTHILRIGERYKEKQRTIQAKKEVEQRRAGGYSRKYASKAKNLADDMVRNTARDLLYYAVTQDAMLIFENLSRGFGRQGKRTFMAERQYTRMEDWLTAKLAYEGLPSKTYLSKTLAQYTSKTCSNCGFTITSADYDRVLEKLKKTATGWMTTINGKELKVEGQITYYNRYKRQNVVKDLSVELDRLSEESVNNDISSWTKGRSGEALSLLKKRFSHRPVQEKFVCLNCGFETHADEQAALNIARSWLFLRSQEYKKYQTNKTSTGNTDKRAFVETWQSFYRKKLKEVWKPAV

SEQ ID NO: 39226 - protein, 979 aa, synthetic construct
  REGION 1..979: note = engineered CasX variant
QEIKRINKIRRRLVKDSNTKKAGKTGPMKTLLVRVMTPDLRERLENLRKKPENIPQPISNTSRANLNKLLTDYTEMKKAILHVYWEEFQKDPVGLMSRVAQPASKKIDQNKLKPEMDEKGNLTTAGFACSQCGQPLFVYKLEQVSEKGKAYTNYFGRCNVAEHEKLILLAQLKPEKDSDEAVTYSLGKFGQRALDFYSIHVTKESTHPVKPLAQIAGNRYASHPVGKALSDACMGTIASFLSKYQDIIIEHQKVVKGNQKRLESLRELAGKENLEYPSVTLPPQPHTKEGVDAYNEVIARVRMWVNLNLWQKLKLSRDDAKPLLRLKGFPSFPLVERQANEVDWWDMVCNVKKLINEKKEDGKVFWQNLAGYKRQEALRPYLSSEEDRKKGKKFARYQLGDLLLHLEKKHGEDWGKVYDEAWERIDKKVEGLSKHIKLEEERRSEDAQSKAALTDWLRAKASFVIEGLKEADKDEFCRCELKLQKWYGDLRGKPFAIEAENSILDISGFSKQYNCAFIWQKDGVKKLNLYLIINYFKGGKLRFKKIKPEAFEANRFYTVINKKSGEIVPMEVNFNFDDPNLIILPLAFGKRQGREFIWNDLLSLETGSLKLANGRVIEKTLYNRRTRQDEPALFVALTFERREVLDSSNIKPMNLIGVDRGENIPAVIALTDPEGCPLSRFKDSLGNPTHILRIGERYKEKQRTIQAKKEVEQRRAGGYSRKYASKAKNLADDMVRNTARDLLYYAVTQDAMLIFENLSRGFGRQGKRTFMAERQYTRMEDWLTAKLAYEGLPSKTYLSKTLAQYTSKTCSNCGFTITSADYDRVLEKLKKTATGWMTTINGKELKVEGQITYYNRYKRQNVVKDLSVELDRLSEESVNNDISSWTKGRSGEALSLLKKRFSHRPVQEKFVCLNCGFETHADEQAALNIARSWLFLRSQEYKKYQTNKTSTGNTDKRAFVETWQSFYRKKLKEVWKPAV

SEQ ID NO: 39227 - protein, 979 aa, synthetic construct
  REGION 1..979: note = engineered CasX variant
QEIKRINKIRRRLVKDSNTKKAGKTGPMKTLLVRVMTPDLRERLENLRKKPENIPQPISNTSRANLNKLLTDYTEMKKAILHVYWEEFQKDPVGLMSRVAQPASKKIDQNKLKPEMDEKGNLTTAGFACSQCGQPLFVYKLEQVSEKGKAYTNYFGRCNVAEHEKLILLAQLKPEKDSDEAVTYSLGKFGQRALDFYSIHVTKESTHPVKPLAQIAGNRYASSPVGKALSDACMGTIASFLSKYQDIIIEHQKVVKGNQKRLESLRELAGKENLEYPSVTLPPQPHTKEGVDAYNEVIARVRMWVNLNLWQKLKLSRDDAKPLLRLKGFPSFPLVERQANEVDWWDMVCNVKKLINEKKEDGKVFWQNLAGYKRQEALRPYLSSEEDRKKGKKFARYQLGDLLLHLEKKHGEDWGKVYDEAWERIDKKVEGLSKHIKLEEERRSEDAQSKAALTDWLRAKASFVIEGLKEADKDEFCRCELKLQKWYGDLRGKPFAIEAENSILDISGFSKQYNCAFIWQKDGVKKLNLYLIINYFKGGKLRFKKIKPEAFEANRFYTVINKKSGEIVPMEVNFNFDDPNLIILPLAFGKRQGREFIWNDLLSLETGSLKLANGRVIEKTLYNRRTRQDEPALFVALTFERREVLDSSNIKPMNLIGVDRGENIPAVIALTDPEGCPLSRFKDSLGNPTHILRIGERYKEKQRTIQAKKEVEQRRAGGYSRKYASKAKNLADDMVRNTARDLLYYAVTQDAMLIFENLSRGFGRQGKRTFMAERQYTRMEDWLTAKLAYEGLPSKTYLSKTLAQYTSKTCSNCGFTITSADYDRVLEKLKKTATGWMTTINGKELKVEGQITYYNRYKRQNVVKDLSVELDRLSEESVNNDISSWTKGRSGEALSLLKKRFSHRPVQEKFVCLNCGFETHADEQAALNIARSWLFLRSQEYKKYQTNKTSTGNTDKRAFVETWQSFYRKKLKEVWKPAV

SEQ ID NO: 39228 - protein, 979 aa, synthetic construct
  REGION 1..979: note = engineered CasX variant
QEIKRINKIRRRLVKDSNTKKAGKTGPMKTLLVRVMTPDLRERLENLRKKPENIPQPISNTSRANLNKLLTDYTEMKKAILHVYWEEFQKDPVGLMSRVAQPASKKIDQNKLKPEMDEKGNLTTAGFACSQCGQPLFVYKLEQVSEKGKAYTNYFGRCNVAEHEKLILLAQLKPEKDSDEAVTYSLGKFGQRALDFYSIHVTKESTHPVKPLAQIAGNRYASTPVGKALSDACMGTIASFLSKYQDIIIEHQKVVKGNQKRLESLRELAGKENLEYPSVTLPPQPHTKEGVDAYNEVIARVRMWVNLNLWQKLKLSRDDAKPLLRLKGFPSFPLVERQANEVDWWDMVCNVKKLINEKKEDGKVFWQNLAGYKRQEALRPYLSSEEDRKKGKKFARYQLGDLLLHLEKKHGEDWGKVYDEAWERIDKKVEGLSKHIKLEEERRSEDAQSKAALTDWLRAKASFVIEGLKEADKDEFCRCELKLQKWYGDLRGKPFAIEAENSILDISGFSKQYNCAFIWQKDGVKKLNLYLIINYFKGGKLRFKKIKPEAFEANRFYTVINKKSGEIVPMEVNFNFDDPNLIILPLAFGKRQGREFIWNDLLSLETGSLKLANGRVIEKTLYNRRTRQDEPALFVALTFERREVLDSSNIKPMNLIGVDRGENIPAVIALTDPEGCPLSRFKDSLGNPTHILRIGERYKEKQRTIQAKKEVEQRRAGGYSRKYASKAKNLADDMVRNTARDLLYYAVTQDAMLIFENLSRGFGRQGKRTFMAERQYTRMEDWLTAKLAYEGLPSKTYLSKTLAQYTSKTCSNCGFTITSADYDRVLEKLKKTATGWMTTINGKELKVEGQITYYNRYKRQNVVKDLSVELDRLSEESVNNDISSWTKGRSGEALSLLKKRFSHRPVQEKFVCLNCGFETHADEQAALNIARSWLFLRSQEYKKYQTNKTSTGNTDKRAFVETWQSFYRKKLKEVWKPAV

SEQ ID NO: 39229 - protein, 979 aa, synthetic construct
  REGION 1..979: note = engineered CasX variant
QEIKRINKIRRRLVKDSNTKKAGKTGPMKTLLVRVMTPDLRERLENLRKKPENIPQPISNTSRANLNKLLTDYTEMKKAILHVYWEEFQKDPVGLMSRVAQPASKKIDQNKLKPEMDEKGNLTTAGFACSQCGQPLFVYKLEQVSEKGKAYTNYFGRCNVAEHEKLILLAQLKPEKDSDEAVTYSLGKFGQRALDFYSIHVTKESTHPVKPLAQIAGNRYASAPVGKALSDACMGTIASFLSKYQDIIIEHQKVVKGNQKRLESLRELAGKENLEYPSVTLPPQPHTKEGVDAYNEVIARVRMWVNLNLWQKLKLSRDDAKPLLRLKGFPSFPLVERQANEVDWWDMVCNVKKLINEKKEDGKVFWQNLAGYKRQEALRPYLSSEEDRKKGKKFARYQLGDLLLHLEKKHGEDWGKVYDEAWERIDKKVEGLSKHIKLEEERRSEDAQSKAALTDWLRAKASFVIEGLKEADKDEFCRCELKLQKWYGDLRGKPFAIEAENSILDISGFSKQYNCAFIWQKDGVKKLNLYLIINYFKGGKLRFKKIKPEAFEANRFYTVINKKSGEIVPMEVNFNFDDPNLIILPLAFGKRQGREFIWNDLLSLETGSLKLANGRVIEKTLYNRRTRQDEPALFVALTFERREVLDSSNIKPMNLIGVDRGENIPAVIALTDPEGCPLSRFKDSLGNPTHILRIGERYKEKQRTIQAKKEVEQRRAGGYSRKYASKAKNLADDMVRNTARDLLYYAVTQDAMLIFENLSRGFGRQGKRTFMAERQYTRMEDWLTAKLAYEGLPSKTYLSKTLAQYTSKTCSNCGFTITSADYDRVLEKLKKTATGWMTTINGKELKVEGQITYYNRYKRQNVVKDLSVELDRLSEESVNNDISSWTKGRSGEALSLLKKRFSHRPVQEKFVCLNCGFETHADEQAALNIARSWLFLRSQEYKKYQTNKTSTGNTDKRAFVETWQSFYRKKLKEVWKPAV

SEQ ID NO: 39230 - protein, 979 aa, synthetic construct
  REGION 1..979: note = engineered CasX variant
QEIKRINKIRRRLVKDSNTKKAGKTGPMKTLLVRVMTPDLRERLENLRKKPENIPQPISNTSRANLNKLLTDYTEMKKAILHVYWEEFQKDPVGLMSRVAQPASKKIDQNKLKPEMDEKGNLTTAGFACSQCGQPLFVYKLEQVSEKGKAYTNYFGRCNVAEHEKLILLAQLKPEKDSDEAVTYSLGKFGQRALDFYSIHVTKESTHPVKPLAQIAGNRYASVPVGKALSDACMGTIASFLSKYQDIIIEHQKVVKGNQKRLESLRELAGKENLEYPSVTLPPQPHTKEGVDAYNEVIARVRMWVNLNLWQKLKLSRDDAKPLLRLKGFPSFPLVERQANEVDWWDMVCNVKKLINEKKEDGKVFWQNLAGYKRQEALRPYLSSEEDRKKGKKFARYQLGDLLLHLEKKHGEDWGKVYDEAWERIDKKVEGLSKHIKLEEERRSEDAQSKAALTDWLRAKASFVIEGLKEADKDEFCRCELKLQKWYGDLRGKPFAIEAENSILDISGFSKQYNCAFIWQKDGVKKLNLYLIINYFKGGKLRFKKIKPEAFEANRFYTVINKKSGEIVPMEVNFNFDDPNLIILPLAFGKRQGREFIWNDLLSLETGSLKLANGRVIEKTLYNRRTRQDEPALFVALTFERREVLDSSNIKPMNLIGVDRGENIPAVIALTDPEGCPLSRFKDSLGNPTHILRIGERYKEKQRTIQAKKEVEQRRAGGYSRKYASKAKNLADDMVRNTARDLLYYAVTQDAMLIFENLSRGFGRQGKRTFMAERQYTRMEDWLTAKLAYEGLPSKTYLSKTLAQYTSKTCSNCGFTITSADYDRVLEKLKKTATGWMTTINGKELKVEGQITYYNRYKRQNVVKDLSVELDRLSEESVNNDISSWTKGRSGEALSLLKKRFSHRPVQEKFVCLNCGFETHADEQAALNIARSWLFLRSQEYKKYQTNKTSTGNTDKRAFVETWQSFYRKKLKEVWKPAV

SEQ ID NO: 39231 - protein, 979 aa, synthetic construct
  REGION 1..979: note = engineered CasX variant
QEIKRINKIRRRLVKDSNTKKAGKTGPMKTLLVRVMTPDLRERLENLRKKPENIPQPISNTSRANLNKLLTDYTEMKKAILHVYWEEFQKDPVGLMSRVAQPASKKIDQNKLKPEMDEKGNLTTAGFACSQCGQPLFVYKLEQVSEKGKAYTNYFGRCNVAEHEKLIKLAQLKPEKDSDEAVTYSLGKFGQRALDFYSIHVTKESTHPVKPLAQIAGNRYASGPVGKALSDACMGTIASFLSKYQDIIIEHQKVVKGNQKRLESLRELAGKENLEYPSVTLPPQPHTKEGVDAYNEVIARVRMWVNLNLWQKLKLSRDDAKPLLRLKGFPSFPLVERQANEVDWWDMVCNVKKLINEKKEDGKVFWQNLAGYKRQEALRPYLSSEEDRKKGKKFARYQLGDLLLHLEKKHGEDWGKVYDEAWERIDKKVEGLSKHIKLEEERRSEDAQSKAALTDWLRAKASFVIEGLKEADKDEFCRCELKLQKWYGDLRGKPFAIEAENSILDISGFSKQYNCAFIWQKDGVKKLNLYLIINYFKGGKLRFKKIKPEAFEANRFYTVINKKSGEIVPMEVNFNFDDPNLIILPLAFGKRQGREFIWNDLLSLETGSLKLANGRVIEKTLYNRRTRQDEPALFVALTFERREVLDSSNIKPMNLIGVDRGENIPAVIALTDPEGCPLSRFKDSLGNPTHILRIGERYKEKQRTIQAKKEVEQRRAGGYSRKYASKAKNLADDMVRNTARDLLYYAVTQDAMLIFENLSRGFGRQGKRTFMAERQYTRMEDWLTAKLAYEGLPSKTYLSKTLAQYTSKTCSNCGFTITSADYDRVLEKLKKTATGWMTTINGKELKVEGQITYYNRYKRQNVVKDLSVELDRLSEESVNNDISSWTKGRSGEALSLLKKRFSHRPVQEKFVCLNCGFETHADEQAALNIARSWLFLRSQEYKKYQTNKTSTGNTDKRAFVETWQSFYRKKLKEVWKPAV

SEQ ID NO: 39232 - protein, 978 aa, synthetic construct
  REGION 1..978: note = engineered CasX variant
QEIKRINKIRRRLVKDSNTKKAGKTGPMKTLLVRVMTPDLRERLENLRKKPENIPQPISNTSRANLNKLLTDYTEMKKAILHVYWEEFQKDPVGLMSRVAQPASKKIDQNKLKPEMDEKGNLTTAGFACSQCGQPLFVYKLEQVSEKGKAYTNYFGRCNVAEHEKLILLAQLKPEKDSDEAVTYSLGKFGQRALDFYSIHVTKESTHPVKPLAQIAGNRYASPVGKALSDACMGTIASFLSKYQDIIIEHQKVVKGNQKRLESLRELAGKENLEYPSVTLPPQPHTKEGVDAYNEVIARVRMWVNLNLWQKLKLSRDDAKPLLRLKGFPSFPLVERQANEVDWWDMVCNVKKLINEKKEDGKVFWQNLAGYKRQEALRPYLSSEEDRKKGKKFARYQLGDLLLHLEKKHGEDWGKVYDEAWERIDKKVEGLSKHIKLEEERRSEDAQSKAALTDWLRAKASFVIEGLKEADKDEFCRCELKLQKWYGDLRGKPFAIEAENSILDISGFSKQYNCAFIWQKDGVKKLNLYLIINYFKGGKLRFKKIKPEAFEANRFYTVINKKSGEIVPMEVNFNFDDPNLIILPLAFGKRQGREFIWNDLLSLETGSLKLANGRVIEKTLYNRRTRQDEPALFVALTFERREVLDSSNIKPMNLIGVDRGENIPAVIALTDPEGCPLSRFKDSLGNPTHILRIGERYKEKQRTIQAKKEVEQRRAGGYSRKYASKAKNLADDMVRNTARDLLYYAVTQDAMLIFENLSRGFGRQGKRTFMAERQYTRMEDWLTAKLAYEGLPSKTYLSKTLAQYTSKTCSNCGFTITSADYDRVLEKLKKTATGWMTTINGKELKVEGQITYYNRYKRQNVVKDLSVELDRLSEESVNNDISSWTKGRSGEALSLLKKRFSHRPVQEKFVCLNCGFETHADEQAALNIARSWLFLRSQEYKKYQTNKTSTGNTDKRAFVETWQSFYRKKLKEVWKPAV

SEQ ID NO: 39233 - protein, 979 aa, synthetic construct
  REGION 1..979: note = engineered CasX variant
QEIKRINKIRRRLVKDSNTKKAGKTGPMKTLLVRVMTPDLRERLENLRKKPENIPQPISNTSRANLNKLLTDYTEMKKAILHVYWEEFQKDPVGLMSRVAQPASKKIDQNKLKPEMDEKGNLTTAGFACSQCGQPLFVYKLEQVSEKGKAYTNYFGRCNVAEHEKLILLAQLKPEKDSDEAVTYSLGKFGQRALDFYSIHVTKESTHPVKPLAQIAGNRYASYPVGKALSDACMGTIASFLSKYQDIIIEHQKVVKGNQKRLESLRELAGKENLEYPSVTLPPQPHTKEGVDAYNEVIARVRMWVNLNLWQKLKLSRDDAKPLLRLKGFPSFPLVERQANEVDWWDMVCNVKKLINEKKEDGKVFWQNLAGYKRQEALRPYLSSEEDRKKGKKFARYQLGDLLLHLEKKHGEDWGKVYDEAWERIDKKVEGLSKHIKLEEERRSEDAQSKAALTDWLRAKASFVIEGLKEADKDEFCRCELKLQKWYGDLRGKPFAIEAENSILDISGFSKQYNCAFIWQKDGVKKLNLYLIINYFKGGKLRFKKIKPEAFEANRFYTVINKKSGEIVPMEVNFNFDDPNLIILPLAFGKRQGREFIWNDLLSLETGSLQLANGRVIEKTLYNRRTRQDEPALFVALTFERREVLDSSNIKPMNLIGVDRGENIPAVIALTDPEGCPLSRFKDSLGNPTHILRIGESYKEKQRTIQAKKEVEQRRAGGYSRKYASKAKNLADDMVRNTARDLLYYAVTQDAMLIFENLSRGFGRQGKRTFMAERQYTRMEDWLTAKLAYEGLPSKTYLSKTLAQYTSKTCSNCGFTITSADYDRVLEKLKKTATGWMTTINGKELKVEGQITYYNRYKRQNVVKDLSVELDRLSEESVNNDISSWTKGRSGEALSLLKKRFSHRPVQEKFVCLNCGFETHADEQAALNIARSWLFLRSQEYKKYQTNKTSTGNTDKRAFVETWQSFYRKKLKEVWKPAV

SEQ ID NO: 39234 - protein, 979 aa, synthetic construct
  REGION 1..979: note = engineered CasX variant
QEIKRINKIRRRLVKDSNTKKAGKTGPMKTLLVRVMTPDLRERLENLRKKPENIPQPISNTSRANLNKLLTDYTEMKKAILHVYWEEFQKDPVGLMSRVAQPASKKIDQNKLKPEMDEKGNLTTAGFACSQCGQPLFVYKLEQVSEKGKAYTNYFGRCNVAEHEKLILLAQLKPEKDSDEAVTYSLGKFGQRALDFYSIHVTKESTHPVKPLAQIAGNRYASHPVGKALSDACMGTIASFLSKYQDIIIEHQKVVKGNQKRLESLRELAGKENLEYPSVTLPPQPHTKEGVDAYNEVIARVRMWVNLNLWQKLKLSRDDAKPLLRLKGFPSFPLVERQANEVDWWDMVCNVKKLINEKKEDGKVFWQNLAGYKRQEALRPYLSSEEDRKKGKKFARYQLGDLLLHLEKKHGEDWGKVYDEAWERIDKKVEGLSKHIKLEEERRSEDAQSKAALTDWLRAKASFVIEGLKEADKDEFCRCELKLQKWYGDLRGKPFAIEAENSILDISGFSKQYNCAFIWQKDGVKKLNLYLIINYFKGGKLRFKKIKPEAFEANRFYTVINKKSGEIVPMEVNFNFDDPNLIILPLAFGKRQGREFIWNDLLSLETGSLQLANGRVIEKTLYNRRTRQDEPALFVALTFERREVLDSSNIKPMNLIGVDRGENIPAVIALTDPEGCPLSRFKDSLGNPTHILRIGESYKEKQRTIQAKKEVEQRRAGGYSRKYASKAKNLADDMVRNTARDLLYYAVTQDAMLIFENLSRGFGRQGKRTFMAERQYTRMEDWLTAKLAYEGLPSKTYLSKTLAQYTSKTCSNCGFTITSADYDRVLEKLKKTATGWMTTINGKELKVEGQITYYNRYKRQNVVKDLSVELDRLSEESVNNDISSWTKGRSGEALSLLKKRFSHRPVQEKFVCLNCGFETHADEQAALNIARSWLFLRSQEYKKYQTNKTSTGNTDKRAFVETWQSFYRKKLKEVWKPAV

SEQ ID NO: 39235 - protein, 979 aa, synthetic construct
  REGION 1..979: note = engineered CasX variant
QEIKRINKIRRRLVKDSNTKKAGKTGPMKTLLVRVMTPDLRERLENLRKKPENIPQPISNTSRANLNKLLTDYTEMKKAILHVYWEEFQKDPVGLMSRVAQPASKKIDQNKLKPEMDEKGNLTTAGFACSQCGQPLFVYKLEQVSEKGKAYTNYFGRCNVAEHEKLILLAQLKPEKDSDEAVTYSLGKFGQRALDFYSIHVTKESTHPVKPLAQIAGNRYASSPVGKALSDACMGTIASFLSKYQDIIIEHQKVVKGNQKRLESLRELAGKENLEYPSVTLPPQPHTKEGVDAYNEVIARVRMWVNLNLWQKLKLSRDDAKPLLRLKGFPSFPLVERQANEVDWWDMVCNVKKLINEKKEDGKVFWQNLAGYKRQEALRPYLSSEEDRKKGKKFARYQLGDLLLHLEKKHGEDWGKVYDEAWERIDKKVEGLSKHIKLEEERRSEDAQSKAALTDWLRAKASFVIEGLKEADKDEFCRCELKLQKWYGDLRGKPFAIEAENSILDISGFSKQYNCAFIWQKDGVKKLNLYLIINYFKGGKLRFKKIKPEAFEANRFYTVINKKSGEIVPMEVNFNFDDPNLIILPLAFGKRQGREFIWNDLLSLETGSLQLANGRVIEKTLYNRRTRQDEPALFVALTFERREVLDSSNIKPMNLIGVDRGENIPAVIALTDPEGCPLSRFKDSLGNPTHILRIGESYKEKQRTIQAKKEVEQRRAGGYSRKYASKAKNLADDMVRNTARDLLYYAVTQDAMLIFENLSRGFGRQGKRTFMAERQYTRMEDWLTAKLAYEGLPSKTYLSKTLAQYTSKTCSNCGFTITSADYDRVLEKLKKTATGWMTTINGKELKVEGQITYYNRYKRQNVVKDLSVELDRLSEESVNNDISSWTKGRSGEALSLLKKRFSHRPVQEKFVCLNCGFETHADEQAALNIARSWLFLRSQEYKKYQTNKTSTGNTDKRAFVETWQSFYRKKLKEVWKPAV

SEQ ID NO: 39236 - protein, 979 aa, synthetic construct
  REGION 1..979: note = engineered CasX variant
QEIKRINKIRRRLVKDSNTKKAGKTGPMKTLLVRVMTPDLRERLENLRKKPENIPQPISNTSRANLNKLLTDYTEMKKAILHVYWEEFQKDPVGLMSRVAQPASKKIDQNKLKPEMDEKGNLTTAGFACSQCGQPLFVYKLEQVSEKGKAYTNYFGRCNVAEHEKLILLAQLKPEKDSDEAVTYSLGKFGQRALDFYSIHVTKESTHPVKPLAQIAGNRYASTPVGKALSDACMGTIASFLSKYQDIIIEHQKVVKGNQKRLESLRELAGKENLEYPSVTLPPQPHTKEGVDAYNEVIARVRMWVNLNLWQKLKLSRDDAKPLLRLKGFPSFPLVERQANEVDWWDMVCNVKKLINEKKEDGKVFWQNLAGYKRQEALRPYLSSEEDRKKGKKFARYQLGDLLLHLEKKHGEDWGKVYDEAWERIDKKVEGLSKHIKLEEERRSEDAQSKAALTDWLRAKASFVIEGLKEADKDEFCRCELKLQKWYGDLRGKPFAIEAENSILDISGFSKQYNCAFIWQKDGVKKLNLYLIINYFKGGKLRFKKIKPEAFEANRFYTVINKKSGEIVPMEVNFNFDDPNLIILPLAFGKRQGREFIWNDLLSLETGSLQLANGRVIEKTLYNRRTRQDEPALFVALTFERREVLDSSNIKPMNLIGVDRGENIPAVIALTDPEGCPLSRFKDSLGNPTHILRIGESYKEKQRTIQAKKEVEQRRAGGYSRKYASKAKNLADDMVRNTARDLLYYAVTQDAMLIFENLSRGFGRQGKRTFMAERQYTRMEDWLTAKLAYEGLPSKTYLSKTLAQYTSKTCSNCGFTITSADYDRVLEKLKKTATGWMTTINGKELKVEGQITYYNRYKRQNVVKDLSVELDRLSEESVNNDISSWTKGRSGEALSLLKKRFSHRPVQEKFVCLNCGFETHADEQAALNIARSWLFLRSQEYKKYQTNKTSTGNTDKRAFVETWQSFYRKKLKEVWKPAV

SEQ ID NO: 39237 - protein, 979 aa, synthetic construct
  REGION 1..979: note = engineered CasX variant
QEIKRINKIRRRLVKDSNTKKAGKTGPMKTLLVRVMTPDLRERLENLRKKPENIPQPISNTSRANLNKLLTDYTEMKKAILHVYWEEFQKDPVGLMSRVAQPASKKIDQNKLKPEMDEKGNLTTAGFACSQCGQPLFVYKLEQVSEKGKAYTNYFGRCNVAEHEKLILLAQLKPEKDSDEAVTYSLGKFGQRALDFYSIHVTKESTHPVKPLAQIAGNRYASAPVGKALSDACMGTIASFLSKYQDIIIEHQKVVKGNQKRLESLRELAGKENLEYPSVTLPPQPHTKEGVDAYNEVIARVRMWVNLNLWQKLKLSRDDAKPLLRLKGFPSFPLVERQANEVDWWDMVCNVKKLINEKKEDGKVFWQNLAGYKRQEALRPYLSSEEDRKKGKKFARYQLGDLLLHLEKKHGEDWGKVYDEAWERIDKKVEGLSKHIKLEEERRSEDAQSKAALTDWLRAKASFVIEGLKEADKDEFCRCELKLQKWYGDLRGKPFAIEAENSILDISGFSKQYNCAFIWQKDGVKKLNLYLIINYFKGGKLRFKKIKPEAFEANRFYTVINKKSGEIVPMEVNFNFDDPNLIILPLAFGKRQGREFIWNDLLSLETGSLQLANGRVIEKTLYNRRTRQDEPALFVALTFERREVLDSSNIKPMNLIGVDRGENIPAVIALTDPEGCPLSRFKDSLGNPTHILRIGESYKEKQRTIQAKKEVEQRRAGGYSRKYASKAKNLADDMVRNTARDLLYYAVTQDAMLIFENLSRGFGRQGKRTFMAERQYTRMEDWLTAKLAYEGLPSKTYLSKTLAQYTSKTCSNCGFTITSADYDRVLEKLKKTATGWMTTINGKELKVEGQITYYNRYKRQNVVKDLSVELDRLSEESVNNDISSWTKGRSGEALSLLKKRFSHRPVQEKFVCLNCGFETHADEQAALNIARSWLFLRSQEYKKYQTNKTSTGNTDKRAFVETWQSFYRKKLKEVWKPAV

SEQ ID NO: 39238 - protein, 979 aa, synthetic construct
  REGION 1..979: note = engineered CasX variant
QEIKRINKIRRRLVKDSNTKKAGKTGPMKTLLVRVMTPDLRERLENLRKKPENIPQPISNTSRANLNKLLTDYTEMKKAILHVYWEEFQKDPVGLMSRVAQPASKKIDQNKLKPEMDEKGNLTTAGFACSQCGQPLFVYKLEQVSEKGKAYTNYFGRCNVAEHEKLILLAQLKPEKDSDEAVTYSLGKFGQRALDFYSIHVTKESTHPVKPLAQIAGNRYASVPVGKALSDACMGTIASFLSKYQDIIIEHQKVVKGNQKRLESLRELAGKENLEYPSVTLPPQPHTKEGVDAYNEVIARVRMWVNLNLWQKLKLSRDDAKPLLRLKGFPSFPLVERQANEVDWWDMVCNVKKLINEKKEDGKVFWQNLAGYKRQEALRPYLSSEEDRKKGKKFARYQLGDLLLHLEKKHGEDWGKVYDEAWERIDKKVEGLSKHIKLEEERRSEDAQSKAALTDWLRAKASFVIEGLKEADKDEFCRCELKLQKWYGDLRGKPFAIEAENSILDISGFSKQYNCAFIWQKDGVKKLNLYLIINYFKGGKLRFKKIKPEAFEANRFYTVINKKSGEIVPMEVNFNFDDPNLIILPLAFGKRQGREFIWNDLLSLETGSLQLANGRVIEKTLYNRRTRQDEPALFVALTFERREVLDSSNIKPMNLIGVDRGENIPAVIALTDPEGCPLSRFKDSLGNPTHILRIGESYKEKQRTIQAKKEVEQRRAGGYSRKYASKAKNLADDMVRNTARDLLYYAVTQDAMLIFENLSRGFGRQGKRTFMAERQYTRMEDWLTAKLAYEGLPSKTYLSKTLAQYTSKTCSNCGFTITSADYDRVLEKLKKTATGWMTTINGKELKVEGQITYYNRYKRQNVVKDLSVELDRLSEESVNNDISSWTKGRSGEALSLLKKRFSHRPVQEKFVCLNCGFETHADEQAALNIARSWLFLRSQEYKKYQTNKTSTGNTDKRAFVETWQSFYRKKLKEVWKPAV

SEQ ID NO: 39239 - protein, 979 aa, synthetic construct
  REGION 1..979: note = engineered CasX variant
QEIKRINKIRRRLVKDSNTKKAGKTGPMKTLLVRVMTPDLRERLENLRKKPENIPQPISNTSRANLNKLLTDYTEMKKAILHVYWEEFQKDPVGLMSRVAQPASKKIDQNKLKPEMDEKGNLTTAGFACSQCGQPLFVYKLEQVSEKGKAYTNYFGRCNVAEHEKLIKLAQLKPEKDSDEAVTYSLGKFGQRALDFYSIHVTKESTHPVKPLAQIAGNRYASGPVGKALSDACMGTIASFLSKYQDIIIEHQKVVKGNQKRLESLRELAGKENLEYPSVTLPPQPHTKEGVDAYNEVIARVRMWVNLNLWQKLKLSRDDAKPLLRLKGFPSFPLVERQANEVDWWDMVCNVKKLINEKKEDGKVFWQNLAGYKRQEALRPYLSSEEDRKKGKKFARYQLGDLLLHLEKKHGEDWGKVYDEAWERIDKKVEGLSKHIKLEEERRSEDAQSKAALTDWLRAKASFVIEGLKEADKDEFCRCELKLQKWYGDLRGKPFAIEAENSILDISGFSKQYNCAFIWQKDGVKKLNLYLIINYFKGGKLRFKKIKPEAFEANRFYTVINKKSGEIVPMEVNFNFDDPNLIILPLAFGKRQGREFIWNDLLSLETGSLQLANGRVIEKTLYNRRTRQDEPALFVALTFERREVLDSSNIKPMNLIGVDRGENIPAVIALTDPEGCPLSRFKDSLGNPTHILRIGESYKEKQRTIQAKKEVEQRRAGGYSRKYASKAKNLADDMVRNTARDLLYYAVTQDAMLIFENLSRGFGRQGKRTFMAERQYTRMEDWLTAKLAYEGLPSKTYLSKTLAQYTSKTCSNCGFTITSADYDRVLEKLKKTATGWMTTINGKELKVEGQITYYNRYKRQNVVKDLSVELDRLSEESVNNDISSWTKGRSGEALSLLKKRFSHRPVQEKFVCLNCGFETHADEQAALNIARSWLFLRSQEYKKYQTNKTSTGNTDKRAFVETWQSFYRKKLKEVWKPAV

SEQ ID NO: 39240 - protein, 978 aa, synthetic construct
  REGION 1..978: note = engineered CasX variant
QEIKRINKIRRRLVKDSNTKKAGKTGPMKTLLVRVMTPDLRERLENLRKKPENIPQPISNTSRANLNKLLTDYTEMKKAILHVYWEEFQKDPVGLMSRVAQPASKKIDQNKLKPEMDEKGNLTTAGFACSQCGQPLFVYKLEQVSEKGKAYTNYFGRCNVAEHEKLILLAQLKPEKDSDEAVTYSLGKFGQRALDFYSIHVTKESTHPVKPLAQIAGNRYASPVGKALSDACMGTIASFLSKYQDIIIEHQKVVKGNQKRLESLRELAGKENLEYPSVTLPPQPHTKEGVDAYNEVIARVRMWVNLNLWQKLKLSRDDAKPLLRLKGFPSFPLVERQANEVDWWDMVCNVKKLINEKKEDGKVFWQNLAGYKRQEALRPYLSSEEDRKKGKKFARYQLGDLLLHLEKKHGEDWGKVYDEAWERIDKKVEGLSKHIKLEEERRSEDAQSKAALTDWLRAKASFVIEGLKEADKDEFCRCELKLQKWYGDLRGKPFAIEAENSILDISGFSKQYNCAFIWQKDGVKKLNLYLIINYFKGGKLRFKKIKPEAFEANRFYTVINKKSGEIVPMEVNFNFDDPNLIILPLAFGKRQGREFIWNDLLSLETGSLQLANGRVIEKTLYNRRTRQDEPALFVALTFERREVLDSSNIKPMNLIGVDRGENIPAVIALTDPEGCPLSRFKDSLGNPTHILRIGESYKEKQRTIQAKKEVEQRRAGGYSRKYASKAKNLADDMVRNTARDLLYYAVTQDAMLIFENLSRGFGRQGKRTFMAERQYTRMEDWLTAKLAYEGLPSKTYLSKTLAQYTSKTCSNCGFTITSADYDRVLEKLKKTATGWMTTINGKELKVEGQITYYNRYKRQNVVKDLSVELDRLSEESVNNDISSWTKGRSGEALSLLKKRFSHRPVQEKFVCLNCGFETHADEQAALNIARSWLFLRSQEYKKYQTNKTSTGNTDKRAFVETWQSFYRKKLKEVWKPAV

SEQ ID NO: 39241 - protein, 979 aa, synthetic construct
  REGION 1..979: note = engineered CasX variant
QEIKRINKIRRRLVKDSNTKKAGKTGPMKTLLVRVMTPDLRERLENLRKKPENIPQPISNTSRANLNKLLTDYTEMKKAILHVYWEEFQKDPVGLMSRVAQPASKKIDQNKLKPEMDEKGNLTTAGFACSQCGQPLFVYKLEQVSEKGKAYTNYFGRCNVAEHEKLILLAQLKPEKDSDEAVTYSLGKFGQRALDFYSIHVTKESTHPVKPLAQIAGNRYASYPVGKALSDACMGTIASFLSKYQDIIIEHQKVVKGNQKRLESLRELAGKENLEYPSVTLPPQPHTKEGVDAYNEVIARVRMWVNLNLWQKLKLSRDDAKPLLRLKKFPSFPLVERQANEVDWWDMVCNVKKLINEKKEDGKVFWQNLAGYKRQEALRPYLSSEEDRKKGKKFARYQLGDLLLHLEKKHGEDWGKVYDEAWERIDKKVEGLSKHIKLEEERRSEDAQSKAALTDWLRAKASFVIEGLKEADKDEFCRCELKLQKWYGDLRGKPFAIEAENSILDISGFSKQYNCAFIWQKDGVKKLNLYLIINYFKGGKLRFKKIKPEAFEANRFYTVINKKSGEIVPMEVNFNFDDPNLIILPLAFGKRQGREFIWNDLLSLETGSLKLANGRVIEKTLYNRRTRQDEPALFVALTFERREVLDSSNIKPMNLIGVDRGENIPAVIALTDPEGCPLSRFKDSLGNPTHILRIGESYKEKQRTIQAKKEVEQRRAGGYSRKYASKAKNLADDMVRNTARDLLYYAVTQDAMLIFENLSRGFGRQGKRTFMAERQYTRMEDWLTAKLAYEGLPSKTYLSKTLAQYTSKTCSNCGFTITSADYDRVLEKLKKTATGWMTTINGKELKVEGQITYYNRYKRQNVVKDLSVELDRLSEESVNNDISSWTKGRSGEALSLLKKRFSHRPVQEKFVCLNCGFETHADEQAALNIARSWLFLRSQEYKKYQTNKTTGKNTDKRAFVETWQSFYRKKLKEVWKPAV

SEQ ID NO: 39242 - protein, 979 aa, synthetic construct
  REGION 1..979: note = engineered CasX variant
QEIKRINKIRRRLVKDSNTKKAGKTGPMKTLLVRVMTPDLRERLENLRKKPENIPQPISNTSRANLNKLLTDYTEMKKAILHVYWEEFQKDPVGLMSRVAQPASKKIDQNKLKPEMDEKGNLTTAGFACSQCGQPLFVYKLEQVSEKGKAYTNYFGRCNVAEHEKLILLAQLKPEKDSDEAVTYSLGKFGQRALDFYSIHVTKESTHPVKPLAQIAGNRYASHPVGKALSDACMGTIASFLSKYQDIIIEHQKVVKGNQKRLESLRELAGKENLEYPSVTLPPQPHTKEGVDAYNEVIARVRMWVNLNLWQKLKLSRDDAKPLLRLKKFPSFPLVERQANEVDWWDMVCNVKKLINEKKEDGKVFWQNLAGYKRQEALRPYLSSEEDRKKGKKFARYQLGDLLLHLEKKHGEDWGKVYDEAWERIDKKVEGLSKHIKLEEERRSEDAQSKAALTDWLRAKASFVIEGLKEADKDEFCRCELKLQKWYGDLRGKPFAIEAENSILDISGFSKQYNCAFIWQKDGVKKLNLYLIINYFKGGKLRFKKIKPEAFEANRFYTVINKKSGEIVPMEVNFNFDDPNLIILPLAFGKRQGREFIWNDLLSLETGSLKLANGRVIEKTLYNRRTRQDEPALFVALTFERREVLDSSNIKPMNLIGVDRGENIPAVIALTDPEGCPLSRFKDSLGNPTHILRIGESYKEKQRTIQAKKEVEQRRAGGYSRKYASKAKNLADDMVRNTARDLLYYAVTQDAMLIFENLSRGFGRQGKRTFMAERQYTRMEDWLTAKLAYEGLPSKTYLSKTLAQYTSKTCSNCGFTITSADYDRVLEKLKKTATGWMTTINGKELKVEGQITYYNRYKRQNVVKDLSVELDRLSEESVNNDISSWTKGRSGEALSLLKKRFSHRPVQEKFVCLNCGFETHADEQAALNIARSWLFLRSQEYKKYQTNKTTGKNTDKRAFVETWQSFYRKKLKEVWKPAV

SEQ ID NO: 39243 - protein, 979 aa, synthetic construct
  REGION 1..979: note = engineered CasX variant
QEIKRINKIRRRLVKDSNTKKAGKTGPMKTLLVRVMTPDLRERLENLRKKPENIPQPISNTSRANLNKLLTDYTEMKKAILHVYWEEFQKDPVGLMSRVAQPASKKIDQNKLKPEMDEKGNLTTAGFACSQCGQPLFVYKLEQVSEKGKAYTNYFGRCNVAEHEKLILLAQLKPEKDSDEAVTYSLGKFGQRALDFYSIHVTKESTHPVKPLAQIAGNRYASSPVGKALSDACMGTIASFLSKYQDIIIEHQKVVKGNQKRLESLRELAGKENLEYPSVTLPPQPHTKEGVDAYNEVIARVRMWVNLNLWQKLKLSRDDAKPLLRLKKFPSFPLVERQANEVDWWDMVCNVKKLINEKKEDGKVFWQNLAGYKRQEALRPYLSSEEDRKKGKKFARYQLGDLLLHLEKKHGEDWGKVYDEAWERIDKKVEGLSKHIKLEEERRSEDAQSKAALTDWLRAKASFVIEGLKEADKDEFCRCELKLQKWYGDLRGKPFAIEAENSILDISGFSKQYNCAFIWQKDGVKKLNLYLIINYFKGGKLRFKKIKPEAFEANRFYTVINKKSGEIVPMEVNFNFDDPNLIILPLAFGKRQGREFIWNDLLSLETGSLKLANGRVIEKTLYNRRTRQDEPALFVALTFERREVLDSSNIKPMNLIGVDRGENIPAVIALTDPEGCPLSRFKDSLGNPTHILRIGESYKEKQRTIQAKKEVEQRRAGGYSRKYASKAKNLADDMVRNTARDLLYYAVTQDAMLIFENLSRGFGRQGKRTFMAERQYTRMEDWLTAKLAYEGLPSKTYLSKTLAQYTSKTCSNCGFTITSADYDRVLEKLKKTATGWMTTINGKELKVEGQITYYNRYKRQNVVKDLSVELDRLSEESVNNDISSWTKGRSGEALSLLKKRFSHRPVQEKFVCLNCGFETHADEQAALNIARSWLFLRSQEYKKYQTNKTTGKNTDKRAFVETWQSFYRKKLKEVWKPAV

SEQ ID NO: 39244 - protein, 979 aa, synthetic construct
  REGION 1..979: note = engineered CasX variant
QEIKRINKIRRRLVKDSNTKKAGKTGPMKTLLVRVMTPDLRERLENLRKKPENIPQPISNTSRANLNKLLTDYTEMKKAILHVYWEEFQKDPVGLMSRVAQPASKKIDQNKLKPEMDEKGNLTTAGFACSQCGQPLFVYKLEQVSEKGKAYTNYFGRCNVAEHEKLILLAQLKPEKDSDEAVTYSLGKFGQRALDFYSIHVTKESTHPVKPLAQIAGNRYASTPVGKALSDACMGTIASFLSKYQDIIIEHQKVVKGNQKRLESLRELAGKENLEYPSVTLPPQPHTKEGVDAYNEVIARVRMWVNLNLWQKLKLSRDDAKPLLRLKKFPSFPLVERQANEVDWWDMVCNVKKLINEKKEDGKVFWQNLAGYKRQEALRPYLSSEEDRKKGKKFARYQLGDLLLHLEKKHGEDWGKVYDEAWERIDKKVEGLSKHIKLEEERRSEDAQSKAALTDWLRAKASFVIEGLKEADKDEFCRCELKLQKWYGDLRGKPFAIEAENSILDISGFSKQYNCAFIWQKDGVKKLNLYLIINYFKGGKLRFKKIKPEAFEANRFYTVINKKSGEIVPMEVNFNFDDPNLIILPLAFGKRQGREFIWNDLLSLETGSLKLANGRVIEKTLYNRRTRQDEPALFVALTFERREVLDSSNIKPMNLIGVDRGENIPAVIALTDPEGCPLSRFKDSLGNPTHILRIGESYKEKQRTIQAKKEVEQRRAGGYSRKYASKAKNLADDMVRNTARDLLYYAVTQDAMLIFENLSRGFGRQGKRTFMAERQYTRMEDWLTAKLAYEGLPSKTYLSKTLAQYTSKTCSNCGFTITSADYDRVLEKLKKTATGWMTTINGKELKVEGQITYYNRYKRQNVVKDLSVELDRLSEESVNNDISSWTKGRSGEALSLLKKRFSHRPVQEKFVCLNCGFETHADEQAALNIARSWLFLRSQEYKKYQTNKTTGKNTDKRAFVETWQSFYRKKLKEVWKPAV

SEQ ID NO: 39245 - protein, 979 aa, synthetic construct
  REGION 1..979: note = engineered CasX variant
QEIKRINKIRRRLVKDSNTKKAGKTGPMKTLLVRVMTPDLRERLENLRKKPENIPQPISNTSRANLNKLLTDYTEMKKAILHVYWEEFQKDPVGLMSRVAQPASKKIDQNKLKPEMDEKGNLTTAGFACSQCGQPLFVYKLEQVSEKGKAYTNYFGRCNVAEHEKLILLAQLKPEKDSDEAVTYSLGKFGQRALDFYSIHVTKESTHPVKPLAQIAGNRYASAPVGKALSDACMGTIASFLSKYQDIIIEHQKVVKGNQKRLESLRELAGKENLEYPSVTLPPQPHTKEGVDAYNEVIARVRMWVNLNLWQKLKLSRDDAKPLLRLKKFPSFPLVERQANEVDWWDMVCNVKKLINEKKEDGKVFWQNLAGYKRQEALRPYLSSEEDRKKGKKFARYQLGDLLLHLEKKHGEDWGKVYDEAWERIDKKVEGLSKHIKLEEERRSEDAQSKAALTDWLRAKASFVIEGLKEADKDEFCRCELKLQKWYGDLRGKPFAIEAENSILDISGFSKQYNCAFIWQKDGVKKLNLYLIINYFKGGKLRFKKIKPEAFEANRFYTVINKKSGEIVPMEVNFNFDDPNLIILPLAFGKRQGREFIWNDLLSLETGSLKLANGRVIEKTLYNRRTRQDEPALFVALTFERREVLDSSNIKPMNLIGVDRGENIPAVIALTDPEGCPLSRFKDSLGNPTHILRIGESYKEKQRTIQAKKEVEQRRAGGYSRKYASKAKNLADDMVRNTARDLLYYAVTQDAMLIFENLSRGFGRQGKRTFMAERQYTRMEDWLTAKLAYEGLPSKTYLSKTLAQYTSKTCSNCGFTITSADYDRVLEKLKKTATGWMTTINGKELKVEGQITYYNRYKRQNVVKDLSVELDRLSEESVNNDISSWTKGRSGEALSLLKKRFSHRPVQEKFVCLNCGFETHADEQAALNIARSWLFLRSQEYKKYQTNKTTGKNTDKRAFVETWQSFYRKKLKEVWKPAV

SEQ ID NO: 39246 - protein, 979 aa, synthetic construct
  REGION 1..979: note = engineered CasX variant
QEIKRINKIRRRLVKDSNTKKAGKTGPMKTLLVRVMTPDLRERLENLRKKPENIPQPISNTSRANLNKLLTDYTEMKKAILHVYWEEFQKDPVGLMSRVAQPASKKIDQNKLKPEMDEKGNLTTAGFACSQCGQPLFVYKLEQVSEKGKAYTNYFGRCNVAEHEKLILLAQLKPEKDSDEAVTYSLGKFGQRALDFYSIHVTKESTHPVKPLAQIAGNRYASVPVGKALSDACMGTIASFLSKYQDIIIEHQKVVKGNQKRLESLRELAGKENLEYPSVTLPPQPHTKEGVDAYNEVIARVRMWVNLNLWQKLKLSRDDAKPLLRLKKFPSFPLVERQANEVDWWDMVCNVKKLINEKKEDGKVFWQNLAGYKRQEALRPYLSSEEDRKKGKKFARYQLGDLLLHLEKKHGEDWGKVYDEAWERIDKKVEGLSKHIKLEEERRSEDAQSKAALTDWLRAKASFVIEGLKEADKDEFCRCELKLQKWYGDLRGKPFAIEAENSILDISGFSKQYNCAFIWQKDGVKKLNLYLIINYFKGGKLRFKKIKPEAFEANRFYTVINKKSGEIVPMEVNFNFDDPNLIILPLAFGKRQGREFIWNDLLSLETGSLKLANGRVIEKTLYNRRTRQDEPALFVALTFERREVLDSSNIKPMNLIGVDRGENIPAVIALTDPEGCPLSRFKDSLGNPTHILRIGESYKEKQRTIQAKKEVEQRRAGGYSRKYASKAKNLADDMVRNTARDLLYYAVTQDAMLIFENLSRGFGRQGKRTFMAERQYTRMEDWLTAKLAYEGLPSKTYLSKTLAQYTSKTCSNCGFTITSADYDRVLEKLKKTATGWMTTINGKELKVEGQITYYNRYKRQNVVKDLSVELDRLSEESVNNDISSWTKGRSGEALSLLKKRFSHRPVQEKFVCLNCGFETHADEQAALNIARSWLFLRSQEYKKYQTNKTTGKNTDKRAFVETWQSFYRKKLKEVWKPAV

SEQ ID NO: 39247 - protein, 979 aa, synthetic construct
  REGION 1..979: note = engineered CasX variant
QEIKRINKIRRRLVKDSNTKKAGKTGPMKTLLVRVMTPDLRERLENLRKKPENIPQPISNTSRANLNKLLTDYTEMKKAILHVYWEEFQKDPVGLMSRVAQPASKKIDQNKLKPEMDEKGNLTTAGFACSQCGQPLFVYKLEQVSEKGKAYTNYFGRCNVAEHEKLIKLAQLKPEKDSDEAVTYSLGKFGQRALDFYSIHVTKESTHPVKPLAQIAGNRYASGPVGKALSDACMGTIASFLSKYQDIIIEHQKVVKGNQKRLESLRELAGKENLEYPSVTLPPQPHTKEGVDAYNEVIARVRMWVNLNLWQKLKLSRDDAKPLLRLKKFPSFPLVERQANEVDWWDMVCNVKKLINEKKEDGKVFWQNLAGYKRQEALRPYLSSEEDRKKGKKFARYQLGDLLLHLEKKHGEDWGKVYDEAWERIDKKVEGLSKHIKLEEERRSEDAQSKAALTDWLRAKASFVIEGLKEADKDEFCRCELKLQKWYGDLRGKPFAIEAENSILDISGFSKQYNCAFIWQKDGVKKLNLYLIINYFKGGKLRFKKIKPEAFEANRFYTVINKKSGEIVPMEVNFNFDDPNLIILPLAFGKRQGREFIWNDLLSLETGSLKLANGRVIEKTLYNRRTRQDEPALFVALTFERREVLDSSNIKPMNLIGVDRGENIPAVIALTDPEGCPLSRFKDSLGNPTHILRIGESYKEKQRTIQAKKEVEQRRAGGYSRKYASKAKNLADDMVRNTARDLLYYAVTQDAMLIFENLSRGFGRQGKRTFMAERQYTRMEDWLTAKLAYEGLPSKTYLSKTLAQYTSKTCSNCGFTITSADYDRVLEKLKKTATGWMTTINGKELKVEGQITYYNRYKRQNVVKDLSVELDRLSEESVNNDISSWTKGRSGEALSLLKKRFSHRPVQEKFVCLNCGFETHADEQAALNIARSWLFLRSQEYKKYQTNKTTGKNTDKRAFVETWQSFYRKKLKEVWKPAV

SEQ ID NO: 39248 - protein, 978 aa, synthetic construct
  REGION 1..978: note = engineered CasX variant
QEIKRINKIRRRLVKDSNTKKAGKTGPMKTLLVRVMTPDLRERLENLRKKPENIPQPISNTSRANLNKLLTDYTEMKKAILHVYWEEFQKDPVGLMSRVAQPASKKIDQNKLKPEMDEKGNLTTAGFACSQCGQPLFVYKLEQVSEKGKAYTNYFGRCNVAEHEKLILLAQLKPEKDSDEAVTYSLGKFGQRALDFYSIHVTKESTHPVKPLAQIAGNRYASPVGKALSDACMGTIASFLSKYQDIIIEHQKVVKGNQKRLESLRELAGKENLEYPSVTLPPQPHTKEGVDAYNEVIARVRMWVNLNLWQKLKLSRDDAKPLLRLKKFPSFPLVERQANEVDWWDMVCNVKKLINEKKEDGKVFWQNLAGYKRQEALRPYLSSEEDRKKGKKFARYQLGDLLLHLEKKHGEDWGKVYDEAWERIDKKVEGLSKHIKLEEERRSEDAQSKAALTDWLRAKASFVIEGLKEADKDEFCRCELKLQKWYGDLRGKPFAIEAENSILDISGFSKQYNCAFIWQKDGVKKLNLYLIINYFKGGKLRFKKIKPEAFEANRFYTVINKKSGEIVPMEVNFNFDDPNLIILPLAFGKRQGREFIWNDLLSLETGSLKLANGRVIEKTLYNRRTRQDEPALFVALTFERREVLDSSNIKPMNLIGVDRGENIPAVIALTDPEGCPLSRFKDSLGNPTHILRIGESYKEKQRTIQAKKEVEQRRAGGYSRKYASKAKNLADDMVRNTARDLLYYAVTQDAMLIFENLSRGFGRQGKRTFMAERQYTRMEDWLTAKLAYEGLPSKTYLSKTLAQYTSKTCSNCGFTITSADYDRVLEKLKKTATGWMTTINGKELKVEGQITYYNRYKRQNVVKDLSVELDRLSEESVNNDISSWTKGRSGEALSLLKKRFSHRPVQEKFVCLNCGFETHADEQAALNIARSWLFLRSQEYKKYQTNKTTGKNTDKRAFVETWQSFYRKKLKEVWKPAV

SEQ ID NO: 39249 - protein, 979 aa, synthetic construct
  REGION 1..979: note = engineered CasX variant
QEIKRINKIRRRLVKDSNTKKAGKTGPMKTLLVRVMTPDLRERLENLRKKPENIPQPISNTSRANLNKLLTDYTEMKKAILHVYWEEFQKDPVGLMSRVAQPASKKIDQNKLKPEMDEKGNLTTAGFACSQCGQPLFVYKLEQVSEKGKAYTNYFGRCNVAEHEKLILLAQLKPEKDSDEAVTYSLGKFGQRALDFYSIHVTKESTHPVKPLAQIAGNRYASYPVGKALSDACMGTIASFLSKYQDIIIEHQKVVKGNQKRLESLRELAGKENLEYPSVTLPPQPHTKEGVDAYNEVIARVRMWVNLNLWQKLKLSRDDAKPLLRLKGFPSFPLVERQANEVDWWDMVCNVKKLINEKKEDGKVFWQNLAGYKRQEALRPYLSSEEDRKKGKKFARYQLGDLLLHLEKKHGEDWGKVYDEAWERIDKKVEGLSKHIKLEEERRSEDAQSKAALTDWLRAKASFVIEGLKEADKDEFCRCELKLQKWYGDLRGKPFAIEAENSILDISGFSKQYNCAFIWQKDGVKKLNLYLIINYFKGGKLRFKKIKPEAFEANRFYTVINKKSGEIVPMEVNFNFDDPNLIILPLAFGKRQGREFIWNDLLSLETGSLKLANGRVIEKTLYNRRTRQDEPALFVALTFERREVLDSSNIKPMNLIGVDRGENIPAVIALTDPEGCPLSRFKDSLGNPTHILRIGERYKEKQRTIQAKKEVEQRRAGGYSRKYASKAKNLADDMVRNTARDLLYYAVTQDAMLIFENLSRGFGRQGKRTFMAERQYTRMEDWLTAKLAYEGLPSKTYLSKTLAQYTSKTCSNCGFTITSADYDRVLEKLKKTATGWMTTINGKELKVEGQITYYNRYKRQNVVKDLSVELDRLSEESVNNDISSWTKGRSGEALSLLKKRFSHRPVQEKFVCLNCGFETHADEQAALNIARSWLFLRSQEYKKYQTNKTTGKNTDKRAFVETWQSFYRKKLKEVWKPAV

SEQ ID NO: 39250 - protein, 979 aa, synthetic construct
  REGION 1..979: note = engineered CasX variant
QEIKRINKIRRRLVKDSNTKKAGKTGPMKTLLVRVMTPDLRERLENLRKKPENIPQPISNTSRANLNKLLTDYTEMKKAILHVYWEEFQKDPVGLMSRVAQPASKKIDQNKLKPEMDEKGNLTTAGFACSQCGQPLFVYKLEQVSEKGKAYTNYFGRCNVAEHEKLILLAQLKPEKDSDEAVTYSLGKFGQRALDFYSIHVTKESTHPVKPLAQIAGNRYASHPVGKALSDACMGTIASFLSKYQDIIIEHQKVVKGNQKRLESLRELAGKENLEYPSVTLPPQPHTKEGVDAYNEVIARVRMWVNLNLWQKLKLSRDDAKPLLRLKGFPSFPLVERQANEVDWWDMVCNVKKLINEKKEDGKVFWQNLAGYKRQEALRPYLSSEEDRKKGKKFARYQLGDLLLHLEKKHGEDWGKVYDEAWERIDKKVEGLSKHIKLEEERRSEDAQSKAALTDWLRAKASFVIEGLKEADKDEFCRCELKLQKWYGDLRGKPFAIEAENSILDISGFSKQYNCAFIWQKDGVKKLNLYLIINYFKGGKLRFKKIKPEAFEANRFYTVINKKSGEIVPMEVNFNFDDPNLIILPLAFGKRQGREFIWNDLLSLETGSLKLANGRVIEKTLYNRRTRQDEPALFVALTFERREVLDSSNIKPMNLIGVDRGENIPAVIALTDPEGCPLSRFKDSLGNPTHILRIGERYKEKQRTIQAKKEVEQRRAGGYSRKYASKAKNLADDMVRNTARDLLYYAVTQDAMLIFENLSRGFGRQGKRTFMAERQYTRMEDWLTAKLAYEGLPSKTYLSKTLAQYTSKTCSNCGFTITSADYDRVLEKLKKTATGWMTTINGKELKVEGQITYYNRYKRQNVVKDLSVELDRLSEESVNNDISSWTKGRSGEALSLLKKRFSHRPVQEKFVCLNCGFETHADEQAALNIARSWLFLRSQEYKKYQTNKTTGKNTDKRAFVETWQSFYRKKLKEVWKPAV

SEQ ID NO: 39251 - protein, 979 aa, synthetic construct
  REGION 1..979: note = engineered CasX variant
QEIKRINKIRRRLVKDSNTKKAGKTGPMKTLLVRVMTPDLRERLENLRKKPENIPQPISNTSRANLNKLLTDYTEMKKAILHVYWEEFQKDPVGLMSRVAQPASKKIDQNKLKPEMDEKGNLTTAGFACSQCGQPLFVYKLEQVSEKGKAYTNYFGRCNVAEHEKLILLAQLKPEKDSDEAVTYSLGKFGQRALDFYSIHVTKESTHPVKPLAQIAGNRYASSPVGKALSDACMGTIASFLSKYQDIIIEHQKVVKGNQKRLESLRELAGKENLEYPSVTLPPQPHTKEGVDAYNEVIARVRMWVNLNLWQKLKLSRDDAKPLLRLKGFPSFPLVERQANEVDWWDMVCNVKKLINEKKEDGKVFWQNLAGYKRQEALRPYLSSEEDRKKGKKFARYQLGDLLLHLEKKHGEDWGKVYDEAWERIDKKVEGLSKHIKLEEERRSEDAQSKAALTDWLRAKASFVIEGLKEADKDEFCRCELKLQKWYGDLRGKPFAIEAENSILDISGFSKQYNCAFIWQKDGVKKLNLYLIINYFKGGKLRFKKIKPEAFEANRFYTVINKKSGEIVPMEVNFNFDDPNLIILPLAFGKRQGREFIWNDLLSLETGSLKLANGRVIEKTLYNRRTRQDEPALFVALTFERREVLDSSNIKPMNLIGVDRGENIPAVIALTDPEGCPLSRFKDSLGNPTHILRIGERYKEKQRTIQAKKEVEQRRAGGYSRKYASKAKNLADDMVRNTARDLLYYAVTQDAMLIFENLSRGFGRQGKRTFMAERQYTRMEDWLTAKLAYEGLPSKTYLSKTLAQYTSKTCSNCGFTITSADYDRVLEKLKKTATGWMTTINGKELKVEGQITYYNRYKRQNVVKDLSVELDRLSEESVNNDISSWTKGRSGEALSLLKKRFSHRPVQEKFVCLNCGFETHADEQAALNIARSWLFLRSQEYKKYQTNKTTGKNTDKRAFVETWQSFYRKKLKEVWKPAV

SEQ ID NO: 39252 - protein, 979 aa, synthetic construct
  REGION 1..979: note = engineered CasX variant
QEIKRINKIRRRLVKDSNTKKAGKTGPMKTLLVRVMTPDLRERLENLRKKPENIPQPISNTSRANLNKLLTDYTEMKKAILHVYWEEFQKDPVGLMSRVAQPASKKIDQNKLKPEMDEKGNLTTAGFACSQCGQPLFVYKLEQVSEKGKAYTNYFGRCNVAEHEKLILLAQLKPEKDSDEAVTYSLGKFGQRALDFYSIHVTKESTHPVKPLAQIAGNRYASTPVGKALSDACMGTIASFLSKYQDIIIEHQKVVKGNQKRLESLRELAGKENLEYPSVTLPPQPHTKEGVDAYNEVIARVRMWVNLNLWQKLKLSRDDAKPLLRLKGFPSFPLVERQANEVDWWDMVCNVKKLINEKKEDGKVFWQNLAGYKRQEALRPYLSSEEDRKKGKKFARYQLGDLLLHLEKKHGEDWGKVYDEAWERIDKKVEGLSKHIKLEEERRSEDAQSKAALTDWLRAKASFVIEGLKEADKDEFCRCELKLQKWYGDLRGKPFAIEAENSILDISGFSKQYNCAFIWQKDGVKKLNLYLIINYFKGGKLRFKKIKPEAFEANRFYTVINKKSGEIVPMEVNFNFDDPNLIILPLAFGKRQGREFIWNDLLSLETGSLKLANGRVIEKTLYNRRTRQDEPALFVALTFERREVLDSSNIKPMNLIGVDRGENIPAVIALTDPEGCPLSRFKDSLGNPTHILRIGERYKEKQRTIQAKKEVEQRRAGGYSRKYASKAKNLADDMVRNTARDLLYYAVTQDAMLIFENLSRGFGRQGKRTFMAERQYTRMEDWLTAKLAYEGLPSKTYLSKTLAQYTSKTCSNCGFTITSADYDRVLEKLKKTATGWMTTINGKELKVEGQITYYNRYKRQNVVKDLSVELDRLSEESVNNDISSWTKGRSGEALSLLKKRFSHRPVQEKFVCLNCGFETHADEQAALNIARSWLFLRSQEYKKYQTNKTTGKNTDKRAFVETWQSFYRKKLKEVWKPAV

SEQ ID NO: 39253 - protein, 979 aa, synthetic construct
  REGION 1..979: note = engineered CasX variant
QEIKRINKIRRRLVKDSNTKKAGKTGPMKTLLVRVMTPDLRERLENLRKKPENIPQPISNTSRANLNKLLTDYTEMKKAILHVYWEEFQKDPVGLMSRVAQPASKKIDQNKLKPEMDEKGNLTTAGFACSQCGQPLFVYKLEQVSEKGKAYTNYFGRCNVAEHEKLILLAQLKPEKDSDEAVTYSLGKFGQRALDFYSIHVTKESTHPVKPLAQIAGNRYASAPVGKALSDACMGTIASFLSKYQDIIIEHQKVVKGNQKRLESLRELAGKENLEYPSVTLPPQPHTKEGVDAYNEVIARVRMWVNLNLWQKLKLSRDDAKPLLRLKGFPSFPLVERQANEVDWWDMVCNVKKLINEKKEDGKVFWQNLAGYKRQEALRPYLSSEEDRKKGKKFARYQLGDLLLHLEKKHGEDWGKVYDEAWERIDKKVEGLSKHIKLEEERRSEDAQSKAALTDWLRAKASFVIEGLKEADKDEFCRCELKLQKWYGDLRGKPFAIEAENSILDISGFSKQYNCAFIWQKDGVKKLNLYLIINYFKGGKLRFKKIKPEAFEANRFYTVINKKSGEIVPMEVNFNFDDPNLIILPLAFGKRQGREFIWNDLLSLETGSLKLANGRVIEKTLYNRRTRQDEPALFVALTFERREVLDSSNIKPMNLIGVDRGENIPAVIALTDPEGCPLSRFKDSLGNPTHILRIGERYKEKQRTIQAKKEVEQRRAGGYSRKYASKAKNLADDMVRNTARDLLYYAVTQDAMLIFENLSRGFGRQGKRTFMAERQYTRMEDWLTAKLAYEGLPSKTYLSKTLAQYTSKTCSNCGFTITSADYDRVLEKLKKTATGWMTTINGKELKVEGQITYYNRYKRQNVVKDLSVELDRLSEESVNNDISSWTKGRSGEALSLLKKRFSHRPVQEKFVCLNCGFETHADEQAALNIARSWLFLRSQEYKKYQTNKTTGKNTDKRAFVETWQSFYRKKLKEVWKPAV

SEQ ID NO: 39254 - protein, 979 aa, synthetic construct
  REGION 1..979: note = engineered CasX variant
QEIKRINKIRRRLVKDSNTKKAGKTGPMKTLLVRVMTPDLRERLENLRKKPENIPQPISNTSRANLNKLLTDYTEMKKAILHVYWEEFQKDPVGLMSRVAQPASKKIDQNKLKPEMDEKGNLTTAGFACSQCGQPLFVYKLEQVSEKGKAYTNYFGRCNVAEHEKLILLAQLKPEKDSDEAVTYSLGKFGQRALDFYSIHVTKESTHPVKPLAQIAGNRYASVPVGKALSDACMGTIASFLSKYQDIIIEHQKVVKGNQKRLESLRELAGKENLEYPSVTLPPQPHTKEGVDAYNEVIARVRMWVNLNLWQKLKLSRDDAKPLLRLKGFPSFPLVERQANEVDWWDMVCNVKKLINEKKEDGKVFWQNLAGYKRQEALRPYLSSEEDRKKGKKFARYQLGDLLLHLEKKHGEDWGKVYDEAWERIDKKVEGLSKHIKLEEERRSEDAQSKAALTDWLRAKASFVIEGLKEADKDEFCRCELKLQKWYGDLRGKPFAIEAENSILDISGFSKQYNCAFIWQKDGVKKLNLYLIINYFKGGKLRFKKIKPEAFEANRFYTVINKKSGEIVPMEVNFNFDDPNLIILPLAFGKRQGREFIWNDLLSLETGSLKLANGRVIEKTLYNRRTRQDEPALFVALTFERREVLDSSNIKPMNLIGVDRGENIPAVIALTDPEGCPLSRFKDSLGNPTHILRIGERYKEKQRTIQAKKEVEQRRAGGYSRKYASKAKNLADDMVRNTARDLLYYAVTQDAMLIFENLSRGFGRQGKRTFMAERQYTRMEDWLTAKLAYEGLPSKTYLSKTLAQYTSKTCSNCGFTITSADYDRVLEKLKKTATGWMTTINGKELKVEGQITYYNRYKRQNVVKDLSVELDRLSEESVNNDISSWTKGRSGEALSLLKKRFSHRPVQEKFVCLNCGFETHADEQAALNIARSWLFLRSQEYKKYQTNKTTGKNTDKRAFVETWQSFYRKKLKEVWKPAV

SEQ ID NO: 39255 - protein, 979 aa, synthetic construct
  REGION 1..979: note = engineered CasX variant
QEIKRINKIRRRLVKDSNTKKAGKTGPMKTLLVRVMTPDLRERLENLRKKPENIPQPISNTSRANLNKLLTDYTEMKKAILHVYWEEFQKDPVGLMSRVAQPASKKIDQNKLKPEMDEKGNLTTAGFACSQCGQPLFVYKLEQVSEKGKAYTNYFGRCNVAEHEKLIKLAQLKPEKDSDEAVTYSLGKFGQRALDFYSIHVTKESTHPVKPLAQIAGNRYASGPVGKALSDACMGTIASFLSKYQDIIIEHQKVVKGNQKRLESLRELAGKENLEYPSVTLPPQPHTKEGVDAYNEVIARVRMWVNLNLWQKLKLSRDDAKPLLRLKGFPSFPLVERQANEVDWWDMVCNVKKLINEKKEDGKVFWQNLAGYKRQEALRPYLSSEEDRKKGKKFARYQLGDLLLHLEKKHGEDWGKVYDEAWERIDKKVEGLSKHIKLEEERRSEDAQSKAALTDWLRAKASFVIEGLKEADKDEFCRCELKLQKWYGDLRGKPFAIEAENSILDISGFSKQYNCAFIWQKDGVKKLNLYLIINYFKGGKLRFKKIKPEAFEANRFYTVINKKSGEIVPMEVNFNFDDPNLIILPLAFGKRQGREFIWNDLLSLETGSLKLANGRVIEKTLYNRRTRQDEPALFVALTFERREVLDSSNIKPMNLIGVDRGENIPAVIALTDPEGCPLSRFKDSLGNPTHILRIGERYKEKQRTIQAKKEVEQRRAGGYSRKYASKAKNLADDMVRNTARDLLYYAVTQDAMLIFENLSRGFGRQGKRTFMAERQYTRMEDWLTAKLAYEGLPSKTYLSKTLAQYTSKTCSNCGFTITSADYDRVLEKLKKTATGWMTTINGKELKVEGQITYYNRYKRQNVVKDLSVELDRLSEESVNNDISSWTKGRSGEALSLLKKRFSHRPVQEKFVCLNCGFETHADEQAALNIARSWLFLRSQEYKKYQTNKTTGKNTDKRAFVETWQSFYRKKLKEVWKPAV

SEQ ID NO: 39256 - protein, 978 aa, synthetic construct
  REGION 1..978: note = engineered CasX variant
QEIKRINKIRRRLVKDSNTKKAGKTGPMKTLLVRVMTPDLRERLENLRKKPENIPQPISNTSRANLNKLLTDYTEMKKAILHVYWEEFQKDPVGLMSRVAQPASKKIDQNKLKPEMDEKGNLTTAGFACSQCGQPLFVYKLEQVSEKGKAYTNYFGRCNVAEHEKLILLAQLKPEKDSDEAVTYSLGKFGQRALDFYSIHVTKESTHPVKPLAQIAGNRYASPVGKALSDACMGTIASFLSKYQDIIIEHQKVVKGNQKRLESLRELAGKENLEYPSVTLPPQPHTKEGVDAYNEVIARVRMWVNLNLWQKLKLSRDDAKPLLRLKGFPSFPLVERQANEVDWWDMVCNVKKLINEKKEDGKVFWQNLAGYKRQEALRPYLSSEEDRKKGKKFARYQLGDLLLHLEKKHGEDWGKVYDEAWERIDKKVEGLSKHIKLEEERRSEDAQSKAALTDWLRAKASFVIEGLKEADKDEFCRCELKLQKWYGDLRGKPFAIEAENSILDISGFSKQYNCAFIWQKDGVKKLNLYLIINYFKGGKLRFKKIKPEAFEANRFYTVINKKSGEIVPMEVNFNFDDPNLIILPLAFGKRQGREFIWNDLLSLETGSLKLANGRVIEKTLYNRRTRQDEPALFVALTFERREVLDSSNIKPMNLIGVDRGENIPAVIALTDPEGCPLSRFKDSLGNPTHILRIGERYKEKQRTIQAKKEVEQRRAGGYSRKYASKAKNLADDMVRNTARDLLYYAVTQDAMLIFENLSRGFGRQGKRTFMAERQYTRMEDWLTAKLAYEGLPSKTYLSKTLAQYTSKTCSNCGFTITSADYDRVLEKLKKTATGWMTTINGKELKVEGQITYYNRYKRQNVVKDLSVELDRLSEESVNNDISSWTKGRSGEALSLLKKRFSHRPVQEKFVCLNCGFETHADEQAALNIARSWLFLRSQEYKKYQTNKTTGKNTDKRAFVETWQSFYRKKLKEVWKPAV

SEQ ID NO: 39257 - protein, 979 aa, synthetic construct
  REGION 1..979: note = engineered CasX variant
QEIKRINKIRRRLVKDSNTKKAGKTGPMKTLLVRVMTPDLRERLENLRKKPENIPQPISNTSRANLNKLLTDYTEMKKAILHVYWEEFQKDPVGLMSRVAQPASKKIDQNKLKPEMDEKGNLTTAGFACSQCGQPLFVYKLEQVSEKGKAYTNYFGRCNVAEHEKLILLAQLKPEKDSDEAVTYSLGKFGQRALDFYSIHVTKESTHPVKPLAQIAGNRYASYPVGKALSDACMGTIASFLSKYQDIIIEHQKVVKGNQKRLESLRELAGKENLEYPSVTLPPQPHTKEGVDAYNEVIARVRMWVNLNLWQKLKLSRDDAKPLLRLKGFPSFPLVERQANEVDWWDMVCNVKKLINEKKEDGKVFWQNLAGYKRQEALRPYLSSEEDRKKGKKFARYQLGDLLLHLEKKHGEDWGKVYDEAWERIDKKVEGLSKHIKLEEERRSEDAQSKAALTDWLRAKASFVIEGLKEADKDEFCRCELKLQKWYGDLRGKPFAIEAENSILDISGFSKQYNCAFIWQKDGVKKLNLYLIINYFKGGKLRFKKIKPEAFEANRFYTVINKKSGEIVPMEVNFNFDDPNLIILPLAFGKRQGREFIWNDLLSLETGSLQLANGRVIEKTLYNRRTRQDEPALFVALTFERREVLDSSNIKPMNLIGVDRGENIPAVIALTDPEGCPLSRFKDSLGNPTHILRIGESYKEKQRTIQAKKEVEQRRAGGYSRKYASKAKNLADDMVRNTARDLLYYAVTQDAMLIFENLSRGFGRQGKRTFMAERQYTRMEDWLTAKLAYEGLPSKTYLSKTLAQYTSKTCSNCGFTITSADYDRVLEKLKKTATGWMTTINGKELKVEGQITYYNRYKRQNVVKDLSVELDRLSEESVNNDISSWTKGRSGEALSLLKKRFSHRPVQEKFVCLNCGFETHADEQAALNIARSWLFLRSQEYKKYQTNKTTGKNTDKRAFVETWQSFYRKKLKEVWKPAV

SEQ ID NO: 39258 - protein, 979 aa, synthetic construct
  REGION 1..979: note = engineered CasX variant
QEIKRINKIRRRLVKDSNTKKAGKTGPMKTLLVRVMTPDLRERLENLRKKPENIPQPISNTSRANLNKLLTDYTEMKKAILHVYWEEFQKDPVGLMSRVAQPASKKIDQNKLKPEMDEKGNLTTAGFACSQCGQPLFVYKLEQVSEKGKAYTNYFGRCNVAEHEKLILLAQLKPEKDSDEAVTYSLGKFGQRALDFYSIHVTKESTHPVKPLAQIAGNRYASHPVGKALSDACMGTIASFLSKYQDIIIEHQKVVKGNQKRLESLRELAGKENLEYPSVTLPPQPHTKEGVDAYNEVIARVRMWVNLNLWQKLKLSRDDAKPLLRLKGFPSFPLVERQANEVDWWDMVCNVKKLINEKKEDGKVFWQNLAGYKRQEALRPYLSSEEDRKKGKKFARYQLGDLLLHLEKKHGEDWGKVYDEAWERIDKKVEGLSKHIKLEEERRSEDAQSKAALTDWLRAKASFVIEGLKEADKDEFCRCELKLQKWYGDLRGKPFAIEAENSILDISGFSKQYNCAFIWQKDGVKKLNLYLIINYFKGGKLRFKKIKPEAFEANRFYTVINKKSGEIVPMEVNFNFDDPNLIILPLAFGKRQGREFIWNDLLSLETGSLQLANGRVIEKTLYNRRTRQDEPALFVALTFERREVLDSSNIKPMNLIGVDRGENIPAVIALTDPEGCPLSRFKDSLGNPTHILRIGESYKEKQRTIQAKKEVEQRRAGGYSRKYASKAKNLADDMVRNTARDLLYYAVTQDAMLIFENLSRGFGRQGKRTFMAERQYTRMEDWLTAKLAYEGLPSKTYLSKTLAQYTSKTCSNCGFTITSADYDRVLEKLKKTATGWMTTINGKELKVEGQITYYNRYKRQNVVKDLSVELDRLSEESVNNDISSWTKGRSGEALSLLKKRFSHRPVQEKFVCLNCGFETHADEQAALNIARSWLFLRSQEYKKYQTNKTTGKNTDKRAFVETWQSFYRKKLKEVWKPAV

SEQ ID NO: 39259 - protein, 979 aa, synthetic construct
  REGION 1..979: note = engineered CasX variant
QEIKRINKIRRRLVKDSNTKKAGKTGPMKTLLVRVMTPDLRERLENLRKKPENIPQPISNTSRANLNKLLTDYTEMKKAILHVYWEEFQKDPVGLMSRVAQPASKKIDQNKLKPEMDEKGNLTTAGFACSQCGQPLFVYKLEQVSEKGKAYTNYFGRCNVAEHEKLILLAQLKPEKDSDEAVTYSLGKFGQRALDFYSIHVTKESTHPVKPLAQIAGNRYASSPVGKALSDACMGTIASFLSKYQDIIIEHQKVVKGNQKRLESLRELAGKENLEYPSVTLPPQPHTKEGVDAYNEVIARVRMWVNLNLWQKLKLSRDDAKPLLRLKGFPSFPLVERQANEVDWWDMVCNVKKLINEKKEDGKVFWQNLAGYKRQEALRPYLSSEEDRKKGKKFARYQLGDLLLHLEKKHGEDWGKVYDEAWERIDKKVEGLSKHIKLEEERRSEDAQSKAALTDWLRAKASFVIEGLKEADKDEFCRCELKLQKWYGDLRGKPFAIEAENSILDISGFSKQYNCAFIWQKDGVKKLNLYLIINYFKGGKLRFKKIKPEAFEANRFYTVINKKSGEIVPMEVNFNFDDPNLIILPLAFGKRQGREFIWNDLLSLETGSLQLANGRVIEKTLYNRRTRQDEPALFVALTFERREVLDSSNIKPMNLIGVDRGENIPAVIALTDPEGCPLSRFKDSLGNPTHILRIGESYKEKQRTIQAKKEVEQRRAGGYSRKYASKAKNLADDMVRNTARDLLYYAVTQDAMLIFENLSRGFGRQGKRTFMAERQYTRMEDWLTAKLAYEGLPSKTYLSKTLAQYTSKTCSNCGFTITSADYDRVLEKLKKTATGWMTTINGKELKVEGQITYYNRYKRQNVVKDLSVELDRLSEESVNNDISSWTKGRSGEALSLLKKRFSHRPVQEKFVCLNCGFETHADEQAALNIARSWLFLRSQEYKKYQTNKTTGKNTDKRAFVETWQSFYRKKLKEVWKPAV

SEQ ID NO: 39260 - protein, 979 aa, synthetic construct
  REGION 1..979: note = engineered CasX variant
QEIKRINKIRRRLVKDSNTKKAGKTGPMKTLLVRVMTPDLRERLENLRKKPENIPQPISNTSRANLNKLLTDYTEMKKAILHVYWEEFQKDPVGLMSRVAQPASKKIDQNKLKPEMDEKGNLTTAGFACSQCGQPLFVYKLEQVSEKGKAYTNYFGRCNVAEHEKLILLAQLKPEKDSDEAVTYSLGKFGQRALDFYSIHVTKESTHPVKPLAQIAGNRYASTPVGKALSDACMGTIASFLSKYQDIIIEHQKVVKGNQKRLESLRELAGKENLEYPSVTLPPQPHTKEGVDAYNEVIARVRMWVNLNLWQKLKLSRDDAKPLLRLKGFPSFPLVERQANEVDWWDMVCNVKKLINEKKEDGKVFWQNLAGYKRQEALRPYLSSEEDRKKGKKFARYQLGDLLLHLEKKHGEDWGKVYDEAWERIDKKVEGLSKHIKLEEERRSEDAQSKAALTDWLRAKASFVIEGLKEADKDEFCRCELKLQKWYGDLRGKPFAIEAENSILDISGFSKQYNCAFIWQKDGVKKLNLYLIINYFKGGKLRFKKIKPEAFEANRFYTVINKKSGEIVPMEVNFNFDDPNLIILPLAFGKRQGREFIWNDLLSLETGSLQLANGRVIEKTLYNRRTRQDEPALFVALTFERREVLDSSNIKPMNLIGVDRGENIPAVIALTDPEGCPLSRFKDSLGNPTHILRIGESYKEKQRTIQAKKEVEQRRAGGYSRKYASKAKNLADDMVRNTARDLLYYAVTQDAMLIFENLSRGFGRQGKRTFMAERQYTRMEDWLTAKLAYEGLPSKTYLSKTLAQYTSKTCSNCGFTITSADYDRVLEKLKKTATGWMTTINGKELKVEGQITYYNRYKRQNVVKDLSVELDRLSEESVNNDISSWTKGRSGEALSLLKKRFSHRPVQEKFVCLNCGFETHADEQAALNIARSWLFLRSQEYKKYQTNKTTGKNTDKRAFVETWQSFYRKKLKEVWKPAV

SEQ ID NO: 39261 - protein, 979 aa, synthetic construct
  REGION 1..979: note = engineered CasX variant
QEIKRINKIRRRLVKDSNTKKAGKTGPMKTLLVRVMTPDLRERLENLRKKPENIPQPISNTSRANLNKLLTDYTEMKKAILHVYWEEFQKDPVGLMSRVAQPASKKIDQNKLKPEMDEKGNLTTAGFACSQCGQPLFVYKLEQVSEKGKAYTNYFGRCNVAEHEKLILLAQLKPEKDSDEAVTYSLGKFGQRALDFYSIHVTKESTHPVKPLAQIAGNRYASAPVGKALSDACMGTIASFLSKYQDIIIEHQKVVKGNQKRLESLRELAGKENLEYPSVTLPPQPHTKEGVDAYNEVIARVRMWVNLNLWQKLKLSRDDAKPLLRLKGFPSFPLVERQANEVDWWDMVCNVKKLINEKKEDGKVFWQNLAGYKRQEALRPYLSSEEDRKKGKKFARYQLGDLLLHLEKKHGEDWGKVYDEAWERIDKKVEGLSKHIKLEEERRSEDAQSKAALTDWLRAKASFVIEGLKEADKDEFCRCELKLQKWYGDLRGKPFAIEAENSILDISGFSKQYNCAFIWQKDGVKKLNLYLIINYFKGGKLRFKKIKPEAFEANRFYTVINKKSGEIVPMEVNFNFDDPNLIILPLAFGKRQGREFIWNDLLSLETGSLQLANGRVIEKTLYNRRTRQDEPALFVALTFERREVLDSSNIKPMNLIGVDRGENIPAVIALTDPEGCPLSRFKDSLGNPTHILRIGESYKEKQRTIQAKKEVEQRRAGGYSRKYASKAKNLADDMVRNTARDLLYYAVTQDAMLIFENLSRGFGRQGKRTFMAERQYTRMEDWLTAKLAYEGLPSKTYLSKTLAQYTSKTCSNCGFTITSADYDRVLEKLKKTATGWMTTINGKELKVEGQITYYNRYKRQNVVKDLSVELDRLSEESVNNDISSWTKGRSGEALSLLKKRFSHRPVQEKFVCLNCGFETHADEQAALNIARSWLFLRSQEYKKYQTNKTTGKNTDKRAFVETWQSFYRKKLKEVWKPAV

SEQ ID NO: 39262 - protein, 979 aa, synthetic construct
  REGION 1..979: note = engineered CasX variant
QEIKRINKIRRRLVKDSNTKKAGKTGPMKTLLVRVMTPDLRERLENLRKKPENIPQPISNTSRANLNKLLTDYTEMKKAILHVYWEEFQKDPVGLMSRVAQPASKKIDQNKLKPEMDEKGNLTTAGFACSQCGQPLFVYKLEQVSEKGKAYTNYFGRCNVAEHEKLILLAQLKPEKDSDEAVTYSLGKFGQRALDFYSIHVTKESTHPVKPLAQIAGNRYASVPVGKALSDACMGTIASFLSKYQDIIIEHQKVVKGNQKRLESLRELAGKENLEYPSVTLPPQPHTKEGVDAYNEVIARVRMWVNLNLWQKLKLSRDDAKPLLRLKGFPSFPLVERQANEVDWWDMVCNVKKLINEKKEDGKVFWQNLAGYKRQEALRPYLSSEEDRKKGKKFARYQLGDLLLHLEKKHGEDWGKVYDEAWERIDKKVEGLSKHIKLEEERRSEDAQSKAALTDWLRAKASFVIEGLKEADKDEFCRCELKLQKWYGDLRGKPFAIEAENSILDISGFSKQYNCAFIWQKDGVKKLNLYLIINYFKGGKLRFKKIKPEAFEANRFYTVINKKSGEIVPMEVNFNFDDPNLIILPLAFGKRQGREFIWNDLLSLETGSLQLANGRVIEKTLYNRRTRQDEPALFVALTFERREVLDSSNIKPMNLIGVDRGENIPAVIALTDPEGCPLSRFKDSLGNPTHILRIGESYKEKQRTIQAKKEVEQRRAGGYSRKYASKAKNLADDMVRNTARDLLYYAVTQDAMLIFENLSRGFGRQGKRTFMAERQYTRMEDWLTAKLAYEGLPSKTYLSKTLAQYTSKTCSNCGFTITSADYDRVLEKLKKTATGWMTTINGKELKVEGQITYYNRYKRQNVVKDLSVELDRLSEESVNNDISSWTKGRSGEALSLLKKRFSHRPVQEKFVCLNCGFETHADEQAALNIARSWLFLRSQEYKKYQTNKTTGKNTDKRAFVETWQSFYRKKLKEVWKPAV

SEQ ID NO: 39263 - protein, 979 aa, synthetic construct
  REGION 1..979: note = engineered CasX variant
QEIKRINKIRRRLVKDSNTKKAGKTGPMKTLLVRVMTPDLRERLENLRKKPENIPQPISNTSRANLNKLLTDYTEMKKAILHVYWEEFQKDPVGLMSRVAQPASKKIDQNKLKPEMDEKGNLTTAGFACSQCGQPLFVYKLEQVSEKGKAYTNYFGRCNVAEHEKLIKLAQLKPEKDSDEAVTYSLGKFGQRALDFYSIHVTKESTHPVKPLAQIAGNRYASGPVGKALSDACMGTIASFLSKYQDIIIEHQKVVKGNQKRLESLRELAGKENLEYPSVTLPPQPHTKEGVDAYNEVIARVRMWVNLNLWQKLKLSRDDAKPLLRLKGFPSFPLVERQANEVDWWDMVCNVKKLINEKKEDGKVFWQNLAGYKRQEALRPYLSSEEDRKKGKKFARYQLGDLLLHLEKKHGEDWGKVYDEAWERIDKKVEGLSKHIKLEEERRSEDAQSKAALTDWLRAKASFVIEGLKEADKDEFCRCELKLQKWYGDLRGKPFAIEAENSILDISGFSKQYNCAFIWQKDGVKKLNLYLIINYFKGGKLRFKKIKPEAFEANRFYTVINKKSGEIVPMEVNFNFDDPNLIILPLAFGKRQGREFIWNDLLSLETGSLQLANGRVIEKTLYNRRTRQDEPALFVALTFERREVLDSSNIKPMNLIGVDRGENIPAVIALTDPEGCPLSRFKDSLGNPTHILRIGESYKEKQRTIQAKKEVEQRRAGGYSRKYASKAKNLADDMVRNTARDLLYYAVTQDAMLIFENLSRGFGRQGKRTFMAERQYTRMEDWLTAKLAYEGLPSKTYLSKTLAQYTSKTCSNCGFTITSADYDRVLEKLKKTATGWMTTINGKELKVEGQITYYNRYKRQNVVKDLSVELDRLSEESVNNDISSWTKGRSGEALSLLKKRFSHRPVQEKFVCLNCGFETHADEQAALNIARSWLFLRSQEYKKYQTNKTTGKNTDKRAFVETWQSFYRKKLKEVWKPAV

SEQ ID NO: 39264 - protein, 978 aa, synthetic construct
  REGION 1..978: note = engineered CasX variant
QEIKRINKIRRRLVKDSNTKKAGKTGPMKTLLVRVMTPDLRERLENLRKKPENIPQPISNTSRANLNKLLTDYTEMKKAILHVYWEEFQKDPVGLMSRVAQPASKKIDQNKLKPEMDEKGNLTTAGFACSQCGQPLFVYKLEQVSEKGKAYTNYFGRCNVAEHEKLILLAQLKPEKDSDEAVTYSLGKFGQRALDFYSIHVTKESTHPVKPLAQIAGNRYASPVGKALSDACMGTIASFLSKYQDIIIEHQKVVKGNQKRLESLRELAGKENLEYPSVTLPPQPHTKEGVDAYNEVIARVRMWVNLNLWQKLKLSRDDAKPLLRLKGFPSFPLVERQANEVDWWDMVCNVKKLINEKKEDGKVFWQNLAGYKRQEALRPYLSSEEDRKKGKKFARYQLGDLLLHLEKKHGEDWGKVYDEAWERIDKKVEGLSKHIKLEEERRSEDAQSKAALTDWLRAKASFVIEGLKEADKDEFCRCELKLQKWYGDLRGKPFAIEAENSILDISGFSKQYNCAFIWQKDGVKKLNLYLIINYFKGGKLRFKKIKPEAFEANRFYTVINKKSGEIVPMEVNFNFDDPNLIILPLAFGKRQGREFIWNDLLSLETGSLQLANGRVIEKTLYNRRTRQDEPALFVALTFERREVLDSSNIKPMNLIGVDRGENIPAVIALTDPEGCPLSRFKDSLGNPTHILRIGESYKEKQRTIQAKKEVEQRRAGGYSRKYASKAKNLADDMVRNTARDLLYYAVTQDAMLIFENLSRGFGRQGKRTFMAERQYTRMEDWLTAKLAYEGLPSKTYLSKTLAQYTSKTCSNCGFTITSADYDRVLEKLKKTATGWMTTINGKELKVEGQITYYNRYKRQNVVKDLSVELDRLSEESVNNDISSWTKGRSGEALSLLKKRFSHRPVQEKFVCLNCGFETHADEQAALNIARSWLFLRSQEYKKYQTNKTTGKNTDKRAFVETWQSFYRKKLKEVWKPAV

SEQ ID NO: 39265 - protein, 978 aa, synthetic construct
  REGION 1..978: note = engineered CasX variant
QEIKRINKIRRRLVKDSNTKKAGKTGPMKTLLVRVMTPDLRERLENLRKKPENIPQPISNTSRANLNKLLTDYTEMKKAILHVYWEEFQKDPVGLMSRVAQPASKKIDQNKLKPEMDEKGNLTTAGFACSQCGQPLFVYKLEQVSEKGKAYTNYFGRCNVAEHEKLILLAQLKPEKDSDEAVTYSLGKFGQRALDFYSIHVTKESTHPVKPLAQIAGNRYASYPVGKALSDACMGTIASFLSKYQDIIIEHQKVVKGNQKRLESLRELAGKENLEYPSVTLPPQPHTKEGVDAYNEVIARVRMWVNLNLWQKLKLSRDDAKPLLRLKKFPSFPLVERQANEVDWWDMVCNVKKLINEKKEDGKVFWQNLAGYKRQEALRPYLSSEEDRKKGKKFARYQLGDLLLHLEKKHGEDWGKVYDEAWERIDKKVEGLSKHIKLEEERRSEDAQSKAALTDWLRAKASFVIEGLKEADKDEFCRCELKLQKWYGDLRGKPFAIEAENSILDISGFSKQYNCAFIWQKDGVKKLNLYLIINYFKGGKLRFKKIKPEAFEANRFYTVINKKSGEIVPMEVNFNFDDPNLIILPLAFGKRQGREFIWNDLLSLETGSLKLANGRVIEKTLYNRRTRQDEPALFVALTFERREVLDSSNIKPMNLIGVDRGENIPAVIALTDPEGCPLSRFKDSLGNPTHILRIGERYKEKQRTIQAKKEVEQRRAGGYSRKYASKAKNLADDMVRNTARDLLYYAVTQDAMLIFENLSRGFGRQGKRTFMAERQYTRMEDWLTAKLAYEGLPSKTYLSKTLAQYTSKTCSNCGFTITSADYDRVLEKLKKTATGWMTTINGKELKVEGQITYYNRYKRQNVVKDLSVELDRLSEESVNNDISSWTKGRSGEALSLLKKRFSHRPVQEKFVCLNCGFETHADEQAALNIARSWLFLRSQEYKKYQTNKTTGNTDKRAFVETWQSFYRKKLKEVWKPAV

SEQ ID NO: 39266 - protein, 978 aa, synthetic construct
  REGION 1..978: note = engineered CasX variant
QEIKRINKIRRRLVKDSNTKKAGKTGPMKTLLVRVMTPDLRERLENLRKKPENIPQPISNTSRANLNKLLTDYTEMKKAILHVYWEEFQKDPVGLMSRVAQPASKKIDQNKLKPEMDEKGNLTTAGFACSQCGQPLFVYKLEQVSEKGKAYTNYFGRCNVAEHEKLILLAQLKPEKDSDEAVTYSLGKFGQRALDFYSIHVTKESTHPVKPLAQIAGNRYASHPVGKALSDACMGTIASFLSKYQDIIIEHQKVVKGNQKRLESLRELAGKENLEYPSVTLPPQPHTKEGVDAYNEVIARVRMWVNLNLWQKLKLSRDDAKPLLRLKKFPSFPLVERQANEVDWWDMVCNVKKLINEKKEDGKVFWQNLAGYKRQEALRPYLSSEEDRKKGKKFARYQLGDLLLHLEKKHGEDWGKVYDEAWERIDKKVEGLSKHIKLEEERRSEDAQSKAALTDWLRAKASFVIEGLKEADKDEFCRCELKLQKWYGDLRGKPFAIEAENSILDISGFSKQYNCAFIWQKDGVKKLNLYLIINYFKGGKLRFKKIKPEAFEANRFYTVINKKSGEIVPMEVNFNFDDPNLIILPLAFGKRQGREFIWNDLLSLETGSLKLANGRVIEKTLYNRRTRQDEPALFVALTFERREVLDSSNIKPMNLIGVDRGENIPAVIALTDPEGCPLSRFKDSLGNPTHILRIGERYKEKQRTIQAKKEVEQRRAGGYSRKYASKAKNLADDMVRNTARDLLYYAVTQDAMLIFENLSRGFGRQGKRTFMAERQYTRMEDWLTAKLAYEGLPSKTYLSKTLAQYTSKTCSNCGFTITSADYDRVLEKLKKTATGWMTTINGKELKVEGQITYYNRYKRQNVVKDLSVELDRLSEESVNNDISSWTKGRSGEALSLLKKRFSHRPVQEKFVCLNCGFETHADEQAALNIARSWLFLRSQEYKKYQTNKTTGNTDKRAFVETWQSFYRKKLKEVWKPAV

SEQ ID NO: 39267 - protein, 978 aa, synthetic construct
  REGION 1..978: note = engineered CasX variant
QEIKRINKIRRRLVKDSNTKKAGKTGPMKTLLVRVMTPDLRERLENLRKKPENIPQPISNTSRANLNKLLTDYTEMKKAILHVYWEEFQKDPVGLMSRVAQPASKKIDQNKLKPEMDEKGNLTTAGFACSQCGQPLFVYKLEQVSEKGKAYTNYFGRCNVAEHEKLILLAQLKPEKDSDEAVTYSLGKFGQRALDFYSIHVTKESTHPVKPLAQIAGNRYASSPVGKALSDACMGTIASFLSKYQDIIIEHQKVVKGNQKRLESLRELAGKENLEYPSVTLPPQPHTKEGVDAYNEVIARVRMWVNLNLWQKLKLSRDDAKPLLRLKKFPSFPLVERQANEVDWWDMVCNVKKLINEKKEDGKVFWQNLAGYKRQEALRPYLSSEEDRKKGKKFARYQLGDLLLHLEKKHGEDWGKVYDEAWERIDKKVEGLSKHIKLEEERRSEDAQSKAALTDWLRAKASFVIEGLKEADKDEFCRCELKLQKWYGDLRGKPFAIEAENSILDISGFSKQYNCAFIWQKDGVKKLNLYLIINYFKGGKLRFKKIKPEAFEANRFYTVINKKSGEIVPMEVNFNFDDPNLIILPLAFGKRQGREFIWNDLLSLETGSLKLANGRVIEKTLYNRRTRQDEPALFVALTFERREVLDSSNIKPMNLIGVDRGENIPAVIALTDPEGCPLSRFKDSLGNPTHILRIGERYKEKQRTIQAKKEVEQRRAGGYSRKYASKAKNLADDMVRNTARDLLYYAVTQDAMLIFENLSRGFGRQGKRTFMAERQYTRMEDWLTAKLAYEGLPSKTYLSKTLAQYTSKTCSNCGFTITSADYDRVLEKLKKTATGWMTTINGKELKVEGQITYYNRYKRQNVVKDLSVELDRLSEESVNNDISSWTKGRSGEALSLLKKRFSHRPVQEKFVCLNCGFETHADEQAALNIARSWLFLRSQEYKKYQTNKTTGNTDKRAFVETWQSFYRKKLKEVWKPAV

SEQ ID NO: 39268 - protein, 978 aa, synthetic construct
  REGION 1..978: note = engineered CasX variant
QEIKRINKIRRRLVKDSNTKKAGKTGPMKTLLVRVMTPDLRERLENLRKKPENIPQPISNTSRANLNKLLTDYTEMKKAILHVYWEEFQKDPVGLMSRVAQPASKKIDQNKLKPEMDEKGNLTTAGFACSQCGQPLFVYKLEQVSEKGKAYTNYFGRCNVAEHEKLILLAQLKPEKDSDEAVTYSLGKFGQRALDFYSIHVTKESTHPVKPLAQIAGNRYASTPVGKALSDACMGTIASFLSKYQDIIIEHQKVVKGNQKRLESLRELAGKENLEYPSVTLPPQPHTKEGVDAYNEVIARVRMWVNLNLWQKLKLSRDDAKPLLRLKKFPSFPLVERQANEVDWWDMVCNVKKLINEKKEDGKVFWQNLAGYKRQEALRPYLSSEEDRKKGKKFARYQLGDLLLHLEKKHGEDWGKVYDEAWERIDKKVEGLSKHIKLEEERRSEDAQSKAALTDWLRAKASFVIEGLKEADKDEFCRCELKLQKWYGDLRGKPFAIEAENSILDISGFSKQYNCAFIWQKDGVKKLNLYLIINYFKGGKLRFKKIKPEAFEANRFYTVINKKSGEIVPMEVNFNFDDPNLIILPLAFGKRQGREFIWNDLLSLETGSLKLANGRVIEKTLYNRRTRQDEPALFVALTFERREVLDSSNIKPMNLIGVDRGENIPAVIALTDPEGCPLSRFKDSLGNPTHILRIGERYKEKQRTIQAKKEVEQRRAGGYSRKYASKAKNLADDMVRNTARDLLYYAVTQDAMLIFENLSRGFGRQGKRTFMAERQYTRMEDWLTAKLAYEGLPSKTYLSKTLAQYTSKTCSNCGFTITSADYDRVLEKLKKTATGWMTTINGKELKVEGQITYYNRYKRQNVVKDLSVELDRLSEESVNNDISSWTKGRSGEALSLLKKRFSHRPVQEKFVCLNCGFETHADEQAALNIARSWLFLRSQEYKKYQTNKTTGNTDKRAFVETWQSFYRKKLKEVWKPAV

SEQ ID NO: 39269 - protein, 978 aa, synthetic construct
  REGION 1..978: note = engineered CasX variant
QEIKRINKIRRRLVKDSNTKKAGKTGPMKTLLVRVMTPDLRERLENLRKKPENIPQPISNTSRANLNKLLTDYTEMKKAILHVYWEEFQKDPVGLMSRVAQPASKKIDQNKLKPEMDEKGNLTTAGFACSQCGQPLFVYKLEQVSEKGKAYTNYFGRCNVAEHEKLILLAQLKPEKDSDEAVTYSLGKFGQRALDFYSIHVTKESTHPVKPLAQIAGNRYASAPVGKALSDACMGTIASFLSKYQDIIIEHQKVVKGNQKRLESLRELAGKENLEYPSVTLPPQPHTKEGVDAYNEVIARVRMWVNLNLWQKLKLSRDDAKPLLRLKKFPSFPLVERQANEVDWWDMVCNVKKLINEKKEDGKVFWQNLAGYKRQEALRPYLSSEEDRKKGKKFARYQLGDLLLHLEKKHGEDWGKVYDEAWERIDKKVEGLSKHIKLEEERRSEDAQSKAALTDWLRAKASFVIEGLKEADKDEFCRCELKLQKWYGDLRGKPFAIEAENSILDISGFSKQYNCAFIWQKDGVKKLNLYLIINYFKGGKLRFKKIKPEAFEANRFYTVINKKSGEIVPMEVNFNFDDPNLIILPLAFGKRQGREFIWNDLLSLETGSLKLANGRVIEKTLYNRRTRQDEPALFVALTFERREVLDSSNIKPMNLIGVDRGENIPAVIALTDPEGCPLSRFKDSLGNPTHILRIGERYKEKQRTIQAKKEVEQRRAGGYSRKYASKAKNLADDMVRNTARDLLYYAVTQDAMLIFENLSRGFGRQGKRTFMAERQYTRMEDWLTAKLAYEGLPSKTYLSKTLAQYTSKTCSNCGFTITSADYDRVLEKLKKTATGWMTTINGKELKVEGQITYYNRYKRQNVVKDLSVELDRLSEESVNNDISSWTKGRSGEALSLLKKRFSHRPVQEKFVCLNCGFETHADEQAALNIARSWLFLRSQEYKKYQTNKTTGNTDKRAFVETWQSFYRKKLKEVWKPAV

SEQ ID NO: 39270 - protein, 978 aa, synthetic construct
  REGION 1..978: note = engineered CasX variant
QEIKRINKIRRRLVKDSNTKKAGKTGPMKTLLVRVMTPDLRERLENLRKKPENIPQPISNTSRANLNKLLTDYTEMKKAILHVYWEEFQKDPVGLMSRVAQPASKKIDQNKLKPEMDEKGNLTTAGFACSQCGQPLFVYKLEQVSEKGKAYTNYFGRCNVAEHEKLILLAQLKPEKDSDEAVTYSLGKFGQRALDFYSIHVTKESTHPVKPLAQIAGNRYASVPVGKALSDACMGTIASFLSKYQDIIIEHQKVVKGNQKRLESLRELAGKENLEYPSVTLPPQPHTKEGVDAYNEVIARVRMWVNLNLWQKLKLSRDDAKPLLRLKKFPSFPLVERQANEVDWWDMVCNVKKLINEKKEDGKVFWQNLAGYKRQEALRPYLSSEEDRKKGKKFARYQLGDLLLHLEKKHGEDWGKVYDEAWERIDKKVEGLSKHIKLEEERRSEDAQSKAALTDWLRAKASFVIEGLKEADKDEFCRCELKLQKWYGDLRGKPFAIEAENSILDISGFSKQYNCAFIWQKDGVKKLNLYLIINYFKGGKLRFKKIKPEAFEANRFYTVINKKSGEIVPMEVNFNFDDPNLIILPLAFGKRQGREFIWNDLLSLETGSLKLANGRVIEKTLYNRRTRQDEPALFVALTFERREVLDSSNIKPMNLIGVDRGENIPAVIALTDPEGCPLSRFKDSLGNPTHILRIGERYKEKQRTIQAKKEVEQRRAGGYSRKYASKAKNLADDMVRNTARDLLYYAVTQDAMLIFENLSRGFGRQGKRTFMAERQYTRMEDWLTAKLAYEGLPSKTYLSKTLAQYTSKTCSNCGFTITSADYDRVLEKLKKTATGWMTTINGKELKVEGQITYYNRYKRQNVVKDLSVELDRLSEESVNNDISSWTKGRSGEALSLLKKRFSHRPVQEKFVCLNCGFETHADEQAALNIARSWLFLRSQEYKKYQTNKTTGNTDKRAFVETWQSFYRKKLKEVWKPAV

SEQ ID NO: 39271 - protein, 978 aa, synthetic construct
  REGION 1..978: note = engineered CasX variant
QEIKRINKIRRRLVKDSNTKKAGKTGPMKTLLVRVMTPDLRERLENLRKKPENIPQPISNTSRANLNKLLTDYTEMKKAILHVYWEEFQKDPVGLMSRVAQPASKKIDQNKLKPEMDEKGNLTTAGFACSQCGQPLFVYKLEQVSEKGKAYTNYFGRCNVAEHEKLIKLAQLKPEKDSDEAVTYSLGKFGQRALDFYSIHVTKESTHPVKPLAQIAGNRYASGPVGKALSDACMGTIASFLSKYQDIIIEHQKVVKGNQKRLESLRELAGKENLEYPSVTLPPQPHTKEGVDAYNEVIARVRMWVNLNLWQKLKLSRDDAKPLLRLKKFPSFPLVERQANEVDWWDMVCNVKKLINEKKEDGKVFWQNLAGYKRQEALRPYLSSEEDRKKGKKFARYQLGDLLLHLEKKHGEDWGKVYDEAWERIDKKVEGLSKHIKLEEERRSEDAQSKAALTDWLRAKASFVIEGLKEADKDEFCRCELKLQKWYGDLRGKPFAIEAENSILDISGFSKQYNCAFIWQKDGVKKLNLYLIINYFKGGKLRFKKIKPEAFEANRFYTVINKKSGEIVPMEVNFNFDDPNLIILPLAFGKRQGREFIWNDLLSLETGSLKLANGRVIEKTLYNRRTRQDEPALFVALTFERREVLDSSNIKPMNLIGVDRGENIPAVIALTDPEGCPLSRFKDSLGNPTHILRIGERYKEKQRTIQAKKEVEQRRAGGYSRKYASKAKNLADDMVRNTARDLLYYAVTQDAMLIFENLSRGFGRQGKRTFMAERQYTRMEDWLTAKLAYEGLPSKTYLSKTLAQYTSKTCSNCGFTITSADYDRVLEKLKKTATGWMTTINGKELKVEGQITYYNRYKRQNVVKDLSVELDRLSEESVNNDISSWTKGRSGEALSLLKKRFSHRPVQEKFVCLNCGFETHADEQAALNIARSWLFLRSQEYKKYQTNKTTGNTDKRAFVETWQSFYRKKLKEVWKPAV

SEQ ID NO: 39272 - protein, 977 aa, synthetic construct
  REGION 1..977: note = engineered CasX variant
QEIKRINKIRRRLVKDSNTKKAGKTGPMKTLLVRVMTPDLRERLENLRKKPENIPQPISNTSRANLNKLLTDYTEMKKAILHVYWEEFQKDPVGLMSRVAQPASKKIDQNKLKPEMDEKGNLTTAGFACSQCGQPLFVYKLEQVSEKGKAYTNYFGRCNVAEHEKLILLAQLKPEKDSDEAVTYSLGKFGQRALDFYSIHVTKESTHPVKPLAQIAGNRYASPVGKALSDACMGTIASFLSKYQDIIIEHQKVVKGNQKRLESLRELAGKENLEYPSVTLPPQPHTKEGVDAYNEVIARVRMWVNLNLWQKLKLSRDDAKPLLRLKKFPSFPLVERQANEVDWWDMVCNVKKLINEKKEDGKVFWQNLAGYKRQEALRPYLSSEEDRKKGKKFARYQLGDLLLHLEKKHGEDWGKVYDEAWERIDKKVEGLSKHIKLEEERRSEDAQSKAALTDWLRAKASFVIEGLKEADKDEFCRCELKLQKWYGDLRGKPFAIEAENSILDISGFSKQYNCAFIWQKDGVKKLNLYLIINYFKGGKLRFKKIKPEAFEANRFYTVINKKSGEIVPMEVNFNFDDPNLIILPLAFGKRQGREFIWNDLLSLETGSLKLANGRVIEKTLYNRRTRQDEPALFVALTFERREVLDSSNIKPMNLIGVDRGENIPAVIALTDPEGCPLSRFKDSLGNPTHILRIGERYKEKQRTIQAKKEVEQRRAGGYSRKYASKAKNLADDMVRNTARDLLYYAVTQDAMLIFENLSRGFGRQGKRTFMAERQYTRMEDWLTAKLAYEGLPSKTYLSKTLAQYTSKTCSNCGFTITSADYDRVLEKLKKTATGWMTTINGKELKVEGQITYYNRYKRQNVVKDLSVELDRLSEESVNNDISSWTKGRSGEALSLLKKRFSHRPVQEKFVCLNCGFETHADEQAALNIARSWLFLRSQEYKKYQTNKTTGNTDKRAFVETWQSFYRKKLKEVWKPAV

SEQ ID NO: 39273 - protein, 978 aa, synthetic construct
  REGION 1..978: note = engineered CasX variant
QEIKRINKIRRRLVKDSNTKKAGKTGPMKTLLVRVMTPDLRERLENLRKKPENIPQPISNTSRANLNKLLTDYTEMKKAILHVYWEEFQKDPVGLMSRVAQPASKKIDQNKLKPEMDEKGNLTTAGFACSQCGQPLFVYKLEQVSEKGKAYTNYFGRCNVAEHEKLILLAQLKPEKDSDEAVTYSLGKFGQRALDFYSIHVTKESTHPVKPLAQIAGNRYASYPVGKALSDACMGTIASFLSKYQDIIIEHQKVVKGNQKRLESLRELAGKENLEYPSVTLPPQPHTKEGVDAYNEVIARVRMWVNLNLWQKLKLSRDDAKPLLRLKKFPSFPLVERQANEVDWWDMVCNVKKLINEKKEDGKVFWQNLAGYKRQEALRPYLSSEEDRKKGKKFARYQLGDLLLHLEKKHGEDWGKVYDEAWERIDKKVEGLSKHIKLEEERRSEDAQSKAALTDWLRAKASFVIEGLKEADKDEFCRCELKLQKWYGDLRGKPFAIEAENSILDISGFSKQYNCAFIWQKDGVKKLNLYLIINYFKGGKLRFKKIKPEAFEANRFYTVINKKSGEIVPMEVNFNFDDPNLIILPLAFGKRQGREFIWNDLLSLETGSLQLANGRVIEKTLYNRRTRQDEPALFVALTFERREVLDSSNIKPMNLIGVDRGENIPAVIALTDPEGCPLSRFKDSLGNPTHILRIGESYKEKQRTIQAKKEVEQRRAGGYSRKYASKAKNLADDMVRNTARDLLYYAVTQDAMLIFENLSRGFGRQGKRTFMAERQYTRMEDWLTAKLAYEGLPSKTYLSKTLAQYTSKTCSNCGFTITSADYDRVLEKLKKTATGWMTTINGKELKVEGQITYYNRYKRQNVVKDLSVELDRLSEESVNNDISSWTKGRSGEALSLLKKRFSHRPVQEKFVCLNCGFETHADEQAALNIARSWLFLRSQEYKKYQTNKTTGNTDKRAFVETWQSFYRKKLKEVWKPAV

SEQ ID NO: 39274 - protein, 978 aa, synthetic construct
  REGION 1..978: note = engineered CasX variant
QEIKRINKIRRRLVKDSNTKKAGKTGPMKTLLVRVMTPDLRERLENLRKKPENIPQPISNTSRANLNKLLTDYTEMKKAILHVYWEEFQKDPVGLMSRVAQPASKKIDQNKLKPEMDEKGNLTTAGFACSQCGQPLFVYKLEQVSEKGKAYTNYFGRCNVAEHEKLILLAQLKPEKDSDEAVTYSLGKFGQRALDFYSIHVTKESTHPVKPLAQIAGNRYASHPVGKALSDACMGTIASFLSKYQDIIIEHQKVVKGNQKRLESLRELAGKENLEYPSVTLPPQPHTKEGVDAYNEVIARVRMWVNLNLWQKLKLSRDDAKPLLRLKKFPSFPLVERQANEVDWWDMVCNVKKLINEKKEDGKVFWQNLAGYKRQEALRPYLSSEEDRKKGKKFARYQLGDLLLHLEKKHGEDWGKVYDEAWERIDKKVEGLSKHIKLEEERRSEDAQSKAALTDWLRAKASFVIEGLKEADKDEFCRCELKLQKWYGDLRGKPFAIEAENSILDISGFSKQYNCAFIWQKDGVKKLNLYLIINYFKGGKLRFKKIKPEAFEANRFYTVINKKSGEIVPMEVNFNFDDPNLIILPLAFGKRQGREFIWNDLLSLETGSLQLANGRVIEKTLYNRRTRQDEPALFVALTFERREVLDSSNIKPMNLIGVDRGENIPAVIALTDPEGCPLSRFKDSLGNPTHILRIGESYKEKQRTIQAKKEVEQRRAGGYSRKYASKAKNLADDMVRNTARDLLYYAVTQDAMLIFENLSRGFGRQGKRTFMAERQYTRMEDWLTAKLAYEGLPSKTYLSKTLAQYTSKTCSNCGFTITSADYDRVLEKLKKTATGWMTTINGKELKVEGQITYYNRYKRQNVVKDLSVELDRLSEESVNNDISSWTKGRSGEALSLLKKRFSHRPVQEKFVCLNCGFETHADEQAALNIARSWLFLRSQEYKKYQTNKTTGNTDKRAFVETWQSFYRKKLKEVWKPAV

SEQ ID NO: 39275 - protein, 978 aa, synthetic construct
  REGION 1..978: note = engineered CasX variant
QEIKRINKIRRRLVKDSNTKKAGKTGPMKTLLVRVMTPDLRERLENLRKKPENIPQPISNTSRANLNKLLTDYTEMKKAILHVYWEEFQKDPVGLMSRVAQPASKKIDQNKLKPEMDEKGNLTTAGFACSQCGQPLFVYKLEQVSEKGKAYTNYFGRCNVAEHEKLILLAQLKPEKDSDEAVTYSLGKFGQRALDFYSIHVTKESTHPVKPLAQIAGNRYASSPVGKALSDACMGTIASFLSKYQDIIIEHQKVVKGNQKRLESLRELAGKENLEYPSVTLPPQPHTKEGVDAYNEVIARVRMWVNLNLWQKLKLSRDDAKPLLRLKKFPSFPLVERQANEVDWWDMVCNVKKLINEKKEDGKVFWQNLAGYKRQEALRPYLSSEEDRKKGKKFARYQLGDLLLHLEKKHGEDWGKVYDEAWERIDKKVEGLSKHIKLEEERRSEDAQSKAALTDWLRAKASFVIEGLKEADKDEFCRCELKLQKWYGDLRGKPFAIEAENSILDISGFSKQYNCAFIWQKDGVKKLNLYLIINYFKGGKLRFKKIKPEAFEANRFYTVINKKSGEIVPMEVNFNFDDPNLIILPLAFGKRQGREFIWNDLLSLETGSLQLANGRVIEKTLYNRRTRQDEPALFVALTFERREVLDSSNIKPMNLIGVDRGENIPAVIALTDPEGCPLSRFKDSLGNPTHILRIGESYKEKQRTIQAKKEVEQRRAGGYSRKYASKAKNLADDMVRNTARDLLYYAVTQDAMLIFENLSRGFGRQGKRTFMAERQYTRMEDWLTAKLAYEGLPSKTYLSKTLAQYTSKTCSNCGFTITSADYDRVLEKLKKTATGWMTTINGKELKVEGQITYYNRYKRQNVVKDLSVELDRLSEESVNNDISSWTKGRSGEALSLLKKRFSHRPVQEKFVCLNCGFETHADEQAALNIARSWLFLRSQEYKKYQTNKTTGNTDKRAFVETWQSFYRKKLKEVWKPAV

SEQ ID NO: 39276 - protein, 978 aa, synthetic construct
  REGION 1..978: note = engineered CasX variant
QEIKRINKIRRRLVKDSNTKKAGKTGPMKTLLVRVMTPDLRERLENLRKKPENIPQPISNTSRANLNKLLTDYTEMKKAILHVYWEEFQKDPVGLMSRVAQPASKKIDQNKLKPEMDEKGNLTTAGFACSQCGQPLFVYKLEQVSEKGKAYTNYFGRCNVAEHEKLILLAQLKPEKDSDEAVTYSLGKFGQRALDFYSIHVTKESTHPVKPLAQIAGNRYASTPVGKALSDACMGTIASFLSKYQDIIIEHQKVVKGNQKRLESLRELAGKENLEYPSVTLPPQPHTKEGVDAYNEVIARVRMWVNLNLWQKLKLSRDDAKPLLRLKKFPSFPLVERQANEVDWWDMVCNVKKLINEKKEDGKVFWQNLAGYKRQEALRPYLSSEEDRKKGKKFARYQLGDLLLHLEKKHGEDWGKVYDEAWERIDKKVEGLSKHIKLEEERRSEDAQSKAALTDWLRAKASFVIEGLKEADKDEFCRCELKLQKWYGDLRGKPFAIEAENSILDISGFSKQYNCAFIWQKDGVKKLNLYLIINYFKGGKLRFKKIKPEAFEANRFYTVINKKSGEIVPMEVNFNFDDPNLIILPLAFGKRQGREFIWNDLLSLETGSLQLANGRVIEKTLYNRRTRQDEPALFVALTFERREVLDSSNIKPMNLIGVDRGENIPAVIALTDPEGCPLSRFKDSLGNPTHILRIGESYKEKQRTIQAKKEVEQRRAGGYSRKYASKAKNLADDMVRNTARDLLYYAVTQDAMLIFENLSRGFGRQGKRTFMAERQYTRMEDWLTAKLAYEGLPSKTYLSKTLAQYTSKTCSNCGFTITSADYDRVLEKLKKTATGWMTTINGKELKVEGQITYYNRYKRQNVVKDLSVELDRLSEESVNNDISSWTKGRSGEALSLLKKRFSHRPVQEKFVCLNCGFETHADEQAALNIARSWLFLRSQEYKKYQTNKTTGNTDKRAFVETWQSFYRKKLKEVWKPAV

SEQ ID NO: 39277 - protein, 978 aa, synthetic construct
  REGION 1..978: note = engineered CasX variant
QEIKRINKIRRRLVKDSNTKKAGKTGPMKTLLVRVMTPDLRERLENLRKKPENIPQPISNTSRANLNKLLTDYTEMKKAILHVYWEEFQKDPVGLMSRVAQPASKKIDQNKLKPEMDEKGNLTTAGFACSQCGQPLFVYKLEQVSEKGKAYTNYFGRCNVAEHEKLILLAQLKPEKDSDEAVTYSLGKFGQRALDFYSIHVTKESTHPVKPLAQIAGNRYASAPVGKALSDACMGTIASFLSKYQDIIIEHQKVVKGNQKRLESLRELAGKENLEYPSVTLPPQPHTKEGVDAYNEVIARVRMWVNLNLWQKLKLSRDDAKPLLRLKKFPSFPLVERQANEVDWWDMVCNVKKLINEKKEDGKVFWQNLAGYKRQEALRPYLSSEEDRKKGKKFARYQLGDLLLHLEKKHGEDWGKVYDEAWERIDKKVEGLSKHIKLEEERRSEDAQSKAALTDWLRAKASFVIEGLKEADKDEFCRCELKLQKWYGDLRGKPFAIEAENSILDISGFSKQYNCAFIWQKDGVKKLNLYLIINYFKGGKLRFKKIKPEAFEANRFYTVINKKSGEIVPMEVNFNFDDPNLIILPLAFGKRQGREFIWNDLLSLETGSLQLANGRVIEKTLYNRRTRQDEPALFVALTFERREVLDSSNIKPMNLIGVDRGENIPAVIALTDPEGCPLSRFKDSLGNPTHILRIGESYKEKQRTIQAKKEVEQRRAGGYSRKYASKAKNLADDMVRNTARDLLYYAVTQDAMLIFENLSRGFGRQGKRTFMAERQYTRMEDWLTAKLAYEGLPSKTYLSKTLAQYTSKTCSNCGFTITSADYDRVLEKLKKTATGWMTTINGKELKVEGQITYYNRYKRQNVVKDLSVELDRLSEESVNNDISSWTKGRSGEALSLLKKRFSHRPVQEKFVCLNCGFETHADEQAALNIARSWLFLRSQEYKKYQTNKTTGNTDKRAFVETWQSFYRKKLKEVWKPAV

SEQ ID NO: 39278 - protein, 978 aa, synthetic construct
  REGION 1..978: note = engineered CasX variant
QEIKRINKIRRRLVKDSNTKKAGKTGPMKTLLVRVMTPDLRERLENLRKKPENIPQPISNTSRANLNKLLTDYTEMKKAILHVYWEEFQKDPVGLMSRVAQPASKKIDQNKLKPEMDEKGNLTTAGFACSQCGQPLFVYKLEQVSEKGKAYTNYFGRCNVAEHEKLILLAQLKPEKDSDEAVTYSLGKFGQRALDFYSIHVTKESTHPVKPLAQIAGNRYASVPVGKALSDACMGTIASFLSKYQDIIIEHQKVVKGNQKRLESLRELAGKENLEYPSVTLPPQPHTKEGVDAYNEVIARVRMWVNLNLWQKLKLSRDDAKPLLRLKKFPSFPLVERQANEVDWWDMVCNVKKLINEKKEDGKVFWQNLAGYKRQEALRPYLSSEEDRKKGKKFARYQLGDLLLHLEKKHGEDWGKVYDEAWERIDKKVEGLSKHIKLEEERRSEDAQSKAALTDWLRAKASFVIEGLKEADKDEFCRCELKLQKWYGDLRGKPFAIEAENSILDISGFSKQYNCAFIWQKDGVKKLNLYLIINYFKGGKLRFKKIKPEAFEANRFYTVINKKSGEIVPMEVNFNFDDPNLIILPLAFGKRQGREFIWNDLLSLETGSLQLANGRVIEKTLYNRRTRQDEPALFVALTFERREVLDSSNIKPMNLIGVDRGENIPAVIALTDPEGCPLSRFKDSLGNPTHILRIGESYKEKQRTIQAKKEVEQRRAGGYSRKYASKAKNLADDMVRNTARDLLYYAVTQDAMLIFENLSRGFGRQGKRTFMAERQYTRMEDWLTAKLAYEGLPSKTYLSKTLAQYTSKTCSNCGFTITSADYDRVLEKLKKTATGWMTTINGKELKVEGQITYYNRYKRQNVVKDLSVELDRLSEESVNNDISSWTKGRSGEALSLLKKRFSHRPVQEKFVCLNCGFETHADEQAALNIARSWLFLRSQEYKKYQTNKTTGNTDKRAFVETWQSFYRKKLKEVWKPAV

SEQ ID NO: 39279 - protein, 978 aa, synthetic construct
  REGION 1..978: note = engineered CasX variant
QEIKRINKIRRRLVKDSNTKKAGKTGPMKTLLVRVMTPDLRERLENLRKKPENIPQPISNTSRANLNKLLTDYTEMKKAILHVYWEEFQKDPVGLMSRVAQPASKKIDQNKLKPEMDEKGNLTTAGFACSQCGQPLFVYKLEQVSEKGKAYTNYFGRCNVAEHEKLIKLAQLKPEKDSDEAVTYSLGKFGQRALDFYSIHVTKESTHPVKPLAQIAGNRYASGPVGKALSDACMGTIASFLSKYQDIIIEHQKVVKGNQKRLESLRELAGKENLEYPSVTLPPQPHTKEGVDAYNEVIARVRMWVNLNLWQKLKLSRDDAKPLLRLKKFPSFPLVERQANEVDWWDMVCNVKKLINEKKEDGKVFWQNLAGYKRQEALRPYLSSEEDRKKGKKFARYQLGDLLLHLEKKHGEDWGKVYDEAWERIDKKVEGLSKHIKLEEERRSEDAQSKAALTDWLRAKASFVIEGLKEADKDEFCRCELKLQKWYGDLRGKPFAIEAENSILDISGFSKQYNCAFIWQKDGVKKLNLYLIINYFKGGKLRFKKIKPEAFEANRFYTVINKKSGEIVPMEVNFNFDDPNLIILPLAFGKRQGREFIWNDLLSLETGSLQLANGRVIEKTLYNRRTRQDEPALFVALTFERREVLDSSNIKPMNLIGVDRGENIPAVIALTDPEGCPLSRFKDSLGNPTHILRIGESYKEKQRTIQAKKEVEQRRAGGYSRKYASKAKNLADDMVRNTARDLLYYAVTQDAMLIFENLSRGFGRQGKRTFMAERQYTRMEDWLTAKLAYEGLPSKTYLSKTLAQYTSKTCSNCGFTITSADYDRVLEKLKKTATGWMTTINGKELKVEGQITYYNRYKRQNVVKDLSVELDRLSEESVNNDISSWTKGRSGEALSLLKKRFSHRPVQEKFVCLNCGFETHADEQAALNIARSWLFLRSQEYKKYQTNKTTGNTDKRAFVETWQSFYRKKLKEVWKPAV

SEQ ID NO: 39280 - protein, 977 aa, synthetic construct
  REGION 1..977: note = engineered CasX variant
QEIKRINKIRRRLVKDSNTKKAGKTGPMKTLLVRVMTPDLRERLENLRKKPENIPQPISNTSRANLNKLLTDYTEMKKAILHVYWEEFQKDPVGLMSRVAQPASKKIDQNKLKPEMDEKGNLTTAGFACSQCGQPLFVYKLEQVSEKGKAYTNYFGRCNVAEHEKLILLAQLKPEKDSDEAVTYSLGKFGQRALDFYSIHVTKESTHPVKPLAQIAGNRYASPVGKALSDACMGTIASFLSKYQDIIIEHQKVVKGNQKRLESLRELAGKENLEYPSVTLPPQPHTKEGVDAYNEVIARVRMWVNLNLWQKLKLSRDDAKPLLRLKKFPSFPLVERQANEVDWWDMVCNVKKLINEKKEDGKVFWQNLAGYKRQEALRPYLSSEEDRKKGKKFARYQLGDLLLHLEKKHGEDWGKVYDEAWERIDKKVEGLSKHIKLEEERRSEDAQSKAALTDWLRAKASFVIEGLKEADKDEFCRCELKLQKWYGDLRGKPFAIEAENSILDISGFSKQYNCAFIWQKDGVKKLNLYLIINYFKGGKLRFKKIKPEAFEANRFYTVINKKSGEIVPMEVNFNFDDPNLIILPLAFGKRQGREFIWNDLLSLETGSLQLANGRVIEKTLYNRRTRQDEPALFVALTFERREVLDSSNIKPMNLIGVDRGENIPAVIALTDPEGCPLSRFKDSLGNPTHILRIGESYKEKQRTIQAKKEVEQRRAGGYSRKYASKAKNLADDMVRNTARDLLYYAVTQDAMLIFENLSRGFGRQGKRTFMAERQYTRMEDWLTAKLAYEGLPSKTYLSKTLAQYTSKTCSNCGFTITSADYDRVLEKLKKTATGWMTTINGKELKVEGQITYYNRYKRQNVVKDLSVELDRLSEESVNNDISSWTKGRSGEALSLLKKRFSHRPVQEKFVCLNCGFETHADEQAALNIARSWLFLRSQEYKKYQTNKTTGNTDKRAFVETWQSFYRKKLKEVWKPAV

SEQ ID NO: 39281 - protein, 978 aa, synthetic construct
  REGION 1..978: note = engineered CasX variant
QEIKRINKIRRRLVKDSNTKKAGKTGPMKTLLVRVMTPDLRERLENLRKKPENIPQPISNTSRANLNKLLTDYTEMKKAILHVYWEEFQKDPVGLMSRVAQPASKKIDQNKLKPEMDEKGNLTTAGFACSQCGQPLFVYKLEQVSEKGKAYTNYFGRCNVAEHEKLILLAQLKPEKDSDEAVTYSLGKFGQRALDFYSIHVTKESTHPVKPLAQIAGNRYASYPVGKALSDACMGTIASFLSKYQDIIIEHQKVVKGNQKRLESLRELAGKENLEYPSVTLPPQPHTKEGVDAYNEVIARVRMWVNLNLWQKLKLSRDDAKPLLRLKGFPSFPLVERQANEVDWWDMVCNVKKLINEKKEDGKVFWQNLAGYKRQEALRPYLSSEEDRKKGKKFARYQLGDLLLHLEKKHGEDWGKVYDEAWERIDKKVEGLSKHIKLEEERRSEDAQSKAALTDWLRAKASFVIEGLKEADKDEFCRCELKLQKWYGDLRGKPFAIEAENSILDISGFSKQYNCAFIWQKDGVKKLNLYLIINYFKGGKLRFKKIKPEAFEANRFYTVINKKSGEIVPMEVNFNFDDPNLIILPLAFGKRQGREFIWNDLLSLETGSLQLANGRVIEKTLYNRRTRQDEPALFVALTFERREVLDSSNIKPMNLIGVDRGENIPAVIALTDPEGCPLSRFKDSLGNPTHILRIGERYKEKQRTIQAKKEVEQRRAGGYSRKYASKAKNLADDMVRNTARDLLYYAVTQDAMLIFENLSRGFGRQGKRTFMAERQYTRMEDWLTAKLAYEGLPSKTYLSKTLAQYTSKTCSNCGFTITSADYDRVLEKLKKTATGWMTTINGKELKVEGQITYYNRYKRQNVVKDLSVELDRLSEESVNNDISSWTKGRSGEALSLLKKRFSHRPVQEKFVCLNCGFETHADEQAALNIARSWLFLRSQEYKKYQTNKTTGNTDKRAFVETWQSFYRKKLKEVWKPAV

SEQ ID NO: 39282 - protein, 978 aa, synthetic construct
  REGION 1..978: note = engineered CasX variant
QEIKRINKIRRRLVKDSNTKKAGKTGPMKTLLVRVMTPDLRERLENLRKKPENIPQPISNTSRANLNKLLTDYTEMKKAILHVYWEEFQKDPVGLMSRVAQPASKKIDQNKLKPEMDEKGNLTTAGFACSQCGQPLFVYKLEQVSEKGKAYTNYFGRCNVAEHEKLILLAQLKPEKDSDEAVTYSLGKFGQRALDFYSIHVTKESTHPVKPLAQIAGNRYASHPVGKALSDACMGTIASFLSKYQDIIIEHQKVVKGNQKRLESLRELAGKENLEYPSVTLPPQPHTKEGVDAYNEVIARVRMWVNLNLWQKLKLSRDDAKPLLRLKGFPSFPLVERQANEVDWWDMVCNVKKLINEKKEDGKVFWQNLAGYKRQEALRPYLSSEEDRKKGKKFARYQLGDLLLHLEKKHGEDWGKVYDEAWERIDKKVEGLSKHIKLEEERRSEDAQSKAALTDWLRAKASFVIEGLKEADKDEFCRCELKLQKWYGDLRGKPFAIEAENSILDISGFSKQYNCAFIWQKDGVKKLNLYLIINYFKGGKLRFKKIKPEAFEANRFYTVINKKSGEIVPMEVNFNFDDPNLIILPLAFGKRQGREFIWNDLLSLETGSLQLANGRVIEKTLYNRRTRQDEPALFVALTFERREVLDSSNIKPMNLIGVDRGENIPAVIALTDPEGCPLSRFKDSLGNPTHILRIGERYKEKQRTIQAKKEVEQRRAGGYSRKYASKAKNLADDMVRNTARDLLYYAVTQDAMLIFENLSRGFGRQGKRTFMAERQYTRMEDWLTAKLAYEGLPSKTYLSKTLAQYTSKTCSNCGFTITSADYDRVLEKLKKTATGWMTTINGKELKVEGQITYYNRYKRQNVVKDLSVELDRLSEESVNNDISSWTKGRSGEALSLLKKRFSHRPVQEKFVCLNCGFETHADEQAALNIARSWLFLRSQEYKKYQTNKTTGNTDKRAFVETWQSFYRKKLKEVWKPAV

SEQ ID NO: 39283 - protein, 978 aa, synthetic construct
  REGION 1..978: note = engineered CasX variant
QEIKRINKIRRRLVKDSNTKKAGKTGPMKTLLVRVMTPDLRERLENLRKKPENIPQPISNTSRANLNKLLTDYTEMKKAILHVYWEEFQKDPVGLMSRVAQPASKKIDQNKLKPEMDEKGNLTTAGFACSQCGQPLFVYKLEQVSEKGKAYTNYFGRCNVAEHEKLILLAQLKPEKDSDEAVTYSLGKFGQRALDFYSIHVTKESTHPVKPLAQIAGNRYASSPVGKALSDACMGTIASFLSKYQDIIIEHQKVVKGNQKRLESLRELAGKENLEYPSVTLPPQPHTKEGVDAYNEVIARVRMWVNLNLWQKLKLSRDDAKPLLRLKGFPSFPLVERQANEVDWWDMVCNVKKLINEKKEDGKVFWQNLAGYKRQEALRPYLSSEEDRKKGKKFARYQLGDLLLHLEKKHGEDWGKVYDEAWERIDKKVEGLSKHIKLEEERRSEDAQSKAALTDWLRAKASFVIEGLKEADKDEFCRCELKLQKWYGDLRGKPFAIEAENSILDISGFSKQYNCAFIWQKDGVKKLNLYLIINYFKGGKLRFKKIKPEAFEANRFYTVINKKSGEIVPMEVNFNFDDPNLIILPLAFGKRQGREFIWNDLLSLETGSLQLANGRVIEKTLYNRRTRQDEPALFVALTFERREVLDSSNIKPMNLIGVDRGENIPAVIALTDPEGCPLSRFKDSLGNPTHILRIGERYKEKQRTIQAKKEVEQRRAGGYSRKYASKAKNLADDMVRNTARDLLYYAVTQDAMLIFENLSRGFGRQGKRTFMAERQYTRMEDWLTAKLAYEGLPSKTYLSKTLAQYTSKTCSNCGFTITSADYDRVLEKLKKTATGWMTTINGKELKVEGQITYYNRYKRQNVVKDLSVELDRLSEESVNNDISSWTKGRSGEALSLLKKRFSHRPVQEKFVCLNCGFETHADEQAALNIARSWLFLRSQEYKKYQTNKTTGNTDKRAFVETWQSFYRKKLKEVWKPAV

SEQ ID NO: 39284 - protein, 978 aa, synthetic construct
  REGION 1..978: note = engineered CasX variant
QEIKRINKIRRRLVKDSNTKKAGKTGPMKTLLVRVMTPDLRERLENLRKKPENIPQPISNTSRANLNKLLTDYTEMKKAILHVYWEEFQKDPVGLMSRVAQPASKKIDQNKLKPEMDEKGNLTTAGFACSQCGQPLFVYKLEQVSEKGKAYTNYFGRCNVAEHEKLILLAQLKPEKDSDEAVTYSLGKFGQRALDFYSIHVTKESTHPVKPLAQIAGNRYASTPVGKALSDACMGTIASFLSKYQDIIIEHQKVVKGNQKRLESLRELAGKENLEYPSVTLPPQPHTKEGVDAYNEVIARVRMWVNLNLWQKLKLSRDDAKPLLRLKGFPSFPLVERQANEVDWWDMVCNVKKLINEKKEDGKVFWQNLAGYKRQEALRPYLSSEEDRKKGKKFARYQLGDLLLHLEKKHGEDWGKVYDEAWERIDKKVEGLSKHIKLEEERRSEDAQSKAALTDWLRAKASFVIEGLKEADKDEFCRCELKLQKWYGDLRGKPFAIEAENSILDISGFSKQYNCAFIWQKDGVKKLNLYLIINYFKGGKLRFKKIKPEAFEANRFYTVINKKSGEIVPMEVNFNFDDPNLIILPLAFGKRQGREFIWNDLLSLETGSLQLANGRVIEKTLYNRRTRQDEPALFVALTFERREVLDSSNIKPMNLIGVDRGENIPAVIALTDPEGCPLSRFKDSLGNPTHILRIGERYKEKQRTIQAKKEVEQRRAGGYSRKYASKAKNLADDMVRNTARDLLYYAVTQDAMLIFENLSRGFGRQGKRTFMAERQYTRMEDWLTAKLAYEGLPSKTYLSKTLAQYTSKTCSNCGFTITSADYDRVLEKLKKTATGWMTTINGKELKVEGQITYYNRYKRQNVVKDLSVELDRLSEESVNNDISSWTKGRSGEALSLLKKRFSHRPVQEKFVCLNCGFETHADEQAALNIARSWLFLRSQEYKKYQTNKTTGNTDKRAFVETWQSFYRKKLKEVWKPAV

SEQ ID NO: 39285 - protein, 978 aa, synthetic construct
  REGION 1..978: note = engineered CasX variant
QEIKRINKIRRRLVKDSNTKKAGKTGPMKTLLVRVMTPDLRERLENLRKKPENIPQPISNTSRANLNKLLTDYTEMKKAILHVYWEEFQKDPVGLMSRVAQPASKKIDQNKLKPEMDEKGNLTTAGFACSQCGQPLFVYKLEQVSEKGKAYTNYFGRCNVAEHEKLILLAQLKPEKDSDEAVTYSLGKFGQRALDFYSIHVTKESTHPVKPLAQIAGNRYASAPVGKALSDACMGTIASFLSKYQDIIIEHQKVVKGNQKRLESLRELAGKENLEYPSVTLPPQPHTKEGVDAYNEVIARVRMWVNLNLWQKLKLSRDDAKPLLRLKGFPSFPLVERQANEVDWWDMVCNVKKLINEKKEDGKVFWQNLAGYKRQEALRPYLSSEEDRKKGKKFARYQLGDLLLHLEKKHGEDWGKVYDEAWERIDKKVEGLSKHIKLEEERRSEDAQSKAALTDWLRAKASFVIEGLKEADKDEFCRCELKLQKWYGDLRGKPFAIEAENSILDISGFSKQYNCAFIWQKDGVKKLNLYLIINYFKGGKLRFKKIKPEAFEANRFYTVINKKSGEIVPMEVNFNFDDPNLIILPLAFGKRQGREFIWNDLLSLETGSLQLANGRVIEKTLYNRRTRQDEPALFVALTFERREVLDSSNIKPMNLIGVDRGENIPAVIALTDPEGCPLSRFKDSLGNPTHILRIGERYKEKQRTIQAKKEVEQRRAGGYSRKYASKAKNLADDMVRNTARDLLYYAVTQDAMLIFENLSRGFGRQGKRTFMAERQYTRMEDWLTAKLAYEGLPSKTYLSKTLAQYTSKTCSNCGFTITSADYDRVLEKLKKTATGWMTTINGKELKVEGQITYYNRYKRQNVVKDLSVELDRLSEESVNNDISSWTKGRSGEALSLLKKRFSHRPVQEKFVCLNCGFETHADEQAALNIARSWLFLRSQEYKKYQTNKTTGNTDKRAFVETWQSFYRKKLKEVWKPAV

SEQ ID NO: 39286 - protein, 978 aa, synthetic construct
  REGION 1..978: note = engineered CasX variant
QEIKRINKIRRRLVKDSNTKKAGKTGPMKTLLVRVMTPDLRERLENLRKKPENIPQPISNTSRANLNKLLTDYTEMKKAILHVYWEEFQKDPVGLMSRVAQPASKKIDQNKLKPEMDEKGNLTTAGFACSQCGQPLFVYKLEQVSEKGKAYTNYFGRCNVAEHEKLILLAQLKPEKDSDEAVTYSLGKFGQRALDFYSIHVTKESTHPVKPLAQIAGNRYASVPVGKALSDACMGTIASFLSKYQDIIIEHQKVVKGNQKRLESLRELAGKENLEYPSVTLPPQPHTKEGVDAYNEVIARVRMWVNLNLWQKLKLSRDDAKPLLRLKGFPSFPLVERQANEVDWWDMVCNVKKLINEKKEDGKVFWQNLAGYKRQEALRPYLSSEEDRKKGKKFARYQLGDLLLHLEKKHGEDWGKVYDEAWERIDKKVEGLSKHIKLEEERRSEDAQSKAALTDWLRAKASFVIEGLKEADKDEFCRCELKLQKWYGDLRGKPFAIEAENSILDISGFSKQYNCAFIWQKDGVKKLNLYLIINYFKGGKLRFKKIKPEAFEANRFYTVINKKSGEIVPMEVNFNFDDPNLIILPLAFGKRQGREFIWNDLLSLETGSLQLANGRVIEKTLYNRRTRQDEPALFVALTFERREVLDSSNIKPMNLIGVDRGENIPAVIALTDPEGCPLSRFKDSLGNPTHILRIGERYKEKQRTIQAKKEVEQRRAGGYSRKYASKAKNLADDMVRNTARDLLYYAVTQDAMLIFENLSRGFGRQGKRTFMAERQYTRMEDWLTAKLAYEGLPSKTYLSKTLAQYTSKTCSNCGFTITSADYDRVLEKLKKTATGWMTTINGKELKVEGQITYYNRYKRQNVVKDLSVELDRLSEESVNNDISSWTKGRSGEALSLLKKRFSHRPVQEKFVCLNCGFETHADEQAALNIARSWLFLRSQEYKKYQTNKTTGNTDKRAFVETWQSFYRKKLKEVWKPAV

SEQ ID NO: 39287 - protein, 978 aa, synthetic construct
  REGION 1..978: note = engineered CasX variant
QEIKRINKIRRRLVKDSNTKKAGKTGPMKTLLVRVMTPDLRERLENLRKKPENIPQPISNTSRANLNKLLTDYTEMKKAILHVYWEEFQKDPVGLMSRVAQPASKKIDQNKLKPEMDEKGNLTTAGFACSQCGQPLFVYKLEQVSEKGKAYTNYFGRCNVAEHEKLIKLAQLKPEKDSDEAVTYSLGKFGQRALDFYSIHVTKESTHPVKPLAQIAGNRYASGPVGKALSDACMGTIASFLSKYQDIIIEHQKVVKGNQKRLESLRELAGKENLEYPSVTLPPQPHTKEGVDAYNEVIARVRMWVNLNLWQKLKLSRDDAKPLLRLKGFPSFPLVERQANEVDWWDMVCNVKKLINEKKEDGKVFWQNLAGYKRQEALRPYLSSEEDRKKGKKFARYQLGDLLLHLEKKHGEDWGKVYDEAWERIDKKVEGLSKHIKLEEERRSEDAQSKAALTDWLRAKASFVIEGLKEADKDEFCRCELKLQKWYGDLRGKPFAIEAENSILDISGFSKQYNCAFIWQKDGVKKLNLYLIINYFKGGKLRFKKIKPEAFEANRFYTVINKKSGEIVPMEVNFNFDDPNLIILPLAFGKRQGREFIWNDLLSLETGSLQLANGRVIEKTLYNRRTRQDEPALFVALTFERREVLDSSNIKPMNLIGVDRGENIPAVIALTDPEGCPLSRFKDSLGNPTHILRIGERYKEKQRTIQAKKEVEQRRAGGYSRKYASKAKNLADDMVRNTARDLLYYAVTQDAMLIFENLSRGFGRQGKRTFMAERQYTRMEDWLTAKLAYEGLPSKTYLSKTLAQYTSKTCSNCGFTITSADYDRVLEKLKKTATGWMTTINGKELKVEGQITYYNRYKRQNVVKDLSVELDRLSEESVNNDISSWTKGRSGEALSLLKKRFSHRPVQEKFVCLNCGFETHADEQAALNIARSWLFLRSQEYKKYQTNKTTGNTDKRAFVETWQSFYRKKLKEVWKPAV

SEQ ID NO: 39288 - protein, 977 aa, synthetic construct
  REGION 1..977: note = engineered CasX variant
QEIKRINKIRRRLVKDSNTKKAGKTGPMKTLLVRVMTPDLRERLENLRKKPENIPQPISNTSRANLNKLLTDYTEMKKAILHVYWEEFQKDPVGLMSRVAQPASKKIDQNKLKPEMDEKGNLTTAGFACSQCGQPLFVYKLEQVSEKGKAYTNYFGRCNVAEHEKLILLAQLKPEKDSDEAVTYSLGKFGQRALDFYSIHVTKESTHPVKPLAQIAGNRYASPVGKALSDACMGTIASFLSKYQDIIIEHQKVVKGNQKRLESLRELAGKENLEYPSVTLPPQPHTKEGVDAYNEVIARVRMWVNLNLWQKLKLSRDDAKPLLRLKGFPSFPLVERQANEVDWWDMVCNVKKLINEKKEDGKVFWQNLAGYKRQEALRPYLSSEEDRKKGKKFARYQLGDLLLHLEKKHGEDWGKVYDEAWERIDKKVEGLSKHIKLEEERRSEDAQSKAALTDWLRAKASFVIEGLKEADKDEFCRCELKLQKWYGDLRGKPFAIEAENSILDISGFSKQYNCAFIWQKDGVKKLNLYLIINYFKGGKLRFKKIKPEAFEANRFYTVINKKSGEIVPMEVNFNFDDPNLIILPLAFGKRQGREFIWNDLLSLETGSLQLANGRVIEKTLYNRRTRQDEPALFVALTFERREVLDSSNIKPMNLIGVDRGENIPAVIALTDPEGCPLSRFKDSLGNPTHILRIGERYKEKQRTIQAKKEVEQRRAGGYSRKYASKAKNLADDMVRNTARDLLYYAVTQDAMLIFENLSRGFGRQGKRTFMAERQYTRMEDWLTAKLAYEGLPSKTYLSKTLAQYTSKTCSNCGFTITSADYDRVLEKLKKTATGWMTTINGKELKVEGQITYYNRYKRQNVVKDLSVELDRLSEESVNNDISSWTKGRSGEALSLLKKRFSHRPVQEKFVCLNCGFETHADEQAALNIARSWLFLRSQEYKKYQTNKTTGNTDKRAFVETWQSFYRKKLKEVWKPAV

SEQ ID NO: 39289 - protein, 979 aa, synthetic construct
  REGION 1..979: note = engineered CasX variant
QEIKRINKIRRRLVKDSNTKKAGKTRGPMKTLLVRVMTPDLRERLENLRKKPENIPQPISNTSRANLNKLLTDYTEMKKAILHVYWEEFQKDPVGLMSRVAQPASKKIDQNKLKPEMDEKGNLTTAGFACSQCGQPLFVYKLEQVSEKGKAYTNYFGRCNVAEHEKLILLAQLKPEKDSDEAVTYSLGKFGQRALDFYSIHVTKESTHPVKPLAQIAGNRYASSPVGKALRDACMGTIASFLSKYQDIIIEHQKVVKGNQKRLESLRELAGKENLEYPSVTLPPQPHTKEGVDAYNEVIARVRMWVNLNLWQKLKLSRDDAKPLLRLKGFPSFPLVERQANEVDWWDMVCNVKKLINEKKEDGKVFWQNLAGYKRQEALRPYLSSEEDRKKGKKFARYQLGDLLLHLEKKHGEDWGKVYDEAWERIDKKVEGLSKHIKLEEERRSEDAQSKAALTDWLRAKASFVIEGLKEADKDEFCRCELKLQKWYGDLRGKPFAIEAENSILDISGFSKQYNCAFIWQKDGVKKLNLYLIINYFKGGKLRFKKIKPEAFEANRFYTVINKKSGEIVPMEVNFNFDDPNLIILPLAFGKRQGREFIWNDLLSLETGSLKLANGRVIEKTLYNRRTRQDEPALFVALTFERREVLDSSNIKPMNLIGVDRGENIPAVIALTDPEGCPLSRFKDSLGNPTHILRIGESYKEKQRTIQAKKEVEQRRAGGYSRKYASKAKNLADDMVRNTARDLLYYAVTQDAMLIFENLSRGFGRQGKRTFMAERQYTRMEDWLTAKLAYEGLPSKTYLSKTLAQYTSKTCSNCGFTITSADYDRVLEKLKKTATGWMTTINGKELKVEGQITYYNRYKRQNVVKDLSVELDRLSEESVNNDISSWTKGRSGEALSLLKKRFSHRPVQEKFVCLNCGFETHADEQAALNIARSWLFLRSQEYKKYQTNKTTGNTDKRAFVETWQSFYRKKLKEVWKPAV

SEQ ID NO: 39290 - protein, 979 aa, synthetic construct
  REGION 1..979: note = engineered CasX variant
QEIKRINKIRRRLVKDSNTKKAGKTRGPMKTLLVRVMTPDLRERLENLRKKPENIPQPISNTSRANLNKLLTDYTEMKKAILHVYWEEFQKDPVGLMSRVAQPASKKIDQNKLKPEMDEKGNLTTAGFACSQCGQPLFVYKLEQVSEKGKAYTNYFGRCNVAEHEKLILLDQLKPEKDSDEAVTYSLGKFGQRALDFYSIHVTKESTHPVKPLAQIAGNRYASGPVGKALRDACMGTIASFLSKYQDIIIEHQKVVKGNQKRLESLRELAGKENLEYPSVTLPPQPHTKEGVDAYNEVIARVRMWVNLNLWQKLKLSRDDAKPLLRLKGFPSFPLVERQANEVDWWDMVCNVKKLINEKKEDGKVFWQNLAGYKRQEALRPYLSSEEDRKKGKKFARYQLGDLLLHLEKKHGEDWGKVYDEAWERIDKKVEGLSKHIKLEEERRSEDAQSKAALTDWLRAKASFVIEGLKEADKDEFCRCELKLQKWYGDLRGKPFAIEAENSILDISGFSKQYNCAFIWQKDGVKKLNLYLIINYFKGGKLRFKKIKPEAFEANRFYTVINKKSGEIVPMEVNFNFDDPNLIILPLAFGKRQGREFIWNDLLSLETGSLKLANGRVIEKTLYNRRTRQDEPALFVALTFERREVLDSSNIKPMNLIGVDRGENIPAVIALTDPEGCPLSRFKDSLGNPTHILRIGESYKEKQRTIQAKKEVEQRRAGGYSRKYASKAKNLADDMVRNTARDLLYYAVTQDAMLIFENLSRGFGRQGKRTFMAERQYTRMEDWLTAKLAYEGLPSKTYLSKTLAQYTSKTCSNCGFTITSADYDRVLEKLKKTATGWMTTINGKELKVEGQITYYNRYKRQNVVKDLSVELDRLSEESVNNDISSWTKGRSGEALSLLKKRFSHRPVQEKFVCLNCGFETHADEQAALNIARSWLFLRSQEYKKYQTNKTTGNTDKRAFVETWQSFYRKKLKEVWKPAV

SEQ ID NO: 39291 - protein, 979 aa, synthetic construct
  REGION 1..979: note = engineered CasX variant
QEGKRINKIRRRLVKDSNTKKAGKTRGPMKTLLVRVMTPDLRERLENLRKKPENIPQPISNTSRANLNKLLTDYTEMKKAILHVYWEEFQKDPVGLMSRVAQPASKKIDQNKLKPEMDEKGNLTTAGFACSQCGQPLFVYKLEQVSEKGKAYTNYFGRCNVAEHEKLILLAQLKPEKDSDEAVTYSLGKFGQRALDFYSIHVTKESTHPVKPLAQIAGNRYASGPVGKALRDACMGTIASFLSKYQDIIIEHQKVVKGNQKRLESLRELAGKENLEYPSVTLPPQPHTKEGVDAYNEVIARVRMWVNLNLWQKLKLSRDDAKPLLRLKGFPSFPLVERQANEVDWWDMVCNVKKLINEKKEDGKVFWQNLAGYKRQEALRPYLSSEEDRKKGKKFARYQLGDLLLHLEKKHGEDWGKVYDEAWERIDKKVEGLSKHIKLEEERRSEDAQSKAALTDWLRAKASFVIEGLKEADKDEFCRCELKLQKWYGDLRGKPFAIEAENSILDISGFSKQYNCAFIWQKDGVKKLNLYLIINYFKGGKLRFKKIKPEAFEANRFYTVINKKSGEIVPMEVNFNFDDPNLIILPLAFGKRQGREFIWNDLLSLETGSLKLANGRVIEKTLYNRRTRQDEPALFVALTFERREVLDSSNIKPMNLIGVDRGENIPAVIALTDPEGCPLSRFKDSLGNPTHILRIGESYKEKQRTIQAKKEVEQRRAGGYSRKYASKAKNLADDMVRNTARDLLYYAVTQDAMLIFENLSRGFGRQGKRTFMAERQYTRMEDWLTAKLAYEGLPSKTYLSKTLAQYTSKTCSNCGFTITSADYDRVLEKLKKTATGWMTTINGKELKVEGQITYYNRYKRQNVVKDLSVELDRLSEESVNNDISSWTKGRSGEALSLLKKRFSHRPVQEKFVCLNCGFETHADEQAALNIARSWLFLRSQEYKKYQTNKTTGNTDKRAFVETWQSFYRKKLKEVWKPAV

SEQ ID NO: 39292 - protein, 980 aa, synthetic construct
  REGION 1..980: note = engineered CasX variant
QEIGKRINKIRRRLVKDSNTKKAGKTRGPMKTLLVRVMTPDLRERLENLRKKPENIPQPISNTSRANLNKLLTDYTEMKKAILHVYWEEFQKDPVGLMSRVAQPASKKIDQNKLKPEMDEKGNLTTAGFACSQCGQPLFVYKLEQVSEKGKAYTNYFGRCNVAEHEKLILLAQLKPEKDSDEAVTYSLGKFGQRALDFYSIHVTKESTHPVKPLAQIAGNRYASGPVGKALRDACMGTIASFLSKYQDIIIEHQKVVKGNQKRLESLRELAGKENLEYPSVTLPPQPHTKEGVDAYNEVIARVRMWVNLNLWQKLKLSRDDAKPLLRLKGFPSFPLVERQANEVDWWDMVCNVKKLINEKKEDGKVFWQNLAGYKRQEALRPYLSSEEDRKKGKKFARYQLGDLLLHLEKKHGEDWGKVYDEAWERIDKKVEGLSKHIKLEEERRSEDAQSKAALTDWLRAKASFVIEGLKEADKDEFCRCELKLQKWYGDLRGKPFAIEAENSILDISGFSKQYNCAFIWQKDGVKKLNLYLIINYFKGGKLRFKKIKPEAFEANRFYTVINKKSGEIVPMEVNFNFDDPNLIILPLAFGKRQGREFIWNDLLSLETGSLKLANGRVIEKTLYNRRTRQDEPALFVALTFERREVLDSSNIKPMNLIGVDRGENIPAVIALTDPEGCPLSRFKDSLGNPTHILRIGESYKEKQRTIQAKKEVEQRRAGGYSRKYASKAKNLADDMVRNTARDLLYYAVTQDAMLIFENLSRGFGRQGKRTFMAERQYTRMEDWLTAKLAYEGLPSKTYLSKTLAQYTSKTCSNCGFTITSADYDRVLEKLKKTATGWMTTINGKELKVEGQITYYNRYKRQNVVKDLSVELDRLSEESVNNDISSWTKGRSGEALSLLKKRFSHRPVQEKFVCLNCGFETHADEQAALNIARSWLFLRSQEYKKYQTNKTTGNTDKRAFVETWQSFYRKKLKEVWKPAV

SEQ ID NO: 39293 - protein, 979 aa, synthetic construct
  REGION 1..979: note = engineered CasX variant
QEIGRINKIRRRLVKDSNTKKAGKTRGPMKTLLVRVMTPDLRERLENLRKKPENIPQPISNTSRANLNKLLTDYTEMKKAILHVYWEEFQKDPVGLMSRVAQPASKKIDQNKLKPEMDEKGNLTTAGFACSQCGQPLFVYKLEQVSEKGKAYTNYFGRCNVAEHEKLILLAQLKPEKDSDEAVTYSLGKFGQRALDFYSIHVTKESTHPVKPLAQIAGNRYASGPVGKALRDACMGTIASFLSKYQDIIIEHQKVVKGNQKRLESLRELAGKENLEYPSVTLPPQPHTKEGVDAYNEVIARVRMWVNLNLWQKLKLSRDDAKPLLRLKGFPSFPLVERQANEVDWWDMVCNVKKLINEKKEDGKVFWQNLAGYKRQEALRPYLSSEEDRKKGKKFARYQLGDLLLHLEKKHGEDWGKVYDEAWERIDKKVEGLSKHIKLEEERRSEDAQSKAALTDWLRAKASFVIEGLKEADKDEFCRCELKLQKWYGDLRGKPFAIEAENSILDISGFSKQYNCAFIWQKDGVKKLNLYLIINYFKGGKLRFKKIKPEAFEANRFYTVINKKSGEIVPMEVNFNFDDPNLIILPLAFGKRQGREFIWNDLLSLETGSLKLANGRVIEKTLYNRRTRQDEPALFVALTFERREVLDSSNIKPMNLIGVDRGENIPAVIALTDPEGCPLSRFKDSLGNPTHILRIGESYKEKQRTIQAKKEVEQRRAGGYSRKYASKAKNLADDMVRNTARDLLYYAVTQDAMLIFENLSRGFGRQGKRTFMAERQYTRMEDWLTAKLAYEGLPSKTYLSKTLAQYTSKTCSNCGFTITSADYDRVLEKLKKTATGWMTTINGKELKVEGQITYYNRYKRQNVVKDLSVELDRLSEESVNNDISSWTKGRSGEALSLLKKRFSHRPVQEKFVCLNCGFETHADEQAALNIARSWLFLRSQEYKKYQTNKTTGNTDKRAFVETWQSFYRKKLKEVWKPAV

SEQ ID NO: 39294 - protein, 980 aa, synthetic construct
  REGION 1..980: note = engineered CasX variant
QEIKGRINKIRRRLVKDSNTKKAGKTRGPMKTLLVRVMTPDLRERLENLRKKPENIPQPISNTSRANLNKLLTDYTEMKKAILHVYWEEFQKDPVGLMSRVAQPASKKIDQNKLKPEMDEKGNLTTAGFACSQCGQPLFVYKLEQVSEKGKAYTNYFGRCNVAEHEKLILLAQLKPEKDSDEAVTYSLGKFGQRALDFYSIHVTKESTHPVKPLAQIAGNRYASGPVGKALRDACMGTIASFLSKYQDIIIEHQKVVKGNQKRLESLRELAGKENLEYPSVTLPPQPHTKEGVDAYNEVIARVRMWVNLNLWQKLKLSRDDAKPLLRLKGFPSFPLVERQANEVDWWDMVCNVKKLINEKKEDGKVFWQNLAGYKRQEALRPYLSSEEDRKKGKKFARYQLGDLLLHLEKKHGEDWGKVYDEAWERIDKKVEGLSKHIKLEEERRSEDAQSKAALTDWLRAKASFVIEGLKEADKDEFCRCELKLQKWYGDLRGKPFAIEAENSILDISGFSKQYNCAFIWQKDGVKKLNLYLIINYFKGGKLRFKKIKPEAFEANRFYTVINKKSGEIVPMEVNFNFDDPNLIILPLAFGKRQGREFIWNDLLSLETGSLKLANGRVIEKTLYNRRTRQDEPALFVALTFERREVLDSSNIKPMNLIGVDRGENIPAVIALTDPEGCPLSRFKDSLGNPTHILRIGESYKEKQRTIQAKKEVEQRRAGGYSRKYASKAKNLADDMVRNTARDLLYYAVTQDAMLIFENLSRGFGRQGKRTFMAERQYTRMEDWLTAKLAYEGLPSKTYLSKTLAQYTSKTCSNCGFTITSADYDRVLEKLKKTATGWMTTINGKELKVEGQITYYNRYKRQNVVKDLSVELDRLSEESVNNDISSWTKGRSGEALSLLKKRFSHRPVQEKFVCLNCGFETHADEQAALNIARSWLFLRSQEYKKYQTNKTTGNTDKRAFVETWQSFYRKKLKEVWKPAV

SEQ ID NO: 39295 - protein, 979 aa, synthetic construct
  REGION 1..979: note = engineered CasX variant
QEIKRANKIRRRLVKDSNTKKAGKTRGPMKTLLVRVMTPDLRERLENLRKKPENIPQPISNTSRANLNKLLTDYTEMKKAILHVYWEEFQKDPVGLMSRVAQPASKKIDQNKLKPEMDEKGNLTTAGFACSQCGQPLFVYKLEQVSEKGKAYTNYFGRCNVAEHEKLILLAQLKPEKDSDEAVTYSLGKFGQRALDFYSIHVTKESTHPVKPLAQIAGNRYASGPVGKALRDACMGTIASFLSKYQDIIIEHQKVVKGNQKRLESLRELAGKENLEYPSVTLPPQPHTKEGVDAYNEVIARVRMWVNLNLWQKLKLSRDDAKPLLRLKGFPSFPLVERQANEVDWWDMVCNVKKLINEKKEDGKVFWQNLAGYKRQEALRPYLSSEEDRKKGKKFARYQLGDLLLHLEKKHGEDWGKVYDEAWERIDKKVEGLSKHIKLEEERRSEDAQSKAALTDWLRAKASFVIEGLKEADKDEFCRCELKLQKWYGDLRGKPFAIEAENSILDISGFSKQYNCAFIWQKDGVKKLNLYLIINYFKGGKLRFKKIKPEAFEANRFYTVINKKSGEIVPMEVNFNFDDPNLIILPLAFGKRQGREFIWNDLLSLETGSLKLANGRVIEKTLYNRRTRQDEPALFVALTFERREVLDSSNIKPMNLIGVDRGENIPAVIALTDPEGCPLSRFKDSLGNPTHILRIGESYKEKQRTIQAKKEVEQRRAGGYSRKYASKAKNLADDMVRNTARDLLYYAVTQDAMLIFENLSRGFGRQGKRTFMAERQYTRMEDWLTAKLAYEGLPSKTYLSKTLAQYTSKTCSNCGFTITSADYDRVLEKLKKTATGWMTTINGKELKVEGQITYYNRYKRQNVVKDLSVELDRLSEESVNNDISSWTKGRSGEALSLLKKRFSHRPVQEKFVCLNCGFETHADEQAALNIARSWLFLRSQEYKKYQTNKTTGNTDKRAFVETWQSFYRKKLKEVWKPAV

SEQ ID NO: 39296 - protein, 979 aa, synthetic construct
  REGION 1..979: note = engineered CasX variant
QEIKRISKIRRRLVKDSNTKKAGKTRGPMKTLLVRVMTPDLRERLENLRKKPENIPQPISNTSRANLNKLLTDYTEMKKAILHVYWEEFQKDPVGLMSRVAQPASKKIDQNKLKPEMDEKGNLTTAGFACSQCGQPLFVYKLEQVSEKGKAYTNYFGRCNVAEHEKLILLAQLKPEKDSDEAVTYSLGKFGQRALDFYSIHVTKESTHPVKPLAQIAGNRYASGPVGKALRDACMGTIASFLSKYQDIIIEHQKVVKGNQKRLESLRELAGKENLEYPSVTLPPQPHTKEGVDAYNEVIARVRMWVNLNLWQKLKLSRDDAKPLLRLKGFPSFPLVERQANEVDWWDMVCNVKKLINEKKEDGKVFWQNLAGYKRQEALRPYLSSEEDRKKGKKFARYQLGDLLLHLEKKHGEDWGKVYDEAWERIDKKVEGLSKHIKLEEERRSEDAQSKAALTDWLRAKASFVIEGLKEADKDEFCRCELKLQKWYGDLRGKPFAIEAENSILDISGFSKQYNCAFIWQKDGVKKLNLYLIINYFKGGKLRFKKIKPEAFEANRFYTVINKKSGEIVPMEVNFNFDDPNLIILPLAFGKRQGREFIWNDLLSLETGSLKLANGRVIEKTLYNRRTRQDEPALFVALTFERREVLDSSNIKPMNLIGVDRGENIPAVIALTDPEGCPLSRFKDSLGNPTHILRIGESYKEKQRTIQAKKEVEQRRAGGYSRKYASKAKNLADDMVRNTARDLLYYAVTQDAMLIFENLSRGFGRQGKRTFMAERQYTRMEDWLTAKLAYEGLPSKTYLSKTLAQYTSKTCSNCGFTITSADYDRVLEKLKKTATGWMTTINGKELKVEGQITYYNRYKRQNVVKDLSVELDRLSEESVNNDISSWTKGRSGEALSLLKKRFSHRPVQEKFVCLNCGFETHADEQAALNIARSWLFLRSQEYKKYQTNKTTGNTDKRAFVETWQSFYRKKLKEVWKPAV

SEQ ID NO: 39297 - protein, 979 aa, synthetic construct
  REGION 1..979: note = engineered CasX variant
QEIKRINGIRRRLVKDSNTKKAGKTRGPMKTLLVRVMTPDLRERLENLRKKPENIPQPISNTSRANLNKLLTDYTEMKKAILHVYWEEFQKDPVGLMSRVAQPASKKIDQNKLKPEMDEKGNLTTAGFACSQCGQPLFVYKLEQVSEKGKAYTNYFGRCNVAEHEKLILLAQLKPEKDSDEAVTYSLGKFGQRALDFYSIHVTKESTHPVKPLAQIAGNRYASGPVGKALRDACMGTIASFLSKYQDIIIEHQKVVKGNQKRLESLRELAGKENLEYPSVTLPPQPHTKEGVDAYNEVIARVRMWVNLNLWQKLKLSRDDAKPLLRLKGFPSFPLVERQANEVDWWDMVCNVKKLINEKKEDGKVFWQNLAGYKRQEALRPYLSSEEDRKKGKKFARYQLGDLLLHLEKKHGEDWGKVYDEAWERIDKKVEGLSKHIKLEEERRSEDAQSKAALTDWLRAKASFVIEGLKEADKDEFCRCELKLQKWYGDLRGKPFAIEAENSILDISGFSKQYNCAFIWQKDGVKKLNLYLIINYFKGGKLRFKKIKPEAFEANRFYTVINKKSGEIVPMEVNFNFDDPNLIILPLAFGKRQGREFIWNDLLSLETGSLKLANGRVIEKTLYNRRTRQDEPALFVALTFERREVLDSSNIKPMNLIGVDRGENIPAVIALTDPEGCPLSRFKDSLGNPTHILRIGESYKEKQRTIQAKKEVEQRRAGGYSRKYASKAKNLADDMVRNTARDLLYYAVTQDAMLIFENLSRGFGRQGKRTFMAERQYTRMEDWLTAKLAYEGLPSKTYLSKTLAQYTSKTCSNCGFTITSADYDRVLEKLKKTATGWMTTINGKELKVEGQITYYNRYKRQNVVKDLSVELDRLSEESVNNDISSWTKGRSGEALSLLKKRFSHRPVQEKFVCLNCGFETHADEQAALNIARSWLFLRSQEYKKYQTNKTTGNTDKRAFVETWQSFYRKKLKEVWKPAV

SEQ ID NO: 39298 - protein, 979 aa, synthetic construct
  REGION 1..979: note = engineered CasX variant
QEIKRINKIRRRLVKDSNTKKAGKTRGPMKTLLVPVMTPDLRERLENLRKKPENIPQPISNTSRANLNKLLTDYTEMKKAILHVYWEEFQKDPVGLMSRVAQPASKKIDQNKLKPEMDEKGNLTTAGFACSQCGQPLFVYKLEQVSEKGKAYTNYFGRCNVAEHEKLILLAQLKPEKDSDEAVTYSLGKFGQRALDFYSIHVTKESTHPVKPLAQIAGNRYASGPVGKALRDACMGTIASFLSKYQDIIIEHQKVVKGNQKRLESLRELAGKENLEYPSVTLPPQPHTKEGVDAYNEVIARVRMWVNLNLWQKLKLSRDDAKPLLRLKGFPSFPLVERQANEVDWWDMVCNVKKLINEKKEDGKVFWQNLAGYKRQEALRPYLSSEEDRKKGKKFARYQLGDLLLHLEKKHGEDWGKVYDEAWERIDKKVEGLSKHIKLEEERRSEDAQSKAALTDWLRAKASFVIEGLKEADKDEFCRCELKLQKWYGDLRGKPFAIEAENSILDISGFSKQYNCAFIWQKDGVKKLNLYLIINYFKGGKLRFKKIKPEAFEANRFYTVINKKSGEIVPMEVNFNFDDPNLIILPLAFGKRQGREFIWNDLLSLETGSLKLANGRVIEKTLYNRRTRQDEPALFVALTFERREVLDSSNIKPMNLIGVDRGENIPAVIALTDPEGCPLSRFKDSLGNPTHILRIGESYKEKQRTIQAKKEVEQRRAGGYSRKYASKAKNLADDMVRNTARDLLYYAVTQDAMLIFENLSRGFGRQGKRTFMAERQYTRMEDWLTAKLAYEGLPSKTYLSKTLAQYTSKTCSNCGFTITSADYDRVLEKLKKTATGWMTTINGKELKVEGQITYYNRYKRQNVVKDLSVELDRLSEESVNNDISSWTKGRSGEALSLLKKRFSHRPVQEKFVCLNCGFETHADEQAALNIARSWLFLRSQEYKKYQTNKTTGNTDKRAFVETWQSFYRKKLKEVWKPAV

SEQ ID NO: 39299 - protein, 979 aa, synthetic construct
  REGION 1..979: note = engineered CasX variant
QEIKRINKIRRRLVKDSNTKKAGKTRGPMKTLLVRVMTPDLRERLENLRKKPPNIPQPISNTSRANLNKLLTDYTEMKKAILHVYWEEFQKDPVGLMSRVAQPASKKIDQNKLKPEMDEKGNLTTAGFACSQCGQPLFVYKLEQVSEKGKAYTNYFGRCNVAEHEKLILLAQLKPEKDSDEAVTYSLGKFGQRALDFYSIHVTKESTHPVKPLAQIAGNRYASGPVGKALRDACMGTIASFLSKYQDIIIEHQKVVKGNQKRLESLRELAGKENLEYPSVTLPPQPHTKEGVDAYNEVIARVRMWVNLNLWQKLKLSRDDAKPLLRLKGFPSFPLVERQANEVDWWDMVCNVKKLINEKKEDGKVFWQNLAGYKRQEALRPYLSSEEDRKKGKKFARYQLGDLLLHLEKKHGEDWGKVYDEAWERIDKKVEGLSKHIKLEEERRSEDAQSKAALTDWLRAKASFVIEGLKEADKDEFCRCELKLQKWYGDLRGKPFAIEAENSILDISGFSKQYNCAFIWQKDGVKKLNLYLIINYFKGGKLRFKKIKPEAFEANRFYTVINKKSGEIVPMEVNFNFDDPNLIILPLAFGKRQGREFIWNDLLSLETGSLKLANGRVIEKTLYNRRTRQDEPALFVALTFERREVLDSSNIKPMNLIGVDRGENIPAVIALTDPEGCPLSRFKDSLGNPTHILRIGESYKEKQRTIQAKKEVEQRRAGGYSRKYASKAKNLADDMVRNTARDLLYYAVTQDAMLIFENLSRGFGRQGKRTFMAERQYTRMEDWLTAKLAYEGLPSKTYLSKTLAQYTSKTCSNCGFTITSADYDRVLEKLKKTATGWMTTINGKELKVEGQITYYNRYKRQNVVKDLSVELDRLSEESVNNDISSWTKGRSGEALSLLKKRFSHRPVQEKFVCLNCGFETHADEQAALNIARSWLFLRSQEYKKYQTNKTTGNTDKRAFVETWQSFYRKKLKEVWKPAV

SEQ ID NO: 39300 - protein, 979 aa, synthetic construct
  REGION 1..979: note = engineered CasX variant
QEIKRINKIRRRLVKDSNTKKAGKTRGPMKTLLVRVMTPDLRERLENLRKKPENIPQPISNTSQANLNKLLTDYTEMKKAILHVYWEEFQKDPVGLMSRVAQPASKKIDQNKLKPEMDEKGNLTTAGFACSQCGQPLFVYKLEQVSEKGKAYTNYFGRCNVAEHEKLILLAQLKPEKDSDEAVTYSLGKFGQRALDFYSIHVTKESTHPVKPLAQIAGNRYASGPVGKALRDACMGTIASFLSKYQDIIIEHQKVVKGNQKRLESLRELAGKENLEYPSVTLPPQPHTKEGVDAYNEVIARVRMWVNLNLWQKLKLSRDDAKPLLRLKGFPSFPLVERQANEVDWWDMVCNVKKLINEKKEDGKVFWQNLAGYKRQEALRPYLSSEEDRKKGKKFARYQLGDLLLHLEKKHGEDWGKVYDEAWERIDKKVEGLSKHIKLEEERRSEDAQSKAALTDWLRAKASFVIEGLKEADKDEFCRCELKLQKWYGDLRGKPFAIEAENSILDISGFSKQYNCAFIWQKDGVKKLNLYLIINYFKGGKLRFKKIKPEAFEANRFYTVINKKSGEIVPMEVNFNFDDPNLIILPLAFGKRQGREFIWNDLLSLETGSLKLANGRVIEKTLYNRRTRQDEPALFVALTFERREVLDSSNIKPMNLIGVDRGENIPAVIALTDPEGCPLSRFKDSLGNPTHILRIGESYKEKQRTIQAKKEVEQRRAGGYSRKYASKAKNLADDMVRNTARDLLYYAVTQDAMLIFENLSRGFGRQGKRTFMAERQYTRMEDWLTAKLAYEGLPSKTYLSKTLAQYTSKTCSNCGFTITSADYDRVLEKLKKTATGWMTTINGKELKVEGQITYYNRYKRQNVVKDLSVELDRLSEESVNNDISSWTKGRSGEALSLLKKRFSHRPVQEKFVCLNCGFETHADEQAALNIARSWLFLRSQEYKKYQTNKTTGNTDKRAFVETWQSFYRKKLKEVWKPAV

SEQ ID NO: 39301 - protein, 979 aa, synthetic construct
  REGION 1..979: note = engineered CasX variant
QEIKRINKIRRRLVKDSNTKKAGKTRGPMKTLLVRVMTPDLRERLENLRKKPENIPQPISNTSRANLNKLLTDYTEMKKAILHVYDEEFQKDPVGLMSRVAQPASKKIDQNKLKPEMDEKGNLTTAGFACSQCGQPLFVYKLEQVSEKGKAYTNYFGRCNVAEHEKLILLAQLKPEKDSDEAVTYSLGKFGQRALDFYSIHVTKESTHPVKPLAQIAGNRYASGPVGKALRDACMGTIASFLSKYQDIIIEHQKVVKGNQKRLESLRELAGKENLEYPSVTLPPQPHTKEGVDAYNEVIARVRMWVNLNLWQKLKLSRDDAKPLLRLKGFPSFPLVERQANEVDWWDMVCNVKKLINEKKEDGKVFWQNLAGYKRQEALRPYLSSEEDRKKGKKFARYQLGDLLLHLEKKHGEDWGKVYDEAWERIDKKVEGLSKHIKLEEERRSEDAQSKAALTDWLRAKASFVIEGLKEADKDEFCRCELKLQKWYGDLRGKPFAIEAENSILDISGFSKQYNCAFIWQKDGVKKLNLYLIINYFKGGKLRFKKIKPEAFEANRFYTVINKKSGEIVPMEVNFNFDDPNLIILPLAFGKRQGREFIWNDLLSLETGSLKLANGRVIEKTLYNRRTRQDEPALFVALTFERREVLDSSNIKPMNLIGVDRGENIPAVIALTDPEGCPLSRFKDSLGNPTHILRIGESYKEKQRTIQAKKEVEQRRAGGYSRKYASKAKNLADDMVRNTARDLLYYAVTQDAMLIFENLSRGFGRQGKRTFMAERQYTRMEDWLTAKLAYEGLPSKTYLSKTLAQYTSKTCSNCGFTITSADYDRVLEKLKKTATGWMTTINGKELKVEGQITYYNRYKRQNVVKDLSVELDRLSEESVNNDISSWTKGRSGEALSLLKKRFSHRPVQEKFVCLNCGFETHADEQAALNIARSWLFLRSQEYKKYQTNKTTGNTDKRAFVETWQSFYRKKLKEVWKPAV

SEQ ID NO: 39302 - protein, 979 aa, synthetic construct
  REGION 1..979: note = engineered CasX variant
QEIKRINKIRRRLVKDSNTKKAGKTRGPMKTLLVRVMTPDLRERLENLRKKPENIPQPISNTSRANLNKLLTDYTEMKKAILHVYWEEFQKDPVGLMSRVAQPASKKIDQNKLKPEMDEKGNLTTAGFACSQCGQPLFVYKLEQVSEKGKAYTNYFGRCNVAEHEKLIKLAQLKPEKDSDEAVTYSLGKFGQRALDFYSIHVTKESTHPVKPLAQIAGNRYASGPVGKALRDACMGTIASFLSKYQDIIIEHQKVVKGNQKRLESLRELAGKENLEYPSVTLPPQPHTKEGVDAYNEVIARVRMWVNLNLWQKLKLSRDDAKPLLRLKGFPSFPLVERQANEVDWWDMVCNVKKLINEKKEDGKVFWQNLAGYKRQEALRPYLSSEEDRKKGKKFARYQLGDLLLHLEKKHGEDWGKVYDEAWERIDKKVEGLSKHIKLEEERRSEDAQSKAALTDWLRAKASFVIEGLKEADKDEFCRCELKLQKWYGDLRGKPFAIEAENSILDISGFSKQYNCAFIWQKDGVKKLNLYLIINYFKGGKLRFKKIKPEAFEANRFYTVINKKSGEIVPMEVNFNFDDPNLIILPLAFGKRQGREFIWNDLLSLETGSLKLANGRVIEKTLYNRRTRQDEPALFVALTFERREVLDSSNIKPMNLIGVDRGENIPAVIALTDPEGCPLSRFKDSLGNPTHILRIGESYKEKQRTIQAKKEVEQRRAGGYSRKYASKAKNLADDMVRNTARDLLYYAVTQDAMLIFENLSRGFGRQGKRTFMAERQYTRMEDWLTAKLAYEGLPSKTYLSKTLAQYTSKTCSNCGFTITSADYDRVLEKLKKTATGWMTTINGKELKVEGQITYYNRYKRQNVVKDLSVELDRLSEESVNNDISSWTKGRSGEALSLLKKRFSHRPVQEKFVCLNCGFETHADEQAALNIARSWLFLRSQEYKKYQTNKTTGNTDKRAFVETWQSFYRKKLKEVWKPAV

SEQ ID NO: 39303 - protein, 979 aa, synthetic construct
  REGION 1..979: note = engineered CasX variant
QEIKRINKIRRRLVKDSNTKKAGKTRGPMKTLLVRVMTPDLRERLENLRKKPENIPQPISNTSRANLNKLLTDYTEMKKAILHVYWEEFQKDPVGLMSRVAQPASKKIDQNKLKPEMDEKGNLTTAGFACSQCGQPLFVYKLEQVSEKGKAYTNYFGRCNVAEHEKLILLYQLKPEKDSDEAVTYSLGKFGQRALDFYSIHVTKESTHPVKPLAQIAGNRYASGPVGKALRDACMGTIASFLSKYQDIIIEHQKVVKGNQKRLESLRELAGKENLEYPSVTLPPQPHTKEGVDAYNEVIARVRMWVNLNLWQKLKLSRDDAKPLLRLKGFPSFPLVERQANEVDWWDMVCNVKKLINEKKEDGKVFWQNLAGYKRQEALRPYLSSEEDRKKGKKFARYQLGDLLLHLEKKHGEDWGKVYDEAWERIDKKVEGLSKHIKLEEERRSEDAQSKAALTDWLRAKASFVIEGLKEADKDEFCRCELKLQKWYGDLRGKPFAIEAENSILDISGFSKQYNCAFIWQKDGVKKLNLYLIINYFKGGKLRFKKIKPEAFEANRFYTVINKKSGEIVPMEVNFNFDDPNLIILPLAFGKRQGREFIWNDLLSLETGSLKLANGRVIEKTLYNRRTRQDEPALFVALTFERREVLDSSNIKPMNLIGVDRGENIPAVIALTDPEGCPLSRFKDSLGNPTHILRIGESYKEKQRTIQAKKEVEQRRAGGYSRKYASKAKNLADDMVRNTARDLLYYAVTQDAMLIFENLSRGFGRQGKRTFMAERQYTRMEDWLTAKLAYEGLPSKTYLSKTLAQYTSKTCSNCGFTITSADYDRVLEKLKKTATGWMTTINGKELKVEGQITYYNRYKRQNVVKDLSVELDRLSEESVNNDISSWTKGRSGEALSLLKKRFSHRPVQEKFVCLNCGFETHADEQAALNIARSWLFLRSQEYKKYQTNKTTGNTDKRAFVETWQSFYRKKLKEVWKPAV

SEQ ID NO: 39304 - protein, 979 aa, synthetic construct
  REGION 1..979: note = engineered CasX variant
QEIKRINKIRRRLVKDSNTKKAGKTRGPMKTLLVRVMTPDLRERLENLRKKPENIPQPISNTSRANLNKLLTDYTEMKKAILHVYWEEFQKDPVGLMSRVAQPASKKIDQNKLKPEMDEKGNLTTAGFACSQCGQPLFVYKLEQVSEKGKAYTNYFGRCNVAEHEKLILLSQLKPEKDSDEAVTYSLGKFGQRALDFYSIHVTKESTHPVKPLAQIAGNRYASGPVGKALRDACMGTIASFLSKYQDIIIEHQKVVKGNQKRLESLRELAGKENLEYPSVTLPPQPHTKEGVDAYNEVIARVRMWVNLNLWQKLKLSRDDAKPLLRLKGFPSFPLVERQANEVDWWDMVCNVKKLINEKKEDGKVFWQNLAGYKRQEALRPYLSSEEDRKKGKKFARYQLGDLLLHLEKKHGEDWGKVYDEAWERIDKKVEGLSKHIKLEEERRSEDAQSKAALTDWLRAKASFVIEGLKEADKDEFCRCELKLQKWYGDLRGKPFAIEAENSILDISGFSKQYNCAFIWQKDGVKKLNLYLIINYFKGGKLRFKKIKPEAFEANRFYTVINKKSGEIVPMEVNFNFDDPNLIILPLAFGKRQGREFIWNDLLSLETGSLKLANGRVIEKTLYNRRTRQDEPALFVALTFERREVLDSSNIKPMNLIGVDRGENIPAVIALTDPEGCPLSRFKDSLGNPTHILRIGESYKEKQRTIQAKKEVEQRRAGGYSRKYASKAKNLADDMVRNTARDLLYYAVTQDAMLIFENLSRGFGRQGKRTFMAERQYTRMEDWLTAKLAYEGLPSKTYLSKTLAQYTSKTCSNCGFTITSADYDRVLEKLKKTATGWMTTINGKELKVEGQITYYNRYKRQNVVKDLSVELDRLSEESVNNDISSWTKGRSGEALSLLKKRFSHRPVQEKFVCLNCGFETHADEQAALNIARSWLFLRSQEYKKYQTNKTTGNTDKRAFVETWQSFYRKKLKEVWKPAV

SEQ ID NO: 39305 - protein, 978 aa, synthetic construct
  REGION 1..978: note = engineered CasX variant
QEIKRINKIRRRLVKDSNTKKAGKTRGPMKTLLVRVMTPDLRERLENLRKKPENIPQPISNTSRANLNKLLTDYTEMKKAILHVYWEEFQKDPVGLMSRVAQPASKKIDQNKLKPEMDEKGNLTTAGFACSQCGQPLFVYKLEQVSEKGKAYTNYFGRCNVAEHEKLILLAQLKPEKDSDEAVTYSLGKFGQRALDFYSIHVTKESTHPVKPLAQIAGNRYASPVGKALRDACMGTIASFLSKYQDIIIEHQKVVKGNQKRLESLRELAGKENLEYPSVTLPPQPHTKEGVDAYNEVIARVRMWVNLNLWQKLKLSRDDAKPLLRLKGFPSFPLVERQANEVDWWDMVCNVKKLINEKKEDGKVFWQNLAGYKRQEALRPYLSSEEDRKKGKKFARYQLGDLLLHLEKKHGEDWGKVYDEAWERIDKKVEGLSKHIKLEEERRSEDAQSKAALTDWLRAKASFVIEGLKEADKDEFCRCELKLQKWYGDLRGKPFAIEAENSILDISGFSKQYNCAFIWQKDGVKKLNLYLIINYFKGGKLRFKKIKPEAFEANRFYTVINKKSGEIVPMEVNFNFDDPNLIILPLAFGKRQGREFIWNDLLSLETGSLKLANGRVIEKTLYNRRTRQDEPALFVALTFERREVLDSSNIKPMNLIGVDRGENIPAVIALTDPEGCPLSRFKDSLGNPTHILRIGESYKEKQRTIQAKKEVEQRRAGGYSRKYASKAKNLADDMVRNTARDLLYYAVTQDAMLIFENLSRGFGRQGKRTFMAERQYTRMEDWLTAKLAYEGLPSKTYLSKTLAQYTSKTCSNCGFTITSADYDRVLEKLKKTATGWMTTINGKELKVEGQITYYNRYKRQNVVKDLSVELDRLSEESVNNDISSWTKGRSGEALSLLKKRFSHRPVQEKFVCLNCGFETHADEQAALNIARSWLFLRSQEYKKYQTNKTTGNTDKRAFVETWQSFYRKKLKEVWKPAV

SEQ ID NO: 39306 - protein, 979 aa, synthetic construct
  REGION 1..979: note = engineered CasX variant
QEIKRINKIRRRLVKDSNTKKAGKTRGPMKTLLVRVMTPDLRERLENLRKKPENIPQPISNTSRANLNKLLTDYTEMKKAILHVYWEEFQKDPVGLMSRVAQPASKKIDQNKLKPEMDEKGNLTTAGFACSQCGQPLFVYKLEQVSEKGKAYTNYFGRCNVAEHEKLILLAQLKPEKDSDEAVTYSLGKFGQRALDFYSIHVTKESTHPVKPLAQIAGNRYASGPVGKALRDACMGTIASFLSKYQDIIIEHQKVVKGNQKRLESLRELAGKENLEYPSVTLPPQPHTSEGVDAYNEVIARVRMWVNLNLWQKLKLSRDDAKPLLRLKGFPSFPLVERQANEVDWWDMVCNVKKLINEKKEDGKVFWQNLAGYKRQEALRPYLSSEEDRKKGKKFARYQLGDLLLHLEKKHGEDWGKVYDEAWERIDKKVEGLSKHIKLEEERRSEDAQSKAALTDWLRAKASFVIEGLKEADKDEFCRCELKLQKWYGDLRGKPFAIEAENSILDISGFSKQYNCAFIWQKDGVKKLNLYLIINYFKGGKLRFKKIKPEAFEANRFYTVINKKSGEIVPMEVNFNFDDPNLIILPLAFGKRQGREFIWNDLLSLETGSLKLANGRVIEKTLYNRRTRQDEPALFVALTFERREVLDSSNIKPMNLIGVDRGENIPAVIALTDPEGCPLSRFKDSLGNPTHILRIGESYKEKQRTIQAKKEVEQRRAGGYSRKYASKAKNLADDMVRNTARDLLYYAVTQDAMLIFENLSRGFGRQGKRTFMAERQYTRMEDWLTAKLAYEGLPSKTYLSKTLAQYTSKTCSNCGFTITSADYDRVLEKLKKTATGWMTTINGKELKVEGQITYYNRYKRQNVVKDLSVELDRLSEESVNNDISSWTKGRSGEALSLLKKRFSHRPVQEKFVCLNCGFETHADEQAALNIARSWLFLRSQEYKKYQTNKTTGNTDKRAFVETWQSFYRKKLKEVWKPAV

SEQ ID NO: 39307 - protein, 979 aa, synthetic construct
  REGION 1..979: note = engineered CasX variant
QEIKRINKIRRRLVKDSNTKKAGKTRGPMKTLLVRVMTPDLRERLENLRKKPENIPQPISNTSRANLNKLLTDYTEMKKAILHVYWEEFQKDPVGLMSRVAQPASKKIDQNKLKPEMDEKGNLTTAGFACSQCGQPLFVYKLEQVSEKGKAYTNYFGRCNVAEHEKLILLAQLKPEKDSDEAVTYSLGKFGQRALDFYSIHVTKESTHPVKPLAQIAGNRYASGPVGKALRDACMGTIASFLSKYQDIIIEHQKVVKGNQKRLESLRELAGKENLEYPSVTLPPQPHTKEGLDAYNEVIARVRMWVNLNLWQKLKLSRDDAKPLLRLKGFPSFPLVERQANEVDWWDMVCNVKKLINEKKEDGKVFWQNLAGYKRQEALRPYLSSEEDRKKGKKFARYQLGDLLLHLEKKHGEDWGKVYDEAWERIDKKVEGLSKHIKLEEERRSEDAQSKAALTDWLRAKASFVIEGLKEADKDEFCRCELKLQKWYGDLRGKPFAIEAENSILDISGFSKQYNCAFIWQKDGVKKLNLYLIINYFKGGKLRFKKIKPEAFEANRFYTVINKKSGEIVPMEVNFNFDDPNLIILPLAFGKRQGREFIWNDLLSLETGSLKLANGRVIEKTLYNRRTRQDEPALFVALTFERREVLDSSNIKPMNLIGVDRGENIPAVIALTDPEGCPLSRFKDSLGNPTHILRIGESYKEKQRTIQAKKEVEQRRAGGYSRKYASKAKNLADDMVRNTARDLLYYAVTQDAMLIFENLSRGFGRQGKRTFMAERQYTRMEDWLTAKLAYEGLPSKTYLSKTLAQYTSKTCSNCGFTITSADYDRVLEKLKKTATGWMTTINGKELKVEGQITYYNRYKRQNVVKDLSVELDRLSEESVNNDISSWTKGRSGEALSLLKKRFSHRPVQEKFVCLNCGFETHADEQAALNIARSWLFLRSQEYKKYQTNKTTGNTDKRAFVETWQSFYRKKLKEVWKPAV

SEQ ID NO: 39308 - protein, 979 aa, synthetic construct
  REGION 1..979: note = engineered CasX variant
QEIKRINKIRRRLVKDSNTKKAGKTRGPMKTLLVRVMTPDLRERLENLRKKPENIPQPISNTSRANLNKLLTDYTEMKKAILHVYWEEFQKDPVGLMSRVAQPASKKIDQNKLKPEMDEKGNLTTAGFACSQCGQPLFVYKLEQVSEKGKAYTNYFGRCNVAEHEKLILLAQLKPEKDSDEAVTYSLGKFGQRALDFYSIHVTKESTHPVKPLAQIAGNRYASGPVGKALRDACMGTIASFLSKYQDIIIEHQKVVKGNQKRLESLRELAGKENLEYPSVTLPPQPHTKEGVDAYNEVIARVRTWVNLNLWQKLKLSRDDAKPLLRLKGFPSFPLVERQANEVDWWDMVCNVKKLINEKKEDGKVFWQNLAGYKRQEALRPYLSSEEDRKKGKKFARYQLGDLLLHLEKKHGEDWGKVYDEAWERIDKKVEGLSKHIKLEEERRSEDAQSKAALTDWLRAKASFVIEGLKEADKDEFCRCELKLQKWYGDLRGKPFAIEAENSILDISGFSKQYNCAFIWQKDGVKKLNLYLIINYFKGGKLRFKKIKPEAFEANRFYTVINKKSGEIVPMEVNFNFDDPNLIILPLAFGKRQGREFIWNDLLSLETGSLKLANGRVIEKTLYNRRTRQDEPALFVALTFERREVLDSSNIKPMNLIGVDRGENIPAVIALTDPEGCPLSRFKDSLGNPTHILRIGESYKEKQRTIQAKKEVEQRRAGGYSRKYASKAKNLADDMVRNTARDLLYYAVTQDAMLIFENLSRGFGRQGKRTFMAERQYTRMEDWLTAKLAYEGLPSKTYLSKTLAQYTSKTCSNCGFTITSADYDRVLEKLKKTATGWMTTINGKELKVEGQITYYNRYKRQNVVKDLSVELDRLSEESVNNDISSWTKGRSGEALSLLKKRFSHRPVQEKFVCLNCGFETHADEQAALNIARSWLFLRSQEYKKYQTNKTTGNTDKRAFVETWQSFYRKKLKEVWKPAV

SEQ ID NO: 39309 - protein, 979 aa, synthetic construct
  REGION 1..979: note = engineered CasX variant
QEIKRINKIRRRLVKDSNTKKAGKTRGPMKTLLVRVMTPDLRERLENLRKKPENIPQPISNTSRANLNKLLTDYTEMKKAILHVYWEEFQKDPVGLMSRVAQPASKKIDQNKLKPEMDEKGNLTTAGFACSQCGQPLFVYKLEQVSEKGKAYTNYFGRCNVAEHEKLILLAQLKPEKDSDEAVTYSLGKFGQRALDFYSIHVTKESTHPVKPLAQIAGNRYASGPVGKALRDACMGTIASFLSKYQDIIIEHQKVVKGNQKRLESLRELAGKENLEYPSVTLPPQPHTKEGVDAYNEVIARVRWWVNLNLWQKLKLSRDDAKPLLRLKGFPSFPLVERQANEVDWWDMVCNVKKLINEKKEDGKVFWQNLAGYKRQEALRPYLSSEEDRKKGKKFARYQLGDLLLHLEKKHGEDWGKVYDEAWERIDKKVEGLSKHIKLEEERRSEDAQSKAALTDWLRAKASFVIEGLKEADKDEFCRCELKLQKWYGDLRGKPFAIEAENSILDISGFSKQYNCAFIWQKDGVKKLNLYLIINYFKGGKLRFKKIKPEAFEANRFYTVINKKSGEIVPMEVNFNFDDPNLIILPLAFGKRQGREFIWNDLLSLETGSLKLANGRVIEKTLYNRRTRQDEPALFVALTFERREVLDSSNIKPMNLIGVDRGENIPAVIALTDPEGCPLSRFKDSLGNPTHILRIGESYKEKQRTIQAKKEVEQRRAGGYSRKYASKAKNLADDMVRNTARDLLYYAVTQDAMLIFENLSRGFGRQGKRTFMAERQYTRMEDWLTAKLAYEGLPSKTYLSKTLAQYTSKTCSNCGFTITSADYDRVLEKLKKTATGWMTTINGKELKVEGQITYYNRYKRQNVVKDLSVELDRLSEESVNNDISSWTKGRSGEALSLLKKRFSHRPVQEKFVCLNCGFETHADEQAALNIARSWLFLRSQEYKKYQTNKTTGNTDKRAFVETWQSFYRKKLKEVWKPAV

SEQ ID NO: 39310 - protein, 980 aa, synthetic construct
  REGION 1..980: note = engineered CasX variant
QEIKRINKIRRRLVKDSNTKKAGKTRGPMKTLLVRVMTPDLRERLENLRKKPENIPQPISNTSRANLNKLLTDYTEMKKAILHVYWEEFQKDPVGLMSRVAQPASKKIDQNKLKPEMDEKGNLTTAGFACSQCGQPLFVYKLEQVSEKGKAYTNYFGRCNVAEHEKLILLAQLKPEKDSDEAVTYSLGKFGQRALDFYSIHVTKESTHPVKPLAQIAGNRYASGPVGKALRDACMGTIASFLSKYQDIIIEHQKVVKGNQKRLESLRELAGKENLEYPSVTLPPQPHTKEGVDAYNEVIARVRMWVNLNLWQKLKLSRDDAKPLLRLKGFPSFPLVERQQANEVDWWDMVCNVKKLINEKKEDGKVFWQNLAGYKRQEALRPYLSSEEDRKKGKKFARYQLGDLLLHLEKKHGEDWGKVYDEAWERIDKKVEGLSKHIKLEEERRSEDAQSKAALTDWLRAKASFVIEGLKEADKDEFCRCELKLQKWYGDLRGKPFAIEAENSILDISGFSKQYNCAFIWQKDGVKKLNLYLIINYFKGGKLRFKKIKPEAFEANRFYTVINKKSGEIVPMEVNFNFDDPNLIILPLAFGKRQGREFIWNDLLSLETGSLKLANGRVIEKTLYNRRTRQDEPALFVALTFERREVLDSSNIKPMNLIGVDRGENIPAVIALTDPEGCPLSRFKDSLGNPTHILRIGESYKEKQRTIQAKKEVEQRRAGGYSRKYASKAKNLADDMVRNTARDLLYYAVTQDAMLIFENLSRGFGRQGKRTFMAERQYTRMEDWLTAKLAYEGLPSKTYLSKTLAQYTSKTCSNCGFTITSADYDRVLEKLKKTATGWMTTINGKELKVEGQITYYNRYKRQNVVKDLSVELDRLSEESVNNDISSWTKGRSGEALSLLKKRFSHRPVQEKFVCLNCGFETHADEQAALNIARSWLFLRSQEYKKYQTNKTTGNTDKRAFVETWQSFYRKKLKEVWKPAV

SEQ ID NO: 39311 - protein, 980 aa, synthetic construct
  REGION 1..980: note = engineered CasX variant
QEIKRINKIRRRLVKDSNTKKAGKTRGPMKTLLVRVMTPDLRERLENLRKKPENIPQPISNTSRANLNKLLTDYTEMKKAILHVYWEEFQKDPVGLMSRVAQPASKKIDQNKLKPEMDEKGNLTTAGFACSQCGQPLFVYKLEQVSEKGKAYTNYFGRCNVAEHEKLILLAQLKPEKDSDEAVTYSLGKFGQRALDFYSIHVTKESTHPVKPLAQIAGNRYASGPVGKALRDACMGTIASFLSKYQDIIIEHQKVVKGNQKRLESLRELAGKENLEYPSVTLPPQPHTKEGVDAYNEVIARVRMWVNLNLWQKLKLSRDDAKPLLRLKGFPSFPLVERQANAEVDWWDMVCNVKKLINEKKEDGKVFWQNLAGYKRQEALRPYLSSEEDRKKGKKFARYQLGDLLLHLEKKHGEDWGKVYDEAWERIDKKVEGLSKHIKLEEERRSEDAQSKAALTDWLRAKASFVIEGLKEADKDEFCRCELKLQKWYGDLRGKPFAIEAENSILDISGFSKQYNCAFIWQKDGVKKLNLYLIINYFKGGKLRFKKIKPEAFEANRFYTVINKKSGEIVPMEVNFNFDDPNLIILPLAFGKRQGREFIWNDLLSLETGSLKLANGRVIEKTLYNRRTRQDEPALFVALTFERREVLDSSNIKPMNLIGVDRGENIPAVIALTDPEGCPLSRFKDSLGNPTHILRIGESYKEKQRTIQAKKEVEQRRAGGYSRKYASKAKNLADDMVRNTARDLLYYAVTQDAMLIFENLSRGFGRQGKRTFMAERQYTRMEDWLTAKLAYEGLPSKTYLSKTLAQYTSKTCSNCGFTITSADYDRVLEKLKKTATGWMTTINGKELKVEGQITYYNRYKRQNVVKDLSVELDRLSEESVNNDISSWTKGRSGEALSLLKKRFSHRPVQEKFVCLNCGFETHADEQAALNIARSWLFLRSQEYKKYQTNKTTGNTDKRAFVETWQSFYRKKLKEVWKPAV

SEQ ID NO: 39312 - protein, 979 aa, synthetic construct
  REGION 1..979: note = engineered CasX variant
QEIKRINKIRRRLVKDSNTKKAGKTRGPMKTLLVRVMTPDLRERLENLRKKPENIPQPISNTSRANLNKLLTDYTEMKKAILHVYWEEFQKDPVGLMSRVAQPASKKIDQNKLKPEMDEKGNLTTAGFACSQCGQPLFVYKLEQVSEKGKAYTNYFGRCNVAEHEKLILLAQLKPEKDSDEAVTYSLGKFGQRALDFYSIHVTKESTHPVKPLAQIAGNRYASGPVGKALRDACMGTIASFLSKYQDIIIEHQKVVKGNQKRLESLRELAGKENLEYPSVTLPPQPHTKEGVDAYNEVIARVRMWVNLNLWQKLKLSRDDAKPLLRLKGFPSFPLVERQANEVDWWDMVCNVKKLINEKKEDGKVFWQNLAGYKRQEALRPYLSSEEDRKKGKKFARTQLGDLLLHLEKKHGEDWGKVYDEAWERIDKKVEGLSKHIKLEEERRSEDAQSKAALTDWLRAKASFVIEGLKEADKDEFCRCELKLQKWYGDLRGKPFAIEAENSILDISGFSKQYNCAFIWQKDGVKKLNLYLIINYFKGGKLRFKKIKPEAFEANRFYTVINKKSGEIVPMEVNFNFDDPNLIILPLAFGKRQGREFIWNDLLSLETGSLKLANGRVIEKTLYNRRTRQDEPALFVALTFERREVLDSSNIKPMNLIGVDRGENIPAVIALTDPEGCPLSRFKDSLGNPTHILRIGESYKEKQRTIQAKKEVEQRRAGGYSRKYASKAKNLADDMVRNTARDLLYYAVTQDAMLIFENLSRGFGRQGKRTFMAERQYTRMEDWLTAKLAYEGLPSKTYLSKTLAQYTSKTCSNCGFTITSADYDRVLEKLKKTATGWMTTINGKELKVEGQITYYNRYKRQNVVKDLSVELDRLSEESVNNDISSWTKGRSGEALSLLKKRFSHRPVQEKFVCLNCGFETHADEQAALNIARSWLFLRSQEYKKYQTNKTTGNTDKRAFVETWQSFYRKKLKEVWKPAV

SEQ ID NO: 39313 - protein, 980 aa, synthetic construct
  REGION 1..980: note = engineered CasX variant
QEIKRINKIRRRLVKDSNTKKAGKTRGPMKTLLVRVMTPDLRERLENLRKKPENIPQPISNTSRANLNKLLTDYTEMKKAILHVYWEEFQKDPVGLMSRVAQPASKKIDQNKLKPEMDEKGNLTTAGFACSQCGQPLFVYKLEQVSEKGKAYTNYFGRCNVAEHEKLILLAQLKPEKDSDEAVTYSLGKFGQRALDFYSIHVTKESTHPVKPLAQIAGNRYASGPVGKALRDACMGTIASFLSKYQDIIIEHQKVVKGNQKRLESLRELAGKENLEYPSVTLPPQPHTKEGVDAYNEVIARVRMWVNLNLWQKLKLSRDDAKPLLRLKGFPSFPLVERQANEVDWWDMVCNVKKLINEKKEDGKVFWQNLAGYKRQEALRPYLSSEEDRKKGKKFARYQLGDLLLHLEKKHEGEDWGKVYDEAWERIDKKVEGLSKHIKLEEERRSEDAQSKAALTDWLRAKASFVIEGLKEADKDEFCRCELKLQKWYGDLRGKPFAIEAENSILDISGFSKQYNCAFIWQKDGVKKLNLYLIINYFKGGKLRFKKIKPEAFEANRFYTVINKKSGEIVPMEVNFNFDDPNLIILPLAFGKRQGREFIWNDLLSLETGSLKLANGRVIEKTLYNRRTRQDEPALFVALTFERREVLDSSNIKPMNLIGVDRGENIPAVIALTDPEGCPLSRFKDSLGNPTHILRIGESYKEKQRTIQAKKEVEQRRAGGYSRKYASKAKNLADDMVRNTARDLLYYAVTQDAMLIFENLSRGFGRQGKRTFMAERQYTRMEDWLTAKLAYEGLPSKTYLSKTLAQYTSKTCSNCGFTITSADYDRVLEKLKKTATGWMTTINGKELKVEGQITYYNRYKRQNVVKDLSVELDRLSEESVNNDISSWTKGRSGEALSLLKKRFSHRPVQEKFVCLNCGFETHADEQAALNIARSWLFLRSQEYKKYQTNKTTGNTDKRAFVETWQSFYRKKLKEVWKPAV

SEQ ID NO: 39314 - protein, 979 aa, synthetic construct
  REGION 1..979: note = engineered CasX variant
QEIKRINKIRRRLVKDSNTKKAGKTRGPMKTLLVRVMTPDLRERLENLRKKPENIPQPISNTSRANLNKLLTDYTEMKKAILHVYWEEFQKDPVGLMSRVAQPASKKIDQNKLKPEMDEKGNLTTAGFACSQCGQPLFVYKLEQVSEKGKAYTNYFGRCNVAEHEKLILLAQLKPEKDSDEAVTYSLGKFGQRALDFYSIHVTKESTHPVKPLAQIAGNRYASGPVGKALRDACMGTIASFLSKYQDIIIEHQKVVKGNQKRLESLRELAGKENLEYPSVTLPPQPHTKEGVDAYNEVIARVRMWVNLNLWQKLKLSRDDAKPLLRLKGFPSFPLVERQANEVDWWDMVCNVKKLINEKKEDGKVFWQNLAGYKRQEALRPYLSSEEDRKKGKKFARYQLGDLLLHLEKKHGEDWGKVYDEAWERIDKKVEGLSKHIKLEEERRSEDAQSKAALTDWLRAKASFVIEGLKEADKDEFCRCDLKLQKWYGDLRGKPFAIEAENSILDISGFSKQYNCAFIWQKDGVKKLNLYLIINYFKGGKLRFKKIKPEAFEANRFYTVINKKSGEIVPMEVNFNFDDPNLIILPLAFGKRQGREFIWNDLLSLETGSLKLANGRVIEKTLYNRRTRQDEPALFVALTFERREVLDSSNIKPMNLIGVDRGENIPAVIALTDPEGCPLSRFKDSLGNPTHILRIGESYKEKQRTIQAKKEVEQRRAGGYSRKYASKAKNLADDMVRNTARDLLYYAVTQDAMLIFENLSRGFGRQGKRTFMAERQYTRMEDWLTAKLAYEGLPSKTYLSKTLAQYTSKTCSNCGFTITSADYDRVLEKLKKTATGWMTTINGKELKVEGQITYYNRYKRQNVVKDLSVELDRLSEESVNNDISSWTKGRSGEALSLLKKRFSHRPVQEKFVCLNCGFETHADEQAALNIARSWLFLRSQEYKKYQTNKTTGNTDKRAFVETWQSFYRKKLKEVWKPAV

SEQ ID NO: 39315 - protein, 979 aa, synthetic construct
  REGION 1..979: note = engineered CasX variant
QEIKRINKIRRRLVKDSNTKKAGKTRGPMKTLLVRVMTPDLRERLENLRKKPENIPQPISNTSRANLNKLLTDYTEMKKAILHVYWEEFQKDPVGLMSRVAQPASKKIDQNKLKPEMDEKGNLTTAGFACSQCGQPLFVYKLEQVSEKGKAYTNYFGRCNVAEHEKLILLAQLKPEKDSDEAVTYSLGKFGQRALDFYSIHVTKESTHPVKPLAQIAGNRYASGPVGKALRDACMGTIASFLSKYQDIIIEHQKVVKGNQKRLESLRELAGKENLEYPSVTLPPQPHTKEGVDAYNEVIARVRMWVNLNLWQKLKLSRDDAKPLLRLKGFPSFPLVERQANEVDWWDMVCNVKKLINEKKEDGKVFWQNLAGYKRQEALRPYLSSEEDRKKGKKFARYQLGDLLLHLEKKHGEDWGKVYDEAWERIDKKVEGLSKHIKLEEERRSEDAQSKAALTDWLRAKASFVIEGLKEADKDEFCRCELKLQKWYGDLRGKPFAIEAENSILDISGFSKQYNCAFIWQKDGVKKLNLYLIINYFKGGKLRFKKIKPEAFEANRFYTVINKKSGEIVPMEVNFNFDDPNLIILPLAFGKRFGREFIWNDLLSLETGSLKLANGRVIEKTLYNRRTRQDEPALFVALTFERREVLDSSNIKPMNLIGVDRGENIPAVIALTDPEGCPLSRFKDSLGNPTHILRIGESYKEKQRTIQAKKEVEQRRAGGYSRKYASKAKNLADDMVRNTARDLLYYAVTQDAMLIFENLSRGFGRQGKRTFMAERQYTRMEDWLTAKLAYEGLPSKTYLSKTLAQYTSKTCSNCGFTITSADYDRVLEKLKKTATGWMTTINGKELKVEGQITYYNRYKRQNVVKDLSVELDRLSEESVNNDISSWTKGRSGEALSLLKKRFSHRPVQEKFVCLNCGFETHADEQAALNIARSWLFLRSQEYKKYQTNKTTGNTDKRAFVETWQSFYRKKLKEVWKPAV

SEQ ID NO: 39316 - protein, 979 aa, synthetic construct
  REGION 1..979: note = engineered CasX variant
QEIKRINKIRRRLVKDSNTKKAGKTRGPMKTLLVRVMTPDLRERLENLRKKPENIPQPISNTSRANLNKLLTDYTEMKKAILHVYWEEFQKDPVGLMSRVAQPASKKIDQNKLKPEMDEKGNLTTAGFACSQCGQPLFVYKLEQVSEKGKAYTNYFGRCNVAEHEKLILLAQLKPEKDSDEAVTYSLGKFGQRALDFYSIHVTKESTHPVKPLAQIAGNRYASGPVGKALRDACMGTIASFLSKYQDIIIEHQKVVKGNQKRLESLRELAGKENLEYPSVTLPPQPHTKEGVDAYNEVIARVRMWVNLNLWQKLKLSRDDAKPLLRLKGFPSFPLVERQANEVDWWDMVCNVKKLINEKKEDGKVFWQNLAGYKRQEALRPYLSSEEDRKKGKKFARYQLGDLLLHLEKKHGEDWGKVYDEAWERIDKKVEGLSKHIKLEEERRSEDAQSKAALTDWLRAKASFVIEGLKEADKDEFCRCELKLQKWYGDLRGKPFAIEAENSILDISGFSKQYNCAFIWQKDGVKKLNLYLIINYFKGGKLRFKKIKPEAFEANRFYTVINKKSGEIVPMEVNFNFDDPNLIILPLAFGKRVGREFIWNDLLSLETGSLKLANGRVIEKTLYNRRTRQDEPALFVALTFERREVLDSSNIKPMNLIGVDRGENIPAVIALTDPEGCPLSRFKDSLGNPTHILRIGESYKEKQRTIQAKKEVEQRRAGGYSRKYASKAKNLADDMVRNTARDLLYYAVTQDAMLIFENLSRGFGRQGKRTFMAERQYTRMEDWLTAKLAYEGLPSKTYLSKTLAQYTSKTCSNCGFTITSADYDRVLEKLKKTATGWMTTINGKELKVEGQITYYNRYKRQNVVKDLSVELDRLSEESVNNDISSWTKGRSGEALSLLKKRFSHRPVQEKFVCLNCGFETHADEQAALNIARSWLFLRSQEYKKYQTNKTTGNTDKRAFVETWQSFYRKKLKEVWKPAV

SEQ ID NO: 39317 - protein, 980 aa, synthetic construct
  REGION 1..980: note = engineered CasX variant
QEIKRINKIRRRLVKDSNTKKAGKTRGPMKTLLVRVMTPDLRERLENLRKKPENIPQPISNTSRANLNKLLTDYTEMKKAILHVYWEEFQKDPVGLMSRVAQPASKKIDQNKLKPEMDEKGNLTTAGFACSQCGQPLFVYKLEQVSEKGKAYTNYFGRCNVAEHEKLILLAQLKPEKDSDEAVTYSLGKFGQRALDFYSIHVTKESTHPVKPLAQIAGNRYASGPVGKALRDACMGTIASFLSKYQDIIIEHQKVVKGNQKRLESLRELAGKENLEYPSVTLPPQPHTKEGVDAYNEVIARVRMWVNLNLWQKLKLSRDDAKPLLRLKGFPSFPLVERQANEVDWWDMVCNVKKLINEKKEDGKVFWQNLAGYKRQEALRPYLSSEEDRKKGKKFARYQLGDLLLHLEKKHGEDWGKVYDEAWERIDKKVEGLSKHIKLEEERRSEDAQSKAALTDWLRAKASFVIEGLKEADKDEFCRCELKLQKWYGDLRGKPFAIEAENSILDISGFSKQYNCAFIWQKDGVKKLNLYLIINYFKGGKLRFKKIKPEAFEANRFYTVINKKSGEIVPMEVNFNFDDPNLIILPLAFGKRQGREFIWNDLLSLETGSLKLANGRVIEKTLYNRRTRQDEPALFVALTFERREVLDSSNIKTPMNLIGVDRGENIPAVIALTDPEGCPLSRFKDSLGNPTHILRIGESYKEKQRTIQAKKEVEQRRAGGYSRKYASKAKNLADDMVRNTARDLLYYAVTQDAMLIFENLSRGFGRQGKRTFMAERQYTRMEDWLTAKLAYEGLPSKTYLSKTLAQYTSKTCSNCGFTITSADYDRVLEKLKKTATGWMTTINGKELKVEGQITYYNRYKRQNVVKDLSVELDRLSEESVNNDISSWTKGRSGEALSLLKKRFSHRPVQEKFVCLNCGFETHADEQAALNIARSWLFLRSQEYKKYQTNKTTGNTDKRAFVETWQSFYRKKLKEVWKPAV

SEQ ID NO: 39318 - protein, 980 aa, synthetic construct
  REGION 1..980: note = engineered CasX variant
QEIKRINKIRRRLVKDSNTKKAGKTRGPMKTLLVRVMTPDLRERLENLRKKPENIPQPISNTSRANLNKLLTDYTEMKKAILHVYWEEFQKDPVGLMSRVAQPASKKIDQNKLKPEMDEKGNLTTAGFACSQCGQPLFVYKLEQVSEKGKAYTNYFGRCNVAEHEKLILLAQLKPEKDSDEAVTYSLGKFGQRALDFYSIHVTKESTHPVKPLAQIAGNRYASGPVGKALRDACMGTIASFLSKYQDIIIEHQKVVKGNQKRLESLRELAGKENLEYPSVTLPPQPHTKEGVDAYNEVIARVRMWVNLNLWQKLKLSRDDAKPLLRLKGFPSFPLVERQANEVDWWDMVCNVKKLINEKKEDGKVFWQNLAGYKRQEALRPYLSSEEDRKKGKKFARYQLGDLLLHLEKKHGEDWGKVYDEAWERIDKKVEGLSKHIKLEEERRSEDAQSKAALTDWLRAKASFVIEGLKEADKDEFCRCELKLQKWYGDLRGKPFAIEAENSILDISGFSKQYNCAFIWQKDGVKKLNLYLIINYFKGGKLRFKKIKPEAFEANRFYTVINKKSGEIVPMEVNFNFDDPNLIILPLAFGKRQGREFIWNDLLSLETGSLKLANGRVIEKTLYNRRTRQDEPALFVALTFERREVLDSSNIKPMSNLIGVDRGENIPAVIALTDPEGCPLSRFKDSLGNPTHILRIGESYKEKQRTIQAKKEVEQRRAGGYSRKYASKAKNLADDMVRNTARDLLYYAVTQDAMLIFENLSRGFGRQGKRTFMAERQYTRMEDWLTAKLAYEGLPSKTYLSKTLAQYTSKTCSNCGFTITSADYDRVLEKLKKTATGWMTTINGKELKVEGQITYYNRYKRQNVVKDLSVELDRLSEESVNNDISSWTKGRSGEALSLLKKRFSHRPVQEKFVCLNCGFETHADEQAALNIARSWLFLRSQEYKKYQTNKTTGNTDKRAFVETWQSFYRKKLKEVWKPAV

SEQ ID NO: 39319 - protein, 979 aa, synthetic construct
  REGION 1..979: note = engineered CasX variant
QEIKRINKIRRRLVKDSNTKKAGKTRGPMKTLLVRVMTPDLRERLENLRKKPENIPQPISNTSRANLNKLLTDYTEMKKAILHVYWEEFQKDPVGLMSRVAQPASKKIDQNKLKPEMDEKGNLTTAGFACSQCGQPLFVYKLEQVSEKGKAYTNYFGRCNVAEHEKLILLAQLKPEKDSDEAVTYSLGKFGQRALDFYSIHVTKESTHPVKPLAQIAGNRYASGPVGKALRDACMGTIASFLSKYQDIIIEHQKVVKGNQKRLESLRELAGKENLEYPSVTLPPQPHTKEGVDAYNEVIARVRMWVNLNLWQKLKLSRDDAKPLLRLKGFPSFPLVERQANEVDWWDMVCNVKKLINEKKEDGKVFWQNLAGYKRQEALRPYLSSEEDRKKGKKFARYQLGDLLLHLEKKHGEDWGKVYDEAWERIDKKVEGLSKHIKLEEERRSEDAQSKAALTDWLRAKASFVIEGLKEADKDEFCRCELKLQKWYGDLRGKPFAIEAENSILDISGFSKQYNCAFIWQKDGVKKLNLYLIINYFKGGKLRFKKIKPEAFEANRFYTVINKKSGEIVPMEVNFNFDDPNLIILPLAFGKRQGREFIWNDLLSLETGSLKLANGRVIEKTLYNRRTRQDEPALFVALTFERREVLDSSNIKPMNLIGVDRGENIPAVIALTDPEGCPLSRFKDSLGNPTHILRIRESYKEKQRTIQAKKEVEQRRAGGYSRKYASKAKNLADDMVRNTARDLLYYAVTQDAMLIFENLSRGFGRQGKRTFMAERQYTRMEDWLTAKLAYEGLPSKTYLSKTLAQYTSKTCSNCGFTITSADYDRVLEKLKKTATGWMTTINGKELKVEGQITYYNRYKRQNVVKDLSVELDRLSEESVNNDISSWTKGRSGEALSLLKKRFSHRPVQEKFVCLNCGFETHADEQAALNIARSWLFLRSQEYKKYQTNKTTGNTDKRAFVETWQSFYRKKLKEVWKPAV

SEQ ID NO: 39320 - protein, 979 aa, synthetic construct
  REGION 1..979: note = engineered CasX variant
QEIKRINKIRRRLVKDSNTKKAGKTRGPMKTLLVRVMTPDLRERLENLRKKPENIPQPISNTSRANLNKLLTDYTEMKKAILHVYWEEFQKDPVGLMSRVAQPASKKIDQNKLKPEMDEKGNLTTAGFACSQCGQPLFVYKLEQVSEKGKAYTNYFGRCNVAEHEKLILLAQLKPEKDSDEAVTYSLGKFGQRALDFYSIHVTKESTHPVKPLAQIAGNRYASGPVGKALRDACMGTIASFLSKYQDIIIEHQKVVKGNQKRLESLRELAGKENLEYPSVTLPPQPHTKEGVDAYNEVIARVRMWVNLNLWQKLKLSRDDAKPLLRLKGFPSFPLVERQANEVDWWDMVCNVKKLINEKKEDGKVFWQNLAGYKRQEALRPYLSSEEDRKKGKKFARYQLGDLLLHLEKKHGEDWGKVYDEAWERIDKKVEGLSKHIKLEEERRSEDAQSKAALTDWLRAKASFVIEGLKEADKDEFCRCELKLQKWYGDLRGKPFAIEAENSILDISGFSKQYNCAFIWQKDGVKKLNLYLIINYFKGGKLRFKKIKPEAFEANRFYTVINKKSGEIVPMEVNFNFDDPNLIILPLAFGKRQGREFIWNDLLSLETGSLKLANGRVIEKTLYNRRTRQDEPALFVALTFERREVLDSSNIKPMNLIGVDRGENIPAVIALTDPEGCPLSRFKDSLGNPTHILRIGESYKEKQRTIQAKKEVEQRRAGGYSRKYASKAKNLADDMVRNTARDLLYYAVTQDAMLIFENLSRGFGRQGKRTFSAERQYTRMEDWLTAKLAYEGLPSKTYLSKTLAQYTSKTCSNCGFTITSADYDRVLEKLKKTATGWMTTINGKELKVEGQITYYNRYKRQNVVKDLSVELDRLSEESVNNDISSWTKGRSGEALSLLKKRFSHRPVQEKFVCLNCGFETHADEQAALNIARSWLFLRSQEYKKYQTNKTTGNTDKRAFVETWQSFYRKKLKEVWKPAV

SEQ ID NO: 39321 - protein, 979 aa, synthetic construct
  REGION 1..979: note = engineered CasX variant
QEIKRINKIRRRLVKDSNTKKAGKTRGPMKTLLVRVMTPDLRERLENLRKKPENIPQPISNTSRANLNKLLTDYTEMKKAILHVYWEEFQKDPVGLMSRVAQPASKKIDQNKLKPEMDEKGNLTTAGFACSQCGQPLFVYKLEQVSEKGKAYTNYFGRCNVAEHEKLILLAQLKPEKDSDEAVTYSLGKFGQRALDFYSIHVTKESTHPVKPLAQIAGNRYASGPVGKALRDACMGTIASFLSKYQDIIIEHQKVVKGNQKRLESLRELAGKENLEYPSVTLPPQPHTKEGVDAYNEVIARVRMWVNLNLWQKLKLSRDDAKPLLRLKGFPSFPLVERQANEVDWWDMVCNVKKLINEKKEDGKVFWQNLAGYKRQEALRPYLSSEEDRKKGKKFARYQLGDLLLHLEKKHGEDWGKVYDEAWERIDKKVEGLSKHIKLEEERRSEDAQSKAALTDWLRAKASFVIEGLKEADKDEFCRCELKLQKWYGDLRGKPFAIEAENSILDISGFSKQYNCAFIWQKDGVKKLNLYLIINYFKGGKLRFKKIKPEAFEANRFYTVINKKSGEIVPMEVNFNFDDPNLIILPLAFGKRQGREFIWNDLLSLETGSLKLANGRVIEKTLYNRRTRQDEPALFVALTFERREVLDSSNIKPMNLIGVDRGENIPAVIALTDPEGCPLSRFKDSLGNPTHILRIGESYKEKQRTIQAKKEVEQRRAGGYSRKYASKAKNLADDMVRNTARDLLYYAVTQDAMLIFENLSRGFGRQGKRTFMAERQYTRMEDWLTAKLAYEGLPSKTYLSKTLAQYTSKTCSNCGFTITSADYDRVLEKLKKTATGWMTTINGKELKVEGQITYYNRYKRQNVVKDLSVELDRLSEESVNNDISSWDKGRSGEALSLLKKRFSHRPVQEKFVCLNCGFETHADEQAALNIARSWLFLRSQEYKKYQTNKTTGNTDKRAFVETWQSFYRKKLKEVWKPAV

SEQ ID NO: 39322 - protein, 979 aa, synthetic construct
  REGION 1..979: note = engineered CasX variant
QEIKRINKIRRRLVKDSNTKKAGKTRGPMKTLLVRVMTPDLRERLENLRKKPENIPQPISNTSRANLNKLLTDYTEMKKAILHVYWEEFQVDPVGLMSRVAQPASKKIDQNKLKPEMDEKGNLTTAGFACSQCGQPLFVYKLEQVSEKGKAYTNYFGRCNVAEHEKLILLAQLKPEKDSDEAVTYSLGKFGQRALDFYSIHVTKESTHPVKPLAQIAGNRYASGPVGKALRDACMGTIASFLSKYQDIIIEHQKVVKGNQKRLESLRELAGKENLEYPSVTLPPQPHTKEGVDAYNEVIARVRMWVNLNLWQKLKLSRDDAKPLLRLKGFPSFPLVERQANEVDWWDMVCNVKKLINEKKEDGKVFWQNLAGYKRQEALRPYLSSEEDRKKGKKFARYQLGDLLLHLEKKHGEDWGKVYDEAWERIDKKVEGLSKHIKLEEERRSEDAQSKAALTDWLRAKASFVIEGLKEADKDEFCRCELKLQKWYGDLRGKPFAIEAENSILDISGFSKQYNCAFIWQKDGVKKLNLYLIINYFKGGKLRFKKIKPEAFEANRFYTVINKKSGEIVPMEVNFNFDDPNLIILPLAFGKRQGREFIWNDLLSLETGSLKLANGRVIEKTLYNRRTRQDEPALFVALTFERREVLDSSNIKPMNLIGVDRGENIPAVIALTDPEGCPLSRFKDSLGNPTHILRIGESYKEKQRTIQAKKEVEQRRAGGYSRKYASKAKNLADDMVRNTARDLLYYAVTQDAMLIFENLSRGFGRQGKRTFMAERQYTRMEDWLTAKLAYEGLPSKTYLSKTLAQYTSKTCSNCGFTITSADYDRVLEKLKKTATGWMTTINGKELKVEGQITYYNRYKRQNVVKDLSVELDRLSEESVNNDISSWTKGRSGEALSLLKKRFSHRPVQEKFVCLNCGFETHADEQAALNIARSWLFLRSQEYKKYQTNKTTGNTDKRAFVETWQSFYRKKLKEVWKPAV

SEQ ID NO: 39323 - protein, 979 aa, synthetic construct
  REGION 1..979: note = engineered CasX variant
QEIKRLNKIRRRLVKDSNTKKAGKTRGPMKTLLVRVMTPDLRERLENLRKKPENIPQPISNTSRANLNKLLTDYTEMKKAILHVYWEEFQKDPVGLMSRVAQPASKKIDQNKLKPEMDEKGNLTTAGFACSQCGQPLFVYKLEQVSEKGKAYTNYFGRCNVAEHEKLILLAQLKPEKDSDEAVTYSLGKFGQRALDFYSIHVTKESTHPVKPLAQIAGNRYASGPVGKALRDACMGTIASFLSKYQDIIIEHQKVVKGNQKRLESLRELAGKENLEYPSVTLPPQPHTKEGVDAYNEVIARVRMWVNLNLWQKLKLSRDDAKPLLRLKGFPSFPLVERQANEVDWWDMVCNVKKLINEKKEDGKVFWQNLAGYKRQEALRPYLSSEEDRKKGKKFARYQLGDLLLHLEKKHGEDWGKVYDEAWERIDKKVEGLSKHIKLEEERRSEDAQSKAALTDWLRAKASFVIEGLKEADKDEFCRCELKLQKWYGDLRGKPFAIEAENSILDISGFSKQYNCAFIWQKDGVKKLNLYLIINYFKGGKLRFKKIKPEAFEANRFYTVINKKSGEIVPMEVNFNFDDPNLIILPLAFGKRQGREFIWNDLLSLETGSLKLANGRVIEKTLYNRRTRQDEPALFVALTFERREVLDSSNIKPMNLIGVDRGENIPAVIALTDPEGCPLSRFKDSLGNPTHILRIGESYKEKQRTIQAKKEVEQRRAGGYSRKYASKAKNLADDMVRNTARDLLYYAVTQDAMLIFENLSRGFGRQGKRTFMAERQYTRMEDWLTAKLAYEGLPSKTYLSKTLAQYTSKTCSNCGFTITSADYDRVLEKLKKTATGWMTTINGKELKVEGQITYYNRYKRQNVVKDLSVELDRLSEESVNNDISSWTKGRSGEALSLLKKRFSHRPVQEKFVCLNCGFETHADEQAALNIARSWLFLRSQEYKKYQTNKTTGNTDKRAFVETWQSFYRKKLKEVWKPAV

SEQ ID NO: 39324 - protein, 979 aa, synthetic construct
  REGION 1..979: note = engineered CasX variant
QEIKRINKIRRRLVKDSNTKKAGKTRGPMKTLLVRVMTPDLRERLENLRKKPENIPQPISNTSRANLNKLLTDYTEMKKAILHVYWEEFQKDPVGLMSRVAQPASKKIDQNKLKPEMDEKGNLTTAGFACSQCGQPLFVYKLEQVSEKGKAYTNYVGRCNVAEHEKLILLAQLKPEKDSDEAVTYSLGKFGQRALDFYSIHVTKESTHPVKPLAQIAGNRYASGPVGKALRDACMGTIASFLSKYQDIIIEHQKVVKGNQKRLESLRELAGKENLEYPSVTLPPQPHTKEGVDAYNEVIARVRMWVNLNLWQKLKLSRDDAKPLLRLKGFPSFPLVERQANEVDWWDMVCNVKKLINEKKEDGKVFWQNLAGYKRQEALRPYLSSEEDRKKGKKFARYQLGDLLLHLEKKHGEDWGKVYDEAWERIDKKVEGLSKHIKLEEERRSEDAQSKAALTDWLRAKASFVIEGLKEADKDEFCRCELKLQKWYGDLRGKPFAIEAENSILDISGFSKQYNCAFIWQKDGVKKLNLYLIINYFKGGKLRFKKIKPEAFEANRFYTVINKKSGEIVPMEVNFNFDDPNLIILPLAFGKRQGREFIWNDLLSLETGSLKLANGRVIEKTLYNRRTRQDEPALFVALTFERREVLDSSNIKPMNLIGVDRGENIPAVIALTDPEGCPLSRFKDSLGNPTHILRIGESYKEKQRTIQAKKEVEQRRAGGYSRKYASKAKNLADDMVRNTARDLLYYAVTQDAMLIFENLSRGFGRQGKRTFMAERQYTRMEDWLTAKLAYEGLPSKTYLSKTLAQYTSKTCSNCGFTITSADYDRVLEKLKKTATGWMTTINGKELKVEGQITYYNRYKRQNVVKDLSVELDRLSEESVNNDISSWTKGRSGEALSLLKKRFSHRPVQEKFVCLNCGFETHADEQAALNIARSWLFLRSQEYKKYQTNKTTGNTDKRAFVETWQSFYRKKLKEVWKPAV

SEQ ID NO: 39325 - protein, 979 aa, synthetic construct
  REGION 1..979: note = engineered CasX variant
QEIKRINKIRRRLVKDSNTKKAGKTRGPMKTLLVRVMTPDLRERLENLRKKPENIPQPISNTSRANLNKLLTDYTEMKKAILHVYWEEFQKDPVGLMSRVAQPASKKIDQNKLKPEMDEKGNLTTAGFACSQCGQPLFVYKLEQVSEKGKAYTNYFGRCNVAEHEKLILLAQLKPEKDSDEAVTYSLGKFGQRALDFYSIHVTKESTHPVKPLAQIAGNRYASGPVGKALRDACMGTIASFLSKYQDIIIEHQKVVKGNQKRLESLRELAGKENLEYPSVTLPPQPHTKEGVDAYNEVIARVRMWVNLNLWQKLKLSRDDAKPLLRLKGFPSFPLVERQANEVDWWDMVCNVKKLINEKKEDGKVFWQNLAGYKRQEALRPYLSSEEDRKKGKKFARYQLGDLLLHLEKKHGEDWGKVYDEAWERIDKKVEGLSKHIKLEEERRSEDAQSKAALTDWLRAKASFVIEGLKEADKDEFCRCELKLQKWYGDLRGKPFAIEAENSILDISGFSKQYNCAFIWQKDGVKKLNLYLIINYFKGGKLRFKKIKPEAFEANRFYTVINKKSGEIVPMEVNFNFDDPNLIILPLAFGKRQGREFIWNDLLSLETGSLKLANGRVIEKTLYNRRTRQDEPALFVALTFERREVLDSSNIKPMNLIGVDRGENIPAVIALTDPEGCPLSRFKDSLGNPTHILRIGESYKEKQRTIQAKKEVEQRRAGGYSRKYASKAKNLADDMVRNTARDLLYYAVTQDAMLIFENLSRGFGRQGKRTFMAERQYTRMEDWLTAKLAYEGLASKTYLSKTLAQYTSKTCSNCGFTITSADYDRVLEKLKKTATGWMTTINGKELKVEGQITYYNRYKRQNVVKDLSVELDRLSEESVNNDISSWTKGRSGEALSLLKKRFSHRPVQEKFVCLNCGFETHADEQAALNIARSWLFLRSQEYKKYQTNKTTGNTDKRAFVETWQSFYRKKLKEVWKPAV

SEQ ID NO: 39326 - protein, 979 aa, synthetic construct
  REGION 1..979: note = engineered CasX variant
QEIKRINKIRRRLVKDSNTKKAGKTRGPMKTLLVRVMTPDLRERLENLRKKPENIPQPISNTSRANLNKLLTDYTEMKKAILHVYWEEFQKDPVGLMSRVAQPASKKIDQNKLKPEMDEKGNLTTAGFACSQCGQPLFVYKLEQVSEKGKAYTNYFGRCNVAEHEKLILLAQLKPEKDSDEAVTYSLGKFGQRALDFYSIHVTKESTHPVKPLAQIAGNRYASGPVGKALRDACMGTIASFLSKYQDIIIEHQKVVKGNQKRLESLRELAGKENLEYPSVTLPPQPHTKEGVDAYNEVIARVRMWVNLNLWQKLKLSRDDAKPLLRLKGFPSFPLVERQANEVDWWDMVCNVKKLINEKKEDGKVFWQNLAGYKRQEALRPYLSSEEDRKKGKKFARYQLGDLLLHLEKKHGEDWGKVYDEAWERIDKKVEGLSKHIKLEEERRSEDAQSKAALTDWLRAKASFVIEGLKEADKDEFCRCELKLQKWYGDLRGKPFAIEAENSILDISGFSKQYNCAFIWQKDGVKKLNLYLIINYFKGGKLRFKKIKPEAFEANRFYTVINKKSGEIVPMEVNFNFDDPNLIILPLAFGKRQGREFIWNDLLSLETGSLKLANGRVIEKTLYNRRTRQDEPALFVALTFERREVLDSSNIKPMNLIGVDRGENIPAVIALTDPEGCPLSRFKDSLGNPTHILRIGESYKEKQRTIQAKKEVEQRRAGGYSRKYASKAKNLADDMVRNTARDLLYYAVTQDAMLIFENLSRGFGRQGKRTFMAERQYTRMEDWLTAKLAYEGLPSKVYLSKTLAQYTSKTCSNCGFTITSADYDRVLEKLKKTATGWMTTINGKELKVEGQITYYNRYKRQNVVKDLSVELDRLSEESVNNDISSWTKGRSGEALSLLKKRFSHRPVQEKFVCLNCGFETHADEQAALNIARSWLFLRSQEYKKYQTNKTTGNTDKRAFVETWQSFYRKKLKEVWKPAV

SEQ ID NO: 39327 - protein, 980 aa, synthetic construct
  REGION 1..980: note = engineered CasX variant
QEIKRINKIRRRLVKDSNTKKAGKTRGPMKTLLVRVMTPDLRERLENLRKKPENIPQPISNTSRANLNKLLTDYTEMKKAILHVYWEEFQKDPVGLMSRVAQPASKKIDQNKLKPEMDEKGNLTTAGFACSQCGQPLFVYKLEQVSEKGKAYTNYFGRCNVAEHEKLILLAQLKPEKDSDEAVTYSLGKFGQRALDFYSIHVTKESTHPVKPLAQIAGNRYASGPVGKALRDACMGTIASFLSKYQDIIIEHQKVVKGNQKRLESLRELAGKENLEYPSVTLPPQPHTKEGVDAYNEVIARVRMWVNLNLWQKLKLSRDDAKPLLRLKGFPSFPLVERQANEVDWWDMVCNVKKLINEKKEDGKVFWQNLAGYKRQEALRPYLSSEEDRKKGKKFARYQLGDLLLHLEKKHGEDWGKVYDEAWERIDKKVEGLSKHIKLEEERRSEDAQSKAALTDWLRAKASFVIEGLKEADKDEFCRCELKLQKWYGDLRGKPFAIEAENSILDISGFSKQYNCAFIWQKDGVKKLNLYLIINYFKGGKLRFKKIKPEAFEANRFYTVINKKSGEIVPMEVNFNFDDPNLIILPLAFGKRQGREFIWNDLLSLETGSLKLANGRVIEKTLYNRRTRQDEPALFVALTFERREVLDSSNIKPMNLIGVDRGENIPAVIALTDPEGCPLSRFKDSLGNPTHILRIGESYKEKQRTIQAKKEVEQRRAGGYSRKYASKAKNLADDMVRNTARDLLYYAVTQDAMLIFENLSRGFGRQGKRTFMAERQYTRMEDWLTAKLAYEGPLPSKTYLSKTLAQYTSKTCSNCGFTITSADYDRVLEKLKKTATGWMTTINGKELKVEGQITYYNRYKRQNVVKDLSVELDRLSEESVNNDISSWTKGRSGEALSLLKKRFSHRPVQEKFVCLNCGFETHADEQAALNIARSWLFLRSQEYKKYQTNKTTGNTDKRAFVETWQSFYRKKLKEVWKPAV

SEQ ID NO: 39328 - protein, 980 aa, synthetic construct
  REGION 1..980: note = engineered CasX variant
QEIKRINKIRRRLVKDSNTKKAGKTRGPMKTLLVRVMTPDLRERLENLRKKPENIPQPISNTSRANLNKLLTDYTEMKKAILHVYWEEFQKDPVGLMSRVAQPASKKIDQNKLKPEMDEKGNLTTAGFACSQCGQPLFVYKLEQVSEKGKAYTNYFGRCNVAEHEKLILLAQLKPEKDSDEAVTYSLGKFGQRALDFYSIHVTKESTHPVKPLAQIAGNRYASGPVGKALRDACMGTIASFLSKYQDIIIEHQKVVKGNQKRLESLRELAGKENLEYPSVTLPPQPHTKEGVDAYNEVIARVRMWVNLNLWQKLKLSRDDAKPLLRLKGFPSFPLVERQANEVDWWDMVCNVKKLINEKKEDGKVFWQNLAGYKRQEALRPYLSSEEDVRKKGKKFARYQLGDLLLHLEKKHGEDWGKVYDEAWERIDKKVEGLSKHIKLEEERRSEDAQSKAALTDWLRAKASFVIEGLKEADKDEFCRCELKLQKWYGDLRGKPFAIEAENSILDISGFSKQYNCAFIWQKDGVKKLNLYLIINYFKGGKLRFKKIKPEAFEANRFYTVINKKSGEIVPMEVNFNFDDPNLIILPLAFGKRQGREFIWNDLLSLETGSLKLANGRVIEKTLYNRRTRQDEPALFVALTFERREVLDSSNIKPMNLIGVDRGENIPAVIALTDPEGCPLSRFKDSLGNPTHILRIGESYKEKQRTIQAKKEVEQRRAGGYSRKYASKAKNLADDMVRNTARDLLYYAVTQDAMLIFENLSRGFGRQGKRTFMAERQYTRMEDWLTAKLAYEGLPSKTYLSKTLAQYTSKTCSNCGFTITSADYDRVLEKLKKTATGWMTTINGKELKVEGQITYYNRYKRQNVVKDLSVELDRLSEESVNNDISSWTKGRSGEALSLLKKRFSHRPVQEKFVCLNCGFETHADEQAALNIARSWLFLRSQEYKKYQTNKTTGNTDKRAFVETWQSFYRKKLKEVWKPAV

SEQ ID NO: 39329 - protein, 979 aa, synthetic construct
  REGION 1..979: note = engineered CasX variant
QEIKRINKIRRRLVKDSNTKKAGKTRGPMKTLLVRVMTPDLRERLENLRKKPENIPQPISNTSRANLNKLLTDYTEMKKAILHVYWEEFQKDPVGLMSRVAQPASKKIDQNKLKPEMDEKGNLTTAGFACSQCGQPLFVYKLEQVSEKGKAYTNYFGRCNVAEHEKLILLAQLKPEKDSDEAVTYSLGKFGQRALDFYSIHVTKESTHPVKPLAQIAGNRYASGPVGKALRDACMGTIASFLSKYQDIIIEHQKVVKGNQKRLESLRELAGKENLEYPSVTLPPQPHTKEGVDAYNEVIARVRMWVNLNLWQKLKLSRDDAKPLLRLKGFPSFPLVERQANEVDWWDMVCNVKKLINEKKEDGKVFWQNLAGYKRQEALRPYLSSEEDRKKGKKFARYQLGDLLLHLEKKHGEDWGKVYDEAWERIDKKVEGLSKHIKLEEERRSEDAQSKAALTDWLRAKASFVIEGLKEADKDEFCRCELKLQKWYGDLRGKPFAIEAENSILDISGFSKQYNCAFIWQKDGVKKLNLYLIINYFKGGKLRFKKIKPEAFEANRFYTVINKKSGEIVPMEVNFNFDDPNLIILPLAFGKRQGREFIWNDLLSLETGSLKLANGRVIEKTLYNRRTRQDEPALFVALTFERREVLDSSNIKPMNLIGVDRGENIPAVIALTDPEGCPLSRFKDSLGNPTHILRIGESYKEKQRTIQAKKEVEQRRAGGYSRKYASKAKNLADDMVRNTARDLLYYAVTQDAMLIFENLSRGFGRQGKRTFMAERQYTRMEDWLTAKLAYEGLPSKTYLSKTLAQYTSKTCSNCGFTITSADYDRMLEKLKKTATGWMTTINGKELKVEGQITYYNRYKRQNVVKDLSVELDRLSEESVNNDISSWTKGRSGEALSLLKKRFSHRPVQEKFVCLNCGFETHADEQAALNIARSWLFLRSQEYKKYQTNKTTGNTDKRAFVETWQSFYRKKLKEVWKPAV

SEQ ID NO: 39330 - protein, 979 aa, synthetic construct
  REGION 1..979: note = engineered CasX variant
QEIKRINKIRRRLVKDSNTKKAGKTRGPMKTLLVRVMTPDLRERLENLRKKPENIPQPISNTSRANLNKLLTDYTEMKKAILHVYWEEFQKDPVGLMSRVAQPASKKIDQNKLKPEMDEKGNLTTAGFACSQCGQPLFVYKLEQVSEKGKAYTNYFGRCNVAEHEKLILLAQLKPEKDSDEAVTYSLGKFGQRALDFYSIHVTKESTHPVKPLAQIAGNRYASGPVGKALRDACMGTIASFLSKYQDIIIEHQKVVKGNQKRLESLRELAGKENLEYPSVTLPPQPHTKEGVDAYNEVIARVRMWVNLNLWQKLKLSRDDAKPLLRLKGFPSFPLVERQANEVDWWDMVCNVKKLINEKKEDGKVFWQNLAGYKRQEALRPYLSSEEDRKKGKKFARYQLGDLLLHLEKKHGEDWGKVYDEAWERIDKKVEGLSKHIKLEEERRSEDAQSKAALTDWLRAKASFVIEGLKEADKDEFCRCELKLQKWYGDLRGKPFAIEAENSILDISGFSKQYNCAFIWQKDGVKKLNLYLIINYFKGGKLRFKKIKPEAFEANRFYTVINKKSGEIVPMEVNFNFDDPNLIILPLAFGKRQGREFIWNDLLSLETGSLKLANGRVIEKTLYNRRTRQDEPALFVALTFERREVLDSSNIKPMNLIGVDRGENIPAVIALTDPEGCPLSRFKDSLGNPTHILRIGESYKEKQRTIQAKKEVEQRRAGGYSRKYASKAKNLADDMVRNTARDLLYYAVTQDAMLIFENLSRGFGRQGKRTFMAERQYTRMEDWLTAKLAYEGLPSKTYLSKTLAQYTSKTCSNCGFTITSADYDRVLEKLKKTATGWMTTINGKELKVEGQITYYNRYKRQNVVKDLSVELDRLSEESVNNDISSWTKGRQGEALSLLKKRFSHRPVQEKFVCLNCGFETHADEQAALNIARSWLFLRSQEYKKYQTNKTTGNTDKRAFVETWQSFYRKKLKEVWKPAV

SEQ ID NO: 39331 - protein, 979 aa, synthetic construct
  REGION 1..979: note = engineered CasX variant
QEIKRINKIRRRLVKDSNTKKAGKTRGPMKTLLVRVMTPDLRERLENLRKKPENIPQPISNTSRANLNKLLTDYTEMKKAILHVYWEEFQKDPVGLMSRVAQPASKKIDQNKLKPEMDEKGNLTTAGFACSQCGQPLFVYKLEQVSEKGKAYTNYFGRCNVAEHEKLILLAQLKPEKDSDEAVTYSLGKFGQRALDFYSIHVTKESTHPVKPLAQIAGNRYASGPVGKALRDACMGTIASFLSKYQDIIIEHQKVVKGNQKRLESLRELAGKENLEYPSVTLPPQPHTKEGVDAYNEVIARVRMWVNLNLWQKLKLSRDDAKPLLRLKGFPSFPLVERQANEVDWWDMVCNVKKLINEKKEDGKVFWQNLAGYKRQEALRPYLSSEEDRKKGKKFARYQLGDLLLHLEKKHGEDWGKVYDEAWERIDKKVEGLSKHIKLEEERRSEDAQSKAALTDWLRAKASFVIEGLKEADKDEFCRCELKLQKWYGDLRGKPFAIEAENSILDISGFSKQYNCAFIWQKDGVKKLNLYLIINYFKGGKLRFKKIKPEAFEANRFYTVINKKSGEIVPMEVNFNFDDPNLIILPLAFGKRQGREFIWNDLLSLETGSLKLANGRVIEKTLYNRRTRQDEPALFVALTFERREVLDSSNIKPMNLIGVDRGENIPAVIALTDPEGCPLSRFKDSLGNPTHILRIGESYKEKQRTIQAKKEVEQRRAGGYSRKYASKAKNLADDMVRNTARDLLYYAVTQDAMLIFENLSRGFGRQGKRTFMAERQYTRMEDWLTAKLAYEGLPSKTYLSKTLAQYTSKTCSNCGFTITSADYDRVLEKLKKTATGWMTTINGKELKVEGQITYYNRYKRQNVVKDLSVELDRLSEESVNNDISSWTKGRSGEALSLLKKRFSHRPVQEKFVCLNCEFETHADEQAALNIARSWLFLRSQEYKKYQTNKTTGNTDKRAFVETWQSFYRKKLKEVWKPAV

SEQ ID NO: 39332 - protein, 980 aa, synthetic construct
  REGION 1..980: note = engineered CasX variant
QEIKRINKIRRRLVKDSNTKKAGKTRGPMKTLLVRVMTPDLRERLENLRKKPENIPQPISNTSRANLNKLLTDYTEMKKAILHVYWEEFQKDPVGLMSRVAQPASKKIDQNKLKPEMDEKGNLTTAGFACSQCGQPLFVYKLEQVSEKGKAYTNYFGRCNVAEHEKLILLAQLKPEKDSDEAVTYSLGKFGQRALDFYSIHVTKESTHPVKPLAQIAGNRYASGPVGKALRDACMGTIASFLSKYQDIIIEHQKVVKGNQKRLESLRELAGKENLEYPSVTLPPQPHTKEGVDAYNEVIARVRMWVNLNLWQKLKLSRDDAKPLLRLKGFPSFPLVERQANEVDWWDMVCNVKKLINEKKEDGKVFWQNLAGYKRQEALRPYLSSEEDRKKGKKFARYQLGDLLLHLEKKHGEDWGKVYDEAWERIDKKVEGLSKHIKLEEERRSEDAQSKAALTDWLRAKASFVIEGLKEADKDEFCRCELKLQKWYGDLRGKPFAIEAENSILDISGFSKQYNCAFIWQKDGVKKLNLYLIINYFKGGKLRFKKIKPEAFEANRFYTVINKKSGEIVPMEVNFNFDDPNLIILPLAFGKRQGREFIWNDLLSLETGSLKLANGRVIEKTLYNRRTRQDEPALFVALTFERREVLDSSNIKPMNLIGVDRGENIPAVIALTDPEGCPLSRFKDSLGNPTHILRIGESYKEKQRTIQAKKEVEQRRAGGYSRKYASKAKNLADDMVRNTARDLLYYAVTQDAMLIFENLSRGFGRQGKRTFMAERQYTRMEDWLTAKLAYEGLPSKTYLSKTLAQYTSKTCSNCGFTITSADYDRVLEKLKKTATGWMTTINGKELKVEGQITYYNRYKRQNVVKDLSVELDRLSEESVNNDISSWTKGRSGEALSLLKKRFSHRPVQEKFVCLNCGFETHADEQAALNIARSWLFLRSQEYKKYQTNKTSTGNTDKRAFVETWQSFYRKKLKEVWKPAV

SEQ ID NO: 39333 - protein, 980 aa, synthetic construct
  REGION 1..980: note = engineered CasX variant
QEIKRINKIRRRLVKDSNTKKAGKTRGPMKTLLVRVMTPDLRERLENLRKKPENIPQPISNTSRANLNKLLTDYTEMKKAILHVYWEEFQKDPVGLMSRVAQPASKKIDQNKLKPEMDEKGNLTTAGFACSQCGQPLFVYKLEQVSEKGKAYTNYFGRCNVAEHEKLILLAQLKPEKDSDEAVTYSLGKFGQRALDFYSIHVTKESTHPVKPLAQIAGNRYASGPVGKALRDACMGTIASFLSKYQDIIIEHQKVVKGNQKRLESLRELAGKENLEYPSVTLPPQPHTKEGVDAYNEVIARVRMWVNLNLWQKLKLSRDDAKPLLRLKGFPSFPLVERQANEVDWWDMVCNVKKLINEKKEDGKVFWQNLAGYKRQEALRPYLSSEEDRKKGKKFARYQLGDLLLHLEKKHGEDWGKVYDEAWERIDKKVEGLSKHIKLEEERRSEDAQSKAALTDWLRAKASFVIEGLKEADKDEFCRCELKLQKWYGDLRGKPFAIEAENSILDISGFSKQYNCAFIWQKDGVKKLNLYLIINYFKGGKLRFKKIKPEAFEANRFYTVINKKSGEIVPMEVNFNFDDPNLIILPLAFGKRQGREFIWNDLLSLETGSLKLANGRVIEKTLYNRRTRQDEPALFVALTFERREVLDSSNIKPMNLIGVDRGENIPAVIALTDPEGCPLSRFKDSLGNPTHILRIGESYKEKQRTIQAKKEVEQRRAGGYSRKYASKAKNLADDMVRNTARDLLYYAVTQDAMLIFENLSRGFGRQGKRTFMAERQYTRMEDWLTAKLAYEGLPSKTYLSKTLAQYTSKTCSNCGFTITSADYDRVLEKLKKTATGWMTTINGKELKVEGQITYYNRYKRQNVVKDLSVELDRLSEESVNNDISSWTKGRSGEALSLLKKRFSHRPVQEKFVCLNCGFETHADEQAALNIARSWLFLRSQEYKKYQTNKTTGKNTDKRAFVETWQSFYRKKLKEVWKPAV

SEQ ID NO: 39334 - protein, 979 aa, synthetic construct
  REGION 1..979: note = engineered CasX variant
QEIKRINKIRRRLVKDSNTKKAGKTRGPMKTLLVRVMTPDLRERLENLRKKPENIPQPISNTSRANLNKLLTDYTEMKKAILHVYWEEFQKDPVGLMSRVAQPASKKIDQNKLKPEMDEKGNLTTAGFACSQCGQPLFVYKLEQVSEKGKAYTNYFGRCNVAEHEKLILLAQLKPEKDSDEAVTYSLGKFGQRALDFYSIHVTKESTHPVKPLAQIAGNRYASGPVGKALRDACMGTIASFLSKYQDIIIEHQKVVKGNQKRLESLRELAGKENLEYPSVTLPPQPHTKEGVDAYNEVIARVRMWVNLNLWQKLKLSRDDAKPLLRLKKFPSFPLVERQANEVDWWDMVCNVKKLINEKKEDGKVFWQNLAGYKRQEALRPYLSSEEDRKKGKKFARYQLGDLLLHLEKKHGEDWGKVYDEAWERIDKKVEGLSKHIKLEEERRSEDAQSKAALTDWLRAKASFVIEGLKEADKDEFCRCELKLQKWYGDLRGKPFAIEAENSILDISGFSKQYNCAFIWQKDGVKKLNLYLIINYFKGGKLRFKKIKPEAFEANRFYTVINKKSGEIVPMEVNFNFDDPNLIILPLAFGKRQGREFIWNDLLSLETGSLKLANGRVIEKTLYNRRTRQDEPALFVALTFERREVLDSSNIKPMNLIGVDRGENIPAVIALTDPEGCPLSRFKDSLGNPTHILRIGESYKEKQRTIQAKKEVEQRRAGGYSRKYASKAKNLADDMVRNTARDLLYYAVTQDAMLIFENLSRGFGRQGKRTFMAERQYTRMEDWLTAKLAYEGLPSKTYLSKTLAQYTSKTCSNCGFTITSADYDRVLEKLKKTATGWMTTINGKELKVEGQITYYNRYKRQNVVKDLSVELDRLSEESVNNDISSWTKGRSGEALSLLKKRFSHRPVQEKFVCLNCGFETHADEQAALNIARSWLFLRSQEYKKYQTNKTTGNTDKRAFVETWQSFYRKKLKEVWKPAV

SEQ ID NO: 39335 - protein, 979 aa, synthetic construct
  REGION 1..979: note = engineered CasX variant
QEIKRINKIRRRLVKDSNTKKAGKTRGPMKTLLVRVMTPDLRERLENLRKKPENIPQPISNTSRANLNKLLTDYTEMKKAILHVYWEEFQKDPVGLMSRVAQPASKKIDQNKLKPEMDEKGNLTTAGFACSQCGQPLFVYKLEQVSEKGKAYTNYFGRCNVAEHEKLILLAQLKPEKDSDEAVTYSLGKFGQRALDFYSIHVTKESTHPVKPLAQIAGNRYASGPVGKALRDACMGTIASFLSKYQDIIIEHQKVVKGNQKRLESLRELAGKENLEYPSVTLPPQPHTKEGVDAYNEVIARVRMWVNLNLWQKLKLSRDDAKPLLRLKGFPSFPLVERQANEVDWWDMVCNVKKLINEKKEDGKVFWQNLAGYKRQEALRPYLSSEEDRKKGKKFARYQLGDLLLHLEKKHGEDWGKVYDEAWERIDKKVEGLSKHIKLEEERRSEDAQSKAALTDWLRAKASFVIEGLKEADKDEFCRCELKLQKWYGDLRGKPFAIEAENSILDISGFSKQYNCAFIWQKDGVKKLNLYLIINYFKGGKLRFKKIKPEAFEANRFYTVINKKSGEIVPMEVNFNFDDPNLIILPLAFGKRQGREFIWNDLLSLETGSLKLANGRVIEKTLYNRRTRQDEPALFVALTFERREVLDSSNIKPMNLIGVDRGENIPAVIALTDPEGCPLSRFKDSLGNPTHILRIGERYKEKQRTIQAKKEVEQRRAGGYSRKYASKAKNLADDMVRNTARDLLYYAVTQDAMLIFENLSRGFGRQGKRTFMAERQYTRMEDWLTAKLAYEGLPSKTYLSKTLAQYTSKTCSNCGFTITSADYDRVLEKLKKTATGWMTTINGKELKVEGQITYYNRYKRQNVVKDLSVELDRLSEESVNNDISSWTKGRSGEALSLLKKRFSHRPVQEKFVCLNCGFETHADEQAALNIARSWLFLRSQEYKKYQTNKTTGNTDKRAFVETWQSFYRKKLKEVWKPAV

SEQ ID NO: 39336 - protein, 979 aa, synthetic construct
  REGION 1..979: note = engineered CasX variant
QEIKRINKIRRRLVKDSNTKKAGKTRGPMKTLLVRVMTPDLRERLENLRKKPENIPQPISNTSRANLNKLLTDYTEMKKAILHVYWEEFQKDPVGLMSRVAQPASKKIDQNKLKPEMDEKGNLTTAGFACSQCGQPLFVYKLEQVSEKGKAYTNYFGRCNVAEHEKLILLAQLKPEKDSDEAVTYSLGKFGQRALDFYSIHVTKESTHPVKPLAQIAGNRYASGPVGKALRDACMGTIASFLSKYQDIIIEHQKVVKGNQKRLESLRELAGKENLEYPSVTLPPQPHTKEGVDAYNEVIARVRMWVNLNLWQKLKLSRDDAKPLLRLKGFPSFPLVERQANEVDWWDMVCNVKKLINEKKEDGKVFWQNLAGYKRQEALRPYLSSEEDRKKGKKFARYQLGDLLLHLEKKHGEDWGKVYDEAWERIDKKVEGLSKHIKLEEERRSEDAQSKAALTDWLRAKASFVIEGLKEADKDEFCRCELKLQKWYGDLRGKPFAIEAENSILDISGFSKQYNCAFIWQKDGVKKLNLYLIINYFKGGKLRFKKIKPEAFEANRFYTVINKKSGEIVPMEVNFNFDDPNLIILPLAFGKRQGREFIWNDLLSLETGSLQLANGRVIEKTLYNRRTRQDEPALFVALTFERREVLDSSNIKPMNLIGVDRGENIPAVIALTDPEGCPLSRFKDSLGNPTHILRIGESYKEKQRTIQAKKEVEQRRAGGYSRKYASKAKNLADDMVRNTARDLLYYAVTQDAMLIFENLSRGFGRQGKRTFMAERQYTRMEDWLTAKLAYEGLPSKTYLSKTLAQYTSKTCSNCGFTITSADYDRVLEKLKKTATGWMTTINGKELKVEGQITYYNRYKRQNVVKDLSVELDRLSEESVNNDISSWTKGRSGEALSLLKKRFSHRPVQEKFVCLNCGFETHADEQAALNIARSWLFLRSQEYKKYQTNKTTGNTDKRAFVETWQSFYRKKLKEVWKPAV

SEQ ID NO: 39337 - protein, 978 aa, synthetic construct
  REGION 1..978: note = engineered CasX variant
QEIKRINKIRRRLVKDSNTKKAGKTGPMKTLLVRVMTPDLRERLENLRKKPENIPQPISNTSRANLNKLLTDYTEMKKAILHVYWEEFQKDPVGLMSRVAQPASKKIDQNKLKPEMDEKGNLTTAGFACSQCGQPLFVYKLEQVSEKGKAYTNYFGRCNVAEHEKLILLDQLKPEKDSDEAVTYSLGKFGQRALDFYSIHVTKESTHPVKPLAQIAGNRYASSPVGKALRDACMGTIASFLSKYQDIIIEHQKVVKGNQKRLESLRELAGKENLEYPSVTLPPQPHTKEGVDAYNEVIARVRMWVNLNLWQKLKLSRDDAKPLLRLKGFPSFPLVERQANEVDWWDMVCNVKKLINEKKEDGKVFWQNLAGYKRQEALRPYLSSEEDRKKGKKFARYQLGDLLLHLEKKHGEDWGKVYDEAWERIDKKVEGLSKHIKLEEERRSEDAQSKAALTDWLRAKASFVIEGLKEADKDEFCRCELKLQKWYGDLRGKPFAIEAENSILDISGFSKQYNCAFIWQKDGVKKLNLYLIINYFKGGKLRFKKIKPEAFEANRFYTVINKKSGEIVPMEVNFNFDDPNLIILPLAFGKRQGREFIWNDLLSLETGSLKLANGRVIEKTLYNRRTRQDEPALFVALTFERREVLDSSNIKPMNLIGVDRGENIPAVIALTDPEGCPLSRFKDSLGNPTHILRIGESYKEKQRTIQAKKEVEQRRAGGYSRKYASKAKNLADDMVRNTARDLLYYAVTQDAMLIFENLSRGFGRQGKRTFMAERQYTRMEDWLTAKLAYEGLPSKTYLSKTLAQYTSKTCSNCGFTITSADYDRVLEKLKKTATGWMTTINGKELKVEGQITYYNRYKRQNVVKDLSVELDRLSEESVNNDISSWTKGRSGEALSLLKKRFSHRPVQEKFVCLNCGFETHADEQAALNIARSWLFLRSQEYKKYQTNKTTGNTDKRAFVETWQSFYRKKLKEVWKPAV

SEQ ID NO: 39338 - protein, 978 aa, synthetic construct
  REGION 1..978: note = engineered CasX variant
QEGKRINKIRRRLVKDSNTKKAGKTGPMKTLLVRVMTPDLRERLENLRKKPENIPQPISNTSRANLNKLLTDYTEMKKAILHVYWEEFQKDPVGLMSRVAQPASKKIDQNKLKPEMDEKGNLTTAGFACSQCGQPLFVYKLEQVSEKGKAYTNYFGRCNVAEHEKLILLAQLKPEKDSDEAVTYSLGKFGQRALDFYSIHVTKESTHPVKPLAQIAGNRYASSPVGKALRDACMGTIASFLSKYQDIIIEHQKVVKGNQKRLESLRELAGKENLEYPSVTLPPQPHTKEGVDAYNEVIARVRMWVNLNLWQKLKLSRDDAKPLLRLKGFPSFPLVERQANEVDWWDMVCNVKKLINEKKEDGKVFWQNLAGYKRQEALRPYLSSEEDRKKGKKFARYQLGDLLLHLEKKHGEDWGKVYDEAWERIDKKVEGLSKHIKLEEERRSEDAQSKAALTDWLRAKASFVIEGLKEADKDEFCRCELKLQKWYGDLRGKPFAIEAENSILDISGFSKQYNCAFIWQKDGVKKLNLYLIINYFKGGKLRFKKIKPEAFEANRFYTVINKKSGEIVPMEVNFNFDDPNLIILPLAFGKRQGREFIWNDLLSLETGSLKLANGRVIEKTLYNRRTRQDEPALFVALTFERREVLDSSNIKPMNLIGVDRGENIPAVIALTDPEGCPLSRFKDSLGNPTHILRIGESYKEKQRTIQAKKEVEQRRAGGYSRKYASKAKNLADDMVRNTARDLLYYAVTQDAMLIFENLSRGFGRQGKRTFMAERQYTRMEDWLTAKLAYEGLPSKTYLSKTLAQYTSKTCSNCGFTITSADYDRVLEKLKKTATGWMTTINGKELKVEGQITYYNRYKRQNVVKDLSVELDRLSEESVNNDISSWTKGRSGEALSLLKKRFSHRPVQEKFVCLNCGFETHADEQAALNIARSWLFLRSQEYKKYQTNKTTGNTDKRAFVETWQSFYRKKLKEVWKPAV

SEQ ID NO: 39339 - protein, 979 aa, synthetic construct
  REGION 1..979: note = engineered CasX variant
QEIGKRINKIRRRLVKDSNTKKAGKTGPMKTLLVRVMTPDLRERLENLRKKPENIPQPISNTSRANLNKLLTDYTEMKKAILHVYWEEFQKDPVGLMSRVAQPASKKIDQNKLKPEMDEKGNLTTAGFACSQCGQPLFVYKLEQVSEKGKAYTNYFGRCNVAEHEKLILLAQLKPEKDSDEAVTYSLGKFGQRALDFYSIHVTKESTHPVKPLAQIAGNRYASSPVGKALRDACMGTIASFLSKYQDIIIEHQKVVKGNQKRLESLRELAGKENLEYPSVTLPPQPHTKEGVDAYNEVIARVRMWVNLNLWQKLKLSRDDAKPLLRLKGFPSFPLVERQANEVDWWDMVCNVKKLINEKKEDGKVFWQNLAGYKRQEALRPYLSSEEDRKKGKKFARYQLGDLLLHLEKKHGEDWGKVYDEAWERIDKKVEGLSKHIKLEEERRSEDAQSKAALTDWLRAKASFVIEGLKEADKDEFCRCELKLQKWYGDLRGKPFAIEAENSILDISGFSKQYNCAFIWQKDGVKKLNLYLIINYFKGGKLRFKKIKPEAFEANRFYTVINKKSGEIVPMEVNFNFDDPNLIILPLAFGKRQGREFIWNDLLSLETGSLKLANGRVIEKTLYNRRTRQDEPALFVALTFERREVLDSSNIKPMNLIGVDRGENIPAVIALTDPEGCPLSRFKDSLGNPTHILRIGESYKEKQRTIQAKKEVEQRRAGGYSRKYASKAKNLADDMVRNTARDLLYYAVTQDAMLIFENLSRGFGRQGKRTFMAERQYTRMEDWLTAKLAYEGLPSKTYLSKTLAQYTSKTCSNCGFTITSADYDRVLEKLKKTATGWMTTINGKELKVEGQITYYNRYKRQNVVKDLSVELDRLSEESVNNDISSWTKGRSGEALSLLKKRFSHRPVQEKFVCLNCGFETHADEQAALNIARSWLFLRSQEYKKYQTNKTTGNTDKRAFVETWQSFYRKKLKEVWKPAV

SEQ ID NO: 39340 - protein, 978 aa, synthetic construct
  REGION 1..978: note = engineered CasX variant
QEIGRINKIRRRLVKDSNTKKAGKTGPMKTLLVRVMTPDLRERLENLRKKPENIPQPISNTSRANLNKLLTDYTEMKKAILHVYWEEFQKDPVGLMSRVAQPASKKIDQNKLKPEMDEKGNLTTAGFACSQCGQPLFVYKLEQVSEKGKAYTNYFGRCNVAEHEKLILLAQLKPEKDSDEAVTYSLGKFGQRALDFYSIHVTKESTHPVKPLAQIAGNRYASSPVGKALRDACMGTIASFLSKYQDIIIEHQKVVKGNQKRLESLRELAGKENLEYPSVTLPPQPHTKEGVDAYNEVIARVRMWVNLNLWQKLKLSRDDAKPLLRLKGFPSFPLVERQANEVDWWDMVCNVKKLINEKKEDGKVFWQNLAGYKRQEALRPYLSSEEDRKKGKKFARYQLGDLLLHLEKKHGEDWGKVYDEAWERIDKKVEGLSKHIKLEEERRSEDAQSKAALTDWLRAKASFVIEGLKEADKDEFCRCELKLQKWYGDLRGKPFAIEAENSILDISGFSKQYNCAFIWQKDGVKKLNLYLIINYFKGGKLRFKKIKPEAFEANRFYTVINKKSGEIVPMEVNFNFDDPNLIILPLAFGKRQGREFIWNDLLSLETGSLKLANGRVIEKTLYNRRTRQDEPALFVALTFERREVLDSSNIKPMNLIGVDRGENIPAVIALTDPEGCPLSRFKDSLGNPTHILRIGESYKEKQRTIQAKKEVEQRRAGGYSRKYASKAKNLADDMVRNTARDLLYYAVTQDAMLIFENLSRGFGRQGKRTFMAERQYTRMEDWLTAKLAYEGLPSKTYLSKTLAQYTSKTCSNCGFTITSADYDRVLEKLKKTATGWMTTINGKELKVEGQITYYNRYKRQNVVKDLSVELDRLSEESVNNDISSWTKGRSGEALSLLKKRFSHRPVQEKFVCLNCGFETHADEQAALNIARSWLFLRSQEYKKYQTNKTTGNTDKRAFVETWQSFYRKKLKEVWKPAV

SEQ ID NO: 39341 - protein, 979 aa, synthetic construct
  REGION 1..979: note = engineered CasX variant
QEIKGRINKIRRRLVKDSNTKKAGKTGPMKTLLVRVMTPDLRERLENLRKKPENIPQPISNTSRANLNKLLTDYTEMKKAILHVYWEEFQKDPVGLMSRVAQPASKKIDQNKLKPEMDEKGNLTTAGFACSQCGQPLFVYKLEQVSEKGKAYTNYFGRCNVAEHEKLILLAQLKPEKDSDEAVTYSLGKFGQRALDFYSIHVTKESTHPVKPLAQIAGNRYASSPVGKALRDACMGTIASFLSKYQDIIIEHQKVVKGNQKRLESLRELAGKENLEYPSVTLPPQPHTKEGVDAYNEVIARVRMWVNLNLWQKLKLSRDDAKPLLRLKGFPSFPLVERQANEVDWWDMVCNVKKLINEKKEDGKVFWQNLAGYKRQEALRPYLSSEEDRKKGKKFARYQLGDLLLHLEKKHGEDWGKVYDEAWERIDKKVEGLSKHIKLEEERRSEDAQSKAALTDWLRAKASFVIEGLKEADKDEFCRCELKLQKWYGDLRGKPFAIEAENSILDISGFSKQYNCAFIWQKDGVKKLNLYLIINYFKGGKLRFKKIKPEAFEANRFYTVINKKSGEIVPMEVNFNFDDPNLIILPLAFGKRQGREFIWNDLLSLETGSLKLANGRVIEKTLYNRRTRQDEPALFVALTFERREVLDSSNIKPMNLIGVDRGENIPAVIALTDPEGCPLSRFKDSLGNPTHILRIGESYKEKQRTIQAKKEVEQRRAGGYSRKYASKAKNLADDMVRNTARDLLYYAVTQDAMLIFENLSRGFGRQGKRTFMAERQYTRMEDWLTAKLAYEGLPSKTYLSKTLAQYTSKTCSNCGFTITSADYDRVLEKLKKTATGWMTTINGKELKVEGQITYYNRYKRQNVVKDLSVELDRLSEESVNNDISSWTKGRSGEALSLLKKRFSHRPVQEKFVCLNCGFETHADEQAALNIARSWLFLRSQEYKKYQTNKTTGNTDKRAFVETWQSFYRKKLKEVWKPAV

SEQ ID NO: 39342 - protein, 978 aa, synthetic construct
  REGION 1..978: note = engineered CasX variant
QEIKRANKIRRRLVKDSNTKKAGKTGPMKTLLVRVMTPDLRERLENLRKKPENIPQPISNTSRANLNKLLTDYTEMKKAILHVYWEEFQKDPVGLMSRVAQPASKKIDQNKLKPEMDEKGNLTTAGFACSQCGQPLFVYKLEQVSEKGKAYTNYFGRCNVAEHEKLILLAQLKPEKDSDEAVTYSLGKFGQRALDFYSIHVTKESTHPVKPLAQIAGNRYASSPVGKALRDACMGTIASFLSKYQDIIIEHQKVVKGNQKRLESLRELAGKENLEYPSVTLPPQPHTKEGVDAYNEVIARVRMWVNLNLWQKLKLSRDDAKPLLRLKGFPSFPLVERQANEVDWWDMVCNVKKLINEKKEDGKVFWQNLAGYKRQEALRPYLSSEEDRKKGKKFARYQLGDLLLHLEKKHGEDWGKVYDEAWERIDKKVEGLSKHIKLEEERRSEDAQSKAALTDWLRAKASFVIEGLKEADKDEFCRCELKLQKWYGDLRGKPFAIEAENSILDISGFSKQYNCAFIWQKDGVKKLNLYLIINYFKGGKLRFKKIKPEAFEANRFYTVINKKSGEIVPMEVNFNFDDPNLIILPLAFGKRQGREFIWNDLLSLETGSLKLANGRVIEKTLYNRRTRQDEPALFVALTFERREVLDSSNIKPMNLIGVDRGENIPAVIALTDPEGCPLSRFKDSLGNPTHILRIGESYKEKQRTIQAKKEVEQRRAGGYSRKYASKAKNLADDMVRNTARDLLYYAVTQDAMLIFENLSRGFGRQGKRTFMAERQYTRMEDWLTAKLAYEGLPSKTYLSKTLAQYTSKTCSNCGFTITSADYDRVLEKLKKTATGWMTTINGKELKVEGQITYYNRYKRQNVVKDLSVELDRLSEESVNNDISSWTKGRSGEALSLLKKRFSHRPVQEKFVCLNCGFETHADEQAALNIARSWLFLRSQEYKKYQTNKTTGNTDKRAFVETWQSFYRKKLKEVWKPAV

SEQ ID NO: 39343 - protein, 978 aa, synthetic construct
  REGION 1..978: note = engineered CasX variant
QEIKRISKIRRRLVKDSNTKKAGKTGPMKTLLVRVMTPDLRERLENLRKKPENIPQPISNTSRANLNKLLTDYTEMKKAILHVYWEEFQKDPVGLMSRVAQPASKKIDQNKLKPEMDEKGNLTTAGFACSQCGQPLFVYKLEQVSEKGKAYTNYFGRCNVAEHEKLILLAQLKPEKDSDEAVTYSLGKFGQRALDFYSIHVTKESTHPVKPLAQIAGNRYASSPVGKALRDACMGTIASFLSKYQDIIIEHQKVVKGNQKRLESLRELAGKENLEYPSVTLPPQPHTKEGVDAYNEVIARVRMWVNLNLWQKLKLSRDDAKPLLRLKGFPSFPLVERQANEVDWWDMVCNVKKLINEKKEDGKVFWQNLAGYKRQEALRPYLSSEEDRKKGKKFARYQLGDLLLHLEKKHGEDWGKVYDEAWERIDKKVEGLSKHIKLEEERRSEDAQSKAALTDWLRAKASFVIEGLKEADKDEFCRCELKLQKWYGDLRGKPFAIEAENSILDISGFSKQYNCAFIWQKDGVKKLNLYLIINYFKGGKLRFKKIKPEAFEANRFYTVINKKSGEIVPMEVNFNFDDPNLIILPLAFGKRQGREFIWNDLLSLETGSLKLANGRVIEKTLYNRRTRQDEPALFVALTFERREVLDSSNIKPMNLIGVDRGENIPAVIALTDPEGCPLSRFKDSLGNPTHILRIGESYKEKQRTIQAKKEVEQRRAGGYSRKYASKAKNLADDMVRNTARDLLYYAVTQDAMLIFENLSRGFGRQGKRTFMAERQYTRMEDWLTAKLAYEGLPSKTYLSKTLAQYTSKTCSNCGFTITSADYDRVLEKLKKTATGWMTTINGKELKVEGQITYYNRYKRQNVVKDLSVELDRLSEESVNNDISSWTKGRSGEALSLLKKRFSHRPVQEKFVCLNCGFETHADEQAALNIARSWLFLRSQEYKKYQTNKTTGNTDKRAFVETWQSFYRKKLKEVWKPAV

SEQ ID NO: 39344 - protein, 978 aa, synthetic construct
  REGION 1..978: note = engineered CasX variant
QEIKRINGIRRRLVKDSNTKKAGKTGPMKTLLVRVMTPDLRERLENLRKKPENIPQPISNTSRANLNKLLTDYTEMKKAILHVYWEEFQKDPVGLMSRVAQPASKKIDQNKLKPEMDEKGNLTTAGFACSQCGQPLFVYKLEQVSEKGKAYTNYFGRCNVAEHEKLILLAQLKPEKDSDEAVTYSLGKFGQRALDFYSIHVTKESTHPVKPLAQIAGNRYASSPVGKALRDACMGTIASFLSKYQDIIIEHQKVVKGNQKRLESLRELAGKENLEYPSVTLPPQPHTKEGVDAYNEVIARVRMWVNLNLWQKLKLSRDDAKPLLRLKGFPSFPLVERQANEVDWWDMVCNVKKLINEKKEDGKVFWQNLAGYKRQEALRPYLSSEEDRKKGKKFARYQLGDLLLHLEKKHGEDWGKVYDEAWERIDKKVEGLSKHIKLEEERRSEDAQSKAALTDWLRAKASFVIEGLKEADKDEFCRCELKLQKWYGDLRGKPFAIEAENSILDISGFSKQYNCAFIWQKDGVKKLNLYLIINYFKGGKLRFKKIKPEAFEANRFYTVINKKSGEIVPMEVNFNFDDPNLIILPLAFGKRQGREFIWNDLLSLETGSLKLANGRVIEKTLYNRRTRQDEPALFVALTFERREVLDSSNIKPMNLIGVDRGENIPAVIALTDPEGCPLSRFKDSLGNPTHILRIGESYKEKQRTIQAKKEVEQRRAGGYSRKYASKAKNLADDMVRNTARDLLYYAVTQDAMLIFENLSRGFGRQGKRTFMAERQYTRMEDWLTAKLAYEGLPSKTYLSKTLAQYTSKTCSNCGFTITSADYDRVLEKLKKTATGWMTTINGKELKVEGQITYYNRYKRQNVVKDLSVELDRLSEESVNNDISSWTKGRSGEALSLLKKRFSHRPVQEKFVCLNCGFETHADEQAALNIARSWLFLRSQEYKKYQTNKTTGNTDKRAFVETWQSFYRKKLKEVWKPAV

SEQ ID NO: 39345 - protein, 978 aa, synthetic construct
  REGION 1..978: note = engineered CasX variant
QEIKRINKIRRRLVKDSNTKKAGKTGPMKTLLVPVMTPDLRERLENLRKKPENIPQPISNTSRANLNKLLTDYTEMKKAILHVYWEEFQKDPVGLMSRVAQPASKKIDQNKLKPEMDEKGNLTTAGFACSQCGQPLFVYKLEQVSEKGKAYTNYFGRCNVAEHEKLILLAQLKPEKDSDEAVTYSLGKFGQRALDFYSIHVTKESTHPVKPLAQIAGNRYASSPVGKALRDACMGTIASFLSKYQDIIIEHQKVVKGNQKRLESLRELAGKENLEYPSVTLPPQPHTKEGVDAYNEVIARVRMWVNLNLWQKLKLSRDDAKPLLRLKGFPSFPLVERQANEVDWWDMVCNVKKLINEKKEDGKVFWQNLAGYKRQEALRPYLSSEEDRKKGKKFARYQLGDLLLHLEKKHGEDWGKVYDEAWERIDKKVEGLSKHIKLEEERRSEDAQSKAALTDWLRAKASFVIEGLKEADKDEFCRCELKLQKWYGDLRGKPFAIEAENSILDISGFSKQYNCAFIWQKDGVKKLNLYLIINYFKGGKLRFKKIKPEAFEANRFYTVINKKSGEIVPMEVNFNFDDPNLIILPLAFGKRQGREFIWNDLLSLETGSLKLANGRVIEKTLYNRRTRQDEPALFVALTFERREVLDSSNIKPMNLIGVDRGENIPAVIALTDPEGCPLSRFKDSLGNPTHILRIGESYKEKQRTIQAKKEVEQRRAGGYSRKYASKAKNLADDMVRNTARDLLYYAVTQDAMLIFENLSRGFGRQGKRTFMAERQYTRMEDWLTAKLAYEGLPSKTYLSKTLAQYTSKTCSNCGFTITSADYDRVLEKLKKTATGWMTTINGKELKVEGQITYYNRYKRQNVVKDLSVELDRLSEESVNNDISSWTKGRSGEALSLLKKRFSHRPVQEKFVCLNCGFETHADEQAALNIARSWLFLRSQEYKKYQTNKTTGNTDKRAFVETWQSFYRKKLKEVWKPAV

SEQ ID NO: 39346 - protein, 978 aa, synthetic construct
  REGION 1..978: note = engineered CasX variant
QEIKRINKIRRRLVKDSNTKKAGKTGPMKTLLVRVMTPDLRERLENLRKKPPNIPQPISNTSRANLNKLLTDYTEMKKAILHVYWEEFQKDPVGLMSRVAQPASKKIDQNKLKPEMDEKGNLTTAGFACSQCGQPLFVYKLEQVSEKGKAYTNYFGRCNVAEHEKLILLAQLKPEKDSDEAVTYSLGKFGQRALDFYSIHVTKESTHPVKPLAQIAGNRYASSPVGKALRDACMGTIASFLSKYQDIIIEHQKVVKGNQKRLESLRELAGKENLEYPSVTLPPQPHTKEGVDAYNEVIARVRMWVNLNLWQKLKLSRDDAKPLLRLKGFPSFPLVERQANEVDWWDMVCNVKKLINEKKEDGKVFWQNLAGYKRQEALRPYLSSEEDRKKGKKFARYQLGDLLLHLEKKHGEDWGKVYDEAWERIDKKVEGLSKHIKLEEERRSEDAQSKAALTDWLRAKASFVIEGLKEADKDEFCRCELKLQKWYGDLRGKPFAIEAENSILDISGFSKQYNCAFIWQKDGVKKLNLYLIINYFKGGKLRFKKIKPEAFEANRFYTVINKKSGEIVPMEVNFNFDDPNLIILPLAFGKRQGREFIWNDLLSLETGSLKLANGRVIEKTLYNRRTRQDEPALFVALTFERREVLDSSNIKPMNLIGVDRGENIPAVIALTDPEGCPLSRFKDSLGNPTHILRIGESYKEKQRTIQAKKEVEQRRAGGYSRKYASKAKNLADDMVRNTARDLLYYAVTQDAMLIFENLSRGFGRQGKRTFMAERQYTRMEDWLTAKLAYEGLPSKTYLSKTLAQYTSKTCSNCGFTITSADYDRVLEKLKKTATGWMTTINGKELKVEGQITYYNRYKRQNVVKDLSVELDRLSEESVNNDISSWTKGRSGEALSLLKKRFSHRPVQEKFVCLNCGFETHADEQAALNIARSWLFLRSQEYKKYQTNKTTGNTDKRAFVETWQSFYRKKLKEVWKPAV

SEQ ID NO: 39347 - protein, 978 aa, synthetic construct
  REGION 1..978: note = engineered CasX variant
QEIKRINKIRRRLVKDSNTKKAGKTGPMKTLLVRVMTPDLRERLENLRKKPENIPQPISNTSQANLNKLLTDYTEMKKAILHVYWEEFQKDPVGLMSRVAQPASKKIDQNKLKPEMDEKGNLTTAGFACSQCGQPLFVYKLEQVSEKGKAYTNYFGRCNVAEHEKLILLAQLKPEKDSDEAVTYSLGKFGQRALDFYSIHVTKESTHPVKPLAQIAGNRYASSPVGKALRDACMGTIASFLSKYQDIIIEHQKVVKGNQKRLESLRELAGKENLEYPSVTLPPQPHTKEGVDAYNEVIARVRMWVNLNLWQKLKLSRDDAKPLLRLKGFPSFPLVERQANEVDWWDMVCNVKKLINEKKEDGKVFWQNLAGYKRQEALRPYLSSEEDRKKGKKFARYQLGDLLLHLEKKHGEDWGKVYDEAWERIDKKVEGLSKHIKLEEERRSEDAQSKAALTDWLRAKASFVIEGLKEADKDEFCRCELKLQKWYGDLRGKPFAIEAENSILDISGFSKQYNCAFIWQKDGVKKLNLYLIINYFKGGKLRFKKIKPEAFEANRFYTVINKKSGEIVPMEVNFNFDDPNLIILPLAFGKRQGREFIWNDLLSLETGSLKLANGRVIEKTLYNRRTRQDEPALFVALTFERREVLDSSNIKPMNLIGVDRGENIPAVIALTDPEGCPLSRFKDSLGNPTHILRIGESYKEKQRTIQAKKEVEQRRAGGYSRKYASKAKNLADDMVRNTARDLLYYAVTQDAMLIFENLSRGFGRQGKRTFMAERQYTRMEDWLTAKLAYEGLPSKTYLSKTLAQYTSKTCSNCGFTITSADYDRVLEKLKKTATGWMTTINGKELKVEGQITYYNRYKRQNVVKDLSVELDRLSEESVNNDISSWTKGRSGEALSLLKKRFSHRPVQEKFVCLNCGFETHADEQAALNIARSWLFLRSQEYKKYQTNKTTGNTDKRAFVETWQSFYRKKLKEVWKPAV

SEQ ID NO: 39348 - protein, 978 aa, synthetic construct
  REGION 1..978: note = engineered CasX variant
QEIKRINKIRRRLVKDSNTKKAGKTGPMKTLLVRVMTPDLRERLENLRKKPENIPQPISNTSRANLNKLLTDYTEMKKAILHVYDEEFQKDPVGLMSRVAQPASKKIDQNKLKPEMDEKGNLTTAGFACSQCGQPLFVYKLEQVSEKGKAYTNYFGRCNVAEHEKLILLAQLKPEKDSDEAVTYSLGKFGQRALDFYSIHVTKESTHPVKPLAQIAGNRYASSPVGKALRDACMGTIASFLSKYQDIIIEHQKVVKGNQKRLESLRELAGKENLEYPSVTLPPQPHTKEGVDAYNEVIARVRMWVNLNLWQKLKLSRDDAKPLLRLKGFPSFPLVERQANEVDWWDMVCNVKKLINEKKEDGKVFWQNLAGYKRQEALRPYLSSEEDRKKGKKFARYQLGDLLLHLEKKHGEDWGKVYDEAWERIDKKVEGLSKHIKLEEERRSEDAQSKAALTDWLRAKASFVIEGLKEADKDEFCRCELKLQKWYGDLRGKPFAIEAENSILDISGFSKQYNCAFIWQKDGVKKLNLYLIINYFKGGKLRFKKIKPEAFEANRFYTVINKKSGEIVPMEVNFNFDDPNLIILPLAFGKRQGREFIWNDLLSLETGSLKLANGRVIEKTLYNRRTRQDEPALFVALTFERREVLDSSNIKPMNLIGVDRGENIPAVIALTDPEGCPLSRFKDSLGNPTHILRIGESYKEKQRTIQAKKEVEQRRAGGYSRKYASKAKNLADDMVRNTARDLLYYAVTQDAMLIFENLSRGFGRQGKRTFMAERQYTRMEDWLTAKLAYEGLPSKTYLSKTLAQYTSKTCSNCGFTITSADYDRVLEKLKKTATGWMTTINGKELKVEGQITYYNRYKRQNVVKDLSVELDRLSEESVNNDISSWTKGRSGEALSLLKKRFSHRPVQEKFVCLNCGFETHADEQAALNIARSWLFLRSQEYKKYQTNKTTGNTDKRAFVETWQSFYRKKLKEVWKPAV

SEQ ID NO: 39349 - protein, 978 aa, synthetic construct
  REGION 1..978: note = engineered CasX variant
QEIKRINKIRRRLVKDSNTKKAGKTGPMKTLLVRVMTPDLRERLENLRKKPENIPQPISNTSRANLNKLLTDYTEMKKAILHVYWEEFQKDPVGLMSRVAQPASKKIDQNKLKPEMDEKGNLTTAGFACSQCGQPLFVYKLEQVSEKGKAYTNYFGRCNVAEHEKLIKLAQLKPEKDSDEAVTYSLGKFGQRALDFYSIHVTKESTHPVKPLAQIAGNRYASSPVGKALRDACMGTIASFLSKYQDIIIEHQKVVKGNQKRLESLRELAGKENLEYPSVTLPPQPHTKEGVDAYNEVIARVRMWVNLNLWQKLKLSRDDAKPLLRLKGFPSFPLVERQANEVDWWDMVCNVKKLINEKKEDGKVFWQNLAGYKRQEALRPYLSSEEDRKKGKKFARYQLGDLLLHLEKKHGEDWGKVYDEAWERIDKKVEGLSKHIKLEEERRSEDAQSKAALTDWLRAKASFVIEGLKEADKDEFCRCELKLQKWYGDLRGKPFAIEAENSILDISGFSKQYNCAFIWQKDGVKKLNLYLIINYFKGGKLRFKKIKPEAFEANRFYTVINKKSGEIVPMEVNFNFDDPNLIILPLAFGKRQGREFIWNDLLSLETGSLKLANGRVIEKTLYNRRTRQDEPALFVALTFERREVLDSSNIKPMNLIGVDRGENIPAVIALTDPEGCPLSRFKDSLGNPTHILRIGESYKEKQRTIQAKKEVEQRRAGGYSRKYASKAKNLADDMVRNTARDLLYYAVTQDAMLIFENLSRGFGRQGKRTFMAERQYTRMEDWLTAKLAYEGLPSKTYLSKTLAQYTSKTCSNCGFTITSADYDRVLEKLKKTATGWMTTINGKELKVEGQITYYNRYKRQNVVKDLSVELDRLSEESVNNDISSWTKGRSGEALSLLKKRFSHRPVQEKFVCLNCGFETHADEQAALNIARSWLFLRSQEYKKYQTNKTTGNTDKRAFVETWQSFYRKKLKEVWKPAV

SEQ ID NO: 39350 - protein, 978 aa, synthetic construct
  REGION 1..978: note = engineered CasX variant
QEIKRINKIRRRLVKDSNTKKAGKTGPMKTLLVRVMTPDLRERLENLRKKPENIPQPISNTSRANLNKLLTDYTEMKKAILHVYWEEFQKDPVGLMSRVAQPASKKIDQNKLKPEMDEKGNLTTAGFACSQCGQPLFVYKLEQVSEKGKAYTNYFGRCNVAEHEKLILLYQLKPEKDSDEAVTYSLGKFGQRALDFYSIHVTKESTHPVKPLAQIAGNRYASSPVGKALRDACMGTIASFLSKYQDIIIEHQKVVKGNQKRLESLRELAGKENLEYPSVTLPPQPHTKEGVDAYNEVIARVRMWVNLNLWQKLKLSRDDAKPLLRLKGFPSFPLVERQANEVDWWDMVCNVKKLINEKKEDGKVFWQNLAGYKRQEALRPYLSSEEDRKKGKKFARYQLGDLLLHLEKKHGEDWGKVYDEAWERIDKKVEGLSKHIKLEEERRSEDAQSKAALTDWLRAKASFVIEGLKEADKDEFCRCELKLQKWYGDLRGKPFAIEAENSILDISGFSKQYNCAFIWQKDGVKKLNLYLIINYFKGGKLRFKKIKPEAFEANRFYTVINKKSGEIVPMEVNFNFDDPNLIILPLAFGKRQGREFIWNDLLSLETGSLKLANGRVIEKTLYNRRTRQDEPALFVALTFERREVLDSSNIKPMNLIGVDRGENIPAVIALTDPEGCPLSRFKDSLGNPTHILRIGESYKEKQRTIQAKKEVEQRRAGGYSRKYASKAKNLADDMVRNTARDLLYYAVTQDAMLIFENLSRGFGRQGKRTFMAERQYTRMEDWLTAKLAYEGLPSKTYLSKTLAQYTSKTCSNCGFTITSADYDRVLEKLKKTATGWMTTINGKELKVEGQITYYNRYKRQNVVKDLSVELDRLSEESVNNDISSWTKGRSGEALSLLKKRFSHRPVQEKFVCLNCGFETHADEQAALNIARSWLFLRSQEYKKYQTNKTTGNTDKRAFVETWQSFYRKKLKEVWKPAV

SEQ ID NO: 39351 - protein, 978 aa, synthetic construct
  REGION 1..978: note = engineered CasX variant
QEIKRINKIRRRLVKDSNTKKAGKTGPMKTLLVRVMTPDLRERLENLRKKPENIPQPISNTSRANLNKLLTDYTEMKKAILHVYWEEFQKDPVGLMSRVAQPASKKIDQNKLKPEMDEKGNLTTAGFACSQCGQPLFVYKLEQVSEKGKAYTNYFGRCNVAEHEKLILLSQLKPEKDSDEAVTYSLGKFGQRALDFYSIHVTKESTHPVKPLAQIAGNRYASSPVGKALRDACMGTIASFLSKYQDIIIEHQKVVKGNQKRLESLRELAGKENLEYPSVTLPPQPHTKEGVDAYNEVIARVRMWVNLNLWQKLKLSRDDAKPLLRLKGFPSFPLVERQANEVDWWDMVCNVKKLINEKKEDGKVFWQNLAGYKRQEALRPYLSSEEDRKKGKKFARYQLGDLLLHLEKKHGEDWGKVYDEAWERIDKKVEGLSKHIKLEEERRSEDAQSKAALTDWLRAKASFVIEGLKEADKDEFCRCELKLQKWYGDLRGKPFAIEAENSILDISGFSKQYNCAFIWQKDGVKKLNLYLIINYFKGGKLRFKKIKPEAFEANRFYTVINKKSGEIVPMEVNFNFDDPNLIILPLAFGKRQGREFIWNDLLSLETGSLKLANGRVIEKTLYNRRTRQDEPALFVALTFERREVLDSSNIKPMNLIGVDRGENIPAVIALTDPEGCPLSRFKDSLGNPTHILRIGESYKEKQRTIQAKKEVEQRRAGGYSRKYASKAKNLADDMVRNTARDLLYYAVTQDAMLIFENLSRGFGRQGKRTFMAERQYTRMEDWLTAKLAYEGLPSKTYLSKTLAQYTSKTCSNCGFTITSADYDRVLEKLKKTATGWMTTINGKELKVEGQITYYNRYKRQNVVKDLSVELDRLSEESVNNDISSWTKGRSGEALSLLKKRFSHRPVQEKFVCLNCGFETHADEQAALNIARSWLFLRSQEYKKYQTNKTTGNTDKRAFVETWQSFYRKKLKEVWKPAV

SEQ ID NO: 39352 - protein, 978 aa, synthetic construct
  REGION 1..978: note = engineered CasX variant
QEIKRINKIRRRLVKDSNTKKAGKTGPMKTLLVRVMTPDLRERLENLRKKPENIPQPISNTSRANLNKLLTDYTEMKKAILHVYWEEFQKDPVGLMSRVAQPASKKIDQNKLKPEMDEKGNLTTAGFACSQCGQPLFVYKLEQVSEKGKAYTNYFGRCNVAEHEKLILLAQLKPEKDSDEAVTYSLGKFGQRALDFYSIHVTKESTHPVKPLAQIAGNRYASSPVGKALRDACMGTIASFLSKYQDIIIEHQKVVKGNQKRLESLRELAGKENLEYPSVTLPPQPHTKEGVDAYNEVIARVRMWVNLNLWQKLKLSRDDAKPLLRLKGFPSFPLVERQANEVDWWDMVCNVKKLINEKKEDGKVFWQNLAGYKRQEALRPYLSSEEDRKKGKKFARYQLGDLLLHLEKKHGEDWGKVYDEAWERIDKKVEGLSKHIKLEEERRSEDAQSKAALTDWLRAKASFVIEGLKEADKDEFCRCELKLQKWYGDLRGKPFAIEAENSILDISGFSKQYNCAFIWQKDGVKKLNLYLIINYFKGGKLRFKKIKPEAFEANRFYTVINKKSGEIVPMEVNFNFDDPNLIILPLAFGKRQGREFIWNDLLSLETGSLKLANGRVIEKTLYNRRTRQDEPALFVALTFERREVLDSSNIKPMNLIGVDRGENIPAVIALTDPEGCPLSRFKDSLGNPTHILRIGESYKEKQRTIQAKKEVEQRRAGGYSRKYASKAKNLADDMVRNTARDLLYYAVTQDAMLIFENLSRGFGRQGKRTFMAERQYTRMEDWLTAKLAYEGLPSKTYLSKTLAQYTSKTCSNCGFTITSADYDRVLEKLKKTATGWMTTINGKELKVEGQITYYNRYKRQNVVKDLSVELDRLSEESVNNDISSWTKGRSGEALSLLKKRFSHRPVQEKFVCLNCGFETHADEQAALNIARSWLFLRSQEYKKYQTNKTTGNTDKRAFVETWQSFYRKKLKEVWKPAV

SEQ ID NO: 39353 - protein, 978 aa, synthetic construct
  REGION 1..978: note = engineered CasX variant
QEIKRINKIRRRLVKDSNTKKAGKTGPMKTLLVRVMTPDLRERLENLRKKPENIPQPISNTSRANLNKLLTDYTEMKKAILHVYWEEFQKDPVGLMSRVAQPASKKIDQNKLKPEMDEKGNLTTAGFACSQCGQPLFVYKLEQVSEKGKAYTNYFGRCNVAEHEKLILLAQLKPEKDSDEAVTYSLGKFGQRALDFYSIHVTKESTHPVKPLAQIAGNRYASSPVGKALRDACMGTIASFLSKYQDIIIEHQKVVKGNQKRLESLRELAGKENLEYPSVTLPPQPHTSEGVDAYNEVIARVRMWVNLNLWQKLKLSRDDAKPLLRLKGFPSFPLVERQANEVDWWDMVCNVKKLINEKKEDGKVFWQNLAGYKRQEALRPYLSSEEDRKKGKKFARYQLGDLLLHLEKKHGEDWGKVYDEAWERIDKKVEGLSKHIKLEEERRSEDAQSKAALTDWLRAKASFVIEGLKEADKDEFCRCELKLQKWYGDLRGKPFAIEAENSILDISGFSKQYNCAFIWQKDGVKKLNLYLIINYFKGGKLRFKKIKPEAFEANRFYTVINKKSGEIVPMEVNFNFDDPNLIILPLAFGKRQGREFIWNDLLSLETGSLKLANGRVIEKTLYNRRTRQDEPALFVALTFERREVLDSSNIKPMNLIGVDRGENIPAVIALTDPEGCPLSRFKDSLGNPTHILRIGESYKEKQRTIQAKKEVEQRRAGGYSRKYASKAKNLADDMVRNTARDLLYYAVTQDAMLIFENLSRGFGRQGKRTFMAERQYTRMEDWLTAKLAYEGLPSKTYLSKTLAQYTSKTCSNCGFTITSADYDRVLEKLKKTATGWMTTINGKELKVEGQITYYNRYKRQNVVKDLSVELDRLSEESVNNDISSWTKGRSGEALSLLKKRFSHRPVQEKFVCLNCGFETHADEQAALNIARSWLFLRSQEYKKYQTNKTTGNTDKRAFVETWQSFYRKKLKEVWKPAV

SEQ ID NO: 39354 - protein, 978 aa, synthetic construct
  REGION 1..978: note = engineered CasX variant
QEIKRINKIRRRLVKDSNTKKAGKTGPMKTLLVRVMTPDLRERLENLRKKPENIPQPISNTSRANLNKLLTDYTEMKKAILHVYWEEFQKDPVGLMSRVAQPASKKIDQNKLKPEMDEKGNLTTAGFACSQCGQPLFVYKLEQVSEKGKAYTNYFGRCNVAEHEKLILLAQLKPEKDSDEAVTYSLGKFGQRALDFYSIHVTKESTHPVKPLAQIAGNRYASSPVGKALRDACMGTIASFLSKYQDIIIEHQKVVKGNQKRLESLRELAGKENLEYPSVTLPPQPHTKEGLDAYNEVIARVRMWVNLNLWQKLKLSRDDAKPLLRLKGFPSFPLVERQANEVDWWDMVCNVKKLINEKKEDGKVFWQNLAGYKRQEALRPYLSSEEDRKKGKKFARYQLGDLLLHLEKKHGEDWGKVYDEAWERIDKKVEGLSKHIKLEEERRSEDAQSKAALTDWLRAKASFVIEGLKEADKDEFCRCELKLQKWYGDLRGKPFAIEAENSILDISGFSKQYNCAFIWQKDGVKKLNLYLIINYFKGGKLRFKKIKPEAFEANRFYTVINKKSGEIVPMEVNFNFDDPNLIILPLAFGKRQGREFIWNDLLSLETGSLKLANGRVIEKTLYNRRTRQDEPALFVALTFERREVLDSSNIKPMNLIGVDRGENIPAVIALTDPEGCPLSRFKDSLGNPTHILRIGESYKEKQRTIQAKKEVEQRRAGGYSRKYASKAKNLADDMVRNTARDLLYYAVTQDAMLIFENLSRGFGRQGKRTFMAERQYTRMEDWLTAKLAYEGLPSKTYLSKTLAQYTSKTCSNCGFTITSADYDRVLEKLKKTATGWMTTINGKELKVEGQITYYNRYKRQNVVKDLSVELDRLSEESVNNDISSWTKGRSGEALSLLKKRFSHRPVQEKFVCLNCGFETHADEQAALNIARSWLFLRSQEYKKYQTNKTTGNTDKRAFVETWQSFYRKKLKEVWKPAV

SEQ ID NO: 39355 - protein, 978 aa, synthetic construct
  REGION 1..978: note = engineered CasX variant
QEIKRINKIRRRLVKDSNTKKAGKTGPMKTLLVRVMTPDLRERLENLRKKPENIPQPISNTSRANLNKLLTDYTEMKKAILHVYWEEFQKDPVGLMSRVAQPASKKIDQNKLKPEMDEKGNLTTAGFACSQCGQPLFVYKLEQVSEKGKAYTNYFGRCNVAEHEKLILLAQLKPEKDSDEAVTYSLGKFGQRALDFYSIHVTKESTHPVKPLAQIAGNRYASSPVGKALRDACMGTIASFLSKYQDIIIEHQKVVKGNQKRLESLRELAGKENLEYPSVTLPPQPHTKEGVDAYNEVIARVRTWVNLNLWQKLKLSRDDAKPLLRLKGFPSFPLVERQANEVDWWDMVCNVKKLINEKKEDGKVFWQNLAGYKRQEALRPYLSSEEDRKKGKKFARYQLGDLLLHLEKKHGEDWGKVYDEAWERIDKKVEGLSKHIKLEEERRSEDAQSKAALTDWLRAKASFVIEGLKEADKDEFCRCELKLQKWYGDLRGKPFAIEAENSILDISGFSKQYNCAFIWQKDGVKKLNLYLIINYFKGGKLRFKKIKPEAFEANRFYTVINKKSGEIVPMEVNFNFDDPNLIILPLAFGKRQGREFIWNDLLSLETGSLKLANGRVIEKTLYNRRTRQDEPALFVALTFERREVLDSSNIKPMNLIGVDRGENIPAVIALTDPEGCPLSRFKDSLGNPTHILRIGESYKEKQRTIQAKKEVEQRRAGGYSRKYASKAKNLADDMVRNTARDLLYYAVTQDAMLIFENLSRGFGRQGKRTFMAERQYTRMEDWLTAKLAYEGLPSKTYLSKTLAQYTSKTCSNCGFTITSADYDRVLEKLKKTATGWMTTINGKELKVEGQITYYNRYKRQNVVKDLSVELDRLSEESVNNDISSWTKGRSGEALSLLKKRFSHRPVQEKFVCLNCGFETHADEQAALNIARSWLFLRSQEYKKYQTNKTTGNTDKRAFVETWQSFYRKKLKEVWKPAV

SEQ ID NO: 39356 - protein, 978 aa, synthetic construct
  REGION 1..978: note = engineered CasX variant
QEIKRINKIRRRLVKDSNTKKAGKTGPMKTLLVRVMTPDLRERLENLRKKPENIPQPISNTSRANLNKLLTDYTEMKKAILHVYWEEFQKDPVGLMSRVAQPASKKIDQNKLKPEMDEKGNLTTAGFACSQCGQPLFVYKLEQVSEKGKAYTNYFGRCNVAEHEKLILLAQLKPEKDSDEAVTYSLGKFGQRALDFYSIHVTKESTHPVKPLAQIAGNRYASSPVGKALRDACMGTIASFLSKYQDIIIEHQKVVKGNQKRLESLRELAGKENLEYPSVTLPPQPHTKEGVDAYNEVIARVRWWVNLNLWQKLKLSRDDAKPLLRLKGFPSFPLVERQANEVDWWDMVCNVKKLINEKKEDGKVFWQNLAGYKRQEALRPYLSSEEDRKKGKKFARYQLGDLLLHLEKKHGEDWGKVYDEAWERIDKKVEGLSKHIKLEEERRSEDAQSKAALTDWLRAKASFVIEGLKEADKDEFCRCELKLQKWYGDLRGKPFAIEAENSILDISGFSKQYNCAFIWQKDGVKKLNLYLIINYFKGGKLRFKKIKPEAFEANRFYTVINKKSGEIVPMEVNFNFDDPNLIILPLAFGKRQGREFIWNDLLSLETGSLKLANGRVIEKTLYNRRTRQDEPALFVALTFERREVLDSSNIKPMNLIGVDRGENIPAVIALTDPEGCPLSRFKDSLGNPTHILRIGESYKEKQRTIQAKKEVEQRRAGGYSRKYASKAKNLADDMVRNTARDLLYYAVTQDAMLIFENLSRGFGRQGKRTFMAERQYTRMEDWLTAKLAYEGLPSKTYLSKTLAQYTSKTCSNCGFTITSADYDRVLEKLKKTATGWMTTINGKELKVEGQITYYNRYKRQNVVKDLSVELDRLSEESVNNDISSWTKGRSGEALSLLKKRFSHRPVQEKFVCLNCGFETHADEQAALNIARSWLFLRSQEYKKYQTNKTTGNTDKRAFVETWQSFYRKKLKEVWKPAV

SEQ ID NO: 39357 - protein, 979 aa, synthetic construct
  REGION 1..979: note = engineered CasX variant
QEIKRINKIRRRLVKDSNTKKAGKTGPMKTLLVRVMTPDLRERLENLRKKPENIPQPISNTSRANLNKLLTDYTEMKKAILHVYWEEFQKDPVGLMSRVAQPASKKIDQNKLKPEMDEKGNLTTAGFACSQCGQPLFVYKLEQVSEKGKAYTNYFGRCNVAEHEKLILLAQLKPEKDSDEAVTYSLGKFGQRALDFYSIHVTKESTHPVKPLAQIAGNRYASSPVGKALRDACMGTIASFLSKYQDIIIEHQKVVKGNQKRLESLRELAGKENLEYPSVTLPPQPHTKEGVDAYNEVIARVRMWVNLNLWQKLKLSRDDAKPLLRLKGFPSFPLVERQQANEVDWWDMVCNVKKLINEKKEDGKVFWQNLAGYKRQEALRPYLSSEEDRKKGKKFARYQLGDLLLHLEKKHGEDWGKVYDEAWERIDKKVEGLSKHIKLEEERRSEDAQSKAALTDWLRAKASFVIEGLKEADKDEFCRCELKLQKWYGDLRGKPFAIEAENSILDISGFSKQYNCAFIWQKDGVKKLNLYLIINYFKGGKLRFKKIKPEAFEANRFYTVINKKSGEIVPMEVNFNFDDPNLIILPLAFGKRQGREFIWNDLLSLETGSLKLANGRVIEKTLYNRRTRQDEPALFVALTFERREVLDSSNIKPMNLIGVDRGENIPAVIALTDPEGCPLSRFKDSLGNPTHILRIGESYKEKQRTIQAKKEVEQRRAGGYSRKYASKAKNLADDMVRNTARDLLYYAVTQDAMLIFENLSRGFGRQGKRTFMAERQYTRMEDWLTAKLAYEGLPSKTYLSKTLAQYTSKTCSNCGFTITSADYDRVLEKLKKTATGWMTTINGKELKVEGQITYYNRYKRQNVVKDLSVELDRLSEESVNNDISSWTKGRSGEALSLLKKRFSHRPVQEKFVCLNCGFETHADEQAALNIARSWLFLRSQEYKKYQTNKTTGNTDKRAFVETWQSFYRKKLKEVWKPAV

SEQ ID NO: 39358 - protein, 979 aa, synthetic construct
  REGION 1..979: note = engineered CasX variant
QEIKRINKIRRRLVKDSNTKKAGKTGPMKTLLVRVMTPDLRERLENLRKKPENIPQPISNTSRANLNKLLTDYTEMKKAILHVYWEEFQKDPVGLMSRVAQPASKKIDQNKLKPEMDEKGNLTTAGFACSQCGQPLFVYKLEQVSEKGKAYTNYFGRCNVAEHEKLILLAQLKPEKDSDEAVTYSLGKFGQRALDFYSIHVTKESTHPVKPLAQIAGNRYASSPVGKALRDACMGTIASFLSKYQDIIIEHQKVVKGNQKRLESLRELAGKENLEYPSVTLPPQPHTKEGVDAYNEVIARVRMWVNLNLWQKLKLSRDDAKPLLRLKGFPSFPLVERQANAEVDWWDMVCNVKKLINEKKEDGKVFWQNLAGYKRQEALRPYLSSEEDRKKGKKFARYQLGDLLLHLEKKHGEDWGKVYDEAWERIDKKVEGLSKHIKLEEERRSEDAQSKAALTDWLRAKASFVIEGLKEADKDEFCRCELKLQKWYGDLRGKPFAIEAENSILDISGFSKQYNCAFIWQKDGVKKLNLYLIINYFKGGKLRFKKIKPEAFEANRFYTVINKKSGEIVPMEVNFNFDDPNLIILPLAFGKRQGREFIWNDLLSLETGSLKLANGRVIEKTLYNRRTRQDEPALFVALTFERREVLDSSNIKPMNLIGVDRGENIPAVIALTDPEGCPLSRFKDSLGNPTHILRIGESYKEKQRTIQAKKEVEQRRAGGYSRKYASKAKNLADDMVRNTARDLLYYAVTQDAMLIFENLSRGFGRQGKRTFMAERQYTRMEDWLTAKLAYEGLPSKTYLSKTLAQYTSKTCSNCGFTITSADYDRVLEKLKKTATGWMTTINGKELKVEGQITYYNRYKRQNVVKDLSVELDRLSEESVNNDISSWTKGRSGEALSLLKKRFSHRPVQEKFVCLNCGFETHADEQAALNIARSWLFLRSQEYKKYQTNKTTGNTDKRAFVETWQSFYRKKLKEVWKPAV

SEQ ID NO: 39359 - protein, 978 aa, synthetic construct
  REGION 1..978: note = engineered CasX variant
QEIKRINKIRRRLVKDSNTKKAGKTGPMKTLLVRVMTPDLRERLENLRKKPENIPQPISNTSRANLNKLLTDYTEMKKAILHVYWEEFQKDPVGLMSRVAQPASKKIDQNKLKPEMDEKGNLTTAGFACSQCGQPLFVYKLEQVSEKGKAYTNYFGRCNVAEHEKLILLAQLKPEKDSDEAVTYSLGKFGQRALDFYSIHVTKESTHPVKPLAQIAGNRYASSPVGKALRDACMGTIASFLSKYQDIIIEHQKVVKGNQKRLESLRELAGKENLEYPSVTLPPQPHTKEGVDAYNEVIARVRMWVNLNLWQKLKLSRDDAKPLLRLKGFPSFPLVERQANEVDWWDMVCNVKKLINEKKEDGKVFWQNLAGYKRQEALRPYLSSEEDRKKGKKFARTQLGDLLLHLEKKHGEDWGKVYDEAWERIDKKVEGLSKHIKLEEERRSEDAQSKAALTDWLRAKASFVIEGLKEADKDEFCRCELKLQKWYGDLRGKPFAIEAENSILDISGFSKQYNCAFIWQKDGVKKLNLYLIINYFKGGKLRFKKIKPEAFEANRFYTVINKKSGEIVPMEVNFNFDDPNLIILPLAFGKRQGREFIWNDLLSLETGSLKLANGRVIEKTLYNRRTRQDEPALFVALTFERREVLDSSNIKPMNLIGVDRGENIPAVIALTDPEGCPLSRFKDSLGNPTHILRIGESYKEKQRTIQAKKEVEQRRAGGYSRKYASKAKNLADDMVRNTARDLLYYAVTQDAMLIFENLSRGFGRQGKRTFMAERQYTRMEDWLTAKLAYEGLPSKTYLSKTLAQYTSKTCSNCGFTITSADYDRVLEKLKKTATGWMTTINGKELKVEGQITYYNRYKRQNVVKDLSVELDRLSEESVNNDISSWTKGRSGEALSLLKKRFSHRPVQEKFVCLNCGFETHADEQAALNIARSWLFLRSQEYKKYQTNKTTGNTDKRAFVETWQSFYRKKLKEVWKPAV

SEQ ID NO: 39360 - protein, 979 aa, synthetic construct
  REGION 1..979: note = engineered CasX variant
QEIKRINKIRRRLVKDSNTKKAGKTGPMKTLLVRVMTPDLRERLENLRKKPENIPQPISNTSRANLNKLLTDYTEMKKAILHVYWEEFQKDPVGLMSRVAQPASKKIDQNKLKPEMDEKGNLTTAGFACSQCGQPLFVYKLEQVSEKGKAYTNYFGRCNVAEHEKLILLAQLKPEKDSDEAVTYSLGKFGQRALDFYSIHVTKESTHPVKPLAQIAGNRYASSPVGKALRDACMGTIASFLSKYQDIIIEHQKVVKGNQKRLESLRELAGKENLEYPSVTLPPQPHTKEGVDAYNEVIARVRMWVNLNLWQKLKLSRDDAKPLLRLKGFPSFPLVERQANEVDWWDMVCNVKKLINEKKEDGKVFWQNLAGYKRQEALRPYLSSEEDRKKGKKFARYQLGDLLLHLEKKHEGEDWGKVYDEAWERIDKKVEGLSKHIKLEEERRSEDAQSKAALTDWLRAKASFVIEGLKEADKDEFCRCELKLQKWYGDLRGKPFAIEAENSILDISGFSKQYNCAFIWQKDGVKKLNLYLIINYFKGGKLRFKKIKPEAFEANRFYTVINKKSGEIVPMEVNFNFDDPNLIILPLAFGKRQGREFIWNDLLSLETGSLKLANGRVIEKTLYNRRTRQDEPALFVALTFERREVLDSSNIKPMNLIGVDRGENIPAVIALTDPEGCPLSRFKDSLGNPTHILRIGESYKEKQRTIQAKKEVEQRRAGGYSRKYASKAKNLADDMVRNTARDLLYYAVTQDAMLIFENLSRGFGRQGKRTFMAERQYTRMEDWLTAKLAYEGLPSKTYLSKTLAQYTSKTCSNCGFTITSADYDRVLEKLKKTATGWMTTINGKELKVEGQITYYNRYKRQNVVKDLSVELDRLSEESVNNDISSWTKGRSGEALSLLKKRFSHRPVQEKFVCLNCGFETHADEQAALNIARSWLFLRSQEYKKYQTNKTTGNTDKRAFVETWQSFYRKKLKEVWKPAV

SEQ ID NO: 39361 - protein, 978 aa, synthetic construct
  REGION 1..978: note = engineered CasX variant
QEIKRINKIRRRLVKDSNTKKAGKTGPMKTLLVRVMTPDLRERLENLRKKPENIPQPISNTSRANLNKLLTDYTEMKKAILHVYWEEFQKDPVGLMSRVAQPASKKIDQNKLKPEMDEKGNLTTAGFACSQCGQPLFVYKLEQVSEKGKAYTNYFGRCNVAEHEKLILLAQLKPEKDSDEAVTYSLGKFGQRALDFYSIHVTKESTHPVKPLAQIAGNRYASSPVGKALRDACMGTIASFLSKYQDIIIEHQKVVKGNQKRLESLRELAGKENLEYPSVTLPPQPHTKEGVDAYNEVIARVRMWVNLNLWQKLKLSRDDAKPLLRLKGFPSFPLVERQANEVDWWDMVCNVKKLINEKKEDGKVFWQNLAGYKRQEALRPYLSSEEDRKKGKKFARYQLGDLLLHLEKKHGEDWGKVYDEAWERIDKKVEGLSKHIKLEEERRSEDAQSKAALTDWLRAKASFVIEGLKEADKDEFCRCDLKLQKWYGDLRGKPFAIEAENSILDISGFSKQYNCAFIWQKDGVKKLNLYLIINYFKGGKLRFKKIKPEAFEANRFYTVINKKSGEIVPMEVNFNFDDPNLIILPLAFGKRQGREFIWNDLLSLETGSLKLANGRVIEKTLYNRRTRQDEPALFVALTFERREVLDSSNIKPMNLIGVDRGENIPAVIALTDPEGCPLSRFKDSLGNPTHILRIGESYKEKQRTIQAKKEVEQRRAGGYSRKYASKAKNLADDMVRNTARDLLYYAVTQDAMLIFENLSRGFGRQGKRTFMAERQYTRMEDWLTAKLAYEGLPSKTYLSKTLAQYTSKTCSNCGFTITSADYDRVLEKLKKTATGWMTTINGKELKVEGQITYYNRYKRQNVVKDLSVELDRLSEESVNNDISSWTKGRSGEALSLLKKRFSHRPVQEKFVCLNCGFETHADEQAALNIARSWLFLRSQEYKKYQTNKTTGNTDKRAFVETWQSFYRKKLKEVWKPAV

SEQ ID NO: 39362 - protein, 978 aa, synthetic construct
  REGION 1..978: note = engineered CasX variant
QEIKRINKIRRRLVKDSNTKKAGKTGPMKTLLVRVMTPDLRERLENLRKKPENIPQPISNTSRANLNKLLTDYTEMKKAILHVYWEEFQKDPVGLMSRVAQPASKKIDQNKLKPEMDEKGNLTTAGFACSQCGQPLFVYKLEQVSEKGKAYTNYFGRCNVAEHEKLILLAQLKPEKDSDEAVTYSLGKFGQRALDFYSIHVTKESTHPVKPLAQIAGNRYASSPVGKALRDACMGTIASFLSKYQDIIIEHQKVVKGNQKRLESLRELAGKENLEYPSVTLPPQPHTKEGVDAYNEVIARVRMWVNLNLWQKLKLSRDDAKPLLRLKGFPSFPLVERQANEVDWWDMVCNVKKLINEKKEDGKVFWQNLAGYKRQEALRPYLSSEEDRKKGKKFARYQLGDLLLHLEKKHGEDWGKVYDEAWERIDKKVEGLSKHIKLEEERRSEDAQSKAALTDWLRAKASFVIEGLKEADKDEFCRCELKLQKWYGDLRGKPFAIEAENSILDISGFSKQYNCAFIWQKDGVKKLNLYLIINYFKGGKLRFKKIKPEAFEANRFYTVINKKSGEIVPMEVNFNFDDPNLIILPLAFGKRFGREFIWNDLLSLETGSLKLANGRVIEKTLYNRRTRQDEPALFVALTFERREVLDSSNIKPMNLIGVDRGENIPAVIALTDPEGCPLSRFKDSLGNPTHILRIGESYKEKQRTIQAKKEVEQRRAGGYSRKYASKAKNLADDMVRNTARDLLYYAVTQDAMLIFENLSRGFGRQGKRTFMAERQYTRMEDWLTAKLAYEGLPSKTYLSKTLAQYTSKTCSNCGFTITSADYDRVLEKLKKTATGWMTTINGKELKVEGQITYYNRYKRQNVVKDLSVELDRLSEESVNNDISSWTKGRSGEALSLLKKRFSHRPVQEKFVCLNCGFETHADEQAALNIARSWLFLRSQEYKKYQTNKTTGNTDKRAFVETWQSFYRKKLKEVWKPAV

SEQ ID NO: 39363 - protein, 978 aa, synthetic construct
  REGION 1..978: note = engineered CasX variant
QEIKRINKIRRRLVKDSNTKKAGKTGPMKTLLVRVMTPDLRERLENLRKKPENIPQPISNTSRANLNKLLTDYTEMKKAILHVYWEEFQKDPVGLMSRVAQPASKKIDQNKLKPEMDEKGNLTTAGFACSQCGQPLFVYKLEQVSEKGKAYTNYFGRCNVAEHEKLILLAQLKPEKDSDEAVTYSLGKFGQRALDFYSIHVTKESTHPVKPLAQIAGNRYASSPVGKALRDACMGTIASFLSKYQDIIIEHQKVVKGNQKRLESLRELAGKENLEYPSVTLPPQPHTKEGVDAYNEVIARVRMWVNLNLWQKLKLSRDDAKPLLRLKGFPSFPLVERQANEVDWWDMVCNVKKLINEKKEDGKVFWQNLAGYKRQEALRPYLSSEEDRKKGKKFARYQLGDLLLHLEKKHGEDWGKVYDEAWERIDKKVEGLSKHIKLEEERRSEDAQSKAALTDWLRAKASFVIEGLKEADKDEFCRCELKLQKWYGDLRGKPFAIEAENSILDISGFSKQYNCAFIWQKDGVKKLNLYLIINYFKGGKLRFKKIKPEAFEANRFYTVINKKSGEIVPMEVNFNFDDPNLIILPLAFGKRVGREFIWNDLLSLETGSLKLANGRVIEKTLYNRRTRQDEPALFVALTFERREVLDSSNIKPMNLIGVDRGENIPAVIALTDPEGCPLSRFKDSLGNPTHILRIGESYKEKQRTIQAKKEVEQRRAGGYSRKYASKAKNLADDMVRNTARDLLYYAVTQDAMLIFENLSRGFGRQGKRTFMAERQYTRMEDWLTAKLAYEGLPSKTYLSKTLAQYTSKTCSNCGFTITSADYDRVLEKLKKTATGWMTTINGKELKVEGQITYYNRYKRQNVVKDLSVELDRLSEESVNNDISSWTKGRSGEALSLLKKRFSHRPVQEKFVCLNCGFETHADEQAALNIARSWLFLRSQEYKKYQTNKTTGNTDKRAFVETWQSFYRKKLKEVWKPAV

SEQ ID NO: 39364 - protein, 979 aa, synthetic construct
  REGION 1..979: note = engineered CasX variant
QEIKRINKIRRRLVKDSNTKKAGKTGPMKTLLVRVMTPDLRERLENLRKKPENIPQPISNTSRANLNKLLTDYTEMKKAILHVYWEEFQKDPVGLMSRVAQPASKKIDQNKLKPEMDEKGNLTTAGFACSQCGQPLFVYKLEQVSEKGKAYTNYFGRCNVAEHEKLILLAQLKPEKDSDEAVTYSLGKFGQRALDFYSIHVTKESTHPVKPLAQIAGNRYASSPVGKALRDACMGTIASFLSKYQDIIIEHQKVVKGNQKRLESLRELAGKENLEYPSVTLPPQPHTKEGVDAYNEVIARVRMWVNLNLWQKLKLSRDDAKPLLRLKGFPSFPLVERQANEVDWWDMVCNVKKLINEKKEDGKVFWQNLAGYKRQEALRPYLSSEEDRKKGKKFARYQLGDLLLHLEKKHGEDWGKVYDEAWERIDKKVEGLSKHIKLEEERRSEDAQSKAALTDWLRAKASFVIEGLKEADKDEFCRCELKLQKWYGDLRGKPFAIEAENSILDISGFSKQYNCAFIWQKDGVKKLNLYLIINYFKGGKLRFKKIKPEAFEANRFYTVINKKSGEIVPMEVNFNFDDPNLIILPLAFGKRQGREFIWNDLLSLETGSLKLANGRVIEKTLYNRRTRQDEPALFVALTFERREVLDSSNIKTPMNLIGVDRGENIPAVIALTDPEGCPLSRFKDSLGNPTHILRIGESYKEKQRTIQAKKEVEQRRAGGYSRKYASKAKNLADDMVRNTARDLLYYAVTQDAMLIFENLSRGFGRQGKRTFMAERQYTRMEDWLTAKLAYEGLPSKTYLSKTLAQYTSKTCSNCGFTITSADYDRVLEKLKKTATGWMTTINGKELKVEGQITYYNRYKRQNVVKDLSVELDRLSEESVNNDISSWTKGRSGEALSLLKKRFSHRPVQEKFVCLNCGFETHADEQAALNIARSWLFLRSQEYKKYQTNKTTGNTDKRAFVETWQSFYRKKLKEVWKPAV

SEQ ID NO: 39365 - protein, 979 aa, synthetic construct
  REGION 1..979: note = engineered CasX variant
QEIKRINKIRRRLVKDSNTKKAGKTGPMKTLLVRVMTPDLRERLENLRKKPENIPQPISNTSRANLNKLLTDYTEMKKAILHVYWEEFQKDPVGLMSRVAQPASKKIDQNKLKPEMDEKGNLTTAGFACSQCGQPLFVYKLEQVSEKGKAYTNYFGRCNVAEHEKLILLAQLKPEKDSDEAVTYSLGKFGQRALDFYSIHVTKESTHPVKPLAQIAGNRYASSPVGKALRDACMGTIASFLSKYQDIIIEHQKVVKGNQKRLESLRELAGKENLEYPSVTLPPQPHTKEGVDAYNEVIARVRMWVNLNLWQKLKLSRDDAKPLLRLKGFPSFPLVERQANEVDWWDMVCNVKKLINEKKEDGKVFWQNLAGYKRQEALRPYLSSEEDRKKGKKFARYQLGDLLLHLEKKHGEDWGKVYDEAWERIDKKVEGLSKHIKLEEERRSEDAQSKAALTDWLRAKASFVIEGLKEADKDEFCRCELKLQKWYGDLRGKPFAIEAENSILDISGFSKQYNCAFIWQKDGVKKLNLYLIINYFKGGKLRFKKIKPEAFEANRFYTVINKKSGEIVPMEVNFNFDDPNLIILPLAFGKRQGREFIWNDLLSLETGSLKLANGRVIEKTLYNRRTRQDEPALFVALTFERREVLDSSNIKPMSNLIGVDRGENIPAVIALTDPEGCPLSRFKDSLGNPTHILRIGESYKEKQRTIQAKKEVEQRRAGGYSRKYASKAKNLADDMVRNTARDLLYYAVTQDAMLIFENLSRGFGRQGKRTFMAERQYTRMEDWLTAKLAYEGLPSKTYLSKTLAQYTSKTCSNCGFTITSADYDRVLEKLKKTATGWMTTINGKELKVEGQITYYNRYKRQNVVKDLSVELDRLSEESVNNDISSWTKGRSGEALSLLKKRFSHRPVQEKFVCLNCGFETHADEQAALNIARSWLFLRSQEYKKYQTNKTTGNTDKRAFVETWQSFYRKKLKEVWKPAV

SEQ ID NO: 39366 - protein, 978 aa, synthetic construct
  REGION 1..978: note = engineered CasX variant
QEIKRINKIRRRLVKDSNTKKAGKTGPMKTLLVRVMTPDLRERLENLRKKPENIPQPISNTSRANLNKLLTDYTEMKKAILHVYWEEFQKDPVGLMSRVAQPASKKIDQNKLKPEMDEKGNLTTAGFACSQCGQPLFVYKLEQVSEKGKAYTNYFGRCNVAEHEKLILLAQLKPEKDSDEAVTYSLGKFGQRALDFYSIHVTKESTHPVKPLAQIAGNRYASSPVGKALRDACMGTIASFLSKYQDIIIEHQKVVKGNQKRLESLRELAGKENLEYPSVTLPPQPHTKEGVDAYNEVIARVRMWVNLNLWQKLKLSRDDAKPLLRLKGFPSFPLVERQANEVDWWDMVCNVKKLINEKKEDGKVFWQNLAGYKRQEALRPYLSSEEDRKKGKKFARYQLGDLLLHLEKKHGEDWGKVYDEAWERIDKKVEGLSKHIKLEEERRSEDAQSKAALTDWLRAKASFVIEGLKEADKDEFCRCELKLQKWYGDLRGKPFAIEAENSILDISGFSKQYNCAFIWQKDGVKKLNLYLIINYFKGGKLRFKKIKPEAFEANRFYTVINKKSGEIVPMEVNFNFDDPNLIILPLAFGKRQGREFIWNDLLSLETGSLKLANGRVIEKTLYNRRTRQDEPALFVALTFERREVLDSSNIKPMNLIGVDRGENIPAVIALTDPEGCPLSRFKDSLGNPTHILRIRESYKEKQRTIQAKKEVEQRRAGGYSRKYASKAKNLADDMVRNTARDLLYYAVTQDAMLIFENLSRGFGRQGKRTFMAERQYTRMEDWLTAKLAYEGLPSKTYLSKTLAQYTSKTCSNCGFTITSADYDRVLEKLKKTATGWMTTINGKELKVEGQITYYNRYKRQNVVKDLSVELDRLSEESVNNDISSWTKGRSGEALSLLKKRFSHRPVQEKFVCLNCGFETHADEQAALNIARSWLFLRSQEYKKYQTNKTTGNTDKRAFVETWQSFYRKKLKEVWKPAV

SEQ ID NO: 39367 - protein, 978 aa, synthetic construct
  REGION 1..978: note = engineered CasX variant
QEIKRINKIRRRLVKDSNTKKAGKTGPMKTLLVRVMTPDLRERLENLRKKPENIPQPISNTSRANLNKLLTDYTEMKKAILHVYWEEFQKDPVGLMSRVAQPASKKIDQNKLKPEMDEKGNLTTAGFACSQCGQPLFVYKLEQVSEKGKAYTNYFGRCNVAEHEKLILLAQLKPEKDSDEAVTYSLGKFGQRALDFYSIHVTKESTHPVKPLAQIAGNRYASSPVGKALRDACMGTIASFLSKYQDIIIEHQKVVKGNQKRLESLRELAGKENLEYPSVTLPPQPHTKEGVDAYNEVIARVRMWVNLNLWQKLKLSRDDAKPLLRLKGFPSFPLVERQANEVDWWDMVCNVKKLINEKKEDGKVFWQNLAGYKRQEALRPYLSSEEDRKKGKKFARYQLGDLLLHLEKKHGEDWGKVYDEAWERIDKKVEGLSKHIKLEEERRSEDAQSKAALTDWLRAKASFVIEGLKEADKDEFCRCELKLQKWYGDLRGKPFAIEAENSILDISGFSKQYNCAFIWQKDGVKKLNLYLIINYFKGGKLRFKKIKPEAFEANRFYTVINKKSGEIVPMEVNFNFDDPNLIILPLAFGKRQGREFIWNDLLSLETGSLKLANGRVIEKTLYNRRTRQDEPALFVALTFERREVLDSSNIKPMNLIGVDRGENIPAVIALTDPEGCPLSRFKDSLGNPTHILRIGESYKEKQRTIQAKKEVEQRRAGGYSRKYASKAKNLADDMVRNTARDLLYYAVTQDAMLIFENLSRGFGRQGKRTFSAERQYTRMEDWLTAKLAYEGLPSKTYLSKTLAQYTSKTCSNCGFTITSADYDRVLEKLKKTATGWMTTINGKELKVEGQITYYNRYKRQNVVKDLSVELDRLSEESVNNDISSWTKGRSGEALSLLKKRFSHRPVQEKFVCLNCGFETHADEQAALNIARSWLFLRSQEYKKYQTNKTTGNTDKRAFVETWQSFYRKKLKEVWKPAV

SEQ ID NO: 39368 - protein, 978 aa, synthetic construct
  REGION 1..978: note = engineered CasX variant
QEIKRINKIRRRLVKDSNTKKAGKTGPMKTLLVRVMTPDLRERLENLRKKPENIPQPISNTSRANLNKLLTDYTEMKKAILHVYWEEFQKDPVGLMSRVAQPASKKIDQNKLKPEMDEKGNLTTAGFACSQCGQPLFVYKLEQVSEKGKAYTNYFGRCNVAEHEKLILLAQLKPEKDSDEAVTYSLGKFGQRALDFYSIHVTKESTHPVKPLAQIAGNRYASSPVGKALRDACMGTIASFLSKYQDIIIEHQKVVKGNQKRLESLRELAGKENLEYPSVTLPPQPHTKEGVDAYNEVIARVRMWVNLNLWQKLKLSRDDAKPLLRLKGFPSFPLVERQANEVDWWDMVCNVKKLINEKKEDGKVFWQNLAGYKRQEALRPYLSSEEDRKKGKKFARYQLGDLLLHLEKKHGEDWGKVYDEAWERIDKKVEGLSKHIKLEEERRSEDAQSKAALTDWLRAKASFVIEGLKEADKDEFCRCELKLQKWYGDLRGKPFAIEAENSILDISGFSKQYNCAFIWQKDGVKKLNLYLIINYFKGGKLRFKKIKPEAFEANRFYTVINKKSGEIVPMEVNFNFDDPNLIILPLAFGKRQGREFIWNDLLSLETGSLKLANGRVIEKTLYNRRTRQDEPALFVALTFERREVLDSSNIKPMNLIGVDRGENIPAVIALTDPEGCPLSRFKDSLGNPTHILRIGESYKEKQRTIQAKKEVEQRRAGGYSRKYASKAKNLADDMVRNTARDLLYYAVTQDAMLIFENLSRGFGRQGKRTFMAERQYTRMEDWLTAKLAYEGLPSKTYLSKTLAQYTSKTCSNCGFTITSADYDRVLEKLKKTATGWMTTINGKELKVEGQITYYNRYKRQNVVKDLSVELDRLSEESVNNDISSWDKGRSGEALSLLKKRFSHRPVQEKFVCLNCGFETHADEQAALNIARSWLFLRSQEYKKYQTNKTTGNTDKRAFVETWQSFYRKKLKEVWKPAV

SEQ ID NO: 39369 - protein, 978 aa, synthetic construct
  REGION 1..978: note = engineered CasX variant
QEIKRINKIRRRLVKDSNTKKAGKTGPMKTLLVRVMTPDLRERLENLRKKPENIPQPISNTSRANLNKLLTDYTEMKKAILHVYWEEFQVDPVGLMSRVAQPASKKIDQNKLKPEMDEKGNLTTAGFACSQCGQPLFVYKLEQVSEKGKAYTNYFGRCNVAEHEKLILLAQLKPEKDSDEAVTYSLGKFGQRALDFYSIHVTKESTHPVKPLAQIAGNRYASSPVGKALRDACMGTIASFLSKYQDIIIEHQKVVKGNQKRLESLRELAGKENLEYPSVTLPPQPHTKEGVDAYNEVIARVRMWVNLNLWQKLKLSRDDAKPLLRLKGFPSFPLVERQANEVDWWDMVCNVKKLINEKKEDGKVFWQNLAGYKRQEALRPYLSSEEDRKKGKKFARYQLGDLLLHLEKKHGEDWGKVYDEAWERIDKKVEGLSKHIKLEEERRSEDAQSKAALTDWLRAKASFVIEGLKEADKDEFCRCELKLQKWYGDLRGKPFAIEAENSILDISGFSKQYNCAFIWQKDGVKKLNLYLIINYFKGGKLRFKKIKPEAFEANRFYTVINKKSGEIVPMEVNFNFDDPNLIILPLAFGKRQGREFIWNDLLSLETGSLKLANGRVIEKTLYNRRTRQDEPALFVALTFERREVLDSSNIKPMNLIGVDRGENIPAVIALTDPEGCPLSRFKDSLGNPTHILRIGESYKEKQRTIQAKKEVEQRRAGGYSRKYASKAKNLADDMVRNTARDLLYYAVTQDAMLIFENLSRGFGRQGKRTFMAERQYTRMEDWLTAKLAYEGLPSKTYLSKTLAQYTSKTCSNCGFTITSADYDRVLEKLKKTATGWMTTINGKELKVEGQITYYNRYKRQNVVKDLSVELDRLSEESVNNDISSWTKGRSGEALSLLKKRFSHRPVQEKFVCLNCGFETHADEQAALNIARSWLFLRSQEYKKYQTNKTTGNTDKRAFVETWQSFYRKKLKEVWKPAV

SEQ ID NO: 39370 - protein, 978 aa, synthetic construct
  REGION 1..978: note = engineered CasX variant
QEIKRLNKIRRRLVKDSNTKKAGKTGPMKTLLVRVMTPDLRERLENLRKKPENIPQPISNTSRANLNKLLTDYTEMKKAILHVYWEEFQKDPVGLMSRVAQPASKKIDQNKLKPEMDEKGNLTTAGFACSQCGQPLFVYKLEQVSEKGKAYTNYFGRCNVAEHEKLILLAQLKPEKDSDEAVTYSLGKFGQRALDFYSIHVTKESTHPVKPLAQIAGNRYASSPVGKALRDACMGTIASFLSKYQDIIIEHQKVVKGNQKRLESLRELAGKENLEYPSVTLPPQPHTKEGVDAYNEVIARVRMWVNLNLWQKLKLSRDDAKPLLRLKGFPSFPLVERQANEVDWWDMVCNVKKLINEKKEDGKVFWQNLAGYKRQEALRPYLSSEEDRKKGKKFARYQLGDLLLHLEKKHGEDWGKVYDEAWERIDKKVEGLSKHIKLEEERRSEDAQSKAALTDWLRAKASFVIEGLKEADKDEFCRCELKLQKWYGDLRGKPFAIEAENSILDISGFSKQYNCAFIWQKDGVKKLNLYLIINYFKGGKLRFKKIKPEAFEANRFYTVINKKSGEIVPMEVNFNFDDPNLIILPLAFGKRQGREFIWNDLLSLETGSLKLANGRVIEKTLYNRRTRQDEPALFVALTFERREVLDSSNIKPMNLIGVDRGENIPAVIALTDPEGCPLSRFKDSLGNPTHILRIGESYKEKQRTIQAKKEVEQRRAGGYSRKYASKAKNLADDMVRNTARDLLYYAVTQDAMLIFENLSRGFGRQGKRTFMAERQYTRMEDWLTAKLAYEGLPSKTYLSKTLAQYTSKTCSNCGFTITSADYDRVLEKLKKTATGWMTTINGKELKVEGQITYYNRYKRQNVVKDLSVELDRLSEESVNNDISSWTKGRSGEALSLLKKRFSHRPVQEKFVCLNCGFETHADEQAALNIARSWLFLRSQEYKKYQTNKTTGNTDKRAFVETWQSFYRKKLKEVWKPAV

SEQ ID NO: 39371 - protein, 978 aa, synthetic construct
  REGION 1..978: note = engineered CasX variant
QEIKRINKIRRRLVKDSNTKKAGKTGPMKTLLVRVMTPDLRERLENLRKKPENIPQPISNTSRANLNKLLTDYTEMKKAILHVYWEEFQKDPVGLMSRVAQPASKKIDQNKLKPEMDEKGNLTTAGFACSQCGQPLFVYKLEQVSEKGKAYTNYVGRCNVAEHEKLILLAQLKPEKDSDEAVTYSLGKFGQRALDFYSIHVTKESTHPVKPLAQIAGNRYASSPVGKALRDACMGTIASFLSKYQDIIIEHQKVVKGNQKRLESLRELAGKENLEYPSVTLPPQPHTKEGVDAYNEVIARVRMWVNLNLWQKLKLSRDDAKPLLRLKGFPSFPLVERQANEVDWWDMVCNVKKLINEKKEDGKVFWQNLAGYKRQEALRPYLSSEEDRKKGKKFARYQLGDLLLHLEKKHGEDWGKVYDEAWERIDKKVEGLSKHIKLEEERRSEDAQSKAALTDWLRAKASFVIEGLKEADKDEFCRCELKLQKWYGDLRGKPFAIEAENSILDISGFSKQYNCAFIWQKDGVKKLNLYLIINYFKGGKLRFKKIKPEAFEANRFYTVINKKSGEIVPMEVNFNFDDPNLIILPLAFGKRQGREFIWNDLLSLETGSLKLANGRVIEKTLYNRRTRQDEPALFVALTFERREVLDSSNIKPMNLIGVDRGENIPAVIALTDPEGCPLSRFKDSLGNPTHILRIGESYKEKQRTIQAKKEVEQRRAGGYSRKYASKAKNLADDMVRNTARDLLYYAVTQDAMLIFENLSRGFGRQGKRTFMAERQYTRMEDWLTAKLAYEGLPSKTYLSKTLAQYTSKTCSNCGFTITSADYDRVLEKLKKTATGWMTTINGKELKVEGQITYYNRYKRQNVVKDLSVELDRLSEESVNNDISSWTKGRSGEALSLLKKRFSHRPVQEKFVCLNCGFETHADEQAALNIARSWLFLRSQEYKKYQTNKTTGNTDKRAFVETWQSFYRKKLKEVWKPAV

SEQ ID NO: 39372 - protein, 978 aa, synthetic construct
  REGION 1..978: note = engineered CasX variant
QEIKRINKIRRRLVKDSNTKKAGKTGPMKTLLVRVMTPDLRERLENLRKKPENIPQPISNTSRANLNKLLTDYTEMKKAILHVYWEEFQKDPVGLMSRVAQPASKKIDQNKLKPEMDEKGNLTTAGFACSQCGQPLFVYKLEQVSEKGKAYTNYFGRCNVAEHEKLILLAQLKPEKDSDEAVTYSLGKFGQRALDFYSIHVTKESTHPVKPLAQIAGNRYASSPVGKALRDACMGTIASFLSKYQDIIIEHQKVVKGNQKRLESLRELAGKENLEYPSVTLPPQPHTKEGVDAYNEVIARVRMWVNLNLWQKLKLSRDDAKPLLRLKGFPSFPLVERQANEVDWWDMVCNVKKLINEKKEDGKVFWQNLAGYKRQEALRPYLSSEEDRKKGKKFARYQLGDLLLHLEKKHGEDWGKVYDEAWERIDKKVEGLSKHIKLEEERRSEDAQSKAALTDWLRAKASFVIEGLKEADKDEFCRCELKLQKWYGDLRGKPFAIEAENSILDISGFSKQYNCAFIWQKDGVKKLNLYLIINYFKGGKLRFKKIKPEAFEANRFYTVINKKSGEIVPMEVNFNFDDPNLIILPLAFGKRQGREFIWNDLLSLETGSLKLANGRVIEKTLYNRRTRQDEPALFVALTFERREVLDSSNIKPMNLIGVDRGENIPAVIALTDPEGCPLSRFKDSLGNPTHILRIGESYKEKQRTIQAKKEVEQRRAGGYSRKYASKAKNLADDMVRNTARDLLYYAVTQDAMLIFENLSRGFGRQGKRTFMAERQYTRMEDWLTAKLAYEGLASKTYLSKTLAQYTSKTCSNCGFTITSADYDRVLEKLKKTATGWMTTINGKELKVEGQITYYNRYKRQNVVKDLSVELDRLSEESVNNDISSWTKGRSGEALSLLKKRFSHRPVQEKFVCLNCGFETHADEQAALNIARSWLFLRSQEYKKYQTNKTTGNTDKRAFVETWQSFYRKKLKEVWKPAV

SEQ ID NO: 39373 - protein, 978 aa, synthetic construct
  REGION 1..978: note = engineered CasX variant
QEIKRINKIRRRLVKDSNTKKAGKTGPMKTLLVRVMTPDLRERLENLRKKPENIPQPISNTSRANLNKLLTDYTEMKKAILHVYWEEFQKDPVGLMSRVAQPASKKIDQNKLKPEMDEKGNLTTAGFACSQCGQPLFVYKLEQVSEKGKAYTNYFGRCNVAEHEKLILLAQLKPEKDSDEAVTYSLGKFGQRALDFYSIHVTKESTHPVKPLAQIAGNRYASSPVGKALRDACMGTIASFLSKYQDIIIEHQKVVKGNQKRLESLRELAGKENLEYPSVTLPPQPHTKEGVDAYNEVIARVRMWVNLNLWQKLKLSRDDAKPLLRLKGFPSFPLVERQANEVDWWDMVCNVKKLINEKKEDGKVFWQNLAGYKRQEALRPYLSSEEDRKKGKKFARYQLGDLLLHLEKKHGEDWGKVYDEAWERIDKKVEGLSKHIKLEEERRSEDAQSKAALTDWLRAKASFVIEGLKEADKDEFCRCELKLQKWYGDLRGKPFAIEAENSILDISGFSKQYNCAFIWQKDGVKKLNLYLIINYFKGGKLRFKKIKPEAFEANRFYTVINKKSGEIVPMEVNFNFDDPNLIILPLAFGKRQGREFIWNDLLSLETGSLKLANGRVIEKTLYNRRTRQDEPALFVALTFERREVLDSSNIKPMNLIGVDRGENIPAVIALTDPEGCPLSRFKDSLGNPTHILRIGESYKEKQRTIQAKKEVEQRRAGGYSRKYASKAKNLADDMVRNTARDLLYYAVTQDAMLIFENLSRGFGRQGKRTFMAERQYTRMEDWLTAKLAYEGLPSKVYLSKTLAQYTSKTCSNCGFTITSADYDRVLEKLKKTATGWMTTINGKELKVEGQITYYNRYKRQNVVKDLSVELDRLSEESVNNDISSWTKGRSGEALSLLKKRFSHRPVQEKFVCLNCGFETHADEQAALNIARSWLFLRSQEYKKYQTNKTTGNTDKRAFVETWQSFYRKKLKEVWKPAV

SEQ ID NO: 39374 - protein, 979 aa, synthetic construct
  REGION 1..979: note = engineered CasX variant
QEIKRINKIRRRLVKDSNTKKAGKTGPMKTLLVRVMTPDLRERLENLRKKPENIPQPISNTSRANLNKLLTDYTEMKKAILHVYWEEFQKDPVGLMSRVAQPASKKIDQNKLKPEMDEKGNLTTAGFACSQCGQPLFVYKLEQVSEKGKAYTNYFGRCNVAEHEKLILLAQLKPEKDSDEAVTYSLGKFGQRALDFYSIHVTKESTHPVKPLAQIAGNRYASSPVGKALRDACMGTIASFLSKYQDIIIEHQKVVKGNQKRLESLRELAGKENLEYPSVTLPPQPHTKEGVDAYNEVIARVRMWVNLNLWQKLKLSRDDAKPLLRLKGFPSFPLVERQANEVDWWDMVCNVKKLINEKKEDGKVFWQNLAGYKRQEALRPYLSSEEDRKKGKKFARYQLGDLLLHLEKKHGEDWGKVYDEAWERIDKKVEGLSKHIKLEEERRSEDAQSKAALTDWLRAKASFVIEGLKEADKDEFCRCELKLQKWYGDLRGKPFAIEAENSILDISGFSKQYNCAFIWQKDGVKKLNLYLIINYFKGGKLRFKKIKPEAFEANRFYTVINKKSGEIVPMEVNFNFDDPNLIILPLAFGKRQGREFIWNDLLSLETGSLKLANGRVIEKTLYNRRTRQDEPALFVALTFERREVLDSSNIKPMNLIGVDRGENIPAVIALTDPEGCPLSRFKDSLGNPTHILRIGESYKEKQRTIQAKKEVEQRRAGGYSRKYASKAKNLADDMVRNTARDLLYYAVTQDAMLIFENLSRGFGRQGKRTFMAERQYTRMEDWLTAKLAYEGPLPSKTYLSKTLAQYTSKTCSNCGFTITSADYDRVLEKLKKTATGWMTTINGKELKVEGQITYYNRYKRQNVVKDLSVELDRLSEESVNNDISSWTKGRSGEALSLLKKRFSHRPVQEKFVCLNCGFETHADEQAALNIARSWLFLRSQEYKKYQTNKTTGNTDKRAFVETWQSFYRKKLKEVWKPAV

SEQ ID NO: 39375 - protein, 979 aa, synthetic construct
  REGION 1..979: note = engineered CasX variant
QEIKRINKIRRRLVKDSNTKKAGKTGPMKTLLVRVMTPDLRERLENLRKKPENIPQPISNTSRANLNKLLTDYTEMKKAILHVYWEEFQKDPVGLMSRVAQPASKKIDQNKLKPEMDEKGNLTTAGFACSQCGQPLFVYKLEQVSEKGKAYTNYFGRCNVAEHEKLILLAQLKPEKDSDEAVTYSLGKFGQRALDFYSIHVTKESTHPVKPLAQIAGNRYASSPVGKALRDACMGTIASFLSKYQDIIIEHQKVVKGNQKRLESLRELAGKENLEYPSVTLPPQPHTKEGVDAYNEVIARVRMWVNLNLWQKLKLSRDDAKPLLRLKGFPSFPLVERQANEVDWWDMVCNVKKLINEKKEDGKVFWQNLAGYKRQEALRPYLSSEEDVRKKGKKFARYQLGDLLLHLEKKHGEDWGKVYDEAWERIDKKVEGLSKHIKLEEERRSEDAQSKAALTDWLRAKASFVIEGLKEADKDEFCRCELKLQKWYGDLRGKPFAIEAENSILDISGFSKQYNCAFIWQKDGVKKLNLYLIINYFKGGKLRFKKIKPEAFEANRFYTVINKKSGEIVPMEVNFNFDDPNLIILPLAFGKRQGREFIWNDLLSLETGSLKLANGRVIEKTLYNRRTRQDEPALFVALTFERREVLDSSNIKPMNLIGVDRGENIPAVIALTDPEGCPLSRFKDSLGNPTHILRIGESYKEKQRTIQAKKEVEQRRAGGYSRKYASKAKNLADDMVRNTARDLLYYAVTQDAMLIFENLSRGFGRQGKRTFMAERQYTRMEDWLTAKLAYEGLPSKTYLSKTLAQYTSKTCSNCGFTITSADYDRVLEKLKKTATGWMTTINGKELKVEGQITYYNRYKRQNVVKDLSVELDRLSEESVNNDISSWTKGRSGEALSLLKKRFSHRPVQEKFVCLNCGFETHADEQAALNIARSWLFLRSQEYKKYQTNKTTGNTDKRAFVETWQSFYRKKLKEVWKPAV

SEQ ID NO: 39376 - protein, 978 aa, synthetic construct
  REGION 1..978: note = engineered CasX variant
QEIKRINKIRRRLVKDSNTKKAGKTGPMKTLLVRVMTPDLRERLENLRKKPENIPQPISNTSRANLNKLLTDYTEMKKAILHVYWEEFQKDPVGLMSRVAQPASKKIDQNKLKPEMDEKGNLTTAGFACSQCGQPLFVYKLEQVSEKGKAYTNYFGRCNVAEHEKLILLAQLKPEKDSDEAVTYSLGKFGQRALDFYSIHVTKESTHPVKPLAQIAGNRYASSPVGKALRDACMGTIASFLSKYQDIIIEHQKVVKGNQKRLESLRELAGKENLEYPSVTLPPQPHTKEGVDAYNEVIARVRMWVNLNLWQKLKLSRDDAKPLLRLKGFPSFPLVERQANEVDWWDMVCNVKKLINEKKEDGKVFWQNLAGYKRQEALRPYLSSEEDRKKGKKFARYQLGDLLLHLEKKHGEDWGKVYDEAWERIDKKVEGLSKHIKLEEERRSEDAQSKAALTDWLRAKASFVIEGLKEADKDEFCRCELKLQKWYGDLRGKPFAIEAENSILDISGFSKQYNCAFIWQKDGVKKLNLYLIINYFKGGKLRFKKIKPEAFEANRFYTVINKKSGEIVPMEVNFNFDDPNLIILPLAFGKRQGREFIWNDLLSLETGSLKLANGRVIEKTLYNRRTRQDEPALFVALTFERREVLDSSNIKPMNLIGVDRGENIPAVIALTDPEGCPLSRFKDSLGNPTHILRIGESYKEKQRTIQAKKEVEQRRAGGYSRKYASKAKNLADDMVRNTARDLLYYAVTQDAMLIFENLSRGFGRQGKRTFMAERQYTRMEDWLTAKLAYEGLPSKTYLSKTLAQYTSKTCSNCGFTITSADYDRMLEKLKKTATGWMTTINGKELKVEGQITYYNRYKRQNVVKDLSVELDRLSEESVNNDISSWTKGRSGEALSLLKKRFSHRPVQEKFVCLNCGFETHADEQAALNIARSWLFLRSQEYKKYQTNKTTGNTDKRAFVETWQSFYRKKLKEVWKPAV

SEQ ID NO: 39377 - protein, 978 aa, synthetic construct
  REGION 1..978: note = engineered CasX variant
QEIKRINKIRRRLVKDSNTKKAGKTGPMKTLLVRVMTPDLRERLENLRKKPENIPQPISNTSRANLNKLLTDYTEMKKAILHVYWEEFQKDPVGLMSRVAQPASKKIDQNKLKPEMDEKGNLTTAGFACSQCGQPLFVYKLEQVSEKGKAYTNYFGRCNVAEHEKLILLAQLKPEKDSDEAVTYSLGKFGQRALDFYSIHVTKESTHPVKPLAQIAGNRYASSPVGKALRDACMGTIASFLSKYQDIIIEHQKVVKGNQKRLESLRELAGKENLEYPSVTLPPQPHTKEGVDAYNEVIARVRMWVNLNLWQKLKLSRDDAKPLLRLKGFPSFPLVERQANEVDWWDMVCNVKKLINEKKEDGKVFWQNLAGYKRQEALRPYLSSEEDRKKGKKFARYQLGDLLLHLEKKHGEDWGKVYDEAWERIDKKVEGLSKHIKLEEERRSEDAQSKAALTDWLRAKASFVIEGLKEADKDEFCRCELKLQKWYGDLRGKPFAIEAENSILDISGFSKQYNCAFIWQKDGVKKLNLYLIINYFKGGKLRFKKIKPEAFEANRFYTVINKKSGEIVPMEVNFNFDDPNLIILPLAFGKRQGREFIWNDLLSLETGSLKLANGRVIEKTLYNRRTRQDEPALFVALTFERREVLDSSNIKPMNLIGVDRGENIPAVIALTDPEGCPLSRFKDSLGNPTHILRIGESYKEKQRTIQAKKEVEQRRAGGYSRKYASKAKNLADDMVRNTARDLLYYAVTQDAMLIFENLSRGFGRQGKRTFMAERQYTRMEDWLTAKLAYEGLPSKTYLSKTLAQYTSKTCSNCGFTITSADYDRVLEKLKKTATGWMTTINGKELKVEGQITYYNRYKRQNVVKDLSVELDRLSEESVNNDISSWTKGRQGEALSLLKKRFSHRPVQEKFVCLNCGFETHADEQAALNIARSWLFLRSQEYKKYQTNKTTGNTDKRAFVETWQSFYRKKLKEVWKPAV

SEQ ID NO: 39378 - protein, 978 aa, synthetic construct
  REGION 1..978: note = engineered CasX variant
QEIKRINKIRRRLVKDSNTKKAGKTGPMKTLLVRVMTPDLRERLENLRKKPENIPQPISNTSRANLNKLLTDYTEMKKAILHVYWEEFQKDPVGLMSRVAQPASKKIDQNKLKPEMDEKGNLTTAGFACSQCGQPLFVYKLEQVSEKGKAYTNYFGRCNVAEHEKLILLAQLKPEKDSDEAVTYSLGKFGQRALDFYSIHVTKESTHPVKPLAQIAGNRYASSPVGKALRDACMGTIASFLSKYQDIIIEHQKVVKGNQKRLESLRELAGKENLEYPSVTLPPQPHTKEGVDAYNEVIARVRMWVNLNLWQKLKLSRDDAKPLLRLKGFPSFPLVERQANEVDWWDMVCNVKKLINEKKEDGKVFWQNLAGYKRQEALRPYLSSEEDRKKGKKFARYQLGDLLLHLEKKHGEDWGKVYDEAWERIDKKVEGLSKHIKLEEERRSEDAQSKAALTDWLRAKASFVIEGLKEADKDEFCRCELKLQKWYGDLRGKPFAIEAENSILDISGFSKQYNCAFIWQKDGVKKLNLYLIINYFKGGKLRFKKIKPEAFEANRFYTVINKKSGEIVPMEVNFNFDDPNLIILPLAFGKRQGREFIWNDLLSLETGSLKLANGRVIEKTLYNRRTRQDEPALFVALTFERREVLDSSNIKPMNLIGVDRGENIPAVIALTDPEGCPLSRFKDSLGNPTHILRIGESYKEKQRTIQAKKEVEQRRAGGYSRKYASKAKNLADDMVRNTARDLLYYAVTQDAMLIFENLSRGFGRQGKRTFMAERQYTRMEDWLTAKLAYEGLPSKTYLSKTLAQYTSKTCSNCGFTITSADYDRVLEKLKKTATGWMTTINGKELKVEGQITYYNRYKRQNVVKDLSVELDRLSEESVNNDISSWTKGRSGEALSLLKKRFSHRPVQEKFVCLNCEFETHADEQAALNIARSWLFLRSQEYKKYQTNKTTGNTDKRAFVETWQSFYRKKLKEVWKPAV

SEQ ID NO: 39379 - protein, 979 aa, synthetic construct
  REGION 1..979: note = engineered CasX variant
QEIKRINKIRRRLVKDSNTKKAGKTGPMKTLLVRVMTPDLRERLENLRKKPENIPQPISNTSRANLNKLLTDYTEMKKAILHVYWEEFQKDPVGLMSRVAQPASKKIDQNKLKPEMDEKGNLTTAGFACSQCGQPLFVYKLEQVSEKGKAYTNYFGRCNVAEHEKLILLAQLKPEKDSDEAVTYSLGKFGQRALDFYSIHVTKESTHPVKPLAQIAGNRYASSPVGKALRDACMGTIASFLSKYQDIIIEHQKVVKGNQKRLESLRELAGKENLEYPSVTLPPQPHTKEGVDAYNEVIARVRMWVNLNLWQKLKLSRDDAKPLLRLKGFPSFPLVERQANEVDWWDMVCNVKKLINEKKEDGKVFWQNLAGYKRQEALRPYLSSEEDRKKGKKFARYQLGDLLLHLEKKHGEDWGKVYDEAWERIDKKVEGLSKHIKLEEERRSEDAQSKAALTDWLRAKASFVIEGLKEADKDEFCRCELKLQKWYGDLRGKPFAIEAENSILDISGFSKQYNCAFIWQKDGVKKLNLYLIINYFKGGKLRFKKIKPEAFEANRFYTVINKKSGEIVPMEVNFNFDDPNLIILPLAFGKRQGREFIWNDLLSLETGSLKLANGRVIEKTLYNRRTRQDEPALFVALTFERREVLDSSNIKPMNLIGVDRGENIPAVIALTDPEGCPLSRFKDSLGNPTHILRIGESYKEKQRTIQAKKEVEQRRAGGYSRKYASKAKNLADDMVRNTARDLLYYAVTQDAMLIFENLSRGFGRQGKRTFMAERQYTRMEDWLTAKLAYEGLPSKTYLSKTLAQYTSKTCSNCGFTITSADYDRVLEKLKKTATGWMTTINGKELKVEGQITYYNRYKRQNVVKDLSVELDRLSEESVNNDISSWTKGRSGEALSLLKKRFSHRPVQEKFVCLNCGFETHADEQAALNIARSWLFLRSQEYKKYQTNKTSTGNTDKRAFVETWQSFYRKKLKEVWKPAV

SEQ ID NO: 39380 - protein, 979 aa, synthetic construct
  REGION 1..979: note = engineered CasX variant
QEIKRINKIRRRLVKDSNTKKAGKTGPMKTLLVRVMTPDLRERLENLRKKPENIPQPISNTSRANLNKLLTDYTEMKKAILHVYWEEFQKDPVGLMSRVAQPASKKIDQNKLKPEMDEKGNLTTAGFACSQCGQPLFVYKLEQVSEKGKAYTNYFGRCNVAEHEKLILLAQLKPEKDSDEAVTYSLGKFGQRALDFYSIHVTKESTHPVKPLAQIAGNRYASSPVGKALRDACMGTIASFLSKYQDIIIEHQKVVKGNQKRLESLRELAGKENLEYPSVTLPPQPHTKEGVDAYNEVIARVRMWVNLNLWQKLKLSRDDAKPLLRLKGFPSFPLVERQANEVDWWDMVCNVKKLINEKKEDGKVFWQNLAGYKRQEALRPYLSSEEDRKKGKKFARYQLGDLLLHLEKKHGEDWGKVYDEAWERIDKKVEGLSKHIKLEEERRSEDAQSKAALTDWLRAKASFVIEGLKEADKDEFCRCELKLQKWYGDLRGKPFAIEAENSILDISGFSKQYNCAFIWQKDGVKKLNLYLIINYFKGGKLRFKKIKPEAFEANRFYTVINKKSGEIVPMEVNFNFDDPNLIILPLAFGKRQGREFIWNDLLSLETGSLKLANGRVIEKTLYNRRTRQDEPALFVALTFERREVLDSSNIKPMNLIGVDRGENIPAVIALTDPEGCPLSRFKDSLGNPTHILRIGESYKEKQRTIQAKKEVEQRRAGGYSRKYASKAKNLADDMVRNTARDLLYYAVTQDAMLIFENLSRGFGRQGKRTFMAERQYTRMEDWLTAKLAYEGLPSKTYLSKTLAQYTSKTCSNCGFTITSADYDRVLEKLKKTATGWMTTINGKELKVEGQITYYNRYKRQNVVKDLSVELDRLSEESVNNDISSWTKGRSGEALSLLKKRFSHRPVQEKFVCLNCGFETHADEQAALNIARSWLFLRSQEYKKYQTNKTTGKNTDKRAFVETWQSFYRKKLKEVWKPAV

SEQ ID NO: 39381 - protein, 978 aa, synthetic construct
  REGION 1..978: note = engineered CasX variant
QEIKRINKIRRRLVKDSNTKKAGKTGPMKTLLVRVMTPDLRERLENLRKKPENIPQPISNTSRANLNKLLTDYTEMKKAILHVYWEEFQKDPVGLMSRVAQPASKKIDQNKLKPEMDEKGNLTTAGFACSQCGQPLFVYKLEQVSEKGKAYTNYFGRCNVAEHEKLILLAQLKPEKDSDEAVTYSLGKFGQRALDFYSIHVTKESTHPVKPLAQIAGNRYASSPVGKALRDACMGTIASFLSKYQDIIIEHQKVVKGNQKRLESLRELAGKENLEYPSVTLPPQPHTKEGVDAYNEVIARVRMWVNLNLWQKLKLSRDDAKPLLRLKKFPSFPLVERQANEVDWWDMVCNVKKLINEKKEDGKVFWQNLAGYKRQEALRPYLSSEEDRKKGKKFARYQLGDLLLHLEKKHGEDWGKVYDEAWERIDKKVEGLSKHIKLEEERRSEDAQSKAALTDWLRAKASFVIEGLKEADKDEFCRCELKLQKWYGDLRGKPFAIEAENSILDISGFSKQYNCAFIWQKDGVKKLNLYLIINYFKGGKLRFKKIKPEAFEANRFYTVINKKSGEIVPMEVNFNFDDPNLIILPLAFGKRQGREFIWNDLLSLETGSLKLANGRVIEKTLYNRRTRQDEPALFVALTFERREVLDSSNIKPMNLIGVDRGENIPAVIALTDPEGCPLSRFKDSLGNPTHILRIGESYKEKQRTIQAKKEVEQRRAGGYSRKYASKAKNLADDMVRNTARDLLYYAVTQDAMLIFENLSRGFGRQGKRTFMAERQYTRMEDWLTAKLAYEGLPSKTYLSKTLAQYTSKTCSNCGFTITSADYDRVLEKLKKTATGWMTTINGKELKVEGQITYYNRYKRQNVVKDLSVELDRLSEESVNNDISSWTKGRSGEALSLLKKRFSHRPVQEKFVCLNCGFETHADEQAALNIARSWLFLRSQEYKKYQTNKTTGNTDKRAFVETWQSFYRKKLKEVWKPAV

SEQ ID NO: 39382 - protein, 978 aa, synthetic construct
  REGION 1..978: note = engineered CasX variant
QEIKRINKIRRRLVKDSNTKKAGKTGPMKTLLVRVMTPDLRERLENLRKKPENIPQPISNTSRANLNKLLTDYTEMKKAILHVYWEEFQKDPVGLMSRVAQPASKKIDQNKLKPEMDEKGNLTTAGFACSQCGQPLFVYKLEQVSEKGKAYTNYFGRCNVAEHEKLILLAQLKPEKDSDEAVTYSLGKFGQRALDFYSIHVTKESTHPVKPLAQIAGNRYASSPVGKALRDACMGTIASFLSKYQDIIIEHQKVVKGNQKRLESLRELAGKENLEYPSVTLPPQPHTKEGVDAYNEVIARVRMWVNLNLWQKLKLSRDDAKPLLRLKGFPSFPLVERQANEVDWWDMVCNVKKLINEKKEDGKVFWQNLAGYKRQEALRPYLSSEEDRKKGKKFARYQLGDLLLHLEKKHGEDWGKVYDEAWERIDKKVEGLSKHIKLEEERRSEDAQSKAALTDWLRAKASFVIEGLKEADKDEFCRCELKLQKWYGDLRGKPFAIEAENSILDISGFSKQYNCAFIWQKDGVKKLNLYLIINYFKGGKLRFKKIKPEAFEANRFYTVINKKSGEIVPMEVNFNFDDPNLIILPLAFGKRQGREFIWNDLLSLETGSLKLANGRVIEKTLYNRRTRQDEPALFVALTFERREVLDSSNIKPMNLIGVDRGENIPAVIALTDPEGCPLSRFKDSLGNPTHILRIGERYKEKQRTIQAKKEVEQRRAGGYSRKYASKAKNLADDMVRNTARDLLYYAVTQDAMLIFENLSRGFGRQGKRTFMAERQYTRMEDWLTAKLAYEGLPSKTYLSKTLAQYTSKTCSNCGFTITSADYDRVLEKLKKTATGWMTTINGKELKVEGQITYYNRYKRQNVVKDLSVELDRLSEESVNNDISSWTKGRSGEALSLLKKRFSHRPVQEKFVCLNCGFETHADEQAALNIARSWLFLRSQEYKKYQTNKTTGNTDKRAFVETWQSFYRKKLKEVWKPAV

SEQ ID NO: 39383 - protein, 978 aa, synthetic construct
  REGION 1..978: note = engineered CasX variant
QEIKRINKIRRRLVKDSNTKKAGKTGPMKTLLVRVMTPDLRERLENLRKKPENIPQPISNTSRANLNKLLTDYTEMKKAILHVYWEEFQKDPVGLMSRVAQPASKKIDQNKLKPEMDEKGNLTTAGFACSQCGQPLFVYKLEQVSEKGKAYTNYFGRCNVAEHEKLILLAQLKPEKDSDEAVTYSLGKFGQRALDFYSIHVTKESTHPVKPLAQIAGNRYASSPVGKALRDACMGTIASFLSKYQDIIIEHQKVVKGNQKRLESLRELAGKENLEYPSVTLPPQPHTKEGVDAYNEVIARVRMWVNLNLWQKLKLSRDDAKPLLRLKGFPSFPLVERQANEVDWWDMVCNVKKLINEKKEDGKVFWQNLAGYKRQEALRPYLSSEEDRKKGKKFARYQLGDLLLHLEKKHGEDWGKVYDEAWERIDKKVEGLSKHIKLEEERRSEDAQSKAALTDWLRAKASFVIEGLKEADKDEFCRCELKLQKWYGDLRGKPFAIEAENSILDISGFSKQYNCAFIWQKDGVKKLNLYLIINYFKGGKLRFKKIKPEAFEANRFYTVINKKSGEIVPMEVNFNFDDPNLIILPLAFGKRQGREFIWNDLLSLETGSLQLANGRVIEKTLYNRRTRQDEPALFVALTFERREVLDSSNIKPMNLIGVDRGENIPAVIALTDPEGCPLSRFKDSLGNPTHILRIGESYKEKQRTIQAKKEVEQRRAGGYSRKYASKAKNLADDMVRNTARDLLYYAVTQDAMLIFENLSRGFGRQGKRTFMAERQYTRMEDWLTAKLAYEGLPSKTYLSKTLAQYTSKTCSNCGFTITSADYDRVLEKLKKTATGWMTTINGKELKVEGQITYYNRYKRQNVVKDLSVELDRLSEESVNNDISSWTKGRSGEALSLLKKRFSHRPVQEKFVCLNCGFETHADEQAALNIARSWLFLRSQEYKKYQTNKTTGNTDKRAFVETWQSFYRKKLKEVWKPAV

SEQ ID NO: 39384 - protein, 978 aa, synthetic construct
  REGION 1..978: note = engineered CasX variant
QEGKRINKIRRRLVKDSNTKKAGKTGPMKTLLVRVMTPDLRERLENLRKKPENIPQPISNTSRANLNKLLTDYTEMKKAILHVYWEEFQKDPVGLMSRVAQPASKKIDQNKLKPEMDEKGNLTTAGFACSQCGQPLFVYKLEQVSEKGKAYTNYFGRCNVAEHEKLILLDQLKPEKDSDEAVTYSLGKFGQRALDFYSIHVTKESTHPVKPLAQIAGNRYASGPVGKALRDACMGTIASFLSKYQDIIIEHQKVVKGNQKRLESLRELAGKENLEYPSVTLPPQPHTKEGVDAYNEVIARVRMWVNLNLWQKLKLSRDDAKPLLRLKGFPSFPLVERQANEVDWWDMVCNVKKLINEKKEDGKVFWQNLAGYKRQEALRPYLSSEEDRKKGKKFARYQLGDLLLHLEKKHGEDWGKVYDEAWERIDKKVEGLSKHIKLEEERRSEDAQSKAALTDWLRAKASFVIEGLKEADKDEFCRCELKLQKWYGDLRGKPFAIEAENSILDISGFSKQYNCAFIWQKDGVKKLNLYLIINYFKGGKLRFKKIKPEAFEANRFYTVINKKSGEIVPMEVNFNFDDPNLIILPLAFGKRQGREFIWNDLLSLETGSLKLANGRVIEKTLYNRRTRQDEPALFVALTFERREVLDSSNIKPMNLIGVDRGENIPAVIALTDPEGCPLSRFKDSLGNPTHILRIGESYKEKQRTIQAKKEVEQRRAGGYSRKYASKAKNLADDMVRNTARDLLYYAVTQDAMLIFENLSRGFGRQGKRTFMAERQYTRMEDWLTAKLAYEGLPSKTYLSKTLAQYTSKTCSNCGFTITSADYDRVLEKLKKTATGWMTTINGKELKVEGQITYYNRYKRQNVVKDLSVELDRLSEESVNNDISSWTKGRSGEALSLLKKRFSHRPVQEKFVCLNCGFETHADEQAALNIARSWLFLRSQEYKKYQTNKTTGNTDKRAFVETWQSFYRKKLKEVWKPAV

SEQ ID NO: 39385 - protein, 979 aa, synthetic construct
  REGION 1..979: note = engineered CasX variant
QEIGKRINKIRRRLVKDSNTKKAGKTGPMKTLLVRVMTPDLRERLENLRKKPENIPQPISNTSRANLNKLLTDYTEMKKAILHVYWEEFQKDPVGLMSRVAQPASKKIDQNKLKPEMDEKGNLTTAGFACSQCGQPLFVYKLEQVSEKGKAYTNYFGRCNVAEHEKLILLDQLKPEKDSDEAVTYSLGKFGQRALDFYSIHVTKESTHPVKPLAQIAGNRYASGPVGKALRDACMGTIASFLSKYQDIIIEHQKVVKGNQKRLESLRELAGKENLEYPSVTLPPQPHTKEGVDAYNEVIARVRMWVNLNLWQKLKLSRDDAKPLLRLKGFPSFPLVERQANEVDWWDMVCNVKKLINEKKEDGKVFWQNLAGYKRQEALRPYLSSEEDRKKGKKFARYQLGDLLLHLEKKHGEDWGKVYDEAWERIDKKVEGLSKHIKLEEERRSEDAQSKAALTDWLRAKASFVIEGLKEADKDEFCRCELKLQKWYGDLRGKPFAIEAENSILDISGFSKQYNCAFIWQKDGVKKLNLYLIINYFKGGKLRFKKIKPEAFEANRFYTVINKKSGEIVPMEVNFNFDDPNLIILPLAFGKRQGREFIWNDLLSLETGSLKLANGRVIEKTLYNRRTRQDEPALFVALTFERREVLDSSNIKPMNLIGVDRGENIPAVIALTDPEGCPLSRFKDSLGNPTHILRIGESYKEKQRTIQAKKEVEQRRAGGYSRKYASKAKNLADDMVRNTARDLLYYAVTQDAMLIFENLSRGFGRQGKRTFMAERQYTRMEDWLTAKLAYEGLPSKTYLSKTLAQYTSKTCSNCGFTITSADYDRVLEKLKKTATGWMTTINGKELKVEGQITYYNRYKRQNVVKDLSVELDRLSEESVNNDISSWTKGRSGEALSLLKKRFSHRPVQEKFVCLNCGFETHADEQAALNIARSWLFLRSQEYKKYQTNKTTGNTDKRAFVETWQSFYRKKLKEVWKPAV

SEQ ID NO: 39386 - protein, 978 aa, synthetic construct
  REGION 1..978: note = engineered CasX variant
QEIGRINKIRRRLVKDSNTKKAGKTGPMKTLLVRVMTPDLRERLENLRKKPENIPQPISNTSRANLNKLLTDYTEMKKAILHVYWEEFQKDPVGLMSRVAQPASKKIDQNKLKPEMDEKGNLTTAGFACSQCGQPLFVYKLEQVSEKGKAYTNYFGRCNVAEHEKLILLDQLKPEKDSDEAVTYSLGKFGQRALDFYSIHVTKESTHPVKPLAQIAGNRYASGPVGKALRDACMGTIASFLSKYQDIIIEHQKVVKGNQKRLESLRELAGKENLEYPSVTLPPQPHTKEGVDAYNEVIARVRMWVNLNLWQKLKLSRDDAKPLLRLKGFPSFPLVERQANEVDWWDMVCNVKKLINEKKEDGKVFWQNLAGYKRQEALRPYLSSEEDRKKGKKFARYQLGDLLLHLEKKHGEDWGKVYDEAWERIDKKVEGLSKHIKLEEERRSEDAQSKAALTDWLRAKASFVIEGLKEADKDEFCRCELKLQKWYGDLRGKPFAIEAENSILDISGFSKQYNCAFIWQKDGVKKLNLYLIINYFKGGKLRFKKIKPEAFEANRFYTVINKKSGEIVPMEVNFNFDDPNLIILPLAFGKRQGREFIWNDLLSLETGSLKLANGRVIEKTLYNRRTRQDEPALFVALTFERREVLDSSNIKPMNLIGVDRGENIPAVIALTDPEGCPLSRFKDSLGNPTHILRIGESYKEKQRTIQAKKEVEQRRAGGYSRKYASKAKNLADDMVRNTARDLLYYAVTQDAMLIFENLSRGFGRQGKRTFMAERQYTRMEDWLTAKLAYEGLPSKTYLSKTLAQYTSKTCSNCGFTITSADYDRVLEKLKKTATGWMTTINGKELKVEGQITYYNRYKRQNVVKDLSVELDRLSEESVNNDISSWTKGRSGEALSLLKKRFSHRPVQEKFVCLNCGFETHADEQAALNIARSWLFLRSQEYKKYQTNKTTGNTDKRAFVETWQSFYRKKLKEVWKPAV

SEQ ID NO: 39387 - protein, 979 aa, synthetic construct
  REGION 1..979: note = engineered CasX variant
QEIKGRINKIRRRLVKDSNTKKAGKTGPMKTLLVRVMTPDLRERLENLRKKPENIPQPISNTSRANLNKLLTDYTEMKKAILHVYWEEFQKDPVGLMSRVAQPASKKIDQNKLKPEMDEKGNLTTAGFACSQCGQPLFVYKLEQVSEKGKAYTNYFGRCNVAEHEKLILLDQLKPEKDSDEAVTYSLGKFGQRALDFYSIHVTKESTHPVKPLAQIAGNRYASGPVGKALRDACMGTIASFLSKYQDIIIEHQKVVKGNQKRLESLRELAGKENLEYPSVTLPPQPHTKEGVDAYNEVIARVRMWVNLNLWQKLKLSRDDAKPLLRLKGFPSFPLVERQANEVDWWDMVCNVKKLINEKKEDGKVFWQNLAGYKRQEALRPYLSSEEDRKKGKKFARYQLGDLLLHLEKKHGEDWGKVYDEAWERIDKKVEGLSKHIKLEEERRSEDAQSKAALTDWLRAKASFVIEGLKEADKDEFCRCELKLQKWYGDLRGKPFAIEAENSILDISGFSKQYNCAFIWQKDGVKKLNLYLIINYFKGGKLRFKKIKPEAFEANRFYTVINKKSGEIVPMEVNFNFDDPNLIILPLAFGKRQGREFIWNDLLSLETGSLKLANGRVIEKTLYNRRTRQDEPALFVALTFERREVLDSSNIKPMNLIGVDRGENIPAVIALTDPEGCPLSRFKDSLGNPTHILRIGESYKEKQRTIQAKKEVEQRRAGGYSRKYASKAKNLADDMVRNTARDLLYYAVTQDAMLIFENLSRGFGRQGKRTFMAERQYTRMEDWLTAKLAYEGLPSKTYLSKTLAQYTSKTCSNCGFTITSADYDRVLEKLKKTATGWMTTINGKELKVEGQITYYNRYKRQNVVKDLSVELDRLSEESVNNDISSWTKGRSGEALSLLKKRFSHRPVQEKFVCLNCGFETHADEQAALNIARSWLFLRSQEYKKYQTNKTTGNTDKRAFVETWQSFYRKKLKEVWKPAV

SEQ ID NO: 39388 - protein, 978 aa, synthetic construct
  REGION 1..978: note = engineered CasX variant
QEIKRANKIRRRLVKDSNTKKAGKTGPMKTLLVRVMTPDLRERLENLRKKPENIPQPISNTSRANLNKLLTDYTEMKKAILHVYWEEFQKDPVGLMSRVAQPASKKIDQNKLKPEMDEKGNLTTAGFACSQCGQPLFVYKLEQVSEKGKAYTNYFGRCNVAEHEKLILLDQLKPEKDSDEAVTYSLGKFGQRALDFYSIHVTKESTHPVKPLAQIAGNRYASGPVGKALRDACMGTIASFLSKYQDIIIEHQKVVKGNQKRLESLRELAGKENLEYPSVTLPPQPHTKEGVDAYNEVIARVRMWVNLNLWQKLKLSRDDAKPLLRLKGFPSFPLVERQANEVDWWDMVCNVKKLINEKKEDGKVFWQNLAGYKRQEALRPYLSSEEDRKKGKKFARYQLGDLLLHLEKKHGEDWGKVYDEAWERIDKKVEGLSKHIKLEEERRSEDAQSKAALTDWLRAKASFVIEGLKEADKDEFCRCELKLQKWYGDLRGKPFAIEAENSILDISGFSKQYNCAFIWQKDGVKKLNLYLIINYFKGGKLRFKKIKPEAFEANRFYTVINKKSGEIVPMEVNFNFDDPNLIILPLAFGKRQGREFIWNDLLSLETGSLKLANGRVIEKTLYNRRTRQDEPALFVALTFERREVLDSSNIKPMNLIGVDRGENIPAVIALTDPEGCPLSRFKDSLGNPTHILRIGESYKEKQRTIQAKKEVEQRRAGGYSRKYASKAKNLADDMVRNTARDLLYYAVTQDAMLIFENLSRGFGRQGKRTFMAERQYTRMEDWLTAKLAYEGLPSKTYLSKTLAQYTSKTCSNCGFTITSADYDRVLEKLKKTATGWMTTINGKELKVEGQITYYNRYKRQNVVKDLSVELDRLSEESVNNDISSWTKGRSGEALSLLKKRFSHRPVQEKFVCLNCGFETHADEQAALNIARSWLFLRSQEYKKYQTNKTTGNTDKRAFVETWQSFYRKKLKEVWKPAV

SEQ ID NO: 39389 - protein, 978 aa, synthetic construct
  REGION 1..978: note = engineered CasX variant
QEIKRISKIRRRLVKDSNTKKAGKTGPMKTLLVRVMTPDLRERLENLRKKPENIPQPISNTSRANLNKLLTDYTEMKKAILHVYWEEFQKDPVGLMSRVAQPASKKIDQNKLKPEMDEKGNLTTAGFACSQCGQPLFVYKLEQVSEKGKAYTNYFGRCNVAEHEKLILLDQLKPEKDSDEAVTYSLGKFGQRALDFYSIHVTKESTHPVKPLAQIAGNRYASGPVGKALRDACMGTIASFLSKYQDIIIEHQKVVKGNQKRLESLRELAGKENLEYPSVTLPPQPHTKEGVDAYNEVIARVRMWVNLNLWQKLKLSRDDAKPLLRLKGFPSFPLVERQANEVDWWDMVCNVKKLINEKKEDGKVFWQNLAGYKRQEALRPYLSSEEDRKKGKKFARYQLGDLLLHLEKKHGEDWGKVYDEAWERIDKKVEGLSKHIKLEEERRSEDAQSKAALTDWLRAKASFVIEGLKEADKDEFCRCELKLQKWYGDLRGKPFAIEAENSILDISGFSKQYNCAFIWQKDGVKKLNLYLIINYFKGGKLRFKKIKPEAFEANRFYTVINKKSGEIVPMEVNFNFDDPNLIILPLAFGKRQGREFIWNDLLSLETGSLKLANGRVIEKTLYNRRTRQDEPALFVALTFERREVLDSSNIKPMNLIGVDRGENIPAVIALTDPEGCPLSRFKDSLGNPTHILRIGESYKEKQRTIQAKKEVEQRRAGGYSRKYASKAKNLADDMVRNTARDLLYYAVTQDAMLIFENLSRGFGRQGKRTFMAERQYTRMEDWLTAKLAYEGLPSKTYLSKTLAQYTSKTCSNCGFTITSADYDRVLEKLKKTATGWMTTINGKELKVEGQITYYNRYKRQNVVKDLSVELDRLSEESVNNDISSWTKGRSGEALSLLKKRFSHRPVQEKFVCLNCGFETHADEQAALNIARSWLFLRSQEYKKYQTNKTTGNTDKRAFVETWQSFYRKKLKEVWKPAV

SEQ ID NO: 39390 - protein, 978 aa, synthetic construct
  REGION 1..978: note = engineered CasX variant
QEIKRINGIRRRLVKDSNTKKAGKTGPMKTLLVRVMTPDLRERLENLRKKPENIPQPISNTSRANLNKLLTDYTEMKKAILHVYWEEFQKDPVGLMSRVAQPASKKIDQNKLKPEMDEKGNLTTAGFACSQCGQPLFVYKLEQVSEKGKAYTNYFGRCNVAEHEKLILLDQLKPEKDSDEAVTYSLGKFGQRALDFYSIHVTKESTHPVKPLAQIAGNRYASGPVGKALRDACMGTIASFLSKYQDIIIEHQKVVKGNQKRLESLRELAGKENLEYPSVTLPPQPHTKEGVDAYNEVIARVRMWVNLNLWQKLKLSRDDAKPLLRLKGFPSFPLVERQANEVDWWDMVCNVKKLINEKKEDGKVFWQNLAGYKRQEALRPYLSSEEDRKKGKKFARYQLGDLLLHLEKKHGEDWGKVYDEAWERIDKKVEGLSKHIKLEEERRSEDAQSKAALTDWLRAKASFVIEGLKEADKDEFCRCELKLQKWYGDLRGKPFAIEAENSILDISGFSKQYNCAFIWQKDGVKKLNLYLIINYFKGGKLRFKKIKPEAFEANRFYTVINKKSGEIVPMEVNFNFDDPNLIILPLAFGKRQGREFIWNDLLSLETGSLKLANGRVIEKTLYNRRTRQDEPALFVALTFERREVLDSSNIKPMNLIGVDRGENIPAVIALTDPEGCPLSRFKDSLGNPTHILRIGESYKEKQRTIQAKKEVEQRRAGGYSRKYASKAKNLADDMVRNTARDLLYYAVTQDAMLIFENLSRGFGRQGKRTFMAERQYTRMEDWLTAKLAYEGLPSKTYLSKTLAQYTSKTCSNCGFTITSADYDRVLEKLKKTATGWMTTINGKELKVEGQITYYNRYKRQNVVKDLSVELDRLSEESVNNDISSWTKGRSGEALSLLKKRFSHRPVQEKFVCLNCGFETHADEQAALNIARSWLFLRSQEYKKYQTNKTTGNTDKRAFVETWQSFYRKKLKEVWKPAV

SEQ ID NO: 39391 - protein, 978 aa, synthetic construct
  REGION 1..978: note = engineered CasX variant
QEIKRINKIRRRLVKDSNTKKAGKTGPMKTLLVPVMTPDLRERLENLRKKPENIPQPISNTSRANLNKLLTDYTEMKKAILHVYWEEFQKDPVGLMSRVAQPASKKIDQNKLKPEMDEKGNLTTAGFACSQCGQPLFVYKLEQVSEKGKAYTNYFGRCNVAEHEKLILLDQLKPEKDSDEAVTYSLGKFGQRALDFYSIHVTKESTHPVKPLAQIAGNRYASGPVGKALRDACMGTIASFLSKYQDIIIEHQKVVKGNQKRLESLRELAGKENLEYPSVTLPPQPHTKEGVDAYNEVIARVRMWVNLNLWQKLKLSRDDAKPLLRLKGFPSFPLVERQANEVDWWDMVCNVKKLINEKKEDGKVFWQNLAGYKRQEALRPYLSSEEDRKKGKKFARYQLGDLLLHLEKKHGEDWGKVYDEAWERIDKKVEGLSKHIKLEEERRSEDAQSKAALTDWLRAKASFVIEGLKEADKDEFCRCELKLQKWYGDLRGKPFAIEAENSILDISGFSKQYNCAFIWQKDGVKKLNLYLIINYFKGGKLRFKKIKPEAFEANRFYTVINKKSGEIVPMEVNFNFDDPNLIILPLAFGKRQGREFIWNDLLSLETGSLKLANGRVIEKTLYNRRTRQDEPALFVALTFERREVLDSSNIKPMNLIGVDRGENIPAVIALTDPEGCPLSRFKDSLGNPTHILRIGESYKEKQRTIQAKKEVEQRRAGGYSRKYASKAKNLADDMVRNTARDLLYYAVTQDAMLIFENLSRGFGRQGKRTFMAERQYTRMEDWLTAKLAYEGLPSKTYLSKTLAQYTSKTCSNCGFTITSADYDRVLEKLKKTATGWMTTINGKELKVEGQITYYNRYKRQNVVKDLSVELDRLSEESVNNDISSWTKGRSGEALSLLKKRFSHRPVQEKFVCLNCGFETHADEQAALNIARSWLFLRSQEYKKYQTNKTTGNTDKRAFVETWQSFYRKKLKEVWKPAV

SEQ ID NO: 39392 - protein, 978 aa, synthetic construct
  REGION 1..978: note = engineered CasX variant
QEIKRINKIRRRLVKDSNTKKAGKTGPMKTLLVRVMTPDLRERLENLRKKPPNIPQPISNTSRANLNKLLTDYTEMKKAILHVYWEEFQKDPVGLMSRVAQPASKKIDQNKLKPEMDEKGNLTTAGFACSQCGQPLFVYKLEQVSEKGKAYTNYFGRCNVAEHEKLILLDQLKPEKDSDEAVTYSLGKFGQRALDFYSIHVTKESTHPVKPLAQIAGNRYASGPVGKALRDACMGTIASFLSKYQDIIIEHQKVVKGNQKRLESLRELAGKENLEYPSVTLPPQPHTKEGVDAYNEVIARVRMWVNLNLWQKLKLSRDDAKPLLRLKGFPSFPLVERQANEVDWWDMVCNVKKLINEKKEDGKVFWQNLAGYKRQEALRPYLSSEEDRKKGKKFARYQLGDLLLHLEKKHGEDWGKVYDEAWERIDKKVEGLSKHIKLEEERRSEDAQSKAALTDWLRAKASFVIEGLKEADKDEFCRCELKLQKWYGDLRGKPFAIEAENSILDISGFSKQYNCAFIWQKDGVKKLNLYLIINYFKGGKLRFKKIKPEAFEANRFYTVINKKSGEIVPMEVNFNFDDPNLIILPLAFGKRQGREFIWNDLLSLETGSLKLANGRVIEKTLYNRRTRQDEPALFVALTFERREVLDSSNIKPMNLIGVDRGENIPAVIALTDPEGCPLSRFKDSLGNPTHILRIGESYKEKQRTIQAKKEVEQRRAGGYSRKYASKAKNLADDMVRNTARDLLYYAVTQDAMLIFENLSRGFGRQGKRTFMAERQYTRMEDWLTAKLAYEGLPSKTYLSKTLAQYTSKTCSNCGFTITSADYDRVLEKLKKTATGWMTTINGKELKVEGQITYYNRYKRQNVVKDLSVELDRLSEESVNNDISSWTKGRSGEALSLLKKRFSHRPVQEKFVCLNCGFETHADEQAALNIARSWLFLRSQEYKKYQTNKTTGNTDKRAFVETWQSFYRKKLKEVWKPAV

SEQ ID NO: 39393 - protein, 978 aa, synthetic construct
  REGION 1..978: note = engineered CasX variant
QEIKRINKIRRRLVKDSNTKKAGKTGPMKTLLVRVMTPDLRERLENLRKKPENIPQPISNTSQANLNKLLTDYTEMKKAILHVYWEEFQKDPVGLMSRVAQPASKKIDQNKLKPEMDEKGNLTTAGFACSQCGQPLFVYKLEQVSEKGKAYTNYFGRCNVAEHEKLILLDQLKPEKDSDEAVTYSLGKFGQRALDFYSIHVTKESTHPVKPLAQIAGNRYASGPVGKALRDACMGTIASFLSKYQDIIIEHQKVVKGNQKRLESLRELAGKENLEYPSVTLPPQPHTKEGVDAYNEVIARVRMWVNLNLWQKLKLSRDDAKPLLRLKGFPSFPLVERQANEVDWWDMVCNVKKLINEKKEDGKVFWQNLAGYKRQEALRPYLSSEEDRKKGKKFARYQLGDLLLHLEKKHGEDWGKVYDEAWERIDKKVEGLSKHIKLEEERRSEDAQSKAALTDWLRAKASFVIEGLKEADKDEFCRCELKLQKWYGDLRGKPFAIEAENSILDISGFSKQYNCAFIWQKDGVKKLNLYLIINYFKGGKLRFKKIKPEAFEANRFYTVINKKSGEIVPMEVNFNFDDPNLIILPLAFGKRQGREFIWNDLLSLETGSLKLANGRVIEKTLYNRRTRQDEPALFVALTFERREVLDSSNIKPMNLIGVDRGENIPAVIALTDPEGCPLSRFKDSLGNPTHILRIGESYKEKQRTIQAKKEVEQRRAGGYSRKYASKAKNLADDMVRNTARDLLYYAVTQDAMLIFENLSRGFGRQGKRTFMAERQYTRMEDWLTAKLAYEGLPSKTYLSKTLAQYTSKTCSNCGFTITSADYDRVLEKLKKTATGWMTTINGKELKVEGQITYYNRYKRQNVVKDLSVELDRLSEESVNNDISSWTKGRSGEALSLLKKRFSHRPVQEKFVCLNCGFETHADEQAALNIARSWLFLRSQEYKKYQTNKTTGNTDKRAFVETWQSFYRKKLKEVWKPAV

SEQ ID NO: 39394 - protein, 978 aa, synthetic construct
  REGION 1..978: note = engineered CasX variant
QEIKRINKIRRRLVKDSNTKKAGKTGPMKTLLVRVMTPDLRERLENLRKKPENIPQPISNTSRANLNKLLTDYTEMKKAILHVYDEEFQKDPVGLMSRVAQPASKKIDQNKLKPEMDEKGNLTTAGFACSQCGQPLFVYKLEQVSEKGKAYTNYFGRCNVAEHEKLILLDQLKPEKDSDEAVTYSLGKFGQRALDFYSIHVTKESTHPVKPLAQIAGNRYASGPVGKALRDACMGTIASFLSKYQDIIIEHQKVVKGNQKRLESLRELAGKENLEYPSVTLPPQPHTKEGVDAYNEVIARVRMWVNLNLWQKLKLSRDDAKPLLRLKGFPSFPLVERQANEVDWWDMVCNVKKLINEKKEDGKVFWQNLAGYKRQEALRPYLSSEEDRKKGKKFARYQLGDLLLHLEKKHGEDWGKVYDEAWERIDKKVEGLSKHIKLEEERRSEDAQSKAALTDWLRAKASFVIEGLKEADKDEFCRCELKLQKWYGDLRGKPFAIEAENSILDISGFSKQYNCAFIWQKDGVKKLNLYLIINYFKGGKLRFKKIKPEAFEANRFYTVINKKSGEIVPMEVNFNFDDPNLIILPLAFGKRQGREFIWNDLLSLETGSLKLANGRVIEKTLYNRRTRQDEPALFVALTFERREVLDSSNIKPMNLIGVDRGENIPAVIALTDPEGCPLSRFKDSLGNPTHILRIGESYKEKQRTIQAKKEVEQRRAGGYSRKYASKAKNLADDMVRNTARDLLYYAVTQDAMLIFENLSRGFGRQGKRTFMAERQYTRMEDWLTAKLAYEGLPSKTYLSKTLAQYTSKTCSNCGFTITSADYDRVLEKLKKTATGWMTTINGKELKVEGQITYYNRYKRQNVVKDLSVELDRLSEESVNNDISSWTKGRSGEALSLLKKRFSHRPVQEKFVCLNCGFETHADEQAALNIARSWLFLRSQEYKKYQTNKTTGNTDKRAFVETWQSFYRKKLKEVWKPAV

SEQ ID NO: 39395 - protein, 978 aa, synthetic construct
  REGION 1..978: note = engineered CasX variant
QEIKRINKIRRRLVKDSNTKKAGKTGPMKTLLVRVMTPDLRERLENLRKKPENIPQPISNTSRANLNKLLTDYTEMKKAILHVYWEEFQKDPVGLMSRVAQPASKKIDQNKLKPEMDEKGNLTTAGFACSQCGQPLFVYKLEQVSEKGKAYTNYFGRCNVAEHEKLIKLDQLKPEKDSDEAVTYSLGKFGQRALDFYSIHVTKESTHPVKPLAQIAGNRYASGPVGKALRDACMGTIASFLSKYQDIIIEHQKVVKGNQKRLESLRELAGKENLEYPSVTLPPQPHTKEGVDAYNEVIARVRMWVNLNLWQKLKLSRDDAKPLLRLKGFPSFPLVERQANEVDWWDMVCNVKKLINEKKEDGKVFWQNLAGYKRQEALRPYLSSEEDRKKGKKFARYQLGDLLLHLEKKHGEDWGKVYDEAWERIDKKVEGLSKHIKLEEERRSEDAQSKAALTDWLRAKASFVIEGLKEADKDEFCRCELKLQKWYGDLRGKPFAIEAENSILDISGFSKQYNCAFIWQKDGVKKLNLYLIINYFKGGKLRFKKIKPEAFEANRFYTVINKKSGEIVPMEVNFNFDDPNLIILPLAFGKRQGREFIWNDLLSLETGSLKLANGRVIEKTLYNRRTRQDEPALFVALTFERREVLDSSNIKPMNLIGVDRGENIPAVIALTDPEGCPLSRFKDSLGNPTHILRIGESYKEKQRTIQAKKEVEQRRAGGYSRKYASKAKNLADDMVRNTARDLLYYAVTQDAMLIFENLSRGFGRQGKRTFMAERQYTRMEDWLTAKLAYEGLPSKTYLSKTLAQYTSKTCSNCGFTITSADYDRVLEKLKKTATGWMTTINGKELKVEGQITYYNRYKRQNVVKDLSVELDRLSEESVNNDISSWTKGRSGEALSLLKKRFSHRPVQEKFVCLNCGFETHADEQAALNIARSWLFLRSQEYKKYQTNKTTGNTDKRAFVETWQSFYRKKLKEVWKPAV

SEQ ID NO: 39396 - protein, 979 aa, synthetic construct
  REGION 1..979: note = engineered CasX variant
QEIKRINKIRRRLVKDSNTKKAGKTGPMKTLLVRVMTPDLRERLENLRKKPENIPQPISNTSRANLNKLLTDYTEMKKAILHVYWEEFQKDPVGLMSRVAQPASKKIDQNKLKPEMDEKGNLTTAGFACSQCGQPLFVYKLEQVSEKGKAYTNYFGRCNVAEHEKLILLDYQLKPEKDSDEAVTYSLGKFGQRALDFYSIHVTKESTHPVKPLAQIAGNRYASGPVGKALRDACMGTIASFLSKYQDIIIEHQKVVKGNQKRLESLRELAGKENLEYPSVTLPPQPHTKEGVDAYNEVIARVRMWVNLNLWQKLKLSRDDAKPLLRLKGFPSFPLVERQANEVDWWDMVCNVKKLINEKKEDGKVFWQNLAGYKRQEALRPYLSSEEDRKKGKKFARYQLGDLLLHLEKKHGEDWGKVYDEAWERIDKKVEGLSKHIKLEEERRSEDAQSKAALTDWLRAKASFVIEGLKEADKDEFCRCELKLQKWYGDLRGKPFAIEAENSILDISGFSKQYNCAFIWQKDGVKKLNLYLIINYFKGGKLRFKKIKPEAFEANRFYTVINKKSGEIVPMEVNFNFDDPNLIILPLAFGKRQGREFIWNDLLSLETGSLKLANGRVIEKTLYNRRTRQDEPALFVALTFERREVLDSSNIKPMNLIGVDRGENIPAVIALTDPEGCPLSRFKDSLGNPTHILRIGESYKEKQRTIQAKKEVEQRRAGGYSRKYASKAKNLADDMVRNTARDLLYYAVTQDAMLIFENLSRGFGRQGKRTFMAERQYTRMEDWLTAKLAYEGLPSKTYLSKTLAQYTSKTCSNCGFTITSADYDRVLEKLKKTATGWMTTINGKELKVEGQITYYNRYKRQNVVKDLSVELDRLSEESVNNDISSWTKGRSGEALSLLKKRFSHRPVQEKFVCLNCGFETHADEQAALNIARSWLFLRSQEYKKYQTNKTTGNTDKRAFVETWQSFYRKKLKEVWKPAV

SEQ ID NO: 39397 - protein, 979 aa, synthetic construct
  REGION 1..979: note = engineered CasX variant
QEIKRINKIRRRLVKDSNTKKAGKTGPMKTLLVRVMTPDLRERLENLRKKPENIPQPISNTSRANLNKLLTDYTEMKKAILHVYWEEFQKDPVGLMSRVAQPASKKIDQNKLKPEMDEKGNLTTAGFACSQCGQPLFVYKLEQVSEKGKAYTNYFGRCNVAEHEKLILLDSQLKPEKDSDEAVTYSLGKFGQRALDFYSIHVTKESTHPVKPLAQIAGNRYASGPVGKALRDACMGTIASFLSKYQDIIIEHQKVVKGNQKRLESLRELAGKENLEYPSVTLPPQPHTKEGVDAYNEVIARVRMWVNLNLWQKLKLSRDDAKPLLRLKGFPSFPLVERQANEVDWWDMVCNVKKLINEKKEDGKVFWQNLAGYKRQEALRPYLSSEEDRKKGKKFARYQLGDLLLHLEKKHGEDWGKVYDEAWERIDKKVEGLSKHIKLEEERRSEDAQSKAALTDWLRAKASFVIEGLKEADKDEFCRCELKLQKWYGDLRGKPFAIEAENSILDISGFSKQYNCAFIWQKDGVKKLNLYLIINYFKGGKLRFKKIKPEAFEANRFYTVINKKSGEIVPMEVNFNFDDPNLIILPLAFGKRQGREFIWNDLLSLETGSLKLANGRVIEKTLYNRRTRQDEPALFVALTFERREVLDSSNIKPMNLIGVDRGENIPAVIALTDPEGCPLSRFKDSLGNPTHILRIGESYKEKQRTIQAKKEVEQRRAGGYSRKYASKAKNLADDMVRNTARDLLYYAVTQDAMLIFENLSRGFGRQGKRTFMAERQYTRMEDWLTAKLAYEGLPSKTYLSKTLAQYTSKTCSNCGFTITSADYDRVLEKLKKTATGWMTTINGKELKVEGQITYYNRYKRQNVVKDLSVELDRLSEESVNNDISSWTKGRSGEALSLLKKRFSHRPVQEKFVCLNCGFETHADEQAALNIARSWLFLRSQEYKKYQTNKTTGNTDKRAFVETWQSFYRKKLKEVWKPAV

SEQ ID NO: 39398 - protein, 977 aa, synthetic construct
  REGION 1..977: note = engineered CasX variant
QEIKRINKIRRRLVKDSNTKKAGKTGPMKTLLVRVMTPDLRERLENLRKKPENIPQPISNTSRANLNKLLTDYTEMKKAILHVYWEEFQKDPVGLMSRVAQPASKKIDQNKLKPEMDEKGNLTTAGFACSQCGQPLFVYKLEQVSEKGKAYTNYFGRCNVAEHEKLILLDQLKPEKDSDEAVTYSLGKFGQRALDFYSIHVTKESTHPVKPLAQIAGNRYASPVGKALRDACMGTIASFLSKYQDIIIEHQKVVKGNQKRLESLRELAGKENLEYPSVTLPPQPHTKEGVDAYNEVIARVRMWVNLNLWQKLKLSRDDAKPLLRLKGFPSFPLVERQANEVDWWDMVCNVKKLINEKKEDGKVFWQNLAGYKRQEALRPYLSSEEDRKKGKKFARYQLGDLLLHLEKKHGEDWGKVYDEAWERIDKKVEGLSKHIKLEEERRSEDAQSKAALTDWLRAKASFVIEGLKEADKDEFCRCELKLQKWYGDLRGKPFAIEAENSILDISGFSKQYNCAFIWQKDGVKKLNLYLIINYFKGGKLRFKKIKPEAFEANRFYTVINKKSGEIVPMEVNFNFDDPNLIILPLAFGKRQGREFIWNDLLSLETGSLKLANGRVIEKTLYNRRTRQDEPALFVALTFERREVLDSSNIKPMNLIGVDRGENIPAVIALTDPEGCPLSRFKDSLGNPTHILRIGESYKEKQRTIQAKKEVEQRRAGGYSRKYASKAKNLADDMVRNTARDLLYYAVTQDAMLIFENLSRGFGRQGKRTFMAERQYTRMEDWLTAKLAYEGLPSKTYLSKTLAQYTSKTCSNCGFTITSADYDRVLEKLKKTATGWMTTINGKELKVEGQITYYNRYKRQNVVKDLSVELDRLSEESVNNDISSWTKGRSGEALSLLKKRFSHRPVQEKFVCLNCGFETHADEQAALNIARSWLFLRSQEYKKYQTNKTTGNTDKRAFVETWQSFYRKKLKEVWKPAV

SEQ ID NO: 39399 - protein, 978 aa, synthetic construct
  REGION 1..978: note = engineered CasX variant
QEIKRINKIRRRLVKDSNTKKAGKTGPMKTLLVRVMTPDLRERLENLRKKPENIPQPISNTSRANLNKLLTDYTEMKKAILHVYWEEFQKDPVGLMSRVAQPASKKIDQNKLKPEMDEKGNLTTAGFACSQCGQPLFVYKLEQVSEKGKAYTNYFGRCNVAEHEKLILLDQLKPEKDSDEAVTYSLGKFGQRALDFYSIHVTKESTHPVKPLAQIAGNRYASGPVGKALRDACMGTIASFLSKYQDIIIEHQKVVKGNQKRLESLRELAGKENLEYPSVTLPPQPHTSEGVDAYNEVIARVRMWVNLNLWQKLKLSRDDAKPLLRLKGFPSFPLVERQANEVDWWDMVCNVKKLINEKKEDGKVFWQNLAGYKRQEALRPYLSSEEDRKKGKKFARYQLGDLLLHLEKKHGEDWGKVYDEAWERIDKKVEGLSKHIKLEEERRSEDAQSKAALTDWLRAKASFVIEGLKEADKDEFCRCELKLQKWYGDLRGKPFAIEAENSILDISGFSKQYNCAFIWQKDGVKKLNLYLIINYFKGGKLRFKKIKPEAFEANRFYTVINKKSGEIVPMEVNFNFDDPNLIILPLAFGKRQGREFIWNDLLSLETGSLKLANGRVIEKTLYNRRTRQDEPALFVALTFERREVLDSSNIKPMNLIGVDRGENIPAVIALTDPEGCPLSRFKDSLGNPTHILRIGESYKEKQRTIQAKKEVEQRRAGGYSRKYASKAKNLADDMVRNTARDLLYYAVTQDAMLIFENLSRGFGRQGKRTFMAERQYTRMEDWLTAKLAYEGLPSKTYLSKTLAQYTSKTCSNCGFTITSADYDRVLEKLKKTATGWMTTINGKELKVEGQITYYNRYKRQNVVKDLSVELDRLSEESVNNDISSWTKGRSGEALSLLKKRFSHRPVQEKFVCLNCGFETHADEQAALNIARSWLFLRSQEYKKYQTNKTTGNTDKRAFVETWQSFYRKKLKEVWKPAV

SEQ ID NO: 39400 - protein, 978 aa, synthetic construct
  REGION 1..978: note = engineered CasX variant
QEIKRINKIRRRLVKDSNTKKAGKTGPMKTLLVRVMTPDLRERLENLRKKPENIPQPISNTSRANLNKLLTDYTEMKKAILHVYWEEFQKDPVGLMSRVAQPASKKIDQNKLKPEMDEKGNLTTAGFACSQCGQPLFVYKLEQVSEKGKAYTNYFGRCNVAEHEKLILLDQLKPEKDSDEAVTYSLGKFGQRALDFYSIHVTKESTHPVKPLAQIAGNRYASGPVGKALRDACMGTIASFLSKYQDIIIEHQKVVKGNQKRLESLRELAGKENLEYPSVTLPPQPHTKEGLDAYNEVIARVRMWVNLNLWQKLKLSRDDAKPLLRLKGFPSFPLVERQANEVDWWDMVCNVKKLINEKKEDGKVFWQNLAGYKRQEALRPYLSSEEDRKKGKKFARYQLGDLLLHLEKKHGEDWGKVYDEAWERIDKKVEGLSKHIKLEEERRSEDAQSKAALTDWLRAKASFVIEGLKEADKDEFCRCELKLQKWYGDLRGKPFAIEAENSILDISGFSKQYNCAFIWQKDGVKKLNLYLIINYFKGGKLRFKKIKPEAFEANRFYTVINKKSGEIVPMEVNFNFDDPNLIILPLAFGKRQGREFIWNDLLSLETGSLKLANGRVIEKTLYNRRTRQDEPALFVALTFERREVLDSSNIKPMNLIGVDRGENIPAVIALTDPEGCPLSRFKDSLGNPTHILRIGESYKEKQRTIQAKKEVEQRRAGGYSRKYASKAKNLADDMVRNTARDLLYYAVTQDAMLIFENLSRGFGRQGKRTFMAERQYTRMEDWLTAKLAYEGLPSKTYLSKTLAQYTSKTCSNCGFTITSADYDRVLEKLKKTATGWMTTINGKELKVEGQITYYNRYKRQNVVKDLSVELDRLSEESVNNDISSWTKGRSGEALSLLKKRFSHRPVQEKFVCLNCGFETHADEQAALNIARSWLFLRSQEYKKYQTNKTTGNTDKRAFVETWQSFYRKKLKEVWKPAV

SEQ ID NO: 39401 - protein, 978 aa, synthetic construct
  REGION 1..978: note = engineered CasX variant
QEIKRINKIRRRLVKDSNTKKAGKTGPMKTLLVRVMTPDLRERLENLRKKPENIPQPISNTSRANLNKLLTDYTEMKKAILHVYWEEFQKDPVGLMSRVAQPASKKIDQNKLKPEMDEKGNLTTAGFACSQCGQPLFVYKLEQVSEKGKAYTNYFGRCNVAEHEKLILLDQLKPEKDSDEAVTYSLGKFGQRALDFYSIHVTKESTHPVKPLAQIAGNRYASGPVGKALRDACMGTIASFLSKYQDIIIEHQKVVKGNQKRLESLRELAGKENLEYPSVTLPPQPHTKEGVDAYNEVIARVRTWVNLNLWQKLKLSRDDAKPLLRLKGFPSFPLVERQANEVDWWDMVCNVKKLINEKKEDGKVFWQNLAGYKRQEALRPYLSSEEDRKKGKKFARYQLGDLLLHLEKKHGEDWGKVYDEAWERIDKKVEGLSKHIKLEEERRSEDAQSKAALTDWLRAKASFVIEGLKEADKDEFCRCELKLQKWYGDLRGKPFAIEAENSILDISGFSKQYNCAFIWQKDGVKKLNLYLIINYFKGGKLRFKKIKPEAFEANRFYTVINKKSGEIVPMEVNFNFDDPNLIILPLAFGKRQGREFIWNDLLSLETGSLKLANGRVIEKTLYNRRTRQDEPALFVALTFERREVLDSSNIKPMNLIGVDRGENIPAVIALTDPEGCPLSRFKDSLGNPTHILRIGESYKEKQRTIQAKKEVEQRRAGGYSRKYASKAKNLADDMVRNTARDLLYYAVTQDAMLIFENLSRGFGRQGKRTFMAERQYTRMEDWLTAKLAYEGLPSKTYLSKTLAQYTSKTCSNCGFTITSADYDRVLEKLKKTATGWMTTINGKELKVEGQITYYNRYKRQNVVKDLSVELDRLSEESVNNDISSWTKGRSGEALSLLKKRFSHRPVQEKFVCLNCGFETHADEQAALNIARSWLFLRSQEYKKYQTNKTTGNTDKRAFVETWQSFYRKKLKEVWKPAV

SEQ ID NO: 39402 - protein, 978 aa, synthetic construct
  REGION 1..978: note = engineered CasX variant
QEIKRINKIRRRLVKDSNTKKAGKTGPMKTLLVRVMTPDLRERLENLRKKPENIPQPISNTSRANLNKLLTDYTEMKKAILHVYWEEFQKDPVGLMSRVAQPASKKIDQNKLKPEMDEKGNLTTAGFACSQCGQPLFVYKLEQVSEKGKAYTNYFGRCNVAEHEKLILLDQLKPEKDSDEAVTYSLGKFGQRALDFYSIHVTKESTHPVKPLAQIAGNRYASGPVGKALRDACMGTIASFLSKYQDIIIEHQKVVKGNQKRLESLRELAGKENLEYPSVTLPPQPHTKEGVDAYNEVIARVRWWVNLNLWQKLKLSRDDAKPLLRLKGFPSFPLVERQANEVDWWDMVCNVKKLINEKKEDGKVFWQNLAGYKRQEALRPYLSSEEDRKKGKKFARYQLGDLLLHLEKKHGEDWGKVYDEAWERIDKKVEGLSKHIKLEEERRSEDAQSKAALTDWLRAKASFVIEGLKEADKDEFCRCELKLQKWYGDLRGKPFAIEAENSILDISGFSKQYNCAFIWQKDGVKKLNLYLIINYFKGGKLRFKKIKPEAFEANRFYTVINKKSGEIVPMEVNFNFDDPNLIILPLAFGKRQGREFIWNDLLSLETGSLKLANGRVIEKTLYNRRTRQDEPALFVALTFERREVLDSSNIKPMNLIGVDRGENIPAVIALTDPEGCPLSRFKDSLGNPTHILRIGESYKEKQRTIQAKKEVEQRRAGGYSRKYASKAKNLADDMVRNTARDLLYYAVTQDAMLIFENLSRGFGRQGKRTFMAERQYTRMEDWLTAKLAYEGLPSKTYLSKTLAQYTSKTCSNCGFTITSADYDRVLEKLKKTATGWMTTINGKELKVEGQITYYNRYKRQNVVKDLSVELDRLSEESVNNDISSWTKGRSGEALSLLKKRFSHRPVQEKFVCLNCGFETHADEQAALNIARSWLFLRSQEYKKYQTNKTTGNTDKRAFVETWQSFYRKKLKEVWKPAV

SEQ ID NO: 39403 - protein, 979 aa, synthetic construct
  REGION 1..979: note = engineered CasX variant
QEIKRINKIRRRLVKDSNTKKAGKTGPMKTLLVRVMTPDLRERLENLRKKPENIPQPISNTSRANLNKLLTDYTEMKKAILHVYWEEFQKDPVGLMSRVAQPASKKIDQNKLKPEMDEKGNLTTAGFACSQCGQPLFVYKLEQVSEKGKAYTNYFGRCNVAEHEKLILLDQLKPEKDSDEAVTYSLGKFGQRALDFYSIHVTKESTHPVKPLAQIAGNRYASGPVGKALRDACMGTIASFLSKYQDIIIEHQKVVKGNQKRLESLRELAGKENLEYPSVTLPPQPHTKEGVDAYNEVIARVRMWVNLNLWQKLKLSRDDAKPLLRLKGFPSFPLVERQQANEVDWWDMVCNVKKLINEKKEDGKVFWQNLAGYKRQEALRPYLSSEEDRKKGKKFARYQLGDLLLHLEKKHGEDWGKVYDEAWERIDKKVEGLSKHIKLEEERRSEDAQSKAALTDWLRAKASFVIEGLKEADKDEFCRCELKLQKWYGDLRGKPFAIEAENSILDISGFSKQYNCAFIWQKDGVKKLNLYLIINYFKGGKLRFKKIKPEAFEANRFYTVINKKSGEIVPMEVNFNFDDPNLIILPLAFGKRQGREFIWNDLLSLETGSLKLANGRVIEKTLYNRRTRQDEPALFVALTFERREVLDSSNIKPMNLIGVDRGENIPAVIALTDPEGCPLSRFKDSLGNPTHILRIGESYKEKQRTIQAKKEVEQRRAGGYSRKYASKAKNLADDMVRNTARDLLYYAVTQDAMLIFENLSRGFGRQGKRTFMAERQYTRMEDWLTAKLAYEGLPSKTYLSKTLAQYTSKTCSNCGFTITSADYDRVLEKLKKTATGWMTTINGKELKVEGQITYYNRYKRQNVVKDLSVELDRLSEESVNNDISSWTKGRSGEALSLLKKRFSHRPVQEKFVCLNCGFETHADEQAALNIARSWLFLRSQEYKKYQTNKTTGNTDKRAFVETWQSFYRKKLKEVWKPAV

SEQ ID NO: 39404 - protein, 979 aa, synthetic construct
  REGION 1..979: note = engineered CasX variant
QEIKRINKIRRRLVKDSNTKKAGKTGPMKTLLVRVMTPDLRERLENLRKKPENIPQPISNTSRANLNKLLTDYTEMKKAILHVYWEEFQKDPVGLMSRVAQPASKKIDQNKLKPEMDEKGNLTTAGFACSQCGQPLFVYKLEQVSEKGKAYTNYFGRCNVAEHEKLILLDQLKPEKDSDEAVTYSLGKFGQRALDFYSIHVTKESTHPVKPLAQIAGNRYASGPVGKALRDACMGTIASFLSKYQDIIIEHQKVVKGNQKRLESLRELAGKENLEYPSVTLPPQPHTKEGVDAYNEVIARVRMWVNLNLWQKLKLSRDDAKPLLRLKGFPSFPLVERQANAEVDWWDMVCNVKKLINEKKEDGKVFWQNLAGYKRQEALRPYLSSEEDRKKGKKFARYQLGDLLLHLEKKHGEDWGKVYDEAWERIDKKVEGLSKHIKLEEERRSEDAQSKAALTDWLRAKASFVIEGLKEADKDEFCRCELKLQKWYGDLRGKPFAIEAENSILDISGFSKQYNCAFIWQKDGVKKLNLYLIINYFKGGKLRFKKIKPEAFEANRFYTVINKKSGEIVPMEVNFNFDDPNLIILPLAFGKRQGREFIWNDLLSLETGSLKLANGRVIEKTLYNRRTRQDEPALFVALTFERREVLDSSNIKPMNLIGVDRGENIPAVIALTDPEGCPLSRFKDSLGNPTHILRIGESYKEKQRTIQAKKEVEQRRAGGYSRKYASKAKNLADDMVRNTARDLLYYAVTQDAMLIFENLSRGFGRQGKRTFMAERQYTRMEDWLTAKLAYEGLPSKTYLSKTLAQYTSKTCSNCGFTITSADYDRVLEKLKKTATGWMTTINGKELKVEGQITYYNRYKRQNVVKDLSVELDRLSEESVNNDISSWTKGRSGEALSLLKKRFSHRPVQEKFVCLNCGFETHADEQAALNIARSWLFLRSQEYKKYQTNKTTGNTDKRAFVETWQSFYRKKLKEVWKPAV

SEQ ID NO: 39405 - protein, 978 aa, synthetic construct
  REGION 1..978: note = engineered CasX variant
QEIKRINKIRRRLVKDSNTKKAGKTGPMKTLLVRVMTPDLRERLENLRKKPENIPQPISNTSRANLNKLLTDYTEMKKAILHVYWEEFQKDPVGLMSRVAQPASKKIDQNKLKPEMDEKGNLTTAGFACSQCGQPLFVYKLEQVSEKGKAYTNYFGRCNVAEHEKLILLDQLKPEKDSDEAVTYSLGKFGQRALDFYSIHVTKESTHPVKPLAQIAGNRYASGPVGKALRDACMGTIASFLSKYQDIIIEHQKVVKGNQKRLESLRELAGKENLEYPSVTLPPQPHTKEGVDAYNEVIARVRMWVNLNLWQKLKLSRDDAKPLLRLKGFPSFPLVERQANEVDWWDMVCNVKKLINEKKEDGKVFWQNLAGYKRQEALRPYLSSEEDRKKGKKFARTQLGDLLLHLEKKHGEDWGKVYDEAWERIDKKVEGLSKHIKLEEERRSEDAQSKAALTDWLRAKASFVIEGLKEADKDEFCRCELKLQKWYGDLRGKPFAIEAENSILDISGFSKQYNCAFIWQKDGVKKLNLYLIINYFKGGKLRFKKIKPEAFEANRFYTVINKKSGEIVPMEVNFNFDDPNLIILPLAFGKRQGREFIWNDLLSLETGSLKLANGRVIEKTLYNRRTRQDEPALFVALTFERREVLDSSNIKPMNLIGVDRGENIPAVIALTDPEGCPLSRFKDSLGNPTHILRIGESYKEKQRTIQAKKEVEQRRAGGYSRKYASKAKNLADDMVRNTARDLLYYAVTQDAMLIFENLSRGFGRQGKRTFMAERQYTRMEDWLTAKLAYEGLPSKTYLSKTLAQYTSKTCSNCGFTITSADYDRVLEKLKKTATGWMTTINGKELKVEGQITYYNRYKRQNVVKDLSVELDRLSEESVNNDISSWTKGRSGEALSLLKKRFSHRPVQEKFVCLNCGFETHADEQAALNIARSWLFLRSQEYKKYQTNKTTGNTDKRAFVETWQSFYRKKLKEVWKPAV

SEQ ID NO: 39406 - protein, 979 aa, synthetic construct
  REGION 1..979: note = engineered CasX variant
QEIKRINKIRRRLVKDSNTKKAGKTGPMKTLLVRVMTPDLRERLENLRKKPENIPQPISNTSRANLNKLLTDYTEMKKAILHVYWEEFQKDPVGLMSRVAQPASKKIDQNKLKPEMDEKGNLTTAGFACSQCGQPLFVYKLEQVSEKGKAYTNYFGRCNVAEHEKLILLDQLKPEKDSDEAVTYSLGKFGQRALDFYSIHVTKESTHPVKPLAQIAGNRYASGPVGKALRDACMGTIASFLSKYQDIIIEHQKVVKGNQKRLESLRELAGKENLEYPSVTLPPQPHTKEGVDAYNEVIARVRMWVNLNLWQKLKLSRDDAKPLLRLKGFPSFPLVERQANEVDWWDMVCNVKKLINEKKEDGKVFWQNLAGYKRQEALRPYLSSEEDRKKGKKFARYQLGDLLLHLEKKHEGEDWGKVYDEAWERIDKKVEGLSKHIKLEEERRSEDAQSKAALTDWLRAKASFVIEGLKEADKDEFCRCELKLQKWYGDLRGKPFAIEAENSILDISGFSKQYNCAFIWQKDGVKKLNLYLIINYFKGGKLRFKKIKPEAFEANRFYTVINKKSGEIVPMEVNFNFDDPNLIILPLAFGKRQGREFIWNDLLSLETGSLKLANGRVIEKTLYNRRTRQDEPALFVALTFERREVLDSSNIKPMNLIGVDRGENIPAVIALTDPEGCPLSRFKDSLGNPTHILRIGESYKEKQRTIQAKKEVEQRRAGGYSRKYASKAKNLADDMVRNTARDLLYYAVTQDAMLIFENLSRGFGRQGKRTFMAERQYTRMEDWLTAKLAYEGLPSKTYLSKTLAQYTSKTCSNCGFTITSADYDRVLEKLKKTATGWMTTINGKELKVEGQITYYNRYKRQNVVKDLSVELDRLSEESVNNDISSWTKGRSGEALSLLKKRFSHRPVQEKFVCLNCGFETHADEQAALNIARSWLFLRSQEYKKYQTNKTTGNTDKRAFVETWQSFYRKKLKEVWKPAV

SEQ ID NO: 39407 - protein, 978 aa, synthetic construct
  REGION 1..978: note = engineered CasX variant
QEIKRINKIRRRLVKDSNTKKAGKTGPMKTLLVRVMTPDLRERLENLRKKPENIPQPISNTSRANLNKLLTDYTEMKKAILHVYWEEFQKDPVGLMSRVAQPASKKIDQNKLKPEMDEKGNLTTAGFACSQCGQPLFVYKLEQVSEKGKAYTNYFGRCNVAEHEKLILLDQLKPEKDSDEAVTYSLGKFGQRALDFYSIHVTKESTHPVKPLAQIAGNRYASGPVGKALRDACMGTIASFLSKYQDIIIEHQKVVKGNQKRLESLRELAGKENLEYPSVTLPPQPHTKEGVDAYNEVIARVRMWVNLNLWQKLKLSRDDAKPLLRLKGFPSFPLVERQANEVDWWDMVCNVKKLINEKKEDGKVFWQNLAGYKRQEALRPYLSSEEDRKKGKKFARYQLGDLLLHLEKKHGEDWGKVYDEAWERIDKKVEGLSKHIKLEEERRSEDAQSKAALTDWLRAKASFVIEGLKEADKDEFCRCDLKLQKWYGDLRGKPFAIEAENSILDISGFSKQYNCAFIWQKDGVKKLNLYLIINYFKGGKLRFKKIKPEAFEANRFYTVINKKSGEIVPMEVNFNFDDPNLIILPLAFGKRQGREFIWNDLLSLETGSLKLANGRVIEKTLYNRRTRQDEPALFVALTFERREVLDSSNIKPMNLIGVDRGENIPAVIALTDPEGCPLSRFKDSLGNPTHILRIGESYKEKQRTIQAKKEVEQRRAGGYSRKYASKAKNLADDMVRNTARDLLYYAVTQDAMLIFENLSRGFGRQGKRTFMAERQYTRMEDWLTAKLAYEGLPSKTYLSKTLAQYTSKTCSNCGFTITSADYDRVLEKLKKTATGWMTTINGKELKVEGQITYYNRYKRQNVVKDLSVELDRLSEESVNNDISSWTKGRSGEALSLLKKRFSHRPVQEKFVCLNCGFETHADEQAALNIARSWLFLRSQEYKKYQTNKTTGNTDKRAFVETWQSFYRKKLKEVWKPAV

SEQ ID NO: 39408 - protein, 978 aa, synthetic construct
  REGION 1..978: note = engineered CasX variant
QEIKRINKIRRRLVKDSNTKKAGKTGPMKTLLVRVMTPDLRERLENLRKKPENIPQPISNTSRANLNKLLTDYTEMKKAILHVYWEEFQKDPVGLMSRVAQPASKKIDQNKLKPEMDEKGNLTTAGFACSQCGQPLFVYKLEQVSEKGKAYTNYFGRCNVAEHEKLILLDQLKPEKDSDEAVTYSLGKFGQRALDFYSIHVTKESTHPVKPLAQIAGNRYASGPVGKALRDACMGTIASFLSKYQDIIIEHQKVVKGNQKRLESLRELAGKENLEYPSVTLPPQPHTKEGVDAYNEVIARVRMWVNLNLWQKLKLSRDDAKPLLRLKGFPSFPLVERQANEVDWWDMVCNVKKLINEKKEDGKVFWQNLAGYKRQEALRPYLSSEEDRKKGKKFARYQLGDLLLHLEKKHGEDWGKVYDEAWERIDKKVEGLSKHIKLEEERRSEDAQSKAALTDWLRAKASFVIEGLKEADKDEFCRCELKLQKWYGDLRGKPFAIEAENSILDISGFSKQYNCAFIWQKDGVKKLNLYLIINYFKGGKLRFKKIKPEAFEANRFYTVINKKSGEIVPMEVNFNFDDPNLIILPLAFGKRFGREFIWNDLLSLETGSLKLANGRVIEKTLYNRRTRQDEPALFVALTFERREVLDSSNIKPMNLIGVDRGENIPAVIALTDPEGCPLSRFKDSLGNPTHILRIGESYKEKQRTIQAKKEVEQRRAGGYSRKYASKAKNLADDMVRNTARDLLYYAVTQDAMLIFENLSRGFGRQGKRTFMAERQYTRMEDWLTAKLAYEGLPSKTYLSKTLAQYTSKTCSNCGFTITSADYDRVLEKLKKTATGWMTTINGKELKVEGQITYYNRYKRQNVVKDLSVELDRLSEESVNNDISSWTKGRSGEALSLLKKRFSHRPVQEKFVCLNCGFETHADEQAALNIARSWLFLRSQEYKKYQTNKTTGNTDKRAFVETWQSFYRKKLKEVWKPAV

SEQ ID NO: 39409 - protein, 978 aa, synthetic construct
  REGION 1..978: note = engineered CasX variant
QEIKRINKIRRRLVKDSNTKKAGKTGPMKTLLVRVMTPDLRERLENLRKKPENIPQPISNTSRANLNKLLTDYTEMKKAILHVYWEEFQKDPVGLMSRVAQPASKKIDQNKLKPEMDEKGNLTTAGFACSQCGQPLFVYKLEQVSEKGKAYTNYFGRCNVAEHEKLILLDQLKPEKDSDEAVTYSLGKFGQRALDFYSIHVTKESTHPVKPLAQIAGNRYASGPVGKALRDACMGTIASFLSKYQDIIIEHQKVVKGNQKRLESLRELAGKENLEYPSVTLPPQPHTKEGVDAYNEVIARVRMWVNLNLWQKLKLSRDDAKPLLRLKGFPSFPLVERQANEVDWWDMVCNVKKLINEKKEDGKVFWQNLAGYKRQEALRPYLSSEEDRKKGKKFARYQLGDLLLHLEKKHGEDWGKVYDEAWERIDKKVEGLSKHIKLEEERRSEDAQSKAALTDWLRAKASFVIEGLKEADKDEFCRCELKLQKWYGDLRGKPFAIEAENSILDISGFSKQYNCAFIWQKDGVKKLNLYLIINYFKGGKLRFKKIKPEAFEANRFYTVINKKSGEIVPMEVNFNFDDPNLIILPLAFGKRVGREFIWNDLLSLETGSLKLANGRVIEKTLYNRRTRQDEPALFVALTFERREVLDSSNIKPMNLIGVDRGENIPAVIALTDPEGCPLSRFKDSLGNPTHILRIGESYKEKQRTIQAKKEVEQRRAGGYSRKYASKAKNLADDMVRNTARDLLYYAVTQDAMLIFENLSRGFGRQGKRTFMAERQYTRMEDWLTAKLAYEGLPSKTYLSKTLAQYTSKTCSNCGFTITSADYDRVLEKLKKTATGWMTTINGKELKVEGQITYYNRYKRQNVVKDLSVELDRLSEESVNNDISSWTKGRSGEALSLLKKRFSHRPVQEKFVCLNCGFETHADEQAALNIARSWLFLRSQEYKKYQTNKTTGNTDKRAFVETWQSFYRKKLKEVWKPAV

SEQ ID NO: 39410 - protein, 979 aa, synthetic construct
  REGION 1..979: note = engineered CasX variant
QEIKRINKIRRRLVKDSNTKKAGKTGPMKTLLVRVMTPDLRERLENLRKKPENIPQPISNTSRANLNKLLTDYTEMKKAILHVYWEEFQKDPVGLMSRVAQPASKKIDQNKLKPEMDEKGNLTTAGFACSQCGQPLFVYKLEQVSEKGKAYTNYFGRCNVAEHEKLILLDQLKPEKDSDEAVTYSLGKFGQRALDFYSIHVTKESTHPVKPLAQIAGNRYASGPVGKALRDACMGTIASFLSKYQDIIIEHQKVVKGNQKRLESLRELAGKENLEYPSVTLPPQPHTKEGVDAYNEVIARVRMWVNLNLWQKLKLSRDDAKPLLRLKGFPSFPLVERQANEVDWWDMVCNVKKLINEKKEDGKVFWQNLAGYKRQEALRPYLSSEEDRKKGKKFARYQLGDLLLHLEKKHGEDWGKVYDEAWERIDKKVEGLSKHIKLEEERRSEDAQSKAALTDWLRAKASFVIEGLKEADKDEFCRCELKLQKWYGDLRGKPFAIEAENSILDISGFSKQYNCAFIWQKDGVKKLNLYLIINYFKGGKLRFKKIKPEAFEANRFYTVINKKSGEIVPMEVNFNFDDPNLIILPLAFGKRQGREFIWNDLLSLETGSLKLANGRVIEKTLYNRRTRQDEPALFVALTFERREVLDSSNIKTPMNLIGVDRGENIPAVIALTDPEGCPLSRFKDSLGNPTHILRIGESYKEKQRTIQAKKEVEQRRAGGYSRKYASKAKNLADDMVRNTARDLLYYAVTQDAMLIFENLSRGFGRQGKRTFMAERQYTRMEDWLTAKLAYEGLPSKTYLSKTLAQYTSKTCSNCGFTITSADYDRVLEKLKKTATGWMTTINGKELKVEGQITYYNRYKRQNVVKDLSVELDRLSEESVNNDISSWTKGRSGEALSLLKKRFSHRPVQEKFVCLNCGFETHADEQAALNIARSWLFLRSQEYKKYQTNKTTGNTDKRAFVETWQSFYRKKLKEVWKPAV

SEQ ID NO: 39411 - protein, 979 aa, synthetic construct
  REGION 1..979: note = engineered CasX variant
QEIKRINKIRRRLVKDSNTKKAGKTGPMKTLLVRVMTPDLRERLENLRKKPENIPQPISNTSRANLNKLLTDYTEMKKAILHVYWEEFQKDPVGLMSRVAQPASKKIDQNKLKPEMDEKGNLTTAGFACSQCGQPLFVYKLEQVSEKGKAYTNYFGRCNVAEHEKLILLDQLKPEKDSDEAVTYSLGKFGQRALDFYSIHVTKESTHPVKPLAQIAGNRYASGPVGKALRDACMGTIASFLSKYQDIIIEHQKVVKGNQKRLESLRELAGKENLEYPSVTLPPQPHTKEGVDAYNEVIARVRMWVNLNLWQKLKLSRDDAKPLLRLKGFPSFPLVERQANEVDWWDMVCNVKKLINEKKEDGKVFWQNLAGYKRQEALRPYLSSEEDRKKGKKFARYQLGDLLLHLEKKHGEDWGKVYDEAWERIDKKVEGLSKHIKLEEERRSEDAQSKAALTDWLRAKASFVIEGLKEADKDEFCRCELKLQKWYGDLRGKPFAIEAENSILDISGFSKQYNCAFIWQKDGVKKLNLYLIINYFKGGKLRFKKIKPEAFEANRFYTVINKKSGEIVPMEVNFNFDDPNLIILPLAFGKRQGREFIWNDLLSLETGSLKLANGRVIEKTLYNRRTRQDEPALFVALTFERREVLDSSNIKPMSNLIGVDRGENIPAVIALTDPEGCPLSRFKDSLGNPTHILRIGESYKEKQRTIQAKKEVEQRRAGGYSRKYASKAKNLADDMVRNTARDLLYYAVTQDAMLIFENLSRGFGRQGKRTFMAERQYTRMEDWLTAKLAYEGLPSKTYLSKTLAQYTSKTCSNCGFTITSADYDRVLEKLKKTATGWMTTINGKELKVEGQITYYNRYKRQNVVKDLSVELDRLSEESVNNDISSWTKGRSGEALSLLKKRFSHRPVQEKFVCLNCGFETHADEQAALNIARSWLFLRSQEYKKYQTNKTTGNTDKRAFVETWQSFYRKKLKEVWKPAV

SEQ ID NO: 39412 - protein, 978 aa, synthetic construct
  REGION 1..978: note = engineered CasX variant
QEIKRINKIRRRLVKDSNTKKAGKTGPMKTLLVRVMTPDLRERLENLRKKPENIPQPISNTSRANLNKLLTDYTEMKKAILHVYWEEFQKDPVGLMSRVAQPASKKIDQNKLKPEMDEKGNLTTAGFACSQCGQPLFVYKLEQVSEKGKAYTNYFGRCNVAEHEKLILLDQLKPEKDSDEAVTYSLGKFGQRALDFYSIHVTKESTHPVKPLAQIAGNRYASGPVGKALRDACMGTIASFLSKYQDIIIEHQKVVKGNQKRLESLRELAGKENLEYPSVTLPPQPHTKEGVDAYNEVIARVRMWVNLNLWQKLKLSRDDAKPLLRLKGFPSFPLVERQANEVDWWDMVCNVKKLINEKKEDGKVFWQNLAGYKRQEALRPYLSSEEDRKKGKKFARYQLGDLLLHLEKKHGEDWGKVYDEAWERIDKKVEGLSKHIKLEEERRSEDAQSKAALTDWLRAKASFVIEGLKEADKDEFCRCELKLQKWYGDLRGKPFAIEAENSILDISGFSKQYNCAFIWQKDGVKKLNLYLIINYFKGGKLRFKKIKPEAFEANRFYTVINKKSGEIVPMEVNFNFDDPNLIILPLAFGKRQGREFIWNDLLSLETGSLKLANGRVIEKTLYNRRTRQDEPALFVALTFERREVLDSSNIKPMNLIGVDRGENIPAVIALTDPEGCPLSRFKDSLGNPTHILRIRESYKEKQRTIQAKKEVEQRRAGGYSRKYASKAKNLADDMVRNTARDLLYYAVTQDAMLIFENLSRGFGRQGKRTFMAERQYTRMEDWLTAKLAYEGLPSKTYLSKTLAQYTSKTCSNCGFTITSADYDRVLEKLKKTATGWMTTINGKELKVEGQITYYNRYKRQNVVKDLSVELDRLSEESVNNDISSWTKGRSGEALSLLKKRFSHRPVQEKFVCLNCGFETHADEQAALNIARSWLFLRSQEYKKYQTNKTTGNTDKRAFVETWQSFYRKKLKEVWKPAV

SEQ ID NO: 39413 - protein, 978 aa, synthetic construct
  REGION 1..978: note = engineered CasX variant
QEIKRINKIRRRLVKDSNTKKAGKTGPMKTLLVRVMTPDLRERLENLRKKPENIPQPISNTSRANLNKLLTDYTEMKKAILHVYWEEFQKDPVGLMSRVAQPASKKIDQNKLKPEMDEKGNLTTAGFACSQCGQPLFVYKLEQVSEKGKAYTNYFGRCNVAEHEKLILLDQLKPEKDSDEAVTYSLGKFGQRALDFYSIHVTKESTHPVKPLAQIAGNRYASGPVGKALRDACMGTIASFLSKYQDIIIEHQKVVKGNQKRLESLRELAGKENLEYPSVTLPPQPHTKEGVDAYNEVIARVRMWVNLNLWQKLKLSRDDAKPLLRLKGFPSFPLVERQANEVDWWDMVCNVKKLINEKKEDGKVFWQNLAGYKRQEALRPYLSSEEDRKKGKKFARYQLGDLLLHLEKKHGEDWGKVYDEAWERIDKKVEGLSKHIKLEEERRSEDAQSKAALTDWLRAKASFVIEGLKEADKDEFCRCELKLQKWYGDLRGKPFAIEAENSILDISGFSKQYNCAFIWQKDGVKKLNLYLIINYFKGGKLRFKKIKPEAFEANRFYTVINKKSGEIVPMEVNFNFDDPNLIILPLAFGKRQGREFIWNDLLSLETGSLKLANGRVIEKTLYNRRTRQDEPALFVALTFERREVLDSSNIKPMNLIGVDRGENIPAVIALTDPEGCPLSRFKDSLGNPTHILRIGESYKEKQRTIQAKKEVEQRRAGGYSRKYASKAKNLADDMVRNTARDLLYYAVTQDAMLIFENLSRGFGRQGKRTFSAERQYTRMEDWLTAKLAYEGLPSKTYLSKTLAQYTSKTCSNCGFTITSADYDRVLEKLKKTATGWMTTINGKELKVEGQITYYNRYKRQNVVKDLSVELDRLSEESVNNDISSWTKGRSGEALSLLKKRFSHRPVQEKFVCLNCGFETHADEQAALNIARSWLFLRSQEYKKYQTNKTTGNTDKRAFVETWQSFYRKKLKEVWKPAV

SEQ ID NO: 39414 - protein, 978 aa, synthetic construct
  REGION 1..978: note = engineered CasX variant
QEIKRINKIRRRLVKDSNTKKAGKTGPMKTLLVRVMTPDLRERLENLRKKPENIPQPISNTSRANLNKLLTDYTEMKKAILHVYWEEFQKDPVGLMSRVAQPASKKIDQNKLKPEMDEKGNLTTAGFACSQCGQPLFVYKLEQVSEKGKAYTNYFGRCNVAEHEKLILLDQLKPEKDSDEAVTYSLGKFGQRALDFYSIHVTKESTHPVKPLAQIAGNRYASGPVGKALRDACMGTIASFLSKYQDIIIEHQKVVKGNQKRLESLRELAGKENLEYPSVTLPPQPHTKEGVDAYNEVIARVRMWVNLNLWQKLKLSRDDAKPLLRLKGFPSFPLVERQANEVDWWDMVCNVKKLINEKKEDGKVFWQNLAGYKRQEALRPYLSSEEDRKKGKKFARYQLGDLLLHLEKKHGEDWGKVYDEAWERIDKKVEGLSKHIKLEEERRSEDAQSKAALTDWLRAKASFVIEGLKEADKDEFCRCELKLQKWYGDLRGKPFAIEAENSILDISGFSKQYNCAFIWQKDGVKKLNLYLIINYFKGGKLRFKKIKPEAFEANRFYTVINKKSGEIVPMEVNFNFDDPNLIILPLAFGKRQGREFIWNDLLSLETGSLKLANGRVIEKTLYNRRTRQDEPALFVALTFERREVLDSSNIKPMNLIGVDRGENIPAVIALTDPEGCPLSRFKDSLGNPTHILRIGESYKEKQRTIQAKKEVEQRRAGGYSRKYASKAKNLADDMVRNTARDLLYYAVTQDAMLIFENLSRGFGRQGKRTFMAERQYTRMEDWLTAKLAYEGLPSKTYLSKTLAQYTSKTCSNCGFTITSADYDRVLEKLKKTATGWMTTINGKELKVEGQITYYNRYKRQNVVKDLSVELDRLSEESVNNDISSWDKGRSGEALSLLKKRFSHRPVQEKFVCLNCGFETHADEQAALNIARSWLFLRSQEYKKYQTNKTTGNTDKRAFVETWQSFYRKKLKEVWKPAV

SEQ ID NO: 39415 - protein, 978 aa, synthetic construct
  REGION 1..978: note = engineered CasX variant
QEIKRINKIRRRLVKDSNTKKAGKTGPMKTLLVRVMTPDLRERLENLRKKPENIPQPISNTSRANLNKLLTDYTEMKKAILHVYWEEFQVDPVGLMSRVAQPASKKIDQNKLKPEMDEKGNLTTAGFACSQCGQPLFVYKLEQVSEKGKAYTNYFGRCNVAEHEKLILLDQLKPEKDSDEAVTYSLGKFGQRALDFYSIHVTKESTHPVKPLAQIAGNRYASGPVGKALRDACMGTIASFLSKYQDIIIEHQKVVKGNQKRLESLRELAGKENLEYPSVTLPPQPHTKEGVDAYNEVIARVRMWVNLNLWQKLKLSRDDAKPLLRLKGFPSFPLVERQANEVDWWDMVCNVKKLINEKKEDGKVFWQNLAGYKRQEALRPYLSSEEDRKKGKKFARYQLGDLLLHLEKKHGEDWGKVYDEAWERIDKKVEGLSKHIKLEEERRSEDAQSKAALTDWLRAKASFVIEGLKEADKDEFCRCELKLQKWYGDLRGKPFAIEAENSILDISGFSKQYNCAFIWQKDGVKKLNLYLIINYFKGGKLRFKKIKPEAFEANRFYTVINKKSGEIVPMEVNFNFDDPNLIILPLAFGKRQGREFIWNDLLSLETGSLKLANGRVIEKTLYNRRTRQDEPALFVALTFERREVLDSSNIKPMNLIGVDRGENIPAVIALTDPEGCPLSRFKDSLGNPTHILRIGESYKEKQRTIQAKKEVEQRRAGGYSRKYASKAKNLADDMVRNTARDLLYYAVTQDAMLIFENLSRGFGRQGKRTFMAERQYTRMEDWLTAKLAYEGLPSKTYLSKTLAQYTSKTCSNCGFTITSADYDRVLEKLKKTATGWMTTINGKELKVEGQITYYNRYKRQNVVKDLSVELDRLSEESVNNDISSWTKGRSGEALSLLKKRFSHRPVQEKFVCLNCGFETHADEQAALNIARSWLFLRSQEYKKYQTNKTTGNTDKRAFVETWQSFYRKKLKEVWKPAV

SEQ ID NO: 39416 - protein, 978 aa, synthetic construct
  REGION 1..978: note = engineered CasX variant
QEIKRLNKIRRRLVKDSNTKKAGKTGPMKTLLVRVMTPDLRERLENLRKKPENIPQPISNTSRANLNKLLTDYTEMKKAILHVYWEEFQKDPVGLMSRVAQPASKKIDQNKLKPEMDEKGNLTTAGFACSQCGQPLFVYKLEQVSEKGKAYTNYFGRCNVAEHEKLILLDQLKPEKDSDEAVTYSLGKFGQRALDFYSIHVTKESTHPVKPLAQIAGNRYASGPVGKALRDACMGTIASFLSKYQDIIIEHQKVVKGNQKRLESLRELAGKENLEYPSVTLPPQPHTKEGVDAYNEVIARVRMWVNLNLWQKLKLSRDDAKPLLRLKGFPSFPLVERQANEVDWWDMVCNVKKLINEKKEDGKVFWQNLAGYKRQEALRPYLSSEEDRKKGKKFARYQLGDLLLHLEKKHGEDWGKVYDEAWERIDKKVEGLSKHIKLEEERRSEDAQSKAALTDWLRAKASFVIEGLKEADKDEFCRCELKLQKWYGDLRGKPFAIEAENSILDISGFSKQYNCAFIWQKDGVKKLNLYLIINYFKGGKLRFKKIKPEAFEANRFYTVINKKSGEIVPMEVNFNFDDPNLIILPLAFGKRQGREFIWNDLLSLETGSLKLANGRVIEKTLYNRRTRQDEPALFVALTFERREVLDSSNIKPMNLIGVDRGENIPAVIALTDPEGCPLSRFKDSLGNPTHILRIGESYKEKQRTIQAKKEVEQRRAGGYSRKYASKAKNLADDMVRNTARDLLYYAVTQDAMLIFENLSRGFGRQGKRTFMAERQYTRMEDWLTAKLAYEGLPSKTYLSKTLAQYTSKTCSNCGFTITSADYDRVLEKLKKTATGWMTTINGKELKVEGQITYYNRYKRQNVVKDLSVELDRLSEESVNNDISSWTKGRSGEALSLLKKRFSHRPVQEKFVCLNCGFETHADEQAALNIARSWLFLRSQEYKKYQTNKTTGNTDKRAFVETWQSFYRKKLKEVWKPAV

SEQ ID NO: 39417 - protein, 978 aa, synthetic construct
  REGION 1..978: note = engineered CasX variant
QEIKRINKIRRRLVKDSNTKKAGKTGPMKTLLVRVMTPDLRERLENLRKKPENIPQPISNTSRANLNKLLTDYTEMKKAILHVYWEEFQKDPVGLMSRVAQPASKKIDQNKLKPEMDEKGNLTTAGFACSQCGQPLFVYKLEQVSEKGKAYTNYVGRCNVAEHEKLILLDQLKPEKDSDEAVTYSLGKFGQRALDFYSIHVTKESTHPVKPLAQIAGNRYASGPVGKALRDACMGTIASFLSKYQDIIIEHQKVVKGNQKRLESLRELAGKENLEYPSVTLPPQPHTKEGVDAYNEVIARVRMWVNLNLWQKLKLSRDDAKPLLRLKGFPSFPLVERQANEVDWWDMVCNVKKLINEKKEDGKVFWQNLAGYKRQEALRPYLSSEEDRKKGKKFARYQLGDLLLHLEKKHGEDWGKVYDEAWERIDKKVEGLSKHIKLEEERRSEDAQSKAALTDWLRAKASFVIEGLKEADKDEFCRCELKLQKWYGDLRGKPFAIEAENSILDISGFSKQYNCAFIWQKDGVKKLNLYLIINYFKGGKLRFKKIKPEAFEANRFYTVINKKSGEIVPMEVNFNFDDPNLIILPLAFGKRQGREFIWNDLLSLETGSLKLANGRVIEKTLYNRRTRQDEPALFVALTFERREVLDSSNIKPMNLIGVDRGENIPAVIALTDPEGCPLSRFKDSLGNPTHILRIGESYKEKQRTIQAKKEVEQRRAGGYSRKYASKAKNLADDMVRNTARDLLYYAVTQDAMLIFENLSRGFGRQGKRTFMAERQYTRMEDWLTAKLAYEGLPSKTYLSKTLAQYTSKTCSNCGFTITSADYDRVLEKLKKTATGWMTTINGKELKVEGQITYYNRYKRQNVVKDLSVELDRLSEESVNNDISSWTKGRSGEALSLLKKRFSHRPVQEKFVCLNCGFETHADEQAALNIARSWLFLRSQEYKKYQTNKTTGNTDKRAFVETWQSFYRKKLKEVWKPAV

SEQ ID NO: 39418 - protein, 978 aa, synthetic construct
  REGION 1..978: note = engineered CasX variant
QEIKRINKIRRRLVKDSNTKKAGKTGPMKTLLVRVMTPDLRERLENLRKKPENIPQPISNTSRANLNKLLTDYTEMKKAILHVYWEEFQKDPVGLMSRVAQPASKKIDQNKLKPEMDEKGNLTTAGFACSQCGQPLFVYKLEQVSEKGKAYTNYFGRCNVAEHEKLILLDQLKPEKDSDEAVTYSLGKFGQRALDFYSIHVTKESTHPVKPLAQIAGNRYASGPVGKALRDACMGTIASFLSKYQDIIIEHQKVVKGNQKRLESLRELAGKENLEYPSVTLPPQPHTKEGVDAYNEVIARVRMWVNLNLWQKLKLSRDDAKPLLRLKGFPSFPLVERQANEVDWWDMVCNVKKLINEKKEDGKVFWQNLAGYKRQEALRPYLSSEEDRKKGKKFARYQLGDLLLHLEKKHGEDWGKVYDEAWERIDKKVEGLSKHIKLEEERRSEDAQSKAALTDWLRAKASFVIEGLKEADKDEFCRCELKLQKWYGDLRGKPFAIEAENSILDISGFSKQYNCAFIWQKDGVKKLNLYLIINYFKGGKLRFKKIKPEAFEANRFYTVINKKSGEIVPMEVNFNFDDPNLIILPLAFGKRQGREFIWNDLLSLETGSLKLANGRVIEKTLYNRRTRQDEPALFVALTFERREVLDSSNIKPMNLIGVDRGENIPAVIALTDPEGCPLSRFKDSLGNPTHILRIGESYKEKQRTIQAKKEVEQRRAGGYSRKYASKAKNLADDMVRNTARDLLYYAVTQDAMLIFENLSRGFGRQGKRTFMAERQYTRMEDWLTAKLAYEGLASKTYLSKTLAQYTSKTCSNCGFTITSADYDRVLEKLKKTATGWMTTINGKELKVEGQITYYNRYKRQNVVKDLSVELDRLSEESVNNDISSWTKGRSGEALSLLKKRFSHRPVQEKFVCLNCGFETHADEQAALNIARSWLFLRSQEYKKYQTNKTTGNTDKRAFVETWQSFYRKKLKEVWKPAV

SEQ ID NO: 39419 - protein, 978 aa, synthetic construct
  REGION 1..978: note = engineered CasX variant
QEIKRINKIRRRLVKDSNTKKAGKTGPMKTLLVRVMTPDLRERLENLRKKPENIPQPISNTSRANLNKLLTDYTEMKKAILHVYWEEFQKDPVGLMSRVAQPASKKIDQNKLKPEMDEKGNLTTAGFACSQCGQPLFVYKLEQVSEKGKAYTNYFGRCNVAEHEKLILLDQLKPEKDSDEAVTYSLGKFGQRALDFYSIHVTKESTHPVKPLAQIAGNRYASGPVGKALRDACMGTIASFLSKYQDIIIEHQKVVKGNQKRLESLRELAGKENLEYPSVTLPPQPHTKEGVDAYNEVIARVRMWVNLNLWQKLKLSRDDAKPLLRLKGFPSFPLVERQANEVDWWDMVCNVKKLINEKKEDGKVFWQNLAGYKRQEALRPYLSSEEDRKKGKKFARYQLGDLLLHLEKKHGEDWGKVYDEAWERIDKKVEGLSKHIKLEEERRSEDAQSKAALTDWLRAKASFVIEGLKEADKDEFCRCELKLQKWYGDLRGKPFAIEAENSILDISGFSKQYNCAFIWQKDGVKKLNLYLIINYFKGGKLRFKKIKPEAFEANRFYTVINKKSGEIVPMEVNFNFDDPNLIILPLAFGKRQGREFIWNDLLSLETGSLKLANGRVIEKTLYNRRTRQDEPALFVALTFERREVLDSSNIKPMNLIGVDRGENIPAVIALTDPEGCPLSRFKDSLGNPTHILRIGESYKEKQRTIQAKKEVEQRRAGGYSRKYASKAKNLADDMVRNTARDLLYYAVTQDAMLIFENLSRGFGRQGKRTFMAERQYTRMEDWLTAKLAYEGLPSKVYLSKTLAQYTSKTCSNCGFTITSADYDRVLEKLKKTATGWMTTINGKELKVEGQITYYNRYKRQNVVKDLSVELDRLSEESVNNDISSWTKGRSGEALSLLKKRFSHRPVQEKFVCLNCGFETHADEQAALNIARSWLFLRSQEYKKYQTNKTTGNTDKRAFVETWQSFYRKKLKEVWKPAV

SEQ ID NO: 39420 - protein, 979 aa, synthetic construct
  REGION 1..979: note = engineered CasX variant
QEIKRINKIRRRLVKDSNTKKAGKTGPMKTLLVRVMTPDLRERLENLRKKPENIPQPISNTSRANLNKLLTDYTEMKKAILHVYWEEFQKDPVGLMSRVAQPASKKIDQNKLKPEMDEKGNLTTAGFACSQCGQPLFVYKLEQVSEKGKAYTNYFGRCNVAEHEKLILLDQLKPEKDSDEAVTYSLGKFGQRALDFYSIHVTKESTHPVKPLAQIAGNRYASGPVGKALRDACMGTIASFLSKYQDIIIEHQKVVKGNQKRLESLRELAGKENLEYPSVTLPPQPHTKEGVDAYNEVIARVRMWVNLNLWQKLKLSRDDAKPLLRLKGFPSFPLVERQANEVDWWDMVCNVKKLINEKKEDGKVFWQNLAGYKRQEALRPYLSSEEDRKKGKKFARYQLGDLLLHLEKKHGEDWGKVYDEAWERIDKKVEGLSKHIKLEEERRSEDAQSKAALTDWLRAKASFVIEGLKEADKDEFCRCELKLQKWYGDLRGKPFAIEAENSILDISGFSKQYNCAFIWQKDGVKKLNLYLIINYFKGGKLRFKKIKPEAFEANRFYTVINKKSGEIVPMEVNFNFDDPNLIILPLAFGKRQGREFIWNDLLSLETGSLKLANGRVIEKTLYNRRTRQDEPALFVALTFERREVLDSSNIKPMNLIGVDRGENIPAVIALTDPEGCPLSRFKDSLGNPTHILRIGESYKEKQRTIQAKKEVEQRRAGGYSRKYASKAKNLADDMVRNTARDLLYYAVTQDAMLIFENLSRGFGRQGKRTFMAERQYTRMEDWLTAKLAYEGPLPSKTYLSKTLAQYTSKTCSNCGFTITSADYDRVLEKLKKTATGWMTTINGKELKVEGQITYYNRYKRQNVVKDLSVELDRLSEESVNNDISSWTKGRSGEALSLLKKRFSHRPVQEKFVCLNCGFETHADEQAALNIARSWLFLRSQEYKKYQTNKTTGNTDKRAFVETWQSFYRKKLKEVWKPAV

SEQ ID NO: 39421 - protein, 979 aa, synthetic construct
  REGION 1..979: note = engineered CasX variant
QEIKRINKIRRRLVKDSNTKKAGKTGPMKTLLVRVMTPDLRERLENLRKKPENIPQPISNTSRANLNKLLTDYTEMKKAILHVYWEEFQKDPVGLMSRVAQPASKKIDQNKLKPEMDEKGNLTTAGFACSQCGQPLFVYKLEQVSEKGKAYTNYFGRCNVAEHEKLILLDQLKPEKDSDEAVTYSLGKFGQRALDFYSIHVTKESTHPVKPLAQIAGNRYASGPVGKALRDACMGTIASFLSKYQDIIIEHQKVVKGNQKRLESLRELAGKENLEYPSVTLPPQPHTKEGVDAYNEVIARVRMWVNLNLWQKLKLSRDDAKPLLRLKGFPSFPLVERQANEVDWWDMVCNVKKLINEKKEDGKVFWQNLAGYKRQEALRPYLSSEEDVRKKGKKFARYQLGDLLLHLEKKHGEDWGKVYDEAWERIDKKVEGLSKHIKLEEERRSEDAQSKAALTDWLRAKASFVIEGLKEADKDEFCRCELKLQKWYGDLRGKPFAIEAENSILDISGFSKQYNCAFIWQKDGVKKLNLYLIINYFKGGKLRFKKIKPEAFEANRFYTVINKKSGEIVPMEVNFNFDDPNLIILPLAFGKRQGREFIWNDLLSLETGSLKLANGRVIEKTLYNRRTRQDEPALFVALTFERREVLDSSNIKPMNLIGVDRGENIPAVIALTDPEGCPLSRFKDSLGNPTHILRIGESYKEKQRTIQAKKEVEQRRAGGYSRKYASKAKNLADDMVRNTARDLLYYAVTQDAMLIFENLSRGFGRQGKRTFMAERQYTRMEDWLTAKLAYEGLPSKTYLSKTLAQYTSKTCSNCGFTITSADYDRVLEKLKKTATGWMTTINGKELKVEGQITYYNRYKRQNVVKDLSVELDRLSEESVNNDISSWTKGRSGEALSLLKKRFSHRPVQEKFVCLNCGFETHADEQAALNIARSWLFLRSQEYKKYQTNKTTGNTDKRAFVETWQSFYRKKLKEVWKPAV

SEQ ID NO: 39422 - protein, 978 aa, synthetic construct
  REGION 1..978: note = engineered CasX variant
QEIKRINKIRRRLVKDSNTKKAGKTGPMKTLLVRVMTPDLRERLENLRKKPENIPQPISNTSRANLNKLLTDYTEMKKAILHVYWEEFQKDPVGLMSRVAQPASKKIDQNKLKPEMDEKGNLTTAGFACSQCGQPLFVYKLEQVSEKGKAYTNYFGRCNVAEHEKLILLDQLKPEKDSDEAVTYSLGKFGQRALDFYSIHVTKESTHPVKPLAQIAGNRYASGPVGKALRDACMGTIASFLSKYQDIIIEHQKVVKGNQKRLESLRELAGKENLEYPSVTLPPQPHTKEGVDAYNEVIARVRMWVNLNLWQKLKLSRDDAKPLLRLKGFPSFPLVERQANEVDWWDMVCNVKKLINEKKEDGKVFWQNLAGYKRQEALRPYLSSEEDRKKGKKFARYQLGDLLLHLEKKHGEDWGKVYDEAWERIDKKVEGLSKHIKLEEERRSEDAQSKAALTDWLRAKASFVIEGLKEADKDEFCRCELKLQKWYGDLRGKPFAIEAENSILDISGFSKQYNCAFIWQKDGVKKLNLYLIINYFKGGKLRFKKIKPEAFEANRFYTVINKKSGEIVPMEVNFNFDDPNLIILPLAFGKRQGREFIWNDLLSLETGSLKLANGRVIEKTLYNRRTRQDEPALFVALTFERREVLDSSNIKPMNLIGVDRGENIPAVIALTDPEGCPLSRFKDSLGNPTHILRIGESYKEKQRTIQAKKEVEQRRAGGYSRKYASKAKNLADDMVRNTARDLLYYAVTQDAMLIFENLSRGFGRQGKRTFMAERQYTRMEDWLTAKLAYEGLPSKTYLSKTLAQYTSKTCSNCGFTITSADYDRMLEKLKKTATGWMTTINGKELKVEGQITYYNRYKRQNVVKDLSVELDRLSEESVNNDISSWTKGRSGEALSLLKKRFSHRPVQEKFVCLNCGFETHADEQAALNIARSWLFLRSQEYKKYQTNKTTGNTDKRAFVETWQSFYRKKLKEVWKPAV

SEQ ID NO: 39423 - protein, 978 aa, synthetic construct
  REGION 1..978: note = engineered CasX variant
QEIKRINKIRRRLVKDSNTKKAGKTGPMKTLLVRVMTPDLRERLENLRKKPENIPQPISNTSRANLNKLLTDYTEMKKAILHVYWEEFQKDPVGLMSRVAQPASKKIDQNKLKPEMDEKGNLTTAGFACSQCGQPLFVYKLEQVSEKGKAYTNYFGRCNVAEHEKLILLDQLKPEKDSDEAVTYSLGKFGQRALDFYSIHVTKESTHPVKPLAQIAGNRYASGPVGKALRDACMGTIASFLSKYQDIIIEHQKVVKGNQKRLESLRELAGKENLEYPSVTLPPQPHTKEGVDAYNEVIARVRMWVNLNLWQKLKLSRDDAKPLLRLKGFPSFPLVERQANEVDWWDMVCNVKKLINEKKEDGKVFWQNLAGYKRQEALRPYLSSEEDRKKGKKFARYQLGDLLLHLEKKHGEDWGKVYDEAWERIDKKVEGLSKHIKLEEERRSEDAQSKAALTDWLRAKASFVIEGLKEADKDEFCRCELKLQKWYGDLRGKPFAIEAENSILDISGFSKQYNCAFIWQKDGVKKLNLYLIINYFKGGKLRFKKIKPEAFEANRFYTVINKKSGEIVPMEVNFNFDDPNLIILPLAFGKRQGREFIWNDLLSLETGSLKLANGRVIEKTLYNRRTRQDEPALFVALTFERREVLDSSNIKPMNLIGVDRGENIPAVIALTDPEGCPLSRFKDSLGNPTHILRIGESYKEKQRTIQAKKEVEQRRAGGYSRKYASKAKNLADDMVRNTARDLLYYAVTQDAMLIFENLSRGFGRQGKRTFMAERQYTRMEDWLTAKLAYEGLPSKTYLSKTLAQYTSKTCSNCGFTITSADYDRVLEKLKKTATGWMTTINGKELKVEGQITYYNRYKRQNVVKDLSVELDRLSEESVNNDISSWTKGRQGEALSLLKKRFSHRPVQEKFVCLNCGFETHADEQAALNIARSWLFLRSQEYKKYQTNKTTGNTDKRAFVETWQSFYRKKLKEVWKPAV

SEQ ID NO: 39424 - protein, 978 aa, synthetic construct
  REGION 1..978: note = engineered CasX variant
QEIKRINKIRRRLVKDSNTKKAGKTGPMKTLLVRVMTPDLRERLENLRKKPENIPQPISNTSRANLNKLLTDYTEMKKAILHVYWEEFQKDPVGLMSRVAQPASKKIDQNKLKPEMDEKGNLTTAGFACSQCGQPLFVYKLEQVSEKGKAYTNYFGRCNVAEHEKLILLDQLKPEKDSDEAVTYSLGKFGQRALDFYSIHVTKESTHPVKPLAQIAGNRYASGPVGKALRDACMGTIASFLSKYQDIIIEHQKVVKGNQKRLESLRELAGKENLEYPSVTLPPQPHTKEGVDAYNEVIARVRMWVNLNLWQKLKLSRDDAKPLLRLKGFPSFPLVERQANEVDWWDMVCNVKKLINEKKEDGKVFWQNLAGYKRQEALRPYLSSEEDRKKGKKFARYQLGDLLLHLEKKHGEDWGKVYDEAWERIDKKVEGLSKHIKLEEERRSEDAQSKAALTDWLRAKASFVIEGLKEADKDEFCRCELKLQKWYGDLRGKPFAIEAENSILDISGFSKQYNCAFIWQKDGVKKLNLYLIINYFKGGKLRFKKIKPEAFEANRFYTVINKKSGEIVPMEVNFNFDDPNLIILPLAFGKRQGREFIWNDLLSLETGSLKLANGRVIEKTLYNRRTRQDEPALFVALTFERREVLDSSNIKPMNLIGVDRGENIPAVIALTDPEGCPLSRFKDSLGNPTHILRIGESYKEKQRTIQAKKEVEQRRAGGYSRKYASKAKNLADDMVRNTARDLLYYAVTQDAMLIFENLSRGFGRQGKRTFMAERQYTRMEDWLTAKLAYEGLPSKTYLSKTLAQYTSKTCSNCGFTITSADYDRVLEKLKKTATGWMTTINGKELKVEGQITYYNRYKRQNVVKDLSVELDRLSEESVNNDISSWTKGRSGEALSLLKKRFSHRPVQEKFVCLNCEFETHADEQAALNIARSWLFLRSQEYKKYQTNKTTGNTDKRAFVETWQSFYRKKLKEVWKPAV

SEQ ID NO: 39425 - protein, 979 aa, synthetic construct
  REGION 1..979: note = engineered CasX variant
QEIKRINKIRRRLVKDSNTKKAGKTGPMKTLLVRVMTPDLRERLENLRKKPENIPQPISNTSRANLNKLLTDYTEMKKAILHVYWEEFQKDPVGLMSRVAQPASKKIDQNKLKPEMDEKGNLTTAGFACSQCGQPLFVYKLEQVSEKGKAYTNYFGRCNVAEHEKLILLDQLKPEKDSDEAVTYSLGKFGQRALDFYSIHVTKESTHPVKPLAQIAGNRYASGPVGKALRDACMGTIASFLSKYQDIIIEHQKVVKGNQKRLESLRELAGKENLEYPSVTLPPQPHTKEGVDAYNEVIARVRMWVNLNLWQKLKLSRDDAKPLLRLKGFPSFPLVERQANEVDWWDMVCNVKKLINEKKEDGKVFWQNLAGYKRQEALRPYLSSEEDRKKGKKFARYQLGDLLLHLEKKHGEDWGKVYDEAWERIDKKVEGLSKHIKLEEERRSEDAQSKAALTDWLRAKASFVIEGLKEADKDEFCRCELKLQKWYGDLRGKPFAIEAENSILDISGFSKQYNCAFIWQKDGVKKLNLYLIINYFKGGKLRFKKIKPEAFEANRFYTVINKKSGEIVPMEVNFNFDDPNLIILPLAFGKRQGREFIWNDLLSLETGSLKLANGRVIEKTLYNRRTRQDEPALFVALTFERREVLDSSNIKPMNLIGVDRGENIPAVIALTDPEGCPLSRFKDSLGNPTHILRIGESYKEKQRTIQAKKEVEQRRAGGYSRKYASKAKNLADDMVRNTARDLLYYAVTQDAMLIFENLSRGFGRQGKRTFMAERQYTRMEDWLTAKLAYEGLPSKTYLSKTLAQYTSKTCSNCGFTITSADYDRVLEKLKKTATGWMTTINGKELKVEGQITYYNRYKRQNVVKDLSVELDRLSEESVNNDISSWTKGRSGEALSLLKKRFSHRPVQEKFVCLNCGFETHADEQAALNIARSWLFLRSQEYKKYQTNKTSTGNTDKRAFVETWQSFYRKKLKEVWKPAV

SEQ ID NO: 39426 - protein, 979 aa, synthetic construct
  REGION 1..979: note = engineered CasX variant
QEIKRINKIRRRLVKDSNTKKAGKTGPMKTLLVRVMTPDLRERLENLRKKPENIPQPISNTSRANLNKLLTDYTEMKKAILHVYWEEFQKDPVGLMSRVAQPASKKIDQNKLKPEMDEKGNLTTAGFACSQCGQPLFVYKLEQVSEKGKAYTNYFGRCNVAEHEKLILLDQLKPEKDSDEAVTYSLGKFGQRALDFYSIHVTKESTHPVKPLAQIAGNRYASGPVGKALRDACMGTIASFLSKYQDIIIEHQKVVKGNQKRLESLRELAGKENLEYPSVTLPPQPHTKEGVDAYNEVIARVRMWVNLNLWQKLKLSRDDAKPLLRLKGFPSFPLVERQANEVDWWDMVCNVKKLINEKKEDGKVFWQNLAGYKRQEALRPYLSSEEDRKKGKKFARYQLGDLLLHLEKKHGEDWGKVYDEAWERIDKKVEGLSKHIKLEEERRSEDAQSKAALTDWLRAKASFVIEGLKEADKDEFCRCELKLQKWYGDLRGKPFAIEAENSILDISGFSKQYNCAFIWQKDGVKKLNLYLIINYFKGGKLRFKKIKPEAFEANRFYTVINKKSGEIVPMEVNFNFDDPNLIILPLAFGKRQGREFIWNDLLSLETGSLKLANGRVIEKTLYNRRTRQDEPALFVALTFERREVLDSSNIKPMNLIGVDRGENIPAVIALTDPEGCPLSRFKDSLGNPTHILRIGESYKEKQRTIQAKKEVEQRRAGGYSRKYASKAKNLADDMVRNTARDLLYYAVTQDAMLIFENLSRGFGRQGKRTFMAERQYTRMEDWLTAKLAYEGLPSKTYLSKTLAQYTSKTCSNCGFTITSADYDRVLEKLKKTATGWMTTINGKELKVEGQITYYNRYKRQNVVKDLSVELDRLSEESVNNDISSWTKGRSGEALSLLKKRFSHRPVQEKFVCLNCGFETHADEQAALNIARSWLFLRSQEYKKYQTNKTTGKNTDKRAFVETWQSFYRKKLKEVWKPAV

SEQ ID NO: 39427 - protein, 978 aa, synthetic construct
  REGION 1..978: note = engineered CasX variant
QEIKRINKIRRRLVKDSNTKKAGKTGPMKTLLVRVMTPDLRERLENLRKKPENIPQPISNTSRANLNKLLTDYTEMKKAILHVYWEEFQKDPVGLMSRVAQPASKKIDQNKLKPEMDEKGNLTTAGFACSQCGQPLFVYKLEQVSEKGKAYTNYFGRCNVAEHEKLILLDQLKPEKDSDEAVTYSLGKFGQRALDFYSIHVTKESTHPVKPLAQIAGNRYASGPVGKALRDACMGTIASFLSKYQDIIIEHQKVVKGNQKRLESLRELAGKENLEYPSVTLPPQPHTKEGVDAYNEVIARVRMWVNLNLWQKLKLSRDDAKPLLRLKKFPSFPLVERQANEVDWWDMVCNVKKLINEKKEDGKVFWQNLAGYKRQEALRPYLSSEEDRKKGKKFARYQLGDLLLHLEKKHGEDWGKVYDEAWERIDKKVEGLSKHIKLEEERRSEDAQSKAALTDWLRAKASFVIEGLKEADKDEFCRCELKLQKWYGDLRGKPFAIEAENSILDISGFSKQYNCAFIWQKDGVKKLNLYLIINYFKGGKLRFKKIKPEAFEANRFYTVINKKSGEIVPMEVNFNFDDPNLIILPLAFGKRQGREFIWNDLLSLETGSLKLANGRVIEKTLYNRRTRQDEPALFVALTFERREVLDSSNIKPMNLIGVDRGENIPAVIALTDPEGCPLSRFKDSLGNPTHILRIGESYKEKQRTIQAKKEVEQRRAGGYSRKYASKAKNLADDMVRNTARDLLYYAVTQDAMLIFENLSRGFGRQGKRTFMAERQYTRMEDWLTAKLAYEGLPSKTYLSKTLAQYTSKTCSNCGFTITSADYDRVLEKLKKTATGWMTTINGKELKVEGQITYYNRYKRQNVVKDLSVELDRLSEESVNNDISSWTKGRSGEALSLLKKRFSHRPVQEKFVCLNCGFETHADEQAALNIARSWLFLRSQEYKKYQTNKTTGNTDKRAFVETWQSFYRKKLKEVWKPAV

SEQ ID NO: 39428 - protein, 978 aa, synthetic construct
  REGION 1..978: note = engineered CasX variant
QEIKRINKIRRRLVKDSNTKKAGKTGPMKTLLVRVMTPDLRERLENLRKKPENIPQPISNTSRANLNKLLTDYTEMKKAILHVYWEEFQKDPVGLMSRVAQPASKKIDQNKLKPEMDEKGNLTTAGFACSQCGQPLFVYKLEQVSEKGKAYTNYFGRCNVAEHEKLILLDQLKPEKDSDEAVTYSLGKFGQRALDFYSIHVTKESTHPVKPLAQIAGNRYASGPVGKALRDACMGTIASFLSKYQDIIIEHQKVVKGNQKRLESLRELAGKENLEYPSVTLPPQPHTKEGVDAYNEVIARVRMWVNLNLWQKLKLSRDDAKPLLRLKGFPSFPLVERQANEVDWWDMVCNVKKLINEKKEDGKVFWQNLAGYKRQEALRPYLSSEEDRKKGKKFARYQLGDLLLHLEKKHGEDWGKVYDEAWERIDKKVEGLSKHIKLEEERRSEDAQSKAALTDWLRAKASFVIEGLKEADKDEFCRCELKLQKWYGDLRGKPFAIEAENSILDISGFSKQYNCAFIWQKDGVKKLNLYLIINYFKGGKLRFKKIKPEAFEANRFYTVINKKSGEIVPMEVNFNFDDPNLIILPLAFGKRQGREFIWNDLLSLETGSLKLANGRVIEKTLYNRRTRQDEPALFVALTFERREVLDSSNIKPMNLIGVDRGENIPAVIALTDPEGCPLSRFKDSLGNPTHILRIGERYKEKQRTIQAKKEVEQRRAGGYSRKYASKAKNLADDMVRNTARDLLYYAVTQDAMLIFENLSRGFGRQGKRTFMAERQYTRMEDWLTAKLAYEGLPSKTYLSKTLAQYTSKTCSNCGFTITSADYDRVLEKLKKTATGWMTTINGKELKVEGQITYYNRYKRQNVVKDLSVELDRLSEESVNNDISSWTKGRSGEALSLLKKRFSHRPVQEKFVCLNCGFETHADEQAALNIARSWLFLRSQEYKKYQTNKTTGNTDKRAFVETWQSFYRKKLKEVWKPAV

SEQ ID NO: 39429 - protein, 978 aa, synthetic construct
  REGION 1..978: note = engineered CasX variant
QEIKRINKIRRRLVKDSNTKKAGKTGPMKTLLVRVMTPDLRERLENLRKKPENIPQPISNTSRANLNKLLTDYTEMKKAILHVYWEEFQKDPVGLMSRVAQPASKKIDQNKLKPEMDEKGNLTTAGFACSQCGQPLFVYKLEQVSEKGKAYTNYFGRCNVAEHEKLILLDQLKPEKDSDEAVTYSLGKFGQRALDFYSIHVTKESTHPVKPLAQIAGNRYASGPVGKALRDACMGTIASFLSKYQDIIIEHQKVVKGNQKRLESLRELAGKENLEYPSVTLPPQPHTKEGVDAYNEVIARVRMWVNLNLWQKLKLSRDDAKPLLRLKGFPSFPLVERQANEVDWWDMVCNVKKLINEKKEDGKVFWQNLAGYKRQEALRPYLSSEEDRKKGKKFARYQLGDLLLHLEKKHGEDWGKVYDEAWERIDKKVEGLSKHIKLEEERRSEDAQSKAALTDWLRAKASFVIEGLKEADKDEFCRCELKLQKWYGDLRGKPFAIEAENSILDISGFSKQYNCAFIWQKDGVKKLNLYLIINYFKGGKLRFKKIKPEAFEANRFYTVINKKSGEIVPMEVNFNFDDPNLIILPLAFGKRQGREFIWNDLLSLETGSLQLANGRVIEKTLYNRRTRQDEPALFVALTFERREVLDSSNIKPMNLIGVDRGENIPAVIALTDPEGCPLSRFKDSLGNPTHILRIGESYKEKQRTIQAKKEVEQRRAGGYSRKYASKAKNLADDMVRNTARDLLYYAVTQDAMLIFENLSRGFGRQGKRTFMAERQYTRMEDWLTAKLAYEGLPSKTYLSKTLAQYTSKTCSNCGFTITSADYDRVLEKLKKTATGWMTTINGKELKVEGQITYYNRYKRQNVVKDLSVELDRLSEESVNNDISSWTKGRSGEALSLLKKRFSHRPVQEKFVCLNCGFETHADEQAALNIARSWLFLRSQEYKKYQTNKTTGNTDKRAFVETWQSFYRKKLKEVWKPAV

SEQ ID NO: 39430 - protein, 979 aa, synthetic construct
  REGION 1..979: note = engineered CasX variant
QEGGKRINKIRRRLVKDSNTKKAGKTGPMKTLLVRVMTPDLRERLENLRKKPENIPQPISNTSRANLNKLLTDYTEMKKAILHVYWEEFQKDPVGLMSRVAQPASKKIDQNKLKPEMDEKGNLTTAGFACSQCGQPLFVYKLEQVSEKGKAYTNYFGRCNVAEHEKLILLAQLKPEKDSDEAVTYSLGKFGQRALDFYSIHVTKESTHPVKPLAQIAGNRYASGPVGKALRDACMGTIASFLSKYQDIIIEHQKVVKGNQKRLESLRELAGKENLEYPSVTLPPQPHTKEGVDAYNEVIARVRMWVNLNLWQKLKLSRDDAKPLLRLKGFPSFPLVERQANEVDWWDMVCNVKKLINEKKEDGKVFWQNLAGYKRQEALRPYLSSEEDRKKGKKFARYQLGDLLLHLEKKHGEDWGKVYDEAWERIDKKVEGLSKHIKLEEERRSEDAQSKAALTDWLRAKASFVIEGLKEADKDEFCRCELKLQKWYGDLRGKPFAIEAENSILDISGFSKQYNCAFIWQKDGVKKLNLYLIINYFKGGKLRFKKIKPEAFEANRFYTVINKKSGEIVPMEVNFNFDDPNLIILPLAFGKRQGREFIWNDLLSLETGSLKLANGRVIEKTLYNRRTRQDEPALFVALTFERREVLDSSNIKPMNLIGVDRGENIPAVIALTDPEGCPLSRFKDSLGNPTHILRIGESYKEKQRTIQAKKEVEQRRAGGYSRKYASKAKNLADDMVRNTARDLLYYAVTQDAMLIFENLSRGFGRQGKRTFMAERQYTRMEDWLTAKLAYEGLPSKTYLSKTLAQYTSKTCSNCGFTITSADYDRVLEKLKKTATGWMTTINGKELKVEGQITYYNRYKRQNVVKDLSVELDRLSEESVNNDISSWTKGRSGEALSLLKKRFSHRPVQEKFVCLNCGFETHADEQAALNIARSWLFLRSQEYKKYQTNKTTGNTDKRAFVETWQSFYRKKLKEVWKPAV

SEQ ID NO: 39431 - protein, 978 aa, synthetic construct
  REGION 1..978: note = engineered CasX variant
QEGGRINKIRRRLVKDSNTKKAGKTGPMKTLLVRVMTPDLRERLENLRKKPENIPQPISNTSRANLNKLLTDYTEMKKAILHVYWEEFQKDPVGLMSRVAQPASKKIDQNKLKPEMDEKGNLTTAGFACSQCGQPLFVYKLEQVSEKGKAYTNYFGRCNVAEHEKLILLAQLKPEKDSDEAVTYSLGKFGQRALDFYSIHVTKESTHPVKPLAQIAGNRYASGPVGKALRDACMGTIASFLSKYQDIIIEHQKVVKGNQKRLESLRELAGKENLEYPSVTLPPQPHTKEGVDAYNEVIARVRMWVNLNLWQKLKLSRDDAKPLLRLKGFPSFPLVERQANEVDWWDMVCNVKKLINEKKEDGKVFWQNLAGYKRQEALRPYLSSEEDRKKGKKFARYQLGDLLLHLEKKHGEDWGKVYDEAWERIDKKVEGLSKHIKLEEERRSEDAQSKAALTDWLRAKASFVIEGLKEADKDEFCRCELKLQKWYGDLRGKPFAIEAENSILDISGFSKQYNCAFIWQKDGVKKLNLYLIINYFKGGKLRFKKIKPEAFEANRFYTVINKKSGEIVPMEVNFNFDDPNLIILPLAFGKRQGREFIWNDLLSLETGSLKLANGRVIEKTLYNRRTRQDEPALFVALTFERREVLDSSNIKPMNLIGVDRGENIPAVIALTDPEGCPLSRFKDSLGNPTHILRIGESYKEKQRTIQAKKEVEQRRAGGYSRKYASKAKNLADDMVRNTARDLLYYAVTQDAMLIFENLSRGFGRQGKRTFMAERQYTRMEDWLTAKLAYEGLPSKTYLSKTLAQYTSKTCSNCGFTITSADYDRVLEKLKKTATGWMTTINGKELKVEGQITYYNRYKRQNVVKDLSVELDRLSEESVNNDISSWTKGRSGEALSLLKKRFSHRPVQEKFVCLNCGFETHADEQAALNIARSWLFLRSQEYKKYQTNKTTGNTDKRAFVETWQSFYRKKLKEVWKPAV

SEQ ID NO: 39432 - protein, 979 aa, synthetic construct
  REGION 1..979: note = engineered CasX variant
QEGKGRINKIRRRLVKDSNTKKAGKTGPMKTLLVRVMTPDLRERLENLRKKPENIPQPISNTSRANLNKLLTDYTEMKKAILHVYWEEFQKDPVGLMSRVAQPASKKIDQNKLKPEMDEKGNLTTAGFACSQCGQPLFVYKLEQVSEKGKAYTNYFGRCNVAEHEKLILLAQLKPEKDSDEAVTYSLGKFGQRALDFYSIHVTKESTHPVKPLAQIAGNRYASGPVGKALRDACMGTIASFLSKYQDIIIEHQKVVKGNQKRLESLRELAGKENLEYPSVTLPPQPHTKEGVDAYNEVIARVRMWVNLNLWQKLKLSRDDAKPLLRLKGFPSFPLVERQANEVDWWDMVCNVKKLINEKKEDGKVFWQNLAGYKRQEALRPYLSSEEDRKKGKKFARYQLGDLLLHLEKKHGEDWGKVYDEAWERIDKKVEGLSKHIKLEEERRSEDAQSKAALTDWLRAKASFVIEGLKEADKDEFCRCELKLQKWYGDLRGKPFAIEAENSILDISGFSKQYNCAFIWQKDGVKKLNLYLIINYFKGGKLRFKKIKPEAFEANRFYTVINKKSGEIVPMEVNFNFDDPNLIILPLAFGKRQGREFIWNDLLSLETGSLKLANGRVIEKTLYNRRTRQDEPALFVALTFERREVLDSSNIKPMNLIGVDRGENIPAVIALTDPEGCPLSRFKDSLGNPTHILRIGESYKEKQRTIQAKKEVEQRRAGGYSRKYASKAKNLADDMVRNTARDLLYYAVTQDAMLIFENLSRGFGRQGKRTFMAERQYTRMEDWLTAKLAYEGLPSKTYLSKTLAQYTSKTCSNCGFTITSADYDRVLEKLKKTATGWMTTINGKELKVEGQITYYNRYKRQNVVKDLSVELDRLSEESVNNDISSWTKGRSGEALSLLKKRFSHRPVQEKFVCLNCGFETHADEQAALNIARSWLFLRSQEYKKYQTNKTTGNTDKRAFVETWQSFYRKKLKEVWKPAV

SEQ ID NO: 39433 - protein, 978 aa, synthetic construct
  REGION 1..978: note = engineered CasX variant
QEGKRANKIRRRLVKDSNTKKAGKTGPMKTLLVRVMTPDLRERLENLRKKPENIPQPISNTSRANLNKLLTDYTEMKKAILHVYWEEFQKDPVGLMSRVAQPASKKIDQNKLKPEMDEKGNLTTAGFACSQCGQPLFVYKLEQVSEKGKAYTNYFGRCNVAEHEKLILLAQLKPEKDSDEAVTYSLGKFGQRALDFYSIHVTKESTHPVKPLAQIAGNRYASGPVGKALRDACMGTIASFLSKYQDIIIEHQKVVKGNQKRLESLRELAGKENLEYPSVTLPPQPHTKEGVDAYNEVIARVRMWVNLNLWQKLKLSRDDAKPLLRLKGFPSFPLVERQANEVDWWDMVCNVKKLINEKKEDGKVFWQNLAGYKRQEALRPYLSSEEDRKKGKKFARYQLGDLLLHLEKKHGEDWGKVYDEAWERIDKKVEGLSKHIKLEEERRSEDAQSKAALTDWLRAKASFVIEGLKEADKDEFCRCELKLQKWYGDLRGKPFAIEAENSILDISGFSKQYNCAFIWQKDGVKKLNLYLIINYFKGGKLRFKKIKPEAFEANRFYTVINKKSGEIVPMEVNFNFDDPNLIILPLAFGKRQGREFIWNDLLSLETGSLKLANGRVIEKTLYNRRTRQDEPALFVALTFERREVLDSSNIKPMNLIGVDRGENIPAVIALTDPEGCPLSRFKDSLGNPTHILRIGESYKEKQRTIQAKKEVEQRRAGGYSRKYASKAKNLADDMVRNTARDLLYYAVTQDAMLIFENLSRGFGRQGKRTFMAERQYTRMEDWLTAKLAYEGLPSKTYLSKTLAQYTSKTCSNCGFTITSADYDRVLEKLKKTATGWMTTINGKELKVEGQITYYNRYKRQNVVKDLSVELDRLSEESVNNDISSWTKGRSGEALSLLKKRFSHRPVQEKFVCLNCGFETHADEQAALNIARSWLFLRSQEYKKYQTNKTTGNTDKRAFVETWQSFYRKKLKEVWKPAV

SEQ ID NO: 39434 - protein, 978 aa, synthetic construct
  REGION 1..978: note = engineered CasX variant
QEGKRISKIRRRLVKDSNTKKAGKTGPMKTLLVRVMTPDLRERLENLRKKPENIPQPISNTSRANLNKLLTDYTEMKKAILHVYWEEFQKDPVGLMSRVAQPASKKIDQNKLKPEMDEKGNLTTAGFACSQCGQPLFVYKLEQVSEKGKAYTNYFGRCNVAEHEKLILLAQLKPEKDSDEAVTYSLGKFGQRALDFYSIHVTKESTHPVKPLAQIAGNRYASGPVGKALRDACMGTIASFLSKYQDIIIEHQKVVKGNQKRLESLRELAGKENLEYPSVTLPPQPHTKEGVDAYNEVIARVRMWVNLNLWQKLKLSRDDAKPLLRLKGFPSFPLVERQANEVDWWDMVCNVKKLINEKKEDGKVFWQNLAGYKRQEALRPYLSSEEDRKKGKKFARYQLGDLLLHLEKKHGEDWGKVYDEAWERIDKKVEGLSKHIKLEEERRSEDAQSKAALTDWLRAKASFVIEGLKEADKDEFCRCELKLQKWYGDLRGKPFAIEAENSILDISGFSKQYNCAFIWQKDGVKKLNLYLIINYFKGGKLRFKKIKPEAFEANRFYTVINKKSGEIVPMEVNFNFDDPNLIILPLAFGKRQGREFIWNDLLSLETGSLKLANGRVIEKTLYNRRTRQDEPALFVALTFERREVLDSSNIKPMNLIGVDRGENIPAVIALTDPEGCPLSRFKDSLGNPTHILRIGESYKEKQRTIQAKKEVEQRRAGGYSRKYASKAKNLADDMVRNTARDLLYYAVTQDAMLIFENLSRGFGRQGKRTFMAERQYTRMEDWLTAKLAYEGLPSKTYLSKTLAQYTSKTCSNCGFTITSADYDRVLEKLKKTATGWMTTINGKELKVEGQITYYNRYKRQNVVKDLSVELDRLSEESVNNDISSWTKGRSGEALSLLKKRFSHRPVQEKFVCLNCGFETHADEQAALNIARSWLFLRSQEYKKYQTNKTTGNTDKRAFVETWQSFYRKKLKEVWKPAV

SEQ ID NO: 39435 - protein, 978 aa, synthetic construct
  REGION 1..978: note = engineered CasX variant
QEGKRINGIRRRLVKDSNTKKAGKTGPMKTLLVRVMTPDLRERLENLRKKPENIPQPISNTSRANLNKLLTDYTEMKKAILHVYWEEFQKDPVGLMSRVAQPASKKIDQNKLKPEMDEKGNLTTAGFACSQCGQPLFVYKLEQVSEKGKAYTNYFGRCNVAEHEKLILLAQLKPEKDSDEAVTYSLGKFGQRALDFYSIHVTKESTHPVKPLAQIAGNRYASGPVGKALRDACMGTIASFLSKYQDIIIEHQKVVKGNQKRLESLRELAGKENLEYPSVTLPPQPHTKEGVDAYNEVIARVRMWVNLNLWQKLKLSRDDAKPLLRLKGFPSFPLVERQANEVDWWDMVCNVKKLINEKKEDGKVFWQNLAGYKRQEALRPYLSSEEDRKKGKKFARYQLGDLLLHLEKKHGEDWGKVYDEAWERIDKKVEGLSKHIKLEEERRSEDAQSKAALTDWLRAKASFVIEGLKEADKDEFCRCELKLQKWYGDLRGKPFAIEAENSILDISGFSKQYNCAFIWQKDGVKKLNLYLIINYFKGGKLRFKKIKPEAFEANRFYTVINKKSGEIVPMEVNFNFDDPNLIILPLAFGKRQGREFIWNDLLSLETGSLKLANGRVIEKTLYNRRTRQDEPALFVALTFERREVLDSSNIKPMNLIGVDRGENIPAVIALTDPEGCPLSRFKDSLGNPTHILRIGESYKEKQRTIQAKKEVEQRRAGGYSRKYASKAKNLADDMVRNTARDLLYYAVTQDAMLIFENLSRGFGRQGKRTFMAERQYTRMEDWLTAKLAYEGLPSKTYLSKTLAQYTSKTCSNCGFTITSADYDRVLEKLKKTATGWMTTINGKELKVEGQITYYNRYKRQNVVKDLSVELDRLSEESVNNDISSWTKGRSGEALSLLKKRFSHRPVQEKFVCLNCGFETHADEQAALNIARSWLFLRSQEYKKYQTNKTTGNTDKRAFVETWQSFYRKKLKEVWKPAV

SEQ ID NO: 39436 - protein, 978 aa, synthetic construct
  REGION 1..978: note = engineered CasX variant
QEGKRINKIRRRLVKDSNTKKAGKTGPMKTLLVPVMTPDLRERLENLRKKPENIPQPISNTSRANLNKLLTDYTEMKKAILHVYWEEFQKDPVGLMSRVAQPASKKIDQNKLKPEMDEKGNLTTAGFACSQCGQPLFVYKLEQVSEKGKAYTNYFGRCNVAEHEKLILLAQLKPEKDSDEAVTYSLGKFGQRALDFYSIHVTKESTHPVKPLAQIAGNRYASGPVGKALRDACMGTIASFLSKYQDIIIEHQKVVKGNQKRLESLRELAGKENLEYPSVTLPPQPHTKEGVDAYNEVIARVRMWVNLNLWQKLKLSRDDAKPLLRLKGFPSFPLVERQANEVDWWDMVCNVKKLINEKKEDGKVFWQNLAGYKRQEALRPYLSSEEDRKKGKKFARYQLGDLLLHLEKKHGEDWGKVYDEAWERIDKKVEGLSKHIKLEEERRSEDAQSKAALTDWLRAKASFVIEGLKEADKDEFCRCELKLQKWYGDLRGKPFAIEAENSILDISGFSKQYNCAFIWQKDGVKKLNLYLIINYFKGGKLRFKKIKPEAFEANRFYTVINKKSGEIVPMEVNFNFDDPNLIILPLAFGKRQGREFIWNDLLSLETGSLKLANGRVIEKTLYNRRTRQDEPALFVALTFERREVLDSSNIKPMNLIGVDRGENIPAVIALTDPEGCPLSRFKDSLGNPTHILRIGESYKEKQRTIQAKKEVEQRRAGGYSRKYASKAKNLADDMVRNTARDLLYYAVTQDAMLIFENLSRGFGRQGKRTFMAERQYTRMEDWLTAKLAYEGLPSKTYLSKTLAQYTSKTCSNCGFTITSADYDRVLEKLKKTATGWMTTINGKELKVEGQITYYNRYKRQNVVKDLSVELDRLSEESVNNDISSWTKGRSGEALSLLKKRFSHRPVQEKFVCLNCGFETHADEQAALNIARSWLFLRSQEYKKYQTNKTTGNTDKRAFVETWQSFYRKKLKEVWKPAV

SEQ ID NO: 39437 - protein, 978 aa, synthetic construct
  REGION 1..978: note = engineered CasX variant
QEGKRINKIRRRLVKDSNTKKAGKTGPMKTLLVRVMTPDLRERLENLRKKPPNIPQPISNTSRANLNKLLTDYTEMKKAILHVYWEEFQKDPVGLMSRVAQPASKKIDQNKLKPEMDEKGNLTTAGFACSQCGQPLFVYKLEQVSEKGKAYTNYFGRCNVAEHEKLILLAQLKPEKDSDEAVTYSLGKFGQRALDFYSIHVTKESTHPVKPLAQIAGNRYASGPVGKALRDACMGTIASFLSKYQDIIIEHQKVVKGNQKRLESLRELAGKENLEYPSVTLPPQPHTKEGVDAYNEVIARVRMWVNLNLWQKLKLSRDDAKPLLRLKGFPSFPLVERQANEVDWWDMVCNVKKLINEKKEDGKVFWQNLAGYKRQEALRPYLSSEEDRKKGKKFARYQLGDLLLHLEKKHGEDWGKVYDEAWERIDKKVEGLSKHIKLEEERRSEDAQSKAALTDWLRAKASFVIEGLKEADKDEFCRCELKLQKWYGDLRGKPFAIEAENSILDISGFSKQYNCAFIWQKDGVKKLNLYLIINYFKGGKLRFKKIKPEAFEANRFYTVINKKSGEIVPMEVNFNFDDPNLIILPLAFGKRQGREFIWNDLLSLETGSLKLANGRVIEKTLYNRRTRQDEPALFVALTFERREVLDSSNIKPMNLIGVDRGENIPAVIALTDPEGCPLSRFKDSLGNPTHILRIGESYKEKQRTIQAKKEVEQRRAGGYSRKYASKAKNLADDMVRNTARDLLYYAVTQDAMLIFENLSRGFGRQGKRTFMAERQYTRMEDWLTAKLAYEGLPSKTYLSKTLAQYTSKTCSNCGFTITSADYDRVLEKLKKTATGWMTTINGKELKVEGQITYYNRYKRQNVVKDLSVELDRLSEESVNNDISSWTKGRSGEALSLLKKRFSHRPVQEKFVCLNCGFETHADEQAALNIARSWLFLRSQEYKKYQTNKTTGNTDKRAFVETWQSFYRKKLKEVWKPAV

SEQ ID NO: 39438 - protein, 978 aa, synthetic construct
  REGION 1..978: note = engineered CasX variant
QEGKRINKIRRRLVKDSNTKKAGKTGPMKTLLVRVMTPDLRERLENLRKKPENIPQPISNTSQANLNKLLTDYTEMKKAILHVYWEEFQKDPVGLMSRVAQPASKKIDQNKLKPEMDEKGNLTTAGFACSQCGQPLFVYKLEQVSEKGKAYTNYFGRCNVAEHEKLILLAQLKPEKDSDEAVTYSLGKFGQRALDFYSIHVTKESTHPVKPLAQIAGNRYASGPVGKALRDACMGTIASFLSKYQDIIIEHQKVVKGNQKRLESLRELAGKENLEYPSVTLPPQPHTKEGVDAYNEVIARVRMWVNLNLWQKLKLSRDDAKPLLRLKGFPSFPLVERQANEVDWWDMVCNVKKLINEKKEDGKVFWQNLAGYKRQEALRPYLSSEEDRKKGKKFARYQLGDLLLHLEKKHGEDWGKVYDEAWERIDKKVEGLSKHIKLEEERRSEDAQSKAALTDWLRAKASFVIEGLKEADKDEFCRCELKLQKWYGDLRGKPFAIEAENSILDISGFSKQYNCAFIWQKDGVKKLNLYLIINYFKGGKLRFKKIKPEAFEANRFYTVINKKSGEIVPMEVNFNFDDPNLIILPLAFGKRQGREFIWNDLLSLETGSLKLANGRVIEKTLYNRRTRQDEPALFVALTFERREVLDSSNIKPMNLIGVDRGENIPAVIALTDPEGCPLSRFKDSLGNPTHILRIGESYKEKQRTIQAKKEVEQRRAGGYSRKYASKAKNLADDMVRNTARDLLYYAVTQDAMLIFENLSRGFGRQGKRTFMAERQYTRMEDWLTAKLAYEGLPSKTYLSKTLAQYTSKTCSNCGFTITSADYDRVLEKLKKTATGWMTTINGKELKVEGQITYYNRYKRQNVVKDLSVELDRLSEESVNNDISSWTKGRSGEALSLLKKRFSHRPVQEKFVCLNCGFETHADEQAALNIARSWLFLRSQEYKKYQTNKTTGNTDKRAFVETWQSFYRKKLKEVWKPAV

SEQ ID NO: 39439 - protein, 978 aa, synthetic construct
  REGION 1..978: note = engineered CasX variant
QEGKRINKIRRRLVKDSNTKKAGKTGPMKTLLVRVMTPDLRERLENLRKKPENIPQPISNTSRANLNKLLTDYTEMKKAILHVYDEEFQKDPVGLMSRVAQPASKKIDQNKLKPEMDEKGNLTTAGFACSQCGQPLFVYKLEQVSEKGKAYTNYFGRCNVAEHEKLILLAQLKPEKDSDEAVTYSLGKFGQRALDFYSIHVTKESTHPVKPLAQIAGNRYASGPVGKALRDACMGTIASFLSKYQDIIIEHQKVVKGNQKRLESLRELAGKENLEYPSVTLPPQPHTKEGVDAYNEVIARVRMWVNLNLWQKLKLSRDDAKPLLRLKGFPSFPLVERQANEVDWWDMVCNVKKLINEKKEDGKVFWQNLAGYKRQEALRPYLSSEEDRKKGKKFARYQLGDLLLHLEKKHGEDWGKVYDEAWERIDKKVEGLSKHIKLEEERRSEDAQSKAALTDWLRAKASFVIEGLKEADKDEFCRCELKLQKWYGDLRGKPFAIEAENSILDISGFSKQYNCAFIWQKDGVKKLNLYLIINYFKGGKLRFKKIKPEAFEANRFYTVINKKSGEIVPMEVNFNFDDPNLIILPLAFGKRQGREFIWNDLLSLETGSLKLANGRVIEKTLYNRRTRQDEPALFVALTFERREVLDSSNIKPMNLIGVDRGENIPAVIALTDPEGCPLSRFKDSLGNPTHILRIGESYKEKQRTIQAKKEVEQRRAGGYSRKYASKAKNLADDMVRNTARDLLYYAVTQDAMLIFENLSRGFGRQGKRTFMAERQYTRMEDWLTAKLAYEGLPSKTYLSKTLAQYTSKTCSNCGFTITSADYDRVLEKLKKTATGWMTTINGKELKVEGQITYYNRYKRQNVVKDLSVELDRLSEESVNNDISSWTKGRSGEALSLLKKRFSHRPVQEKFVCLNCGFETHADEQAALNIARSWLFLRSQEYKKYQTNKTTGNTDKRAFVETWQSFYRKKLKEVWKPAV

SEQ ID NO: 39440 - protein, 978 aa, synthetic construct
  REGION 1..978: note = engineered CasX variant
QEGKRINKIRRRLVKDSNTKKAGKTGPMKTLLVRVMTPDLRERLENLRKKPENIPQPISNTSRANLNKLLTDYTEMKKAILHVYWEEFQKDPVGLMSRVAQPASKKIDQNKLKPEMDEKGNLTTAGFACSQCGQPLFVYKLEQVSEKGKAYTNYFGRCNVAEHEKLIKLAQLKPEKDSDEAVTYSLGKFGQRALDFYSIHVTKESTHPVKPLAQIAGNRYASGPVGKALRDACMGTIASFLSKYQDIIIEHQKVVKGNQKRLESLRELAGKENLEYPSVTLPPQPHTKEGVDAYNEVIARVRMWVNLNLWQKLKLSRDDAKPLLRLKGFPSFPLVERQANEVDWWDMVCNVKKLINEKKEDGKVFWQNLAGYKRQEALRPYLSSEEDRKKGKKFARYQLGDLLLHLEKKHGEDWGKVYDEAWERIDKKVEGLSKHIKLEEERRSEDAQSKAALTDWLRAKASFVIEGLKEADKDEFCRCELKLQKWYGDLRGKPFAIEAENSILDISGFSKQYNCAFIWQKDGVKKLNLYLIINYFKGGKLRFKKIKPEAFEANRFYTVINKKSGEIVPMEVNFNFDDPNLIILPLAFGKRQGREFIWNDLLSLETGSLKLANGRVIEKTLYNRRTRQDEPALFVALTFERREVLDSSNIKPMNLIGVDRGENIPAVIALTDPEGCPLSRFKDSLGNPTHILRIGESYKEKQRTIQAKKEVEQRRAGGYSRKYASKAKNLADDMVRNTARDLLYYAVTQDAMLIFENLSRGFGRQGKRTFMAERQYTRMEDWLTAKLAYEGLPSKTYLSKTLAQYTSKTCSNCGFTITSADYDRVLEKLKKTATGWMTTINGKELKVEGQITYYNRYKRQNVVKDLSVELDRLSEESVNNDISSWTKGRSGEALSLLKKRFSHRPVQEKFVCLNCGFETHADEQAALNIARSWLFLRSQEYKKYQTNKTTGNTDKRAFVETWQSFYRKKLKEVWKPAV

SEQ ID NO: 39441 - protein, 978 aa, synthetic construct
  REGION 1..978: note = engineered CasX variant
QEGKRINKIRRRLVKDSNTKKAGKTGPMKTLLVRVMTPDLRERLENLRKKPENIPQPISNTSRANLNKLLTDYTEMKKAILHVYWEEFQKDPVGLMSRVAQPASKKIDQNKLKPEMDEKGNLTTAGFACSQCGQPLFVYKLEQVSEKGKAYTNYFGRCNVAEHEKLILLYQLKPEKDSDEAVTYSLGKFGQRALDFYSIHVTKESTHPVKPLAQIAGNRYASGPVGKALRDACMGTIASFLSKYQDIIIEHQKVVKGNQKRLESLRELAGKENLEYPSVTLPPQPHTKEGVDAYNEVIARVRMWVNLNLWQKLKLSRDDAKPLLRLKGFPSFPLVERQANEVDWWDMVCNVKKLINEKKEDGKVFWQNLAGYKRQEALRPYLSSEEDRKKGKKFARYQLGDLLLHLEKKHGEDWGKVYDEAWERIDKKVEGLSKHIKLEEERRSEDAQSKAALTDWLRAKASFVIEGLKEADKDEFCRCELKLQKWYGDLRGKPFAIEAENSILDISGFSKQYNCAFIWQKDGVKKLNLYLIINYFKGGKLRFKKIKPEAFEANRFYTVINKKSGEIVPMEVNFNFDDPNLIILPLAFGKRQGREFIWNDLLSLETGSLKLANGRVIEKTLYNRRTRQDEPALFVALTFERREVLDSSNIKPMNLIGVDRGENIPAVIALTDPEGCPLSRFKDSLGNPTHILRIGESYKEKQRTIQAKKEVEQRRAGGYSRKYASKAKNLADDMVRNTARDLLYYAVTQDAMLIFENLSRGFGRQGKRTFMAERQYTRMEDWLTAKLAYEGLPSKTYLSKTLAQYTSKTCSNCGFTITSADYDRVLEKLKKTATGWMTTINGKELKVEGQITYYNRYKRQNVVKDLSVELDRLSEESVNNDISSWTKGRSGEALSLLKKRFSHRPVQEKFVCLNCGFETHADEQAALNIARSWLFLRSQEYKKYQTNKTTGNTDKRAFVETWQSFYRKKLKEVWKPAV

SEQ ID NO: 39442 - protein, 978 aa, synthetic construct
  REGION 1..978: note = engineered CasX variant
QEGKRINKIRRRLVKDSNTKKAGKTGPMKTLLVRVMTPDLRERLENLRKKPENIPQPISNTSRANLNKLLTDYTEMKKAILHVYWEEFQKDPVGLMSRVAQPASKKIDQNKLKPEMDEKGNLTTAGFACSQCGQPLFVYKLEQVSEKGKAYTNYFGRCNVAEHEKLILLSQLKPEKDSDEAVTYSLGKFGQRALDFYSIHVTKESTHPVKPLAQIAGNRYASGPVGKALRDACMGTIASFLSKYQDIIIEHQKVVKGNQKRLESLRELAGKENLEYPSVTLPPQPHTKEGVDAYNEVIARVRMWVNLNLWQKLKLSRDDAKPLLRLKGFPSFPLVERQANEVDWWDMVCNVKKLINEKKEDGKVFWQNLAGYKRQEALRPYLSSEEDRKKGKKFARYQLGDLLLHLEKKHGEDWGKVYDEAWERIDKKVEGLSKHIKLEEERRSEDAQSKAALTDWLRAKASFVIEGLKEADKDEFCRCELKLQKWYGDLRGKPFAIEAENSILDISGFSKQYNCAFIWQKDGVKKLNLYLIINYFKGGKLRFKKIKPEAFEANRFYTVINKKSGEIVPMEVNFNFDDPNLIILPLAFGKRQGREFIWNDLLSLETGSLKLANGRVIEKTLYNRRTRQDEPALFVALTFERREVLDSSNIKPMNLIGVDRGENIPAVIALTDPEGCPLSRFKDSLGNPTHILRIGESYKEKQRTIQAKKEVEQRRAGGYSRKYASKAKNLADDMVRNTARDLLYYAVTQDAMLIFENLSRGFGRQGKRTFMAERQYTRMEDWLTAKLAYEGLPSKTYLSKTLAQYTSKTCSNCGFTITSADYDRVLEKLKKTATGWMTTINGKELKVEGQITYYNRYKRQNVVKDLSVELDRLSEESVNNDISSWTKGRSGEALSLLKKRFSHRPVQEKFVCLNCGFETHADEQAALNIARSWLFLRSQEYKKYQTNKTTGNTDKRAFVETWQSFYRKKLKEVWKPAV

SEQ ID NO: 39443 - protein, 977 aa, synthetic construct
  REGION 1..977: note = engineered CasX variant
QEGKRINKIRRRLVKDSNTKKAGKTGPMKTLLVRVMTPDLRERLENLRKKPENIPQPISNTSRANLNKLLTDYTEMKKAILHVYWEEFQKDPVGLMSRVAQPASKKIDQNKLKPEMDEKGNLTTAGFACSQCGQPLFVYKLEQVSEKGKAYTNYFGRCNVAEHEKLILLAQLKPEKDSDEAVTYSLGKFGQRALDFYSIHVTKESTHPVKPLAQIAGNRYASPVGKALRDACMGTIASFLSKYQDIIIEHQKVVKGNQKRLESLRELAGKENLEYPSVTLPPQPHTKEGVDAYNEVIARVRMWVNLNLWQKLKLSRDDAKPLLRLKGFPSFPLVERQANEVDWWDMVCNVKKLINEKKEDGKVFWQNLAGYKRQEALRPYLSSEEDRKKGKKFARYQLGDLLLHLEKKHGEDWGKVYDEAWERIDKKVEGLSKHIKLEEERRSEDAQSKAALTDWLRAKASFVIEGLKEADKDEFCRCELKLQKWYGDLRGKPFAIEAENSILDISGFSKQYNCAFIWQKDGVKKLNLYLIINYFKGGKLRFKKIKPEAFEANRFYTVINKKSGEIVPMEVNFNFDDPNLIILPLAFGKRQGREFIWNDLLSLETGSLKLANGRVIEKTLYNRRTRQDEPALFVALTFERREVLDSSNIKPMNLIGVDRGENIPAVIALTDPEGCPLSRFKDSLGNPTHILRIGESYKEKQRTIQAKKEVEQRRAGGYSRKYASKAKNLADDMVRNTARDLLYYAVTQDAMLIFENLSRGFGRQGKRTFMAERQYTRMEDWLTAKLAYEGLPSKTYLSKTLAQYTSKTCSNCGFTITSADYDRVLEKLKKTATGWMTTINGKELKVEGQITYYNRYKRQNVVKDLSVELDRLSEESVNNDISSWTKGRSGEALSLLKKRFSHRPVQEKFVCLNCGFETHADEQAALNIARSWLFLRSQEYKKYQTNKTTGNTDKRAFVETWQSFYRKKLKEVWKPAV

SEQ ID NO: 39444 - protein, 978 aa, synthetic construct
  REGION 1..978: note = engineered CasX variant
QEGKRINKIRRRLVKDSNTKKAGKTGPMKTLLVRVMTPDLRERLENLRKKPENIPQPISNTSRANLNKLLTDYTEMKKAILHVYWEEFQKDPVGLMSRVAQPASKKIDQNKLKPEMDEKGNLTTAGFACSQCGQPLFVYKLEQVSEKGKAYTNYFGRCNVAEHEKLILLAQLKPEKDSDEAVTYSLGKFGQRALDFYSIHVTKESTHPVKPLAQIAGNRYASGPVGKALRDACMGTIASFLSKYQDIIIEHQKVVKGNQKRLESLRELAGKENLEYPSVTLPPQPHTSEGVDAYNEVIARVRMWVNLNLWQKLKLSRDDAKPLLRLKGFPSFPLVERQANEVDWWDMVCNVKKLINEKKEDGKVFWQNLAGYKRQEALRPYLSSEEDRKKGKKFARYQLGDLLLHLEKKHGEDWGKVYDEAWERIDKKVEGLSKHIKLEEERRSEDAQSKAALTDWLRAKASFVIEGLKEADKDEFCRCELKLQKWYGDLRGKPFAIEAENSILDISGFSKQYNCAFIWQKDGVKKLNLYLIINYFKGGKLRFKKIKPEAFEANRFYTVINKKSGEIVPMEVNFNFDDPNLIILPLAFGKRQGREFIWNDLLSLETGSLKLANGRVIEKTLYNRRTRQDEPALFVALTFERREVLDSSNIKPMNLIGVDRGENIPAVIALTDPEGCPLSRFKDSLGNPTHILRIGESYKEKQRTIQAKKEVEQRRAGGYSRKYASKAKNLADDMVRNTARDLLYYAVTQDAMLIFENLSRGFGRQGKRTFMAERQYTRMEDWLTAKLAYEGLPSKTYLSKTLAQYTSKTCSNCGFTITSADYDRVLEKLKKTATGWMTTINGKELKVEGQITYYNRYKRQNVVKDLSVELDRLSEESVNNDISSWTKGRSGEALSLLKKRFSHRPVQEKFVCLNCGFETHADEQAALNIARSWLFLRSQEYKKYQTNKTTGNTDKRAFVETWQSFYRKKLKEVWKPAV

SEQ ID NO: 39445 - protein, 978 aa, synthetic construct
  REGION 1..978: note = engineered CasX variant
QEGKRINKIRRRLVKDSNTKKAGKTGPMKTLLVRVMTPDLRERLENLRKKPENIPQPISNTSRANLNKLLTDYTEMKKAILHVYWEEFQKDPVGLMSRVAQPASKKIDQNKLKPEMDEKGNLTTAGFACSQCGQPLFVYKLEQVSEKGKAYTNYFGRCNVAEHEKLILLAQLKPEKDSDEAVTYSLGKFGQRALDFYSIHVTKESTHPVKPLAQIAGNRYASGPVGKALRDACMGTIASFLSKYQDIIIEHQKVVKGNQKRLESLRELAGKENLEYPSVTLPPQPHTKEGLDAYNEVIARVRMWVNLNLWQKLKLSRDDAKPLLRLKGFPSFPLVERQANEVDWWDMVCNVKKLINEKKEDGKVFWQNLAGYKRQEALRPYLSSEEDRKKGKKFARYQLGDLLLHLEKKHGEDWGKVYDEAWERIDKKVEGLSKHIKLEEERRSEDAQSKAALTDWLRAKASFVIEGLKEADKDEFCRCELKLQKWYGDLRGKPFAIEAENSILDISGFSKQYNCAFIWQKDGVKKLNLYLIINYFKGGKLRFKKIKPEAFEANRFYTVINKKSGEIVPMEVNFNFDDPNLIILPLAFGKRQGREFIWNDLLSLETGSLKLANGRVIEKTLYNRRTRQDEPALFVALTFERREVLDSSNIKPMNLIGVDRGENIPAVIALTDPEGCPLSRFKDSLGNPTHILRIGESYKEKQRTIQAKKEVEQRRAGGYSRKYASKAKNLADDMVRNTARDLLYYAVTQDAMLIFENLSRGFGRQGKRTFMAERQYTRMEDWLTAKLAYEGLPSKTYLSKTLAQYTSKTCSNCGFTITSADYDRVLEKLKKTATGWMTTINGKELKVEGQITYYNRYKRQNVVKDLSVELDRLSEESVNNDISSWTKGRSGEALSLLKKRFSHRPVQEKFVCLNCGFETHADEQAALNIARSWLFLRSQEYKKYQTNKTTGNTDKRAFVETWQSFYRKKLKEVWKPAV

SEQ ID NO: 39446 - protein, 978 aa, synthetic construct
  REGION 1..978: note = engineered CasX variant
QEGKRINKIRRRLVKDSNTKKAGKTGPMKTLLVRVMTPDLRERLENLRKKPENIPQPISNTSRANLNKLLTDYTEMKKAILHVYWEEFQKDPVGLMSRVAQPASKKIDQNKLKPEMDEKGNLTTAGFACSQCGQPLFVYKLEQVSEKGKAYTNYFGRCNVAEHEKLILLAQLKPEKDSDEAVTYSLGKFGQRALDFYSIHVTKESTHPVKPLAQIAGNRYASGPVGKALRDACMGTIASFLSKYQDIIIEHQKVVKGNQKRLESLRELAGKENLEYPSVTLPPQPHTKEGVDAYNEVIARVRTWVNLNLWQKLKLSRDDAKPLLRLKGFPSFPLVERQANEVDWWDMVCNVKKLINEKKEDGKVFWQNLAGYKRQEALRPYLSSEEDRKKGKKFARYQLGDLLLHLEKKHGEDWGKVYDEAWERIDKKVEGLSKHIKLEEERRSEDAQSKAALTDWLRAKASFVIEGLKEADKDEFCRCELKLQKWYGDLRGKPFAIEAENSILDISGFSKQYNCAFIWQKDGVKKLNLYLIINYFKGGKLRFKKIKPEAFEANRFYTVINKKSGEIVPMEVNFNFDDPNLIILPLAFGKRQGREFIWNDLLSLETGSLKLANGRVIEKTLYNRRTRQDEPALFVALTFERREVLDSSNIKPMNLIGVDRGENIPAVIALTDPEGCPLSRFKDSLGNPTHILRIGESYKEKQRTIQAKKEVEQRRAGGYSRKYASKAKNLADDMVRNTARDLLYYAVTQDAMLIFENLSRGFGRQGKRTFMAERQYTRMEDWLTAKLAYEGLPSKTYLSKTLAQYTSKTCSNCGFTITSADYDRVLEKLKKTATGWMTTINGKELKVEGQITYYNRYKRQNVVKDLSVELDRLSEESVNNDISSWTKGRSGEALSLLKKRFSHRPVQEKFVCLNCGFETHADEQAALNIARSWLFLRSQEYKKYQTNKTTGNTDKRAFVETWQSFYRKKLKEVWKPAV

SEQ ID NO: 39447 - protein, 978 aa, synthetic construct
  REGION 1..978: note = engineered CasX variant
QEGKRINKIRRRLVKDSNTKKAGKTGPMKTLLVRVMTPDLRERLENLRKKPENIPQPISNTSRANLNKLLTDYTEMKKAILHVYWEEFQKDPVGLMSRVAQPASKKIDQNKLKPEMDEKGNLTTAGFACSQCGQPLFVYKLEQVSEKGKAYTNYFGRCNVAEHEKLILLAQLKPEKDSDEAVTYSLGKFGQRALDFYSIHVTKESTHPVKPLAQIAGNRYASGPVGKALRDACMGTIASFLSKYQDIIIEHQKVVKGNQKRLESLRELAGKENLEYPSVTLPPQPHTKEGVDAYNEVIARVRWWVNLNLWQKLKLSRDDAKPLLRLKGFPSFPLVERQANEVDWWDMVCNVKKLINEKKEDGKVFWQNLAGYKRQEALRPYLSSEEDRKKGKKFARYQLGDLLLHLEKKHGEDWGKVYDEAWERIDKKVEGLSKHIKLEEERRSEDAQSKAALTDWLRAKASFVIEGLKEADKDEFCRCELKLQKWYGDLRGKPFAIEAENSILDISGFSKQYNCAFIWQKDGVKKLNLYLIINYFKGGKLRFKKIKPEAFEANRFYTVINKKSGEIVPMEVNFNFDDPNLIILPLAFGKRQGREFIWNDLLSLETGSLKLANGRVIEKTLYNRRTRQDEPALFVALTFERREVLDSSNIKPMNLIGVDRGENIPAVIALTDPEGCPLSRFKDSLGNPTHILRIGESYKEKQRTIQAKKEVEQRRAGGYSRKYASKAKNLADDMVRNTARDLLYYAVTQDAMLIFENLSRGFGRQGKRTFMAERQYTRMEDWLTAKLAYEGLPSKTYLSKTLAQYTSKTCSNCGFTITSADYDRVLEKLKKTATGWMTTINGKELKVEGQITYYNRYKRQNVVKDLSVELDRLSEESVNNDISSWTKGRSGEALSLLKKRFSHRPVQEKFVCLNCGFETHADEQAALNIARSWLFLRSQEYKKYQTNKTTGNTDKRAFVETWQSFYRKKLKEVWKPAV

SEQ ID NO: 39448 - protein, 979 aa, synthetic construct
  REGION 1..979: note = engineered CasX variant
QEGKRINKIRRRLVKDSNTKKAGKTGPMKTLLVRVMTPDLRERLENLRKKPENIPQPISNTSRANLNKLLTDYTEMKKAILHVYWEEFQKDPVGLMSRVAQPASKKIDQNKLKPEMDEKGNLTTAGFACSQCGQPLFVYKLEQVSEKGKAYTNYFGRCNVAEHEKLILLAQLKPEKDSDEAVTYSLGKFGQRALDFYSIHVTKESTHPVKPLAQIAGNRYASGPVGKALRDACMGTIASFLSKYQDIIIEHQKVVKGNQKRLESLRELAGKENLEYPSVTLPPQPHTKEGVDAYNEVIARVRMWVNLNLWQKLKLSRDDAKPLLRLKGFPSFPLVERQQANEVDWWDMVCNVKKLINEKKEDGKVFWQNLAGYKRQEALRPYLSSEEDRKKGKKFARYQLGDLLLHLEKKHGEDWGKVYDEAWERIDKKVEGLSKHIKLEEERRSEDAQSKAALTDWLRAKASFVIEGLKEADKDEFCRCELKLQKWYGDLRGKPFAIEAENSILDISGFSKQYNCAFIWQKDGVKKLNLYLIINYFKGGKLRFKKIKPEAFEANRFYTVINKKSGEIVPMEVNFNFDDPNLIILPLAFGKRQGREFIWNDLLSLETGSLKLANGRVIEKTLYNRRTRQDEPALFVALTFERREVLDSSNIKPMNLIGVDRGENIPAVIALTDPEGCPLSRFKDSLGNPTHILRIGESYKEKQRTIQAKKEVEQRRAGGYSRKYASKAKNLADDMVRNTARDLLYYAVTQDAMLIFENLSRGFGRQGKRTFMAERQYTRMEDWLTAKLAYEGLPSKTYLSKTLAQYTSKTCSNCGFTITSADYDRVLEKLKKTATGWMTTINGKELKVEGQITYYNRYKRQNVVKDLSVELDRLSEESVNNDISSWTKGRSGEALSLLKKRFSHRPVQEKFVCLNCGFETHADEQAALNIARSWLFLRSQEYKKYQTNKTTGNTDKRAFVETWQSFYRKKLKEVWKPAV

SEQ ID NO: 39449 - protein, 979 aa, synthetic construct
  REGION 1..979: note = engineered CasX variant
QEGKRINKIRRRLVKDSNTKKAGKTGPMKTLLVRVMTPDLRERLENLRKKPENIPQPISNTSRANLNKLLTDYTEMKKAILHVYWEEFQKDPVGLMSRVAQPASKKIDQNKLKPEMDEKGNLTTAGFACSQCGQPLFVYKLEQVSEKGKAYTNYFGRCNVAEHEKLILLAQLKPEKDSDEAVTYSLGKFGQRALDFYSIHVTKESTHPVKPLAQIAGNRYASGPVGKALRDACMGTIASFLSKYQDIIIEHQKVVKGNQKRLESLRELAGKENLEYPSVTLPPQPHTKEGVDAYNEVIARVRMWVNLNLWQKLKLSRDDAKPLLRLKGFPSFPLVERQANAEVDWWDMVCNVKKLINEKKEDGKVFWQNLAGYKRQEALRPYLSSEEDRKKGKKFARYQLGDLLLHLEKKHGEDWGKVYDEAWERIDKKVEGLSKHIKLEEERRSEDAQSKAALTDWLRAKASFVIEGLKEADKDEFCRCELKLQKWYGDLRGKPFAIEAENSILDISGFSKQYNCAFIWQKDGVKKLNLYLIINYFKGGKLRFKKIKPEAFEANRFYTVINKKSGEIVPMEVNFNFDDPNLIILPLAFGKRQGREFIWNDLLSLETGSLKLANGRVIEKTLYNRRTRQDEPALFVALTFERREVLDSSNIKPMNLIGVDRGENIPAVIALTDPEGCPLSRFKDSLGNPTHILRIGESYKEKQRTIQAKKEVEQRRAGGYSRKYASKAKNLADDMVRNTARDLLYYAVTQDAMLIFENLSRGFGRQGKRTFMAERQYTRMEDWLTAKLAYEGLPSKTYLSKTLAQYTSKTCSNCGFTITSADYDRVLEKLKKTATGWMTTINGKELKVEGQITYYNRYKRQNVVKDLSVELDRLSEESVNNDISSWTKGRSGEALSLLKKRFSHRPVQEKFVCLNCGFETHADEQAALNIARSWLFLRSQEYKKYQTNKTTGNTDKRAFVETWQSFYRKKLKEVWKPAV

SEQ ID NO: 39450 - protein, 978 aa, synthetic construct
  REGION 1..978: note = engineered CasX variant
QEGKRINKIRRRLVKDSNTKKAGKTGPMKTLLVRVMTPDLRERLENLRKKPENIPQPISNTSRANLNKLLTDYTEMKKAILHVYWEEFQKDPVGLMSRVAQPASKKIDQNKLKPEMDEKGNLTTAGFACSQCGQPLFVYKLEQVSEKGKAYTNYFGRCNVAEHEKLILLAQLKPEKDSDEAVTYSLGKFGQRALDFYSIHVTKESTHPVKPLAQIAGNRYASGPVGKALRDACMGTIASFLSKYQDIIIEHQKVVKGNQKRLESLRELAGKENLEYPSVTLPPQPHTKEGVDAYNEVIARVRMWVNLNLWQKLKLSRDDAKPLLRLKGFPSFPLVERQANEVDWWDMVCNVKKLINEKKEDGKVFWQNLAGYKRQEALRPYLSSEEDRKKGKKFARTQLGDLLLHLEKKHGEDWGKVYDEAWERIDKKVEGLSKHIKLEEERRSEDAQSKAALTDWLRAKASFVIEGLKEADKDEFCRCELKLQKWYGDLRGKPFAIEAENSILDISGFSKQYNCAFIWQKDGVKKLNLYLIINYFKGGKLRFKKIKPEAFEANRFYTVINKKSGEIVPMEVNFNFDDPNLIILPLAFGKRQGREFIWNDLLSLETGSLKLANGRVIEKTLYNRRTRQDEPALFVALTFERREVLDSSNIKPMNLIGVDRGENIPAVIALTDPEGCPLSRFKDSLGNPTHILRIGESYKEKQRTIQAKKEVEQRRAGGYSRKYASKAKNLADDMVRNTARDLLYYAVTQDAMLIFENLSRGFGRQGKRTFMAERQYTRMEDWLTAKLAYEGLPSKTYLSKTLAQYTSKTCSNCGFTITSADYDRVLEKLKKTATGWMTTINGKELKVEGQITYYNRYKRQNVVKDLSVELDRLSEESVNNDISSWTKGRSGEALSLLKKRFSHRPVQEKFVCLNCGFETHADEQAALNIARSWLFLRSQEYKKYQTNKTTGNTDKRAFVETWQSFYRKKLKEVWKPAV

SEQ ID NO: 39451 - protein, 979 aa, synthetic construct
  REGION 1..979: note = engineered CasX variant
QEGKRINKIRRRLVKDSNTKKAGKTGPMKTLLVRVMTPDLRERLENLRKKPENIPQPISNTSRANLNKLLTDYTEMKKAILHVYWEEFQKDPVGLMSRVAQPASKKIDQNKLKPEMDEKGNLTTAGFACSQCGQPLFVYKLEQVSEKGKAYTNYFGRCNVAEHEKLILLAQLKPEKDSDEAVTYSLGKFGQRALDFYSIHVTKESTHPVKPLAQIAGNRYASGPVGKALRDACMGTIASFLSKYQDIIIEHQKVVKGNQKRLESLRELAGKENLEYPSVTLPPQPHTKEGVDAYNEVIARVRMWVNLNLWQKLKLSRDDAKPLLRLKGFPSFPLVERQANEVDWWDMVCNVKKLINEKKEDGKVFWQNLAGYKRQEALRPYLSSEEDRKKGKKFARYQLGDLLLHLEKKHEGEDWGKVYDEAWERIDKKVEGLSKHIKLEEERRSEDAQSKAALTDWLRAKASFVIEGLKEADKDEFCRCELKLQKWYGDLRGKPFAIEAENSILDISGFSKQYNCAFIWQKDGVKKLNLYLIINYFKGGKLRFKKIKPEAFEANRFYTVINKKSGEIVPMEVNFNFDDPNLIILPLAFGKRQGREFIWNDLLSLETGSLKLANGRVIEKTLYNRRTRQDEPALFVALTFERREVLDSSNIKPMNLIGVDRGENIPAVIALTDPEGCPLSRFKDSLGNPTHILRIGESYKEKQRTIQAKKEVEQRRAGGYSRKYASKAKNLADDMVRNTARDLLYYAVTQDAMLIFENLSRGFGRQGKRTFMAERQYTRMEDWLTAKLAYEGLPSKTYLSKTLAQYTSKTCSNCGFTITSADYDRVLEKLKKTATGWMTTINGKELKVEGQITYYNRYKRQNVVKDLSVELDRLSEESVNNDISSWTKGRSGEALSLLKKRFSHRPVQEKFVCLNCGFETHADEQAALNIARSWLFLRSQEYKKYQTNKTTGNTDKRAFVETWQSFYRKKLKEVWKPAV

SEQ ID NO: 39452 - protein, 978 aa, synthetic construct
  REGION 1..978: note = engineered CasX variant
QEGKRINKIRRRLVKDSNTKKAGKTGPMKTLLVRVMTPDLRERLENLRKKPENIPQPISNTSRANLNKLLTDYTEMKKAILHVYWEEFQKDPVGLMSRVAQPASKKIDQNKLKPEMDEKGNLTTAGFACSQCGQPLFVYKLEQVSEKGKAYTNYFGRCNVAEHEKLILLAQLKPEKDSDEAVTYSLGKFGQRALDFYSIHVTKESTHPVKPLAQIAGNRYASGPVGKALRDACMGTIASFLSKYQDIIIEHQKVVKGNQKRLESLRELAGKENLEYPSVTLPPQPHTKEGVDAYNEVIARVRMWVNLNLWQKLKLSRDDAKPLLRLKGFPSFPLVERQANEVDWWDMVCNVKKLINEKKEDGKVFWQNLAGYKRQEALRPYLSSEEDRKKGKKFARYQLGDLLLHLEKKHGEDWGKVYDEAWERIDKKVEGLSKHIKLEEERRSEDAQSKAALTDWLRAKASFVIEGLKEADKDEFCRCDLKLQKWYGDLRGKPFAIEAENSILDISGFSKQYNCAFIWQKDGVKKLNLYLIINYFKGGKLRFKKIKPEAFEANRFYTVINKKSGEIVPMEVNFNFDDPNLIILPLAFGKRQGREFIWNDLLSLETGSLKLANGRVIEKTLYNRRTRQDEPALFVALTFERREVLDSSNIKPMNLIGVDRGENIPAVIALTDPEGCPLSRFKDSLGNPTHILRIGESYKEKQRTIQAKKEVEQRRAGGYSRKYASKAKNLADDMVRNTARDLLYYAVTQDAMLIFENLSRGFGRQGKRTFMAERQYTRMEDWLTAKLAYEGLPSKTYLSKTLAQYTSKTCSNCGFTITSADYDRVLEKLKKTATGWMTTINGKELKVEGQITYYNRYKRQNVVKDLSVELDRLSEESVNNDISSWTKGRSGEALSLLKKRFSHRPVQEKFVCLNCGFETHADEQAALNIARSWLFLRSQEYKKYQTNKTTGNTDKRAFVETWQSFYRKKLKEVWKPAV

SEQ ID NO: 39453 - protein, 978 aa, synthetic construct
  REGION 1..978: note = engineered CasX variant
QEGKRINKIRRRLVKDSNTKKAGKTGPMKTLLVRVMTPDLRERLENLRKKPENIPQPISNTSRANLNKLLTDYTEMKKAILHVYWEEFQKDPVGLMSRVAQPASKKIDQNKLKPEMDEKGNLTTAGFACSQCGQPLFVYKLEQVSEKGKAYTNYFGRCNVAEHEKLILLAQLKPEKDSDEAVTYSLGKFGQRALDFYSIHVTKESTHPVKPLAQIAGNRYASGPVGKALRDACMGTIASFLSKYQDIIIEHQKVVKGNQKRLESLRELAGKENLEYPSVTLPPQPHTKEGVDAYNEVIARVRMWVNLNLWQKLKLSRDDAKPLLRLKGFPSFPLVERQANEVDWWDMVCNVKKLINEKKEDGKVFWQNLAGYKRQEALRPYLSSEEDRKKGKKFARYQLGDLLLHLEKKHGEDWGKVYDEAWERIDKKVEGLSKHIKLEEERRSEDAQSKAALTDWLRAKASFVIEGLKEADKDEFCRCELKLQKWYGDLRGKPFAIEAENSILDISGFSKQYNCAFIWQKDGVKKLNLYLIINYFKGGKLRFKKIKPEAFEANRFYTVINKKSGEIVPMEVNFNFDDPNLIILPLAFGKRFGREFIWNDLLSLETGSLKLANGRVIEKTLYNRRTRQDEPALFVALTFERREVLDSSNIKPMNLIGVDRGENIPAVIALTDPEGCPLSRFKDSLGNPTHILRIGESYKEKQRTIQAKKEVEQRRAGGYSRKYASKAKNLADDMVRNTARDLLYYAVTQDAMLIFENLSRGFGRQGKRTFMAERQYTRMEDWLTAKLAYEGLPSKTYLSKTLAQYTSKTCSNCGFTITSADYDRVLEKLKKTATGWMTTINGKELKVEGQITYYNRYKRQNVVKDLSVELDRLSEESVNNDISSWTKGRSGEALSLLKKRFSHRPVQEKFVCLNCGFETHADEQAALNIARSWLFLRSQEYKKYQTNKTTGNTDKRAFVETWQSFYRKKLKEVWKPAV

SEQ ID NO: 39454 - protein, 978 aa, synthetic construct
  REGION 1..978: note = engineered CasX variant
QEGKRINKIRRRLVKDSNTKKAGKTGPMKTLLVRVMTPDLRERLENLRKKPENIPQPISNTSRANLNKLLTDYTEMKKAILHVYWEEFQKDPVGLMSRVAQPASKKIDQNKLKPEMDEKGNLTTAGFACSQCGQPLFVYKLEQVSEKGKAYTNYFGRCNVAEHEKLILLAQLKPEKDSDEAVTYSLGKFGQRALDFYSIHVTKESTHPVKPLAQIAGNRYASGPVGKALRDACMGTIASFLSKYQDIIIEHQKVVKGNQKRLESLRELAGKENLEYPSVTLPPQPHTKEGVDAYNEVIARVRMWVNLNLWQKLKLSRDDAKPLLRLKGFPSFPLVERQANEVDWWDMVCNVKKLINEKKEDGKVFWQNLAGYKRQEALRPYLSSEEDRKKGKKFARYQLGDLLLHLEKKHGEDWGKVYDEAWERIDKKVEGLSKHIKLEEERRSEDAQSKAALTDWLRAKASFVIEGLKEADKDEFCRCELKLQKWYGDLRGKPFAIEAENSILDISGFSKQYNCAFIWQKDGVKKLNLYLIINYFKGGKLRFKKIKPEAFEANRFYTVINKKSGEIVPMEVNFNFDDPNLIILPLAFGKRVGREFIWNDLLSLETGSLKLANGRVIEKTLYNRRTRQDEPALFVALTFERREVLDSSNIKPMNLIGVDRGENIPAVIALTDPEGCPLSRFKDSLGNPTHILRIGESYKEKQRTIQAKKEVEQRRAGGYSRKYASKAKNLADDMVRNTARDLLYYAVTQDAMLIFENLSRGFGRQGKRTFMAERQYTRMEDWLTAKLAYEGLPSKTYLSKTLAQYTSKTCSNCGFTITSADYDRVLEKLKKTATGWMTTINGKELKVEGQITYYNRYKRQNVVKDLSVELDRLSEESVNNDISSWTKGRSGEALSLLKKRFSHRPVQEKFVCLNCGFETHADEQAALNIARSWLFLRSQEYKKYQTNKTTGNTDKRAFVETWQSFYRKKLKEVWKPAV

SEQ ID NO: 39455 - protein, 979 aa, synthetic construct
  REGION 1..979: note = engineered CasX variant
QEGKRINKIRRRLVKDSNTKKAGKTGPMKTLLVRVMTPDLRERLENLRKKPENIPQPISNTSRANLNKLLTDYTEMKKAILHVYWEEFQKDPVGLMSRVAQPASKKIDQNKLKPEMDEKGNLTTAGFACSQCGQPLFVYKLEQVSEKGKAYTNYFGRCNVAEHEKLILLAQLKPEKDSDEAVTYSLGKFGQRALDFYSIHVTKESTHPVKPLAQIAGNRYASGPVGKALRDACMGTIASFLSKYQDIIIEHQKVVKGNQKRLESLRELAGKENLEYPSVTLPPQPHTKEGVDAYNEVIARVRMWVNLNLWQKLKLSRDDAKPLLRLKGFPSFPLVERQANEVDWWDMVCNVKKLINEKKEDGKVFWQNLAGYKRQEALRPYLSSEEDRKKGKKFARYQLGDLLLHLEKKHGEDWGKVYDEAWERIDKKVEGLSKHIKLEEERRSEDAQSKAALTDWLRAKASFVIEGLKEADKDEFCRCELKLQKWYGDLRGKPFAIEAENSILDISGFSKQYNCAFIWQKDGVKKLNLYLIINYFKGGKLRFKKIKPEAFEANRFYTVINKKSGEIVPMEVNFNFDDPNLIILPLAFGKRQGREFIWNDLLSLETGSLKLANGRVIEKTLYNRRTRQDEPALFVALTFERREVLDSSNIKTPMNLIGVDRGENIPAVIALTDPEGCPLSRFKDSLGNPTHILRIGESYKEKQRTIQAKKEVEQRRAGGYSRKYASKAKNLADDMVRNTARDLLYYAVTQDAMLIFENLSRGFGRQGKRTFMAERQYTRMEDWLTAKLAYEGLPSKTYLSKTLAQYTSKTCSNCGFTITSADYDRVLEKLKKTATGWMTTINGKELKVEGQITYYNRYKRQNVVKDLSVELDRLSEESVNNDISSWTKGRSGEALSLLKKRFSHRPVQEKFVCLNCGFETHADEQAALNIARSWLFLRSQEYKKYQTNKTTGNTDKRAFVETWQSFYRKKLKEVWKPAV

SEQ ID NO: 39456 - protein, 979 aa, synthetic construct
  REGION 1..979: note = engineered CasX variant
QEGKRINKIRRRLVKDSNTKKAGKTGPMKTLLVRVMTPDLRERLENLRKKPENIPQPISNTSRANLNKLLTDYTEMKKAILHVYWEEFQKDPVGLMSRVAQPASKKIDQNKLKPEMDEKGNLTTAGFACSQCGQPLFVYKLEQVSEKGKAYTNYFGRCNVAEHEKLILLAQLKPEKDSDEAVTYSLGKFGQRALDFYSIHVTKESTHPVKPLAQIAGNRYASGPVGKALRDACMGTIASFLSKYQDIIIEHQKVVKGNQKRLESLRELAGKENLEYPSVTLPPQPHTKEGVDAYNEVIARVRMWVNLNLWQKLKLSRDDAKPLLRLKGFPSFPLVERQANEVDWWDMVCNVKKLINEKKEDGKVFWQNLAGYKRQEALRPYLSSEEDRKKGKKFARYQLGDLLLHLEKKHGEDWGKVYDEAWERIDKKVEGLSKHIKLEEERRSEDAQSKAALTDWLRAKASFVIEGLKEADKDEFCRCELKLQKWYGDLRGKPFAIEAENSILDISGFSKQYNCAFIWQKDGVKKLNLYLIINYFKGGKLRFKKIKPEAFEANRFYTVINKKSGEIVPMEVNFNFDDPNLIILPLAFGKRQGREFIWNDLLSLETGSLKLANGRVIEKTLYNRRTRQDEPALFVALTFERREVLDSSNIKPMSNLIGVDRGENIPAVIALTDPEGCPLSRFKDSLGNPTHILRIGESYKEKQRTIQAKKEVEQRRAGGYSRKYASKAKNLADDMVRNTARDLLYYAVTQDAMLIFENLSRGFGRQGKRTFMAERQYTRMEDWLTAKLAYEGLPSKTYLSKTLAQYTSKTCSNCGFTITSADYDRVLEKLKKTATGWMTTINGKELKVEGQITYYNRYKRQNVVKDLSVELDRLSEESVNNDISSWTKGRSGEALSLLKKRFSHRPVQEKFVCLNCGFETHADEQAALNIARSWLFLRSQEYKKYQTNKTTGNTDKRAFVETWQSFYRKKLKEVWKPAV

SEQ ID NO: 39457 - protein, 978 aa, synthetic construct
  REGION 1..978: note = engineered CasX variant
QEGKRINKIRRRLVKDSNTKKAGKTGPMKTLLVRVMTPDLRERLENLRKKPENIPQPISNTSRANLNKLLTDYTEMKKAILHVYWEEFQKDPVGLMSRVAQPASKKIDQNKLKPEMDEKGNLTTAGFACSQCGQPLFVYKLEQVSEKGKAYTNYFGRCNVAEHEKLILLAQLKPEKDSDEAVTYSLGKFGQRALDFYSIHVTKESTHPVKPLAQIAGNRYASGPVGKALRDACMGTIASFLSKYQDIIIEHQKVVKGNQKRLESLRELAGKENLEYPSVTLPPQPHTKEGVDAYNEVIARVRMWVNLNLWQKLKLSRDDAKPLLRLKGFPSFPLVERQANEVDWWDMVCNVKKLINEKKEDGKVFWQNLAGYKRQEALRPYLSSEEDRKKGKKFARYQLGDLLLHLEKKHGEDWGKVYDEAWERIDKKVEGLSKHIKLEEERRSEDAQSKAALTDWLRAKASFVIEGLKEADKDEFCRCELKLQKWYGDLRGKPFAIEAENSILDISGFSKQYNCAFIWQKDGVKKLNLYLIINYFKGGKLRFKKIKPEAFEANRFYTVINKKSGEIVPMEVNFNFDDPNLIILPLAFGKRQGREFIWNDLLSLETGSLKLANGRVIEKTLYNRRTRQDEPALFVALTFERREVLDSSNIKPMNLIGVDRGENIPAVIALTDPEGCPLSRFKDSLGNPTHILRIRESYKEKQRTIQAKKEVEQRRAGGYSRKYASKAKNLADDMVRNTARDLLYYAVTQDAMLIFENLSRGFGRQGKRTFMAERQYTRMEDWLTAKLAYEGLPSKTYLSKTLAQYTSKTCSNCGFTITSADYDRVLEKLKKTATGWMTTINGKELKVEGQITYYNRYKRQNVVKDLSVELDRLSEESVNNDISSWTKGRSGEALSLLKKRFSHRPVQEKFVCLNCGFETHADEQAALNIARSWLFLRSQEYKKYQTNKTTGNTDKRAFVETWQSFYRKKLKEVWKPAV

SEQ ID NO: 39458 - protein, 978 aa, synthetic construct
  REGION 1..978: note = engineered CasX variant
QEGKRINKIRRRLVKDSNTKKAGKTGPMKTLLVRVMTPDLRERLENLRKKPENIPQPISNTSRANLNKLLTDYTEMKKAILHVYWEEFQKDPVGLMSRVAQPASKKIDQNKLKPEMDEKGNLTTAGFACSQCGQPLFVYKLEQVSEKGKAYTNYFGRCNVAEHEKLILLAQLKPEKDSDEAVTYSLGKFGQRALDFYSIHVTKESTHPVKPLAQIAGNRYASGPVGKALRDACMGTIASFLSKYQDIIIEHQKVVKGNQKRLESLRELAGKENLEYPSVTLPPQPHTKEGVDAYNEVIARVRMWVNLNLWQKLKLSRDDAKPLLRLKGFPSFPLVERQANEVDWWDMVCNVKKLINEKKEDGKVFWQNLAGYKRQEALRPYLSSEEDRKKGKKFARYQLGDLLLHLEKKHGEDWGKVYDEAWERIDKKVEGLSKHIKLEEERRSEDAQSKAALTDWLRAKASFVIEGLKEADKDEFCRCELKLQKWYGDLRGKPFAIEAENSILDISGFSKQYNCAFIWQKDGVKKLNLYLIINYFKGGKLRFKKIKPEAFEANRFYTVINKKSGEIVPMEVNFNFDDPNLIILPLAFGKRQGREFIWNDLLSLETGSLKLANGRVIEKTLYNRRTRQDEPALFVALTFERREVLDSSNIKPMNLIGVDRGENIPAVIALTDPEGCPLSRFKDSLGNPTHILRIGESYKEKQRTIQAKKEVEQRRAGGYSRKYASKAKNLADDMVRNTARDLLYYAVTQDAMLIFENLSRGFGRQGKRTFSAERQYTRMEDWLTAKLAYEGLPSKTYLSKTLAQYTSKTCSNCGFTITSADYDRVLEKLKKTATGWMTTINGKELKVEGQITYYNRYKRQNVVKDLSVELDRLSEESVNNDISSWTKGRSGEALSLLKKRFSHRPVQEKFVCLNCGFETHADEQAALNIARSWLFLRSQEYKKYQTNKTTGNTDKRAFVETWQSFYRKKLKEVWKPAV

SEQ ID NO: 39459 - protein, 978 aa, synthetic construct
  REGION 1..978: note = engineered CasX variant
QEGKRINKIRRRLVKDSNTKKAGKTGPMKTLLVRVMTPDLRERLENLRKKPENIPQPISNTSRANLNKLLTDYTEMKKAILHVYWEEFQKDPVGLMSRVAQPASKKIDQNKLKPEMDEKGNLTTAGFACSQCGQPLFVYKLEQVSEKGKAYTNYFGRCNVAEHEKLILLAQLKPEKDSDEAVTYSLGKFGQRALDFYSIHVTKESTHPVKPLAQIAGNRYASGPVGKALRDACMGTIASFLSKYQDIIIEHQKVVKGNQKRLESLRELAGKENLEYPSVTLPPQPHTKEGVDAYNEVIARVRMWVNLNLWQKLKLSRDDAKPLLRLKGFPSFPLVERQANEVDWWDMVCNVKKLINEKKEDGKVFWQNLAGYKRQEALRPYLSSEEDRKKGKKFARYQLGDLLLHLEKKHGEDWGKVYDEAWERIDKKVEGLSKHIKLEEERRSEDAQSKAALTDWLRAKASFVIEGLKEADKDEFCRCELKLQKWYGDLRGKPFAIEAENSILDISGFSKQYNCAFIWQKDGVKKLNLYLIINYFKGGKLRFKKIKPEAFEANRFYTVINKKSGEIVPMEVNFNFDDPNLIILPLAFGKRQGREFIWNDLLSLETGSLKLANGRVIEKTLYNRRTRQDEPALFVALTFERREVLDSSNIKPMNLIGVDRGENIPAVIALTDPEGCPLSRFKDSLGNPTHILRIGESYKEKQRTIQAKKEVEQRRAGGYSRKYASKAKNLADDMVRNTARDLLYYAVTQDAMLIFENLSRGFGRQGKRTFMAERQYTRMEDWLTAKLAYEGLPSKTYLSKTLAQYTSKTCSNCGFTITSADYDRVLEKLKKTATGWMTTINGKELKVEGQITYYNRYKRQNVVKDLSVELDRLSEESVNNDISSWDKGRSGEALSLLKKRFSHRPVQEKFVCLNCGFETHADEQAALNIARSWLFLRSQEYKKYQTNKTTGNTDKRAFVETWQSFYRKKLKEVWKPAV

SEQ ID NO: 39460 - protein, 978 aa, synthetic construct
  REGION 1..978: note = engineered CasX variant
QEGKRINKIRRRLVKDSNTKKAGKTGPMKTLLVRVMTPDLRERLENLRKKPENIPQPISNTSRANLNKLLTDYTEMKKAILHVYWEEFQVDPVGLMSRVAQPASKKIDQNKLKPEMDEKGNLTTAGFACSQCGQPLFVYKLEQVSEKGKAYTNYFGRCNVAEHEKLILLAQLKPEKDSDEAVTYSLGKFGQRALDFYSIHVTKESTHPVKPLAQIAGNRYASGPVGKALRDACMGTIASFLSKYQDIIIEHQKVVKGNQKRLESLRELAGKENLEYPSVTLPPQPHTKEGVDAYNEVIARVRMWVNLNLWQKLKLSRDDAKPLLRLKGFPSFPLVERQANEVDWWDMVCNVKKLINEKKEDGKVFWQNLAGYKRQEALRPYLSSEEDRKKGKKFARYQLGDLLLHLEKKHGEDWGKVYDEAWERIDKKVEGLSKHIKLEEERRSEDAQSKAALTDWLRAKASFVIEGLKEADKDEFCRCELKLQKWYGDLRGKPFAIEAENSILDISGFSKQYNCAFIWQKDGVKKLNLYLIINYFKGGKLRFKKIKPEAFEANRFYTVINKKSGEIVPMEVNFNFDDPNLIILPLAFGKRQGREFIWNDLLSLETGSLKLANGRVIEKTLYNRRTRQDEPALFVALTFERREVLDSSNIKPMNLIGVDRGENIPAVIALTDPEGCPLSRFKDSLGNPTHILRIGESYKEKQRTIQAKKEVEQRRAGGYSRKYASKAKNLADDMVRNTARDLLYYAVTQDAMLIFENLSRGFGRQGKRTFMAERQYTRMEDWLTAKLAYEGLPSKTYLSKTLAQYTSKTCSNCGFTITSADYDRVLEKLKKTATGWMTTINGKELKVEGQITYYNRYKRQNVVKDLSVELDRLSEESVNNDISSWTKGRSGEALSLLKKRFSHRPVQEKFVCLNCGFETHADEQAALNIARSWLFLRSQEYKKYQTNKTTGNTDKRAFVETWQSFYRKKLKEVWKPAV

SEQ ID NO: 39461 - protein, 978 aa, synthetic construct
  REGION 1..978: note = engineered CasX variant
QEGKRLNKIRRRLVKDSNTKKAGKTGPMKTLLVRVMTPDLRERLENLRKKPENIPQPISNTSRANLNKLLTDYTEMKKAILHVYWEEFQKDPVGLMSRVAQPASKKIDQNKLKPEMDEKGNLTTAGFACSQCGQPLFVYKLEQVSEKGKAYTNYFGRCNVAEHEKLILLAQLKPEKDSDEAVTYSLGKFGQRALDFYSIHVTKESTHPVKPLAQIAGNRYASGPVGKALRDACMGTIASFLSKYQDIIIEHQKVVKGNQKRLESLRELAGKENLEYPSVTLPPQPHTKEGVDAYNEVIARVRMWVNLNLWQKLKLSRDDAKPLLRLKGFPSFPLVERQANEVDWWDMVCNVKKLINEKKEDGKVFWQNLAGYKRQEALRPYLSSEEDRKKGKKFARYQLGDLLLHLEKKHGEDWGKVYDEAWERIDKKVEGLSKHIKLEEERRSEDAQSKAALTDWLRAKASFVIEGLKEADKDEFCRCELKLQKWYGDLRGKPFAIEAENSILDISGFSKQYNCAFIWQKDGVKKLNLYLIINYFKGGKLRFKKIKPEAFEANRFYTVINKKSGEIVPMEVNFNFDDPNLIILPLAFGKRQGREFIWNDLLSLETGSLKLANGRVIEKTLYNRRTRQDEPALFVALTFERREVLDSSNIKPMNLIGVDRGENIPAVIALTDPEGCPLSRFKDSLGNPTHILRIGESYKEKQRTIQAKKEVEQRRAGGYSRKYASKAKNLADDMVRNTARDLLYYAVTQDAMLIFENLSRGFGRQGKRTFMAERQYTRMEDWLTAKLAYEGLPSKTYLSKTLAQYTSKTCSNCGFTITSADYDRVLEKLKKTATGWMTTINGKELKVEGQITYYNRYKRQNVVKDLSVELDRLSEESVNNDISSWTKGRSGEALSLLKKRFSHRPVQEKFVCLNCGFETHADEQAALNIARSWLFLRSQEYKKYQTNKTTGNTDKRAFVETWQSFYRKKLKEVWKPAV

SEQ ID NO: 39462 - protein, 978 aa, synthetic construct
  REGION 1..978: note = engineered CasX variant
QEGKRINKIRRRLVKDSNTKKAGKTGPMKTLLVRVMTPDLRERLENLRKKPENIPQPISNTSRANLNKLLTDYTEMKKAILHVYWEEFQKDPVGLMSRVAQPASKKIDQNKLKPEMDEKGNLTTAGFACSQCGQPLFVYKLEQVSEKGKAYTNYVGRCNVAEHEKLILLAQLKPEKDSDEAVTYSLGKFGQRALDFYSIHVTKESTHPVKPLAQIAGNRYASGPVGKALRDACMGTIASFLSKYQDIIIEHQKVVKGNQKRLESLRELAGKENLEYPSVTLPPQPHTKEGVDAYNEVIARVRMWVNLNLWQKLKLSRDDAKPLLRLKGFPSFPLVERQANEVDWWDMVCNVKKLINEKKEDGKVFWQNLAGYKRQEALRPYLSSEEDRKKGKKFARYQLGDLLLHLEKKHGEDWGKVYDEAWERIDKKVEGLSKHIKLEEERRSEDAQSKAALTDWLRAKASFVIEGLKEADKDEFCRCELKLQKWYGDLRGKPFAIEAENSILDISGFSKQYNCAFIWQKDGVKKLNLYLIINYFKGGKLRFKKIKPEAFEANRFYTVINKKSGEIVPMEVNFNFDDPNLIILPLAFGKRQGREFIWNDLLSLETGSLKLANGRVIEKTLYNRRTRQDEPALFVALTFERREVLDSSNIKPMNLIGVDRGENIPAVIALTDPEGCPLSRFKDSLGNPTHILRIGESYKEKQRTIQAKKEVEQRRAGGYSRKYASKAKNLADDMVRNTARDLLYYAVTQDAMLIFENLSRGFGRQGKRTFMAERQYTRMEDWLTAKLAYEGLPSKTYLSKTLAQYTSKTCSNCGFTITSADYDRVLEKLKKTATGWMTTINGKELKVEGQITYYNRYKRQNVVKDLSVELDRLSEESVNNDISSWTKGRSGEALSLLKKRFSHRPVQEKFVCLNCGFETHADEQAALNIARSWLFLRSQEYKKYQTNKTTGNTDKRAFVETWQSFYRKKLKEVWKPAV

SEQ ID NO: 39463 - protein, 978 aa, synthetic construct
  REGION 1..978: note = engineered CasX variant
QEGKRINKIRRRLVKDSNTKKAGKTGPMKTLLVRVMTPDLRERLENLRKKPENIPQPISNTSRANLNKLLTDYTEMKKAILHVYWEEFQKDPVGLMSRVAQPASKKIDQNKLKPEMDEKGNLTTAGFACSQCGQPLFVYKLEQVSEKGKAYTNYFGRCNVAEHEKLILLAQLKPEKDSDEAVTYSLGKFGQRALDFYSIHVTKESTHPVKPLAQIAGNRYASGPVGKALRDACMGTIASFLSKYQDIIIEHQKVVKGNQKRLESLRELAGKENLEYPSVTLPPQPHTKEGVDAYNEVIARVRMWVNLNLWQKLKLSRDDAKPLLRLKGFPSFPLVERQANEVDWWDMVCNVKKLINEKKEDGKVFWQNLAGYKRQEALRPYLSSEEDRKKGKKFARYQLGDLLLHLEKKHGEDWGKVYDEAWERIDKKVEGLSKHIKLEEERRSEDAQSKAALTDWLRAKASFVIEGLKEADKDEFCRCELKLQKWYGDLRGKPFAIEAENSILDISGFSKQYNCAFIWQKDGVKKLNLYLIINYFKGGKLRFKKIKPEAFEANRFYTVINKKSGEIVPMEVNFNFDDPNLIILPLAFGKRQGREFIWNDLLSLETGSLKLANGRVIEKTLYNRRTRQDEPALFVALTFERREVLDSSNIKPMNLIGVDRGENIPAVIALTDPEGCPLSRFKDSLGNPTHILRIGESYKEKQRTIQAKKEVEQRRAGGYSRKYASKAKNLADDMVRNTARDLLYYAVTQDAMLIFENLSRGFGRQGKRTFMAERQYTRMEDWLTAKLAYEGLASKTYLSKTLAQYTSKTCSNCGFTITSADYDRVLEKLKKTATGWMTTINGKELKVEGQITYYNRYKRQNVVKDLSVELDRLSEESVNNDISSWTKGRSGEALSLLKKRFSHRPVQEKFVCLNCGFETHADEQAALNIARSWLFLRSQEYKKYQTNKTTGNTDKRAFVETWQSFYRKKLKEVWKPAV

SEQ ID NO: 39464 - protein, 978 aa, synthetic construct
  REGION 1..978: note = engineered CasX variant
QEGKRINKIRRRLVKDSNTKKAGKTGPMKTLLVRVMTPDLRERLENLRKKPENIPQPISNTSRANLNKLLTDYTEMKKAILHVYWEEFQKDPVGLMSRVAQPASKKIDQNKLKPEMDEKGNLTTAGFACSQCGQPLFVYKLEQVSEKGKAYTNYFGRCNVAEHEKLILLAQLKPEKDSDEAVTYSLGKFGQRALDFYSIHVTKESTHPVKPLAQIAGNRYASGPVGKALRDACMGTIASFLSKYQDIIIEHQKVVKGNQKRLESLRELAGKENLEYPSVTLPPQPHTKEGVDAYNEVIARVRMWVNLNLWQKLKLSRDDAKPLLRLKGFPSFPLVERQANEVDWWDMVCNVKKLINEKKEDGKVFWQNLAGYKRQEALRPYLSSEEDRKKGKKFARYQLGDLLLHLEKKHGEDWGKVYDEAWERIDKKVEGLSKHIKLEEERRSEDAQSKAALTDWLRAKASFVIEGLKEADKDEFCRCELKLQKWYGDLRGKPFAIEAENSILDISGFSKQYNCAFIWQKDGVKKLNLYLIINYFKGGKLRFKKIKPEAFEANRFYTVINKKSGEIVPMEVNFNFDDPNLIILPLAFGKRQGREFIWNDLLSLETGSLKLANGRVIEKTLYNRRTRQDEPALFVALTFERREVLDSSNIKPMNLIGVDRGENIPAVIALTDPEGCPLSRFKDSLGNPTHILRIGESYKEKQRTIQAKKEVEQRRAGGYSRKYASKAKNLADDMVRNTARDLLYYAVTQDAMLIFENLSRGFGRQGKRTFMAERQYTRMEDWLTAKLAYEGLPSKVYLSKTLAQYTSKTCSNCGFTITSADYDRVLEKLKKTATGWMTTINGKELKVEGQITYYNRYKRQNVVKDLSVELDRLSEESVNNDISSWTKGRSGEALSLLKKRFSHRPVQEKFVCLNCGFETHADEQAALNIARSWLFLRSQEYKKYQTNKTTGNTDKRAFVETWQSFYRKKLKEVWKPAV

SEQ ID NO: 39465 - protein, 979 aa, synthetic construct
  REGION 1..979: note = engineered CasX variant
QEGKRINKIRRRLVKDSNTKKAGKTGPMKTLLVRVMTPDLRERLENLRKKPENIPQPISNTSRANLNKLLTDYTEMKKAILHVYWEEFQKDPVGLMSRVAQPASKKIDQNKLKPEMDEKGNLTTAGFACSQCGQPLFVYKLEQVSEKGKAYTNYFGRCNVAEHEKLILLAQLKPEKDSDEAVTYSLGKFGQRALDFYSIHVTKESTHPVKPLAQIAGNRYASGPVGKALRDACMGTIASFLSKYQDIIIEHQKVVKGNQKRLESLRELAGKENLEYPSVTLPPQPHTKEGVDAYNEVIARVRMWVNLNLWQKLKLSRDDAKPLLRLKGFPSFPLVERQANEVDWWDMVCNVKKLINEKKEDGKVFWQNLAGYKRQEALRPYLSSEEDRKKGKKFARYQLGDLLLHLEKKHGEDWGKVYDEAWERIDKKVEGLSKHIKLEEERRSEDAQSKAALTDWLRAKASFVIEGLKEADKDEFCRCELKLQKWYGDLRGKPFAIEAENSILDISGFSKQYNCAFIWQKDGVKKLNLYLIINYFKGGKLRFKKIKPEAFEANRFYTVINKKSGEIVPMEVNFNFDDPNLIILPLAFGKRQGREFIWNDLLSLETGSLKLANGRVIEKTLYNRRTRQDEPALFVALTFERREVLDSSNIKPMNLIGVDRGENIPAVIALTDPEGCPLSRFKDSLGNPTHILRIGESYKEKQRTIQAKKEVEQRRAGGYSRKYASKAKNLADDMVRNTARDLLYYAVTQDAMLIFENLSRGFGRQGKRTFMAERQYTRMEDWLTAKLAYEGPLPSKTYLSKTLAQYTSKTCSNCGFTITSADYDRVLEKLKKTATGWMTTINGKELKVEGQITYYNRYKRQNVVKDLSVELDRLSEESVNNDISSWTKGRSGEALSLLKKRFSHRPVQEKFVCLNCGFETHADEQAALNIARSWLFLRSQEYKKYQTNKTTGNTDKRAFVETWQSFYRKKLKEVWKPAV

SEQ ID NO: 39466 - protein, 979 aa, synthetic construct
  REGION 1..979: note = engineered CasX variant
QEGKRINKIRRRLVKDSNTKKAGKTGPMKTLLVRVMTPDLRERLENLRKKPENIPQPISNTSRANLNKLLTDYTEMKKAILHVYWEEFQKDPVGLMSRVAQPASKKIDQNKLKPEMDEKGNLTTAGFACSQCGQPLFVYKLEQVSEKGKAYTNYFGRCNVAEHEKLILLAQLKPEKDSDEAVTYSLGKFGQRALDFYSIHVTKESTHPVKPLAQIAGNRYASGPVGKALRDACMGTIASFLSKYQDIIIEHQKVVKGNQKRLESLRELAGKENLEYPSVTLPPQPHTKEGVDAYNEVIARVRMWVNLNLWQKLKLSRDDAKPLLRLKGFPSFPLVERQANEVDWWDMVCNVKKLINEKKEDGKVFWQNLAGYKRQEALRPYLSSEEDVRKKGKKFARYQLGDLLLHLEKKHGEDWGKVYDEAWERIDKKVEGLSKHIKLEEERRSEDAQSKAALTDWLRAKASFVIEGLKEADKDEFCRCELKLQKWYGDLRGKPFAIEAENSILDISGFSKQYNCAFIWQKDGVKKLNLYLIINYFKGGKLRFKKIKPEAFEANRFYTVINKKSGEIVPMEVNFNFDDPNLIILPLAFGKRQGREFIWNDLLSLETGSLKLANGRVIEKTLYNRRTRQDEPALFVALTFERREVLDSSNIKPMNLIGVDRGENIPAVIALTDPEGCPLSRFKDSLGNPTHILRIGESYKEKQRTIQAKKEVEQRRAGGYSRKYASKAKNLADDMVRNTARDLLYYAVTQDAMLIFENLSRGFGRQGKRTFMAERQYTRMEDWLTAKLAYEGLPSKTYLSKTLAQYTSKTCSNCGFTITSADYDRVLEKLKKTATGWMTTINGKELKVEGQITYYNRYKRQNVVKDLSVELDRLSEESVNNDISSWTKGRSGEALSLLKKRFSHRPVQEKFVCLNCGFETHADEQAALNIARSWLFLRSQEYKKYQTNKTTGNTDKRAFVETWQSFYRKKLKEVWKPAV

SEQ ID NO: 39467 - protein, 978 aa, synthetic construct
  REGION 1..978: note = engineered CasX variant
QEGKRINKIRRRLVKDSNTKKAGKTGPMKTLLVRVMTPDLRERLENLRKKPENIPQPISNTSRANLNKLLTDYTEMKKAILHVYWEEFQKDPVGLMSRVAQPASKKIDQNKLKPEMDEKGNLTTAGFACSQCGQPLFVYKLEQVSEKGKAYTNYFGRCNVAEHEKLILLAQLKPEKDSDEAVTYSLGKFGQRALDFYSIHVTKESTHPVKPLAQIAGNRYASGPVGKALRDACMGTIASFLSKYQDIIIEHQKVVKGNQKRLESLRELAGKENLEYPSVTLPPQPHTKEGVDAYNEVIARVRMWVNLNLWQKLKLSRDDAKPLLRLKGFPSFPLVERQANEVDWWDMVCNVKKLINEKKEDGKVFWQNLAGYKRQEALRPYLSSEEDRKKGKKFARYQLGDLLLHLEKKHGEDWGKVYDEAWERIDKKVEGLSKHIKLEEERRSEDAQSKAALTDWLRAKASFVIEGLKEADKDEFCRCELKLQKWYGDLRGKPFAIEAENSILDISGFSKQYNCAFIWQKDGVKKLNLYLIINYFKGGKLRFKKIKPEAFEANRFYTVINKKSGEIVPMEVNFNFDDPNLIILPLAFGKRQGREFIWNDLLSLETGSLKLANGRVIEKTLYNRRTRQDEPALFVALTFERREVLDSSNIKPMNLIGVDRGENIPAVIALTDPEGCPLSRFKDSLGNPTHILRIGESYKEKQRTIQAKKEVEQRRAGGYSRKYASKAKNLADDMVRNTARDLLYYAVTQDAMLIFENLSRGFGRQGKRTFMAERQYTRMEDWLTAKLAYEGLPSKTYLSKTLAQYTSKTCSNCGFTITSADYDRMLEKLKKTATGWMTTINGKELKVEGQITYYNRYKRQNVVKDLSVELDRLSEESVNNDISSWTKGRSGEALSLLKKRFSHRPVQEKFVCLNCGFETHADEQAALNIARSWLFLRSQEYKKYQTNKTTGNTDKRAFVETWQSFYRKKLKEVWKPAV

SEQ ID NO: 39468 - protein, 978 aa, synthetic construct
  REGION 1..978: note = engineered CasX variant
QEGKRINKIRRRLVKDSNTKKAGKTGPMKTLLVRVMTPDLRERLENLRKKPENIPQPISNTSRANLNKLLTDYTEMKKAILHVYWEEFQKDPVGLMSRVAQPASKKIDQNKLKPEMDEKGNLTTAGFACSQCGQPLFVYKLEQVSEKGKAYTNYFGRCNVAEHEKLILLAQLKPEKDSDEAVTYSLGKFGQRALDFYSIHVTKESTHPVKPLAQIAGNRYASGPVGKALRDACMGTIASFLSKYQDIIIEHQKVVKGNQKRLESLRELAGKENLEYPSVTLPPQPHTKEGVDAYNEVIARVRMWVNLNLWQKLKLSRDDAKPLLRLKGFPSFPLVERQANEVDWWDMVCNVKKLINEKKEDGKVFWQNLAGYKRQEALRPYLSSEEDRKKGKKFARYQLGDLLLHLEKKHGEDWGKVYDEAWERIDKKVEGLSKHIKLEEERRSEDAQSKAALTDWLRAKASFVIEGLKEADKDEFCRCELKLQKWYGDLRGKPFAIEAENSILDISGFSKQYNCAFIWQKDGVKKLNLYLIINYFKGGKLRFKKIKPEAFEANRFYTVINKKSGEIVPMEVNFNFDDPNLIILPLAFGKRQGREFIWNDLLSLETGSLKLANGRVIEKTLYNRRTRQDEPALFVALTFERREVLDSSNIKPMNLIGVDRGENIPAVIALTDPEGCPLSRFKDSLGNPTHILRIGESYKEKQRTIQAKKEVEQRRAGGYSRKYASKAKNLADDMVRNTARDLLYYAVTQDAMLIFENLSRGFGRQGKRTFMAERQYTRMEDWLTAKLAYEGLPSKTYLSKTLAQYTSKTCSNCGFTITSADYDRVLEKLKKTATGWMTTINGKELKVEGQITYYNRYKRQNVVKDLSVELDRLSEESVNNDISSWTKGRQGEALSLLKKRFSHRPVQEKFVCLNCGFETHADEQAALNIARSWLFLRSQEYKKYQTNKTTGNTDKRAFVETWQSFYRKKLKEVWKPAV

SEQ ID NO: 39469 - protein, 978 aa, synthetic construct
  REGION 1..978: note = engineered CasX variant
QEGKRINKIRRRLVKDSNTKKAGKTGPMKTLLVRVMTPDLRERLENLRKKPENIPQPISNTSRANLNKLLTDYTEMKKAILHVYWEEFQKDPVGLMSRVAQPASKKIDQNKLKPEMDEKGNLTTAGFACSQCGQPLFVYKLEQVSEKGKAYTNYFGRCNVAEHEKLILLAQLKPEKDSDEAVTYSLGKFGQRALDFYSIHVTKESTHPVKPLAQIAGNRYASGPVGKALRDACMGTIASFLSKYQDIIIEHQKVVKGNQKRLESLRELAGKENLEYPSVTLPPQPHTKEGVDAYNEVIARVRMWVNLNLWQKLKLSRDDAKPLLRLKGFPSFPLVERQANEVDWWDMVCNVKKLINEKKEDGKVFWQNLAGYKRQEALRPYLSSEEDRKKGKKFARYQLGDLLLHLEKKHGEDWGKVYDEAWERIDKKVEGLSKHIKLEEERRSEDAQSKAALTDWLRAKASFVIEGLKEADKDEFCRCELKLQKWYGDLRGKPFAIEAENSILDISGFSKQYNCAFIWQKDGVKKLNLYLIINYFKGGKLRFKKIKPEAFEANRFYTVINKKSGEIVPMEVNFNFDDPNLIILPLAFGKRQGREFIWNDLLSLETGSLKLANGRVIEKTLYNRRTRQDEPALFVALTFERREVLDSSNIKPMNLIGVDRGENIPAVIALTDPEGCPLSRFKDSLGNPTHILRIGESYKEKQRTIQAKKEVEQRRAGGYSRKYASKAKNLADDMVRNTARDLLYYAVTQDAMLIFENLSRGFGRQGKRTFMAERQYTRMEDWLTAKLAYEGLPSKTYLSKTLAQYTSKTCSNCGFTITSADYDRVLEKLKKTATGWMTTINGKELKVEGQITYYNRYKRQNVVKDLSVELDRLSEESVNNDISSWTKGRSGEALSLLKKRFSHRPVQEKFVCLNCEFETHADEQAALNIARSWLFLRSQEYKKYQTNKTTGNTDKRAFVETWQSFYRKKLKEVWKPAV

SEQ ID NO: 39470 - protein, 979 aa, synthetic construct
  REGION 1..979: note = engineered CasX variant
QEGKRINKIRRRLVKDSNTKKAGKTGPMKTLLVRVMTPDLRERLENLRKKPENIPQPISNTSRANLNKLLTDYTEMKKAILHVYWEEFQKDPVGLMSRVAQPASKKIDQNKLKPEMDEKGNLTTAGFACSQCGQPLFVYKLEQVSEKGKAYTNYFGRCNVAEHEKLILLAQLKPEKDSDEAVTYSLGKFGQRALDFYSIHVTKESTHPVKPLAQIAGNRYASGPVGKALRDACMGTIASFLSKYQDIIIEHQKVVKGNQKRLESLRELAGKENLEYPSVTLPPQPHTKEGVDAYNEVIARVRMWVNLNLWQKLKLSRDDAKPLLRLKGFPSFPLVERQANEVDWWDMVCNVKKLINEKKEDGKVFWQNLAGYKRQEALRPYLSSEEDRKKGKKFARYQLGDLLLHLEKKHGEDWGKVYDEAWERIDKKVEGLSKHIKLEEERRSEDAQSKAALTDWLRAKASFVIEGLKEADKDEFCRCELKLQKWYGDLRGKPFAIEAENSILDISGFSKQYNCAFIWQKDGVKKLNLYLIINYFKGGKLRFKKIKPEAFEANRFYTVINKKSGEIVPMEVNFNFDDPNLIILPLAFGKRQGREFIWNDLLSLETGSLKLANGRVIEKTLYNRRTRQDEPALFVALTFERREVLDSSNIKPMNLIGVDRGENIPAVIALTDPEGCPLSRFKDSLGNPTHILRIGESYKEKQRTIQAKKEVEQRRAGGYSRKYASKAKNLADDMVRNTARDLLYYAVTQDAMLIFENLSRGFGRQGKRTFMAERQYTRMEDWLTAKLAYEGLPSKTYLSKTLAQYTSKTCSNCGFTITSADYDRVLEKLKKTATGWMTTINGKELKVEGQITYYNRYKRQNVVKDLSVELDRLSEESVNNDISSWTKGRSGEALSLLKKRFSHRPVQEKFVCLNCGFETHADEQAALNIARSWLFLRSQEYKKYQTNKTSTGNTDKRAFVETWQSFYRKKLKEVWKPAV

SEQ ID NO: 39471 - protein, 979 aa, synthetic construct
  REGION 1..979: note = engineered CasX variant
QEGKRINKIRRRLVKDSNTKKAGKTGPMKTLLVRVMTPDLRERLENLRKKPENIPQPISNTSRANLNKLLTDYTEMKKAILHVYWEEFQKDPVGLMSRVAQPASKKIDQNKLKPEMDEKGNLTTAGFACSQCGQPLFVYKLEQVSEKGKAYTNYFGRCNVAEHEKLILLAQLKPEKDSDEAVTYSLGKFGQRALDFYSIHVTKESTHPVKPLAQIAGNRYASGPVGKALRDACMGTIASFLSKYQDIIIEHQKVVKGNQKRLESLRELAGKENLEYPSVTLPPQPHTKEGVDAYNEVIARVRMWVNLNLWQKLKLSRDDAKPLLRLKGFPSFPLVERQANEVDWWDMVCNVKKLINEKKEDGKVFWQNLAGYKRQEALRPYLSSEEDRKKGKKFARYQLGDLLLHLEKKHGEDWGKVYDEAWERIDKKVEGLSKHIKLEEERRSEDAQSKAALTDWLRAKASFVIEGLKEADKDEFCRCELKLQKWYGDLRGKPFAIEAENSILDISGFSKQYNCAFIWQKDGVKKLNLYLIINYFKGGKLRFKKIKPEAFEANRFYTVINKKSGEIVPMEVNFNFDDPNLIILPLAFGKRQGREFIWNDLLSLETGSLKLANGRVIEKTLYNRRTRQDEPALFVALTFERREVLDSSNIKPMNLIGVDRGENIPAVIALTDPEGCPLSRFKDSLGNPTHILRIGESYKEKQRTIQAKKEVEQRRAGGYSRKYASKAKNLADDMVRNTARDLLYYAVTQDAMLIFENLSRGFGRQGKRTFMAERQYTRMEDWLTAKLAYEGLPSKTYLSKTLAQYTSKTCSNCGFTITSADYDRVLEKLKKTATGWMTTINGKELKVEGQITYYNRYKRQNVVKDLSVELDRLSEESVNNDISSWTKGRSGEALSLLKKRFSHRPVQEKFVCLNCGFETHADEQAALNIARSWLFLRSQEYKKYQTNKTTGKNTDKRAFVETWQSFYRKKLKEVWKPAV

SEQ ID NO: 39472 - protein, 978 aa, synthetic construct
  REGION 1..978: note = engineered CasX variant
QEGKRINKIRRRLVKDSNTKKAGKTGPMKTLLVRVMTPDLRERLENLRKKPENIPQPISNTSRANLNKLLTDYTEMKKAILHVYWEEFQKDPVGLMSRVAQPASKKIDQNKLKPEMDEKGNLTTAGFACSQCGQPLFVYKLEQVSEKGKAYTNYFGRCNVAEHEKLILLAQLKPEKDSDEAVTYSLGKFGQRALDFYSIHVTKESTHPVKPLAQIAGNRYASGPVGKALRDACMGTIASFLSKYQDIIIEHQKVVKGNQKRLESLRELAGKENLEYPSVTLPPQPHTKEGVDAYNEVIARVRMWVNLNLWQKLKLSRDDAKPLLRLKKFPSFPLVERQANEVDWWDMVCNVKKLINEKKEDGKVFWQNLAGYKRQEALRPYLSSEEDRKKGKKFARYQLGDLLLHLEKKHGEDWGKVYDEAWERIDKKVEGLSKHIKLEEERRSEDAQSKAALTDWLRAKASFVIEGLKEADKDEFCRCELKLQKWYGDLRGKPFAIEAENSILDISGFSKQYNCAFIWQKDGVKKLNLYLIINYFKGGKLRFKKIKPEAFEANRFYTVINKKSGEIVPMEVNFNFDDPNLIILPLAFGKRQGREFIWNDLLSLETGSLKLANGRVIEKTLYNRRTRQDEPALFVALTFERREVLDSSNIKPMNLIGVDRGENIPAVIALTDPEGCPLSRFKDSLGNPTHILRIGESYKEKQRTIQAKKEVEQRRAGGYSRKYASKAKNLADDMVRNTARDLLYYAVTQDAMLIFENLSRGFGRQGKRTFMAERQYTRMEDWLTAKLAYEGLPSKTYLSKTLAQYTSKTCSNCGFTITSADYDRVLEKLKKTATGWMTTINGKELKVEGQITYYNRYKRQNVVKDLSVELDRLSEESVNNDISSWTKGRSGEALSLLKKRFSHRPVQEKFVCLNCGFETHADEQAALNIARSWLFLRSQEYKKYQTNKTTGNTDKRAFVETWQSFYRKKLKEVWKPAV

SEQ ID NO: 39473 - protein, 978 aa, synthetic construct
  REGION 1..978: note = engineered CasX variant
QEGKRINKIRRRLVKDSNTKKAGKTGPMKTLLVRVMTPDLRERLENLRKKPENIPQPISNTSRANLNKLLTDYTEMKKAILHVYWEEFQKDPVGLMSRVAQPASKKIDQNKLKPEMDEKGNLTTAGFACSQCGQPLFVYKLEQVSEKGKAYTNYFGRCNVAEHEKLILLAQLKPEKDSDEAVTYSLGKFGQRALDFYSIHVTKESTHPVKPLAQIAGNRYASGPVGKALRDACMGTIASFLSKYQDIIIEHQKVVKGNQKRLESLRELAGKENLEYPSVTLPPQPHTKEGVDAYNEVIARVRMWVNLNLWQKLKLSRDDAKPLLRLKGFPSFPLVERQANEVDWWDMVCNVKKLINEKKEDGKVFWQNLAGYKRQEALRPYLSSEEDRKKGKKFARYQLGDLLLHLEKKHGEDWGKVYDEAWERIDKKVEGLSKHIKLEEERRSEDAQSKAALTDWLRAKASFVIEGLKEADKDEFCRCELKLQKWYGDLRGKPFAIEAENSILDISGFSKQYNCAFIWQKDGVKKLNLYLIINYFKGGKLRFKKIKPEAFEANRFYTVINKKSGEIVPMEVNFNFDDPNLIILPLAFGKRQGREFIWNDLLSLETGSLKLANGRVIEKTLYNRRTRQDEPALFVALTFERREVLDSSNIKPMNLIGVDRGENIPAVIALTDPEGCPLSRFKDSLGNPTHILRIGERYKEKQRTIQAKKEVEQRRAGGYSRKYASKAKNLADDMVRNTARDLLYYAVTQDAMLIFENLSRGFGRQGKRTFMAERQYTRMEDWLTAKLAYEGLPSKTYLSKTLAQYTSKTCSNCGFTITSADYDRVLEKLKKTATGWMTTINGKELKVEGQITYYNRYKRQNVVKDLSVELDRLSEESVNNDISSWTKGRSGEALSLLKKRFSHRPVQEKFVCLNCGFETHADEQAALNIARSWLFLRSQEYKKYQTNKTTGNTDKRAFVETWQSFYRKKLKEVWKPAV

SEQ ID NO: 39474 - protein, 978 aa, synthetic construct
  REGION 1..978: note = engineered CasX variant
QEGKRINKIRRRLVKDSNTKKAGKTGPMKTLLVRVMTPDLRERLENLRKKPENIPQPISNTSRANLNKLLTDYTEMKKAILHVYWEEFQKDPVGLMSRVAQPASKKIDQNKLKPEMDEKGNLTTAGFACSQCGQPLFVYKLEQVSEKGKAYTNYFGRCNVAEHEKLILLAQLKPEKDSDEAVTYSLGKFGQRALDFYSIHVTKESTHPVKPLAQIAGNRYASGPVGKALRDACMGTIASFLSKYQDIIIEHQKVVKGNQKRLESLRELAGKENLEYPSVTLPPQPHTKEGVDAYNEVIARVRMWVNLNLWQKLKLSRDDAKPLLRLKGFPSFPLVERQANEVDWWDMVCNVKKLINEKKEDGKVFWQNLAGYKRQEALRPYLSSEEDRKKGKKFARYQLGDLLLHLEKKHGEDWGKVYDEAWERIDKKVEGLSKHIKLEEERRSEDAQSKAALTDWLRAKASFVIEGLKEADKDEFCRCELKLQKWYGDLRGKPFAIEAENSILDISGFSKQYNCAFIWQKDGVKKLNLYLIINYFKGGKLRFKKIKPEAFEANRFYTVINKKSGEIVPMEVNFNFDDPNLIILPLAFGKRQGREFIWNDLLSLETGSLQLANGRVIEKTLYNRRTRQDEPALFVALTFERREVLDSSNIKPMNLIGVDRGENIPAVIALTDPEGCPLSRFKDSLGNPTHILRIGESYKEKQRTIQAKKEVEQRRAGGYSRKYASKAKNLADDMVRNTARDLLYYAVTQDAMLIFENLSRGFGRQGKRTFMAERQYTRMEDWLTAKLAYEGLPSKTYLSKTLAQYTSKTCSNCGFTITSADYDRVLEKLKKTATGWMTTINGKELKVEGQITYYNRYKRQNVVKDLSVELDRLSEESVNNDISSWTKGRSGEALSLLKKRFSHRPVQEKFVCLNCGFETHADEQAALNIARSWLFLRSQEYKKYQTNKTTGNTDKRAFVETWQSFYRKKLKEVWKPAV

SEQ ID NO: 39475 - protein, 979 aa, synthetic construct
  REGION 1..979: note = engineered CasX variant
QEIGGRINKIRRRLVKDSNTKKAGKTGPMKTLLVRVMTPDLRERLENLRKKPENIPQPISNTSRANLNKLLTDYTEMKKAILHVYWEEFQKDPVGLMSRVAQPASKKIDQNKLKPEMDEKGNLTTAGFACSQCGQPLFVYKLEQVSEKGKAYTNYFGRCNVAEHEKLILLAQLKPEKDSDEAVTYSLGKFGQRALDFYSIHVTKESTHPVKPLAQIAGNRYASGPVGKALRDACMGTIASFLSKYQDIIIEHQKVVKGNQKRLESLRELAGKENLEYPSVTLPPQPHTKEGVDAYNEVIARVRMWVNLNLWQKLKLSRDDAKPLLRLKGFPSFPLVERQANEVDWWDMVCNVKKLINEKKEDGKVFWQNLAGYKRQEALRPYLSSEEDRKKGKKFARYQLGDLLLHLEKKHGEDWGKVYDEAWERIDKKVEGLSKHIKLEEERRSEDAQSKAALTDWLRAKASFVIEGLKEADKDEFCRCELKLQKWYGDLRGKPFAIEAENSILDISGFSKQYNCAFIWQKDGVKKLNLYLIINYFKGGKLRFKKIKPEAFEANRFYTVINKKSGEIVPMEVNFNFDDPNLIILPLAFGKRQGREFIWNDLLSLETGSLKLANGRVIEKTLYNRRTRQDEPALFVALTFERREVLDSSNIKPMNLIGVDRGENIPAVIALTDPEGCPLSRFKDSLGNPTHILRIGESYKEKQRTIQAKKEVEQRRAGGYSRKYASKAKNLADDMVRNTARDLLYYAVTQDAMLIFENLSRGFGRQGKRTFMAERQYTRMEDWLTAKLAYEGLPSKTYLSKTLAQYTSKTCSNCGFTITSADYDRVLEKLKKTATGWMTTINGKELKVEGQITYYNRYKRQNVVKDLSVELDRLSEESVNNDISSWTKGRSGEALSLLKKRFSHRPVQEKFVCLNCGFETHADEQAALNIARSWLFLRSQEYKKYQTNKTTGNTDKRAFVETWQSFYRKKLKEVWKPAV

SEQ ID NO: 39476 - protein, 980 aa, synthetic construct
  REGION 1..980: note = engineered CasX variant
QEIGKGRINKIRRRLVKDSNTKKAGKTGPMKTLLVRVMTPDLRERLENLRKKPENIPQPISNTSRANLNKLLTDYTEMKKAILHVYWEEFQKDPVGLMSRVAQPASKKIDQNKLKPEMDEKGNLTTAGFACSQCGQPLFVYKLEQVSEKGKAYTNYFGRCNVAEHEKLILLAQLKPEKDSDEAVTYSLGKFGQRALDFYSIHVTKESTHPVKPLAQIAGNRYASGPVGKALRDACMGTIASFLSKYQDIIIEHQKVVKGNQKRLESLRELAGKENLEYPSVTLPPQPHTKEGVDAYNEVIARVRMWVNLNLWQKLKLSRDDAKPLLRLKGFPSFPLVERQANEVDWWDMVCNVKKLINEKKEDGKVFWQNLAGYKRQEALRPYLSSEEDRKKGKKFARYQLGDLLLHLEKKHGEDWGKVYDEAWERIDKKVEGLSKHIKLEEERRSEDAQSKAALTDWLRAKASFVIEGLKEADKDEFCRCELKLQKWYGDLRGKPFAIEAENSILDISGFSKQYNCAFIWQKDGVKKLNLYLIINYFKGGKLRFKKIKPEAFEANRFYTVINKKSGEIVPMEVNFNFDDPNLIILPLAFGKRQGREFIWNDLLSLETGSLKLANGRVIEKTLYNRRTRQDEPALFVALTFERREVLDSSNIKPMNLIGVDRGENIPAVIALTDPEGCPLSRFKDSLGNPTHILRIGESYKEKQRTIQAKKEVEQRRAGGYSRKYASKAKNLADDMVRNTARDLLYYAVTQDAMLIFENLSRGFGRQGKRTFMAERQYTRMEDWLTAKLAYEGLPSKTYLSKTLAQYTSKTCSNCGFTITSADYDRVLEKLKKTATGWMTTINGKELKVEGQITYYNRYKRQNVVKDLSVELDRLSEESVNNDISSWTKGRSGEALSLLKKRFSHRPVQEKFVCLNCGFETHADEQAALNIARSWLFLRSQEYKKYQTNKTTGNTDKRAFVETWQSFYRKKLKEVWKPAV

SEQ ID NO: 39477 - protein, 979 aa, synthetic construct
  REGION 1..979: note = engineered CasX variant
QEIGKRANKIRRRLVKDSNTKKAGKTGPMKTLLVRVMTPDLRERLENLRKKPENIPQPISNTSRANLNKLLTDYTEMKKAILHVYWEEFQKDPVGLMSRVAQPASKKIDQNKLKPEMDEKGNLTTAGFACSQCGQPLFVYKLEQVSEKGKAYTNYFGRCNVAEHEKLILLAQLKPEKDSDEAVTYSLGKFGQRALDFYSIHVTKESTHPVKPLAQIAGNRYASGPVGKALRDACMGTIASFLSKYQDIIIEHQKVVKGNQKRLESLRELAGKENLEYPSVTLPPQPHTKEGVDAYNEVIARVRMWVNLNLWQKLKLSRDDAKPLLRLKGFPSFPLVERQANEVDWWDMVCNVKKLINEKKEDGKVFWQNLAGYKRQEALRPYLSSEEDRKKGKKFARYQLGDLLLHLEKKHGEDWGKVYDEAWERIDKKVEGLSKHIKLEEERRSEDAQSKAALTDWLRAKASFVIEGLKEADKDEFCRCELKLQKWYGDLRGKPFAIEAENSILDISGFSKQYNCAFIWQKDGVKKLNLYLIINYFKGGKLRFKKIKPEAFEANRFYTVINKKSGEIVPMEVNFNFDDPNLIILPLAFGKRQGREFIWNDLLSLETGSLKLANGRVIEKTLYNRRTRQDEPALFVALTFERREVLDSSNIKPMNLIGVDRGENIPAVIALTDPEGCPLSRFKDSLGNPTHILRIGESYKEKQRTIQAKKEVEQRRAGGYSRKYASKAKNLADDMVRNTARDLLYYAVTQDAMLIFENLSRGFGRQGKRTFMAERQYTRMEDWLTAKLAYEGLPSKTYLSKTLAQYTSKTCSNCGFTITSADYDRVLEKLKKTATGWMTTINGKELKVEGQITYYNRYKRQNVVKDLSVELDRLSEESVNNDISSWTKGRSGEALSLLKKRFSHRPVQEKFVCLNCGFETHADEQAALNIARSWLFLRSQEYKKYQTNKTTGNTDKRAFVETWQSFYRKKLKEVWKPAV

SEQ ID NO: 39478 - protein, 979 aa, synthetic construct
  REGION 1..979: note = engineered CasX variant
QEIGKRISKIRRRLVKDSNTKKAGKTGPMKTLLVRVMTPDLRERLENLRKKPENIPQPISNTSRANLNKLLTDYTEMKKAILHVYWEEFQKDPVGLMSRVAQPASKKIDQNKLKPEMDEKGNLTTAGFACSQCGQPLFVYKLEQVSEKGKAYTNYFGRCNVAEHEKLILLAQLKPEKDSDEAVTYSLGKFGQRALDFYSIHVTKESTHPVKPLAQIAGNRYASGPVGKALRDACMGTIASFLSKYQDIIIEHQKVVKGNQKRLESLRELAGKENLEYPSVTLPPQPHTKEGVDAYNEVIARVRMWVNLNLWQKLKLSRDDAKPLLRLKGFPSFPLVERQANEVDWWDMVCNVKKLINEKKEDGKVFWQNLAGYKRQEALRPYLSSEEDRKKGKKFARYQLGDLLLHLEKKHGEDWGKVYDEAWERIDKKVEGLSKHIKLEEERRSEDAQSKAALTDWLRAKASFVIEGLKEADKDEFCRCELKLQKWYGDLRGKPFAIEAENSILDISGFSKQYNCAFIWQKDGVKKLNLYLIINYFKGGKLRFKKIKPEAFEANRFYTVINKKSGEIVPMEVNFNFDDPNLIILPLAFGKRQGREFIWNDLLSLETGSLKLANGRVIEKTLYNRRTRQDEPALFVALTFERREVLDSSNIKPMNLIGVDRGENIPAVIALTDPEGCPLSRFKDSLGNPTHILRIGESYKEKQRTIQAKKEVEQRRAGGYSRKYASKAKNLADDMVRNTARDLLYYAVTQDAMLIFENLSRGFGRQGKRTFMAERQYTRMEDWLTAKLAYEGLPSKTYLSKTLAQYTSKTCSNCGFTITSADYDRVLEKLKKTATGWMTTINGKELKVEGQITYYNRYKRQNVVKDLSVELDRLSEESVNNDISSWTKGRSGEALSLLKKRFSHRPVQEKFVCLNCGFETHADEQAALNIARSWLFLRSQEYKKYQTNKTTGNTDKRAFVETWQSFYRKKLKEVWKPAV

SEQ ID NO: 39479 - protein, 979 aa, synthetic construct
  REGION 1..979: note = engineered CasX variant
QEIGKRINGIRRRLVKDSNTKKAGKTGPMKTLLVRVMTPDLRERLENLRKKPENIPQPISNTSRANLNKLLTDYTEMKKAILHVYWEEFQKDPVGLMSRVAQPASKKIDQNKLKPEMDEKGNLTTAGFACSQCGQPLFVYKLEQVSEKGKAYTNYFGRCNVAEHEKLILLAQLKPEKDSDEAVTYSLGKFGQRALDFYSIHVTKESTHPVKPLAQIAGNRYASGPVGKALRDACMGTIASFLSKYQDIIIEHQKVVKGNQKRLESLRELAGKENLEYPSVTLPPQPHTKEGVDAYNEVIARVRMWVNLNLWQKLKLSRDDAKPLLRLKGFPSFPLVERQANEVDWWDMVCNVKKLINEKKEDGKVFWQNLAGYKRQEALRPYLSSEEDRKKGKKFARYQLGDLLLHLEKKHGEDWGKVYDEAWERIDKKVEGLSKHIKLEEERRSEDAQSKAALTDWLRAKASFVIEGLKEADKDEFCRCELKLQKWYGDLRGKPFAIEAENSILDISGFSKQYNCAFIWQKDGVKKLNLYLIINYFKGGKLRFKKIKPEAFEANRFYTVINKKSGEIVPMEVNFNFDDPNLIILPLAFGKRQGREFIWNDLLSLETGSLKLANGRVIEKTLYNRRTRQDEPALFVALTFERREVLDSSNIKPMNLIGVDRGENIPAVIALTDPEGCPLSRFKDSLGNPTHILRIGESYKEKQRTIQAKKEVEQRRAGGYSRKYASKAKNLADDMVRNTARDLLYYAVTQDAMLIFENLSRGFGRQGKRTFMAERQYTRMEDWLTAKLAYEGLPSKTYLSKTLAQYTSKTCSNCGFTITSADYDRVLEKLKKTATGWMTTINGKELKVEGQITYYNRYKRQNVVKDLSVELDRLSEESVNNDISSWTKGRSGEALSLLKKRFSHRPVQEKFVCLNCGFETHADEQAALNIARSWLFLRSQEYKKYQTNKTTGNTDKRAFVETWQSFYRKKLKEVWKPAV

SEQ ID NO: 39480 - protein, 979 aa, synthetic construct
  REGION 1..979: note = engineered CasX variant
QEIGKRINKIRRRLVKDSNTKKAGKTGPMKTLLVPVMTPDLRERLENLRKKPENIPQPISNTSRANLNKLLTDYTEMKKAILHVYWEEFQKDPVGLMSRVAQPASKKIDQNKLKPEMDEKGNLTTAGFACSQCGQPLFVYKLEQVSEKGKAYTNYFGRCNVAEHEKLILLAQLKPEKDSDEAVTYSLGKFGQRALDFYSIHVTKESTHPVKPLAQIAGNRYASGPVGKALRDACMGTIASFLSKYQDIIIEHQKVVKGNQKRLESLRELAGKENLEYPSVTLPPQPHTKEGVDAYNEVIARVRMWVNLNLWQKLKLSRDDAKPLLRLKGFPSFPLVERQANEVDWWDMVCNVKKLINEKKEDGKVFWQNLAGYKRQEALRPYLSSEEDRKKGKKFARYQLGDLLLHLEKKHGEDWGKVYDEAWERIDKKVEGLSKHIKLEEERRSEDAQSKAALTDWLRAKASFVIEGLKEADKDEFCRCELKLQKWYGDLRGKPFAIEAENSILDISGFSKQYNCAFIWQKDGVKKLNLYLIINYFKGGKLRFKKIKPEAFEANRFYTVINKKSGEIVPMEVNFNFDDPNLIILPLAFGKRQGREFIWNDLLSLETGSLKLANGRVIEKTLYNRRTRQDEPALFVALTFERREVLDSSNIKPMNLIGVDRGENIPAVIALTDPEGCPLSRFKDSLGNPTHILRIGESYKEKQRTIQAKKEVEQRRAGGYSRKYASKAKNLADDMVRNTARDLLYYAVTQDAMLIFENLSRGFGRQGKRTFMAERQYTRMEDWLTAKLAYEGLPSKTYLSKTLAQYTSKTCSNCGFTITSADYDRVLEKLKKTATGWMTTINGKELKVEGQITYYNRYKRQNVVKDLSVELDRLSEESVNNDISSWTKGRSGEALSLLKKRFSHRPVQEKFVCLNCGFETHADEQAALNIARSWLFLRSQEYKKYQTNKTTGNTDKRAFVETWQSFYRKKLKEVWKPAV

SEQ ID NO: 39481 - protein, 979 aa, synthetic construct
  REGION 1..979: note = engineered CasX variant
QEIGKRINKIRRRLVKDSNTKKAGKTGPMKTLLVRVMTPDLRERLENLRKKPPNIPQPISNTSRANLNKLLTDYTEMKKAILHVYWEEFQKDPVGLMSRVAQPASKKIDQNKLKPEMDEKGNLTTAGFACSQCGQPLFVYKLEQVSEKGKAYTNYFGRCNVAEHEKLILLAQLKPEKDSDEAVTYSLGKFGQRALDFYSIHVTKESTHPVKPLAQIAGNRYASGPVGKALRDACMGTIASFLSKYQDIIIEHQKVVKGNQKRLESLRELAGKENLEYPSVTLPPQPHTKEGVDAYNEVIARVRMWVNLNLWQKLKLSRDDAKPLLRLKGFPSFPLVERQANEVDWWDMVCNVKKLINEKKEDGKVFWQNLAGYKRQEALRPYLSSEEDRKKGKKFARYQLGDLLLHLEKKHGEDWGKVYDEAWERIDKKVEGLSKHIKLEEERRSEDAQSKAALTDWLRAKASFVIEGLKEADKDEFCRCELKLQKWYGDLRGKPFAIEAENSILDISGFSKQYNCAFIWQKDGVKKLNLYLIINYFKGGKLRFKKIKPEAFEANRFYTVINKKSGEIVPMEVNFNFDDPNLIILPLAFGKRQGREFIWNDLLSLETGSLKLANGRVIEKTLYNRRTRQDEPALFVALTFERREVLDSSNIKPMNLIGVDRGENIPAVIALTDPEGCPLSRFKDSLGNPTHILRIGESYKEKQRTIQAKKEVEQRRAGGYSRKYASKAKNLADDMVRNTARDLLYYAVTQDAMLIFENLSRGFGRQGKRTFMAERQYTRMEDWLTAKLAYEGLPSKTYLSKTLAQYTSKTCSNCGFTITSADYDRVLEKLKKTATGWMTTINGKELKVEGQITYYNRYKRQNVVKDLSVELDRLSEESVNNDISSWTKGRSGEALSLLKKRFSHRPVQEKFVCLNCGFETHADEQAALNIARSWLFLRSQEYKKYQTNKTTGNTDKRAFVETWQSFYRKKLKEVWKPAV

SEQ ID NO: 39482 - protein, 979 aa, synthetic construct
  REGION 1..979: note = engineered CasX variant
QEIGKRINKIRRRLVKDSNTKKAGKTGPMKTLLVRVMTPDLRERLENLRKKPENIPQPISNTSQANLNKLLTDYTEMKKAILHVYWEEFQKDPVGLMSRVAQPASKKIDQNKLKPEMDEKGNLTTAGFACSQCGQPLFVYKLEQVSEKGKAYTNYFGRCNVAEHEKLILLAQLKPEKDSDEAVTYSLGKFGQRALDFYSIHVTKESTHPVKPLAQIAGNRYASGPVGKALRDACMGTIASFLSKYQDIIIEHQKVVKGNQKRLESLRELAGKENLEYPSVTLPPQPHTKEGVDAYNEVIARVRMWVNLNLWQKLKLSRDDAKPLLRLKGFPSFPLVERQANEVDWWDMVCNVKKLINEKKEDGKVFWQNLAGYKRQEALRPYLSSEEDRKKGKKFARYQLGDLLLHLEKKHGEDWGKVYDEAWERIDKKVEGLSKHIKLEEERRSEDAQSKAALTDWLRAKASFVIEGLKEADKDEFCRCELKLQKWYGDLRGKPFAIEAENSILDISGFSKQYNCAFIWQKDGVKKLNLYLIINYFKGGKLRFKKIKPEAFEANRFYTVINKKSGEIVPMEVNFNFDDPNLIILPLAFGKRQGREFIWNDLLSLETGSLKLANGRVIEKTLYNRRTRQDEPALFVALTFERREVLDSSNIKPMNLIGVDRGENIPAVIALTDPEGCPLSRFKDSLGNPTHILRIGESYKEKQRTIQAKKEVEQRRAGGYSRKYASKAKNLADDMVRNTARDLLYYAVTQDAMLIFENLSRGFGRQGKRTFMAERQYTRMEDWLTAKLAYEGLPSKTYLSKTLAQYTSKTCSNCGFTITSADYDRVLEKLKKTATGWMTTINGKELKVEGQITYYNRYKRQNVVKDLSVELDRLSEESVNNDISSWTKGRSGEALSLLKKRFSHRPVQEKFVCLNCGFETHADEQAALNIARSWLFLRSQEYKKYQTNKTTGNTDKRAFVETWQSFYRKKLKEVWKPAV

SEQ ID NO: 39483 - protein, 979 aa, synthetic construct
  REGION 1..979: note = engineered CasX variant
QEIGKRINKIRRRLVKDSNTKKAGKTGPMKTLLVRVMTPDLRERLENLRKKPENIPQPISNTSRANLNKLLTDYTEMKKAILHVYDEEFQKDPVGLMSRVAQPASKKIDQNKLKPEMDEKGNLTTAGFACSQCGQPLFVYKLEQVSEKGKAYTNYFGRCNVAEHEKLILLAQLKPEKDSDEAVTYSLGKFGQRALDFYSIHVTKESTHPVKPLAQIAGNRYASGPVGKALRDACMGTIASFLSKYQDIIIEHQKVVKGNQKRLESLRELAGKENLEYPSVTLPPQPHTKEGVDAYNEVIARVRMWVNLNLWQKLKLSRDDAKPLLRLKGFPSFPLVERQANEVDWWDMVCNVKKLINEKKEDGKVFWQNLAGYKRQEALRPYLSSEEDRKKGKKFARYQLGDLLLHLEKKHGEDWGKVYDEAWERIDKKVEGLSKHIKLEEERRSEDAQSKAALTDWLRAKASFVIEGLKEADKDEFCRCELKLQKWYGDLRGKPFAIEAENSILDISGFSKQYNCAFIWQKDGVKKLNLYLIINYFKGGKLRFKKIKPEAFEANRFYTVINKKSGEIVPMEVNFNFDDPNLIILPLAFGKRQGREFIWNDLLSLETGSLKLANGRVIEKTLYNRRTRQDEPALFVALTFERREVLDSSNIKPMNLIGVDRGENIPAVIALTDPEGCPLSRFKDSLGNPTHILRIGESYKEKQRTIQAKKEVEQRRAGGYSRKYASKAKNLADDMVRNTARDLLYYAVTQDAMLIFENLSRGFGRQGKRTFMAERQYTRMEDWLTAKLAYEGLPSKTYLSKTLAQYTSKTCSNCGFTITSADYDRVLEKLKKTATGWMTTINGKELKVEGQITYYNRYKRQNVVKDLSVELDRLSEESVNNDISSWTKGRSGEALSLLKKRFSHRPVQEKFVCLNCGFETHADEQAALNIARSWLFLRSQEYKKYQTNKTTGNTDKRAFVETWQSFYRKKLKEVWKPAV

SEQ ID NO: 39484 - protein, 979 aa, synthetic construct
  REGION 1..979: note = engineered CasX variant
QEIGKRINKIRRRLVKDSNTKKAGKTGPMKTLLVRVMTPDLRERLENLRKKPENIPQPISNTSRANLNKLLTDYTEMKKAILHVYWEEFQKDPVGLMSRVAQPASKKIDQNKLKPEMDEKGNLTTAGFACSQCGQPLFVYKLEQVSEKGKAYTNYFGRCNVAEHEKLIKLAQLKPEKDSDEAVTYSLGKFGQRALDFYSIHVTKESTHPVKPLAQIAGNRYASGPVGKALRDACMGTIASFLSKYQDIIIEHQKVVKGNQKRLESLRELAGKENLEYPSVTLPPQPHTKEGVDAYNEVIARVRMWVNLNLWQKLKLSRDDAKPLLRLKGFPSFPLVERQANEVDWWDMVCNVKKLINEKKEDGKVFWQNLAGYKRQEALRPYLSSEEDRKKGKKFARYQLGDLLLHLEKKHGEDWGKVYDEAWERIDKKVEGLSKHIKLEEERRSEDAQSKAALTDWLRAKASFVIEGLKEADKDEFCRCELKLQKWYGDLRGKPFAIEAENSILDISGFSKQYNCAFIWQKDGVKKLNLYLIINYFKGGKLRFKKIKPEAFEANRFYTVINKKSGEIVPMEVNFNFDDPNLIILPLAFGKRQGREFIWNDLLSLETGSLKLANGRVIEKTLYNRRTRQDEPALFVALTFERREVLDSSNIKPMNLIGVDRGENIPAVIALTDPEGCPLSRFKDSLGNPTHILRIGESYKEKQRTIQAKKEVEQRRAGGYSRKYASKAKNLADDMVRNTARDLLYYAVTQDAMLIFENLSRGFGRQGKRTFMAERQYTRMEDWLTAKLAYEGLPSKTYLSKTLAQYTSKTCSNCGFTITSADYDRVLEKLKKTATGWMTTINGKELKVEGQITYYNRYKRQNVVKDLSVELDRLSEESVNNDISSWTKGRSGEALSLLKKRFSHRPVQEKFVCLNCGFETHADEQAALNIARSWLFLRSQEYKKYQTNKTTGNTDKRAFVETWQSFYRKKLKEVWKPAV

SEQ ID NO: 39485 - protein, 979 aa, synthetic construct
  REGION 1..979: note = engineered CasX variant
QEIGKRINKIRRRLVKDSNTKKAGKTGPMKTLLVRVMTPDLRERLENLRKKPENIPQPISNTSRANLNKLLTDYTEMKKAILHVYWEEFQKDPVGLMSRVAQPASKKIDQNKLKPEMDEKGNLTTAGFACSQCGQPLFVYKLEQVSEKGKAYTNYFGRCNVAEHEKLILLYQLKPEKDSDEAVTYSLGKFGQRALDFYSIHVTKESTHPVKPLAQIAGNRYASGPVGKALRDACMGTIASFLSKYQDIIIEHQKVVKGNQKRLESLRELAGKENLEYPSVTLPPQPHTKEGVDAYNEVIARVRMWVNLNLWQKLKLSRDDAKPLLRLKGFPSFPLVERQANEVDWWDMVCNVKKLINEKKEDGKVFWQNLAGYKRQEALRPYLSSEEDRKKGKKFARYQLGDLLLHLEKKHGEDWGKVYDEAWERIDKKVEGLSKHIKLEEERRSEDAQSKAALTDWLRAKASFVIEGLKEADKDEFCRCELKLQKWYGDLRGKPFAIEAENSILDISGFSKQYNCAFIWQKDGVKKLNLYLIINYFKGGKLRFKKIKPEAFEANRFYTVINKKSGEIVPMEVNFNFDDPNLIILPLAFGKRQGREFIWNDLLSLETGSLKLANGRVIEKTLYNRRTRQDEPALFVALTFERREVLDSSNIKPMNLIGVDRGENIPAVIALTDPEGCPLSRFKDSLGNPTHILRIGESYKEKQRTIQAKKEVEQRRAGGYSRKYASKAKNLADDMVRNTARDLLYYAVTQDAMLIFENLSRGFGRQGKRTFMAERQYTRMEDWLTAKLAYEGLPSKTYLSKTLAQYTSKTCSNCGFTITSADYDRVLEKLKKTATGWMTTINGKELKVEGQITYYNRYKRQNVVKDLSVELDRLSEESVNNDISSWTKGRSGEALSLLKKRFSHRPVQEKFVCLNCGFETHADEQAALNIARSWLFLRSQEYKKYQTNKTTGNTDKRAFVETWQSFYRKKLKEVWKPAV

SEQ ID NO: 39486 - protein, 979 aa, synthetic construct
  REGION 1..979: note = engineered CasX variant
QEIGKRINKIRRRLVKDSNTKKAGKTGPMKTLLVRVMTPDLRERLENLRKKPENIPQPISNTSRANLNKLLTDYTEMKKAILHVYWEEFQKDPVGLMSRVAQPASKKIDQNKLKPEMDEKGNLTTAGFACSQCGQPLFVYKLEQVSEKGKAYTNYFGRCNVAEHEKLILLSQLKPEKDSDEAVTYSLGKFGQRALDFYSIHVTKESTHPVKPLAQIAGNRYASGPVGKALRDACMGTIASFLSKYQDIIIEHQKVVKGNQKRLESLRELAGKENLEYPSVTLPPQPHTKEGVDAYNEVIARVRMWVNLNLWQKLKLSRDDAKPLLRLKGFPSFPLVERQANEVDWWDMVCNVKKLINEKKEDGKVFWQNLAGYKRQEALRPYLSSEEDRKKGKKFARYQLGDLLLHLEKKHGEDWGKVYDEAWERIDKKVEGLSKHIKLEEERRSEDAQSKAALTDWLRAKASFVIEGLKEADKDEFCRCELKLQKWYGDLRGKPFAIEAENSILDISGFSKQYNCAFIWQKDGVKKLNLYLIINYFKGGKLRFKKIKPEAFEANRFYTVINKKSGEIVPMEVNFNFDDPNLIILPLAFGKRQGREFIWNDLLSLETGSLKLANGRVIEKTLYNRRTRQDEPALFVALTFERREVLDSSNIKPMNLIGVDRGENIPAVIALTDPEGCPLSRFKDSLGNPTHILRIGESYKEKQRTIQAKKEVEQRRAGGYSRKYASKAKNLADDMVRNTARDLLYYAVTQDAMLIFENLSRGFGRQGKRTFMAERQYTRMEDWLTAKLAYEGLPSKTYLSKTLAQYTSKTCSNCGFTITSADYDRVLEKLKKTATGWMTTINGKELKVEGQITYYNRYKRQNVVKDLSVELDRLSEESVNNDISSWTKGRSGEALSLLKKRFSHRPVQEKFVCLNCGFETHADEQAALNIARSWLFLRSQEYKKYQTNKTTGNTDKRAFVETWQSFYRKKLKEVWKPAV

SEQ ID NO: 39487 - protein, 978 aa, synthetic construct
  REGION 1..978: note = engineered CasX variant
QEIGKRINKIRRRLVKDSNTKKAGKTGPMKTLLVRVMTPDLRERLENLRKKPENIPQPISNTSRANLNKLLTDYTEMKKAILHVYWEEFQKDPVGLMSRVAQPASKKIDQNKLKPEMDEKGNLTTAGFACSQCGQPLFVYKLEQVSEKGKAYTNYFGRCNVAEHEKLILLAQLKPEKDSDEAVTYSLGKFGQRALDFYSIHVTKESTHPVKPLAQIAGNRYASPVGKALRDACMGTIASFLSKYQDIIIEHQKVVKGNQKRLESLRELAGKENLEYPSVTLPPQPHTKEGVDAYNEVIARVRMWVNLNLWQKLKLSRDDAKPLLRLKGFPSFPLVERQANEVDWWDMVCNVKKLINEKKEDGKVFWQNLAGYKRQEALRPYLSSEEDRKKGKKFARYQLGDLLLHLEKKHGEDWGKVYDEAWERIDKKVEGLSKHIKLEEERRSEDAQSKAALTDWLRAKASFVIEGLKEADKDEFCRCELKLQKWYGDLRGKPFAIEAENSILDISGFSKQYNCAFIWQKDGVKKLNLYLIINYFKGGKLRFKKIKPEAFEANRFYTVINKKSGEIVPMEVNFNFDDPNLIILPLAFGKRQGREFIWNDLLSLETGSLKLANGRVIEKTLYNRRTRQDEPALFVALTFERREVLDSSNIKPMNLIGVDRGENIPAVIALTDPEGCPLSRFKDSLGNPTHILRIGESYKEKQRTIQAKKEVEQRRAGGYSRKYASKAKNLADDMVRNTARDLLYYAVTQDAMLIFENLSRGFGRQGKRTFMAERQYTRMEDWLTAKLAYEGLPSKTYLSKTLAQYTSKTCSNCGFTITSADYDRVLEKLKKTATGWMTTINGKELKVEGQITYYNRYKRQNVVKDLSVELDRLSEESVNNDISSWTKGRSGEALSLLKKRFSHRPVQEKFVCLNCGFETHADEQAALNIARSWLFLRSQEYKKYQTNKTTGNTDKRAFVETWQSFYRKKLKEVWKPAV

SEQ ID NO: 39488 - protein, 979 aa, synthetic construct
  REGION 1..979: note = engineered CasX variant
QEIGKRINKIRRRLVKDSNTKKAGKTGPMKTLLVRVMTPDLRERLENLRKKPENIPQPISNTSRANLNKLLTDYTEMKKAILHVYWEEFQKDPVGLMSRVAQPASKKIDQNKLKPEMDEKGNLTTAGFACSQCGQPLFVYKLEQVSEKGKAYTNYFGRCNVAEHEKLILLAQLKPEKDSDEAVTYSLGKFGQRALDFYSIHVTKESTHPVKPLAQIAGNRYASGPVGKALRDACMGTIASFLSKYQDIIIEHQKVVKGNQKRLESLRELAGKENLEYPSVTLPPQPHTSEGVDAYNEVIARVRMWVNLNLWQKLKLSRDDAKPLLRLKGFPSFPLVERQANEVDWWDMVCNVKKLINEKKEDGKVFWQNLAGYKRQEALRPYLSSEEDRKKGKKFARYQLGDLLLHLEKKHGEDWGKVYDEAWERIDKKVEGLSKHIKLEEERRSEDAQSKAALTDWLRAKASFVIEGLKEADKDEFCRCELKLQKWYGDLRGKPFAIEAENSILDISGFSKQYNCAFIWQKDGVKKLNLYLIINYFKGGKLRFKKIKPEAFEANRFYTVINKKSGEIVPMEVNFNFDDPNLIILPLAFGKRQGREFIWNDLLSLETGSLKLANGRVIEKTLYNRRTRQDEPALFVALTFERREVLDSSNIKPMNLIGVDRGENIPAVIALTDPEGCPLSRFKDSLGNPTHILRIGESYKEKQRTIQAKKEVEQRRAGGYSRKYASKAKNLADDMVRNTARDLLYYAVTQDAMLIFENLSRGFGRQGKRTFMAERQYTRMEDWLTAKLAYEGLPSKTYLSKTLAQYTSKTCSNCGFTITSADYDRVLEKLKKTATGWMTTINGKELKVEGQITYYNRYKRQNVVKDLSVELDRLSEESVNNDISSWTKGRSGEALSLLKKRFSHRPVQEKFVCLNCGFETHADEQAALNIARSWLFLRSQEYKKYQTNKTTGNTDKRAFVETWQSFYRKKLKEVWKPAV

SEQ ID NO: 39489 - protein, 979 aa, synthetic construct
  REGION 1..979: note = engineered CasX variant
QEIGKRINKIRRRLVKDSNTKKAGKTGPMKTLLVRVMTPDLRERLENLRKKPENIPQPISNTSRANLNKLLTDYTEMKKAILHVYWEEFQKDPVGLMSRVAQPASKKIDQNKLKPEMDEKGNLTTAGFACSQCGQPLFVYKLEQVSEKGKAYTNYFGRCNVAEHEKLILLAQLKPEKDSDEAVTYSLGKFGQRALDFYSIHVTKESTHPVKPLAQIAGNRYASGPVGKALRDACMGTIASFLSKYQDIIIEHQKVVKGNQKRLESLRELAGKENLEYPSVTLPPQPHTKEGLDAYNEVIARVRMWVNLNLWQKLKLSRDDAKPLLRLKGFPSFPLVERQANEVDWWDMVCNVKKLINEKKEDGKVFWQNLAGYKRQEALRPYLSSEEDRKKGKKFARYQLGDLLLHLEKKHGEDWGKVYDEAWERIDKKVEGLSKHIKLEEERRSEDAQSKAALTDWLRAKASFVIEGLKEADKDEFCRCELKLQKWYGDLRGKPFAIEAENSILDISGFSKQYNCAFIWQKDGVKKLNLYLIINYFKGGKLRFKKIKPEAFEANRFYTVINKKSGEIVPMEVNFNFDDPNLIILPLAFGKRQGREFIWNDLLSLETGSLKLANGRVIEKTLYNRRTRQDEPALFVALTFERREVLDSSNIKPMNLIGVDRGENIPAVIALTDPEGCPLSRFKDSLGNPTHILRIGESYKEKQRTIQAKKEVEQRRAGGYSRKYASKAKNLADDMVRNTARDLLYYAVTQDAMLIFENLSRGFGRQGKRTFMAERQYTRMEDWLTAKLAYEGLPSKTYLSKTLAQYTSKTCSNCGFTITSADYDRVLEKLKKTATGWMTTINGKELKVEGQITYYNRYKRQNVVKDLSVELDRLSEESVNNDISSWTKGRSGEALSLLKKRFSHRPVQEKFVCLNCGFETHADEQAALNIARSWLFLRSQEYKKYQTNKTTGNTDKRAFVETWQSFYRKKLKEVWKPAV

SEQ ID NO: 39490 - protein, 979 aa, synthetic construct
  REGION 1..979: note = engineered CasX variant
QEIGKRINKIRRRLVKDSNTKKAGKTGPMKTLLVRVMTPDLRERLENLRKKPENIPQPISNTSRANLNKLLTDYTEMKKAILHVYWEEFQKDPVGLMSRVAQPASKKIDQNKLKPEMDEKGNLTTAGFACSQCGQPLFVYKLEQVSEKGKAYTNYFGRCNVAEHEKLILLAQLKPEKDSDEAVTYSLGKFGQRALDFYSIHVTKESTHPVKPLAQIAGNRYASGPVGKALRDACMGTIASFLSKYQDIIIEHQKVVKGNQKRLESLRELAGKENLEYPSVTLPPQPHTKEGVDAYNEVIARVRTWVNLNLWQKLKLSRDDAKPLLRLKGFPSFPLVERQANEVDWWDMVCNVKKLINEKKEDGKVFWQNLAGYKRQEALRPYLSSEEDRKKGKKFARYQLGDLLLHLEKKHGEDWGKVYDEAWERIDKKVEGLSKHIKLEEERRSEDAQSKAALTDWLRAKASFVIEGLKEADKDEFCRCELKLQKWYGDLRGKPFAIEAENSILDISGFSKQYNCAFIWQKDGVKKLNLYLIINYFKGGKLRFKKIKPEAFEANRFYTVINKKSGEIVPMEVNFNFDDPNLIILPLAFGKRQGREFIWNDLLSLETGSLKLANGRVIEKTLYNRRTRQDEPALFVALTFERREVLDSSNIKPMNLIGVDRGENIPAVIALTDPEGCPLSRFKDSLGNPTHILRIGESYKEKQRTIQAKKEVEQRRAGGYSRKYASKAKNLADDMVRNTARDLLYYAVTQDAMLIFENLSRGFGRQGKRTFMAERQYTRMEDWLTAKLAYEGLPSKTYLSKTLAQYTSKTCSNCGFTITSADYDRVLEKLKKTATGWMTTINGKELKVEGQITYYNRYKRQNVVKDLSVELDRLSEESVNNDISSWTKGRSGEALSLLKKRFSHRPVQEKFVCLNCGFETHADEQAALNIARSWLFLRSQEYKKYQTNKTTGNTDKRAFVETWQSFYRKKLKEVWKPAV

SEQ ID NO: 39491 - protein, 979 aa, synthetic construct
  REGION 1..979: note = engineered CasX variant
QEIGKRINKIRRRLVKDSNTKKAGKTGPMKTLLVRVMTPDLRERLENLRKKPENIPQPISNTSRANLNKLLTDYTEMKKAILHVYWEEFQKDPVGLMSRVAQPASKKIDQNKLKPEMDEKGNLTTAGFACSQCGQPLFVYKLEQVSEKGKAYTNYFGRCNVAEHEKLILLAQLKPEKDSDEAVTYSLGKFGQRALDFYSIHVTKESTHPVKPLAQIAGNRYASGPVGKALRDACMGTIASFLSKYQDIIIEHQKVVKGNQKRLESLRELAGKENLEYPSVTLPPQPHTKEGVDAYNEVIARVRWWVNLNLWQKLKLSRDDAKPLLRLKGFPSFPLVERQANEVDWWDMVCNVKKLINEKKEDGKVFWQNLAGYKRQEALRPYLSSEEDRKKGKKFARYQLGDLLLHLEKKHGEDWGKVYDEAWERIDKKVEGLSKHIKLEEERRSEDAQSKAALTDWLRAKASFVIEGLKEADKDEFCRCELKLQKWYGDLRGKPFAIEAENSILDISGFSKQYNCAFIWQKDGVKKLNLYLIINYFKGGKLRFKKIKPEAFEANRFYTVINKKSGEIVPMEVNFNFDDPNLIILPLAFGKRQGREFIWNDLLSLETGSLKLANGRVIEKTLYNRRTRQDEPALFVALTFERREVLDSSNIKPMNLIGVDRGENIPAVIALTDPEGCPLSRFKDSLGNPTHILRIGESYKEKQRTIQAKKEVEQRRAGGYSRKYASKAKNLADDMVRNTARDLLYYAVTQDAMLIFENLSRGFGRQGKRTFMAERQYTRMEDWLTAKLAYEGLPSKTYLSKTLAQYTSKTCSNCGFTITSADYDRVLEKLKKTATGWMTTINGKELKVEGQITYYNRYKRQNVVKDLSVELDRLSEESVNNDISSWTKGRSGEALSLLKKRFSHRPVQEKFVCLNCGFETHADEQAALNIARSWLFLRSQEYKKYQTNKTTGNTDKRAFVETWQSFYRKKLKEVWKPAV

SEQ ID NO: 39492 - protein, 980 aa, synthetic construct
  REGION 1..980: note = engineered CasX variant
QEIGKRINKIRRRLVKDSNTKKAGKTGPMKTLLVRVMTPDLRERLENLRKKPENIPQPISNTSRANLNKLLTDYTEMKKAILHVYWEEFQKDPVGLMSRVAQPASKKIDQNKLKPEMDEKGNLTTAGFACSQCGQPLFVYKLEQVSEKGKAYTNYFGRCNVAEHEKLILLAQLKPEKDSDEAVTYSLGKFGQRALDFYSIHVTKESTHPVKPLAQIAGNRYASGPVGKALRDACMGTIASFLSKYQDIIIEHQKVVKGNQKRLESLRELAGKENLEYPSVTLPPQPHTKEGVDAYNEVIARVRMWVNLNLWQKLKLSRDDAKPLLRLKGFPSFPLVERQQANEVDWWDMVCNVKKLINEKKEDGKVFWQNLAGYKRQEALRPYLSSEEDRKKGKKFARYQLGDLLLHLEKKHGEDWGKVYDEAWERIDKKVEGLSKHIKLEEERRSEDAQSKAALTDWLRAKASFVIEGLKEADKDEFCRCELKLQKWYGDLRGKPFAIEAENSILDISGFSKQYNCAFIWQKDGVKKLNLYLIINYFKGGKLRFKKIKPEAFEANRFYTVINKKSGEIVPMEVNFNFDDPNLIILPLAFGKRQGREFIWNDLLSLETGSLKLANGRVIEKTLYNRRTRQDEPALFVALTFERREVLDSSNIKPMNLIGVDRGENIPAVIALTDPEGCPLSRFKDSLGNPTHILRIGESYKEKQRTIQAKKEVEQRRAGGYSRKYASKAKNLADDMVRNTARDLLYYAVTQDAMLIFENLSRGFGRQGKRTFMAERQYTRMEDWLTAKLAYEGLPSKTYLSKTLAQYTSKTCSNCGFTITSADYDRVLEKLKKTATGWMTTINGKELKVEGQITYYNRYKRQNVVKDLSVELDRLSEESVNNDISSWTKGRSGEALSLLKKRFSHRPVQEKFVCLNCGFETHADEQAALNIARSWLFLRSQEYKKYQTNKTTGNTDKRAFVETWQSFYRKKLKEVWKPAV

SEQ ID NO: 39493 - protein, 980 aa, synthetic construct
  REGION 1..980: note = engineered CasX variant
QEIGKRINKIRRRLVKDSNTKKAGKTGPMKTLLVRVMTPDLRERLENLRKKPENIPQPISNTSRANLNKLLTDYTEMKKAILHVYWEEFQKDPVGLMSRVAQPASKKIDQNKLKPEMDEKGNLTTAGFACSQCGQPLFVYKLEQVSEKGKAYTNYFGRCNVAEHEKLILLAQLKPEKDSDEAVTYSLGKFGQRALDFYSIHVTKESTHPVKPLAQIAGNRYASGPVGKALRDACMGTIASFLSKYQDIIIEHQKVVKGNQKRLESLRELAGKENLEYPSVTLPPQPHTKEGVDAYNEVIARVRMWVNLNLWQKLKLSRDDAKPLLRLKGFPSFPLVERQANAEVDWWDMVCNVKKLINEKKEDGKVFWQNLAGYKRQEALRPYLSSEEDRKKGKKFARYQLGDLLLHLEKKHGEDWGKVYDEAWERIDKKVEGLSKHIKLEEERRSEDAQSKAALTDWLRAKASFVIEGLKEADKDEFCRCELKLQKWYGDLRGKPFAIEAENSILDISGFSKQYNCAFIWQKDGVKKLNLYLIINYFKGGKLRFKKIKPEAFEANRFYTVINKKSGEIVPMEVNFNFDDPNLIILPLAFGKRQGREFIWNDLLSLETGSLKLANGRVIEKTLYNRRTRQDEPALFVALTFERREVLDSSNIKPMNLIGVDRGENIPAVIALTDPEGCPLSRFKDSLGNPTHILRIGESYKEKQRTIQAKKEVEQRRAGGYSRKYASKAKNLADDMVRNTARDLLYYAVTQDAMLIFENLSRGFGRQGKRTFMAERQYTRMEDWLTAKLAYEGLPSKTYLSKTLAQYTSKTCSNCGFTITSADYDRVLEKLKKTATGWMTTINGKELKVEGQITYYNRYKRQNVVKDLSVELDRLSEESVNNDISSWTKGRSGEALSLLKKRFSHRPVQEKFVCLNCGFETHADEQAALNIARSWLFLRSQEYKKYQTNKTTGNTDKRAFVETWQSFYRKKLKEVWKPAV

SEQ ID NO: 39494 - protein, 979 aa, synthetic construct
  REGION 1..979: note = engineered CasX variant
QEIGKRINKIRRRLVKDSNTKKAGKTGPMKTLLVRVMTPDLRERLENLRKKPENIPQPISNTSRANLNKLLTDYTEMKKAILHVYWEEFQKDPVGLMSRVAQPASKKIDQNKLKPEMDEKGNLTTAGFACSQCGQPLFVYKLEQVSEKGKAYTNYFGRCNVAEHEKLILLAQLKPEKDSDEAVTYSLGKFGQRALDFYSIHVTKESTHPVKPLAQIAGNRYASGPVGKALRDACMGTIASFLSKYQDIIIEHQKVVKGNQKRLESLRELAGKENLEYPSVTLPPQPHTKEGVDAYNEVIARVRMWVNLNLWQKLKLSRDDAKPLLRLKGFPSFPLVERQANEVDWWDMVCNVKKLINEKKEDGKVFWQNLAGYKRQEALRPYLSSEEDRKKGKKFARTQLGDLLLHLEKKHGEDWGKVYDEAWERIDKKVEGLSKHIKLEEERRSEDAQSKAALTDWLRAKASFVIEGLKEADKDEFCRCELKLQKWYGDLRGKPFAIEAENSILDISGFSKQYNCAFIWQKDGVKKLNLYLIINYFKGGKLRFKKIKPEAFEANRFYTVINKKSGEIVPMEVNFNFDDPNLIILPLAFGKRQGREFIWNDLLSLETGSLKLANGRVIEKTLYNRRTRQDEPALFVALTFERREVLDSSNIKPMNLIGVDRGENIPAVIALTDPEGCPLSRFKDSLGNPTHILRIGESYKEKQRTIQAKKEVEQRRAGGYSRKYASKAKNLADDMVRNTARDLLYYAVTQDAMLIFENLSRGFGRQGKRTFMAERQYTRMEDWLTAKLAYEGLPSKTYLSKTLAQYTSKTCSNCGFTITSADYDRVLEKLKKTATGWMTTINGKELKVEGQITYYNRYKRQNVVKDLSVELDRLSEESVNNDISSWTKGRSGEALSLLKKRFSHRPVQEKFVCLNCGFETHADEQAALNIARSWLFLRSQEYKKYQTNKTTGNTDKRAFVETWQSFYRKKLKEVWKPAV

SEQ ID NO: 39495 - protein, 980 aa, synthetic construct
  REGION 1..980: note = engineered CasX variant
QEIGKRINKIRRRLVKDSNTKKAGKTGPMKTLLVRVMTPDLRERLENLRKKPENIPQPISNTSRANLNKLLTDYTEMKKAILHVYWEEFQKDPVGLMSRVAQPASKKIDQNKLKPEMDEKGNLTTAGFACSQCGQPLFVYKLEQVSEKGKAYTNYFGRCNVAEHEKLILLAQLKPEKDSDEAVTYSLGKFGQRALDFYSIHVTKESTHPVKPLAQIAGNRYASGPVGKALRDACMGTIASFLSKYQDIIIEHQKVVKGNQKRLESLRELAGKENLEYPSVTLPPQPHTKEGVDAYNEVIARVRMWVNLNLWQKLKLSRDDAKPLLRLKGFPSFPLVERQANEVDWWDMVCNVKKLINEKKEDGKVFWQNLAGYKRQEALRPYLSSEEDRKKGKKFARYQLGDLLLHLEKKHEGEDWGKVYDEAWERIDKKVEGLSKHIKLEEERRSEDAQSKAALTDWLRAKASFVIEGLKEADKDEFCRCELKLQKWYGDLRGKPFAIEAENSILDISGFSKQYNCAFIWQKDGVKKLNLYLIINYFKGGKLRFKKIKPEAFEANRFYTVINKKSGEIVPMEVNFNFDDPNLIILPLAFGKRQGREFIWNDLLSLETGSLKLANGRVIEKTLYNRRTRQDEPALFVALTFERREVLDSSNIKPMNLIGVDRGENIPAVIALTDPEGCPLSRFKDSLGNPTHILRIGESYKEKQRTIQAKKEVEQRRAGGYSRKYASKAKNLADDMVRNTARDLLYYAVTQDAMLIFENLSRGFGRQGKRTFMAERQYTRMEDWLTAKLAYEGLPSKTYLSKTLAQYTSKTCSNCGFTITSADYDRVLEKLKKTATGWMTTINGKELKVEGQITYYNRYKRQNVVKDLSVELDRLSEESVNNDISSWTKGRSGEALSLLKKRFSHRPVQEKFVCLNCGFETHADEQAALNIARSWLFLRSQEYKKYQTNKTTGNTDKRAFVETWQSFYRKKLKEVWKPAV

SEQ ID NO: 39496 - protein, 979 aa, synthetic construct
  REGION 1..979: note = engineered CasX variant
QEIGKRINKIRRRLVKDSNTKKAGKTGPMKTLLVRVMTPDLRERLENLRKKPENIPQPISNTSRANLNKLLTDYTEMKKAILHVYWEEFQKDPVGLMSRVAQPASKKIDQNKLKPEMDEKGNLTTAGFACSQCGQPLFVYKLEQVSEKGKAYTNYFGRCNVAEHEKLILLAQLKPEKDSDEAVTYSLGKFGQRALDFYSIHVTKESTHPVKPLAQIAGNRYASGPVGKALRDACMGTIASFLSKYQDIIIEHQKVVKGNQKRLESLRELAGKENLEYPSVTLPPQPHTKEGVDAYNEVIARVRMWVNLNLWQKLKLSRDDAKPLLRLKGFPSFPLVERQANEVDWWDMVCNVKKLINEKKEDGKVFWQNLAGYKRQEALRPYLSSEEDRKKGKKFARYQLGDLLLHLEKKHGEDWGKVYDEAWERIDKKVEGLSKHIKLEEERRSEDAQSKAALTDWLRAKASFVIEGLKEADKDEFCRCDLKLQKWYGDLRGKPFAIEAENSILDISGFSKQYNCAFIWQKDGVKKLNLYLIINYFKGGKLRFKKIKPEAFEANRFYTVINKKSGEIVPMEVNFNFDDPNLIILPLAFGKRQGREFIWNDLLSLETGSLKLANGRVIEKTLYNRRTRQDEPALFVALTFERREVLDSSNIKPMNLIGVDRGENIPAVIALTDPEGCPLSRFKDSLGNPTHILRIGESYKEKQRTIQAKKEVEQRRAGGYSRKYASKAKNLADDMVRNTARDLLYYAVTQDAMLIFENLSRGFGRQGKRTFMAERQYTRMEDWLTAKLAYEGLPSKTYLSKTLAQYTSKTCSNCGFTITSADYDRVLEKLKKTATGWMTTINGKELKVEGQITYYNRYKRQNVVKDLSVELDRLSEESVNNDISSWTKGRSGEALSLLKKRFSHRPVQEKFVCLNCGFETHADEQAALNIARSWLFLRSQEYKKYQTNKTTGNTDKRAFVETWQSFYRKKLKEVWKPAV

SEQ ID NO: 39497 - protein, 979 aa, synthetic construct
  REGION 1..979: note = engineered CasX variant
QEIGKRINKIRRRLVKDSNTKKAGKTGPMKTLLVRVMTPDLRERLENLRKKPENIPQPISNTSRANLNKLLTDYTEMKKAILHVYWEEFQKDPVGLMSRVAQPASKKIDQNKLKPEMDEKGNLTTAGFACSQCGQPLFVYKLEQVSEKGKAYTNYFGRCNVAEHEKLILLAQLKPEKDSDEAVTYSLGKFGQRALDFYSIHVTKESTHPVKPLAQIAGNRYASGPVGKALRDACMGTIASFLSKYQDIIIEHQKVVKGNQKRLESLRELAGKENLEYPSVTLPPQPHTKEGVDAYNEVIARVRMWVNLNLWQKLKLSRDDAKPLLRLKGFPSFPLVERQANEVDWWDMVCNVKKLINEKKEDGKVFWQNLAGYKRQEALRPYLSSEEDRKKGKKFARYQLGDLLLHLEKKHGEDWGKVYDEAWERIDKKVEGLSKHIKLEEERRSEDAQSKAALTDWLRAKASFVIEGLKEADKDEFCRCELKLQKWYGDLRGKPFAIEAENSILDISGFSKQYNCAFIWQKDGVKKLNLYLIINYFKGGKLRFKKIKPEAFEANRFYTVINKKSGEIVPMEVNFNFDDPNLIILPLAFGKRFGREFIWNDLLSLETGSLKLANGRVIEKTLYNRRTRQDEPALFVALTFERREVLDSSNIKPMNLIGVDRGENIPAVIALTDPEGCPLSRFKDSLGNPTHILRIGESYKEKQRTIQAKKEVEQRRAGGYSRKYASKAKNLADDMVRNTARDLLYYAVTQDAMLIFENLSRGFGRQGKRTFMAERQYTRMEDWLTAKLAYEGLPSKTYLSKTLAQYTSKTCSNCGFTITSADYDRVLEKLKKTATGWMTTINGKELKVEGQITYYNRYKRQNVVKDLSVELDRLSEESVNNDISSWTKGRSGEALSLLKKRFSHRPVQEKFVCLNCGFETHADEQAALNIARSWLFLRSQEYKKYQTNKTTGNTDKRAFVETWQSFYRKKLKEVWKPAV

SEQ ID NO: 39498 - protein, 979 aa, synthetic construct
  REGION 1..979: note = engineered CasX variant
QEIGKRINKIRRRLVKDSNTKKAGKTGPMKTLLVRVMTPDLRERLENLRKKPENIPQPISNTSRANLNKLLTDYTEMKKAILHVYWEEFQKDPVGLMSRVAQPASKKIDQNKLKPEMDEKGNLTTAGFACSQCGQPLFVYKLEQVSEKGKAYTNYFGRCNVAEHEKLILLAQLKPEKDSDEAVTYSLGKFGQRALDFYSIHVTKESTHPVKPLAQIAGNRYASGPVGKALRDACMGTIASFLSKYQDIIIEHQKVVKGNQKRLESLRELAGKENLEYPSVTLPPQPHTKEGVDAYNEVIARVRMWVNLNLWQKLKLSRDDAKPLLRLKGFPSFPLVERQANEVDWWDMVCNVKKLINEKKEDGKVFWQNLAGYKRQEALRPYLSSEEDRKKGKKFARYQLGDLLLHLEKKHGEDWGKVYDEAWERIDKKVEGLSKHIKLEEERRSEDAQSKAALTDWLRAKASFVIEGLKEADKDEFCRCELKLQKWYGDLRGKPFAIEAENSILDISGFSKQYNCAFIWQKDGVKKLNLYLIINYFKGGKLRFKKIKPEAFEANRFYTVINKKSGEIVPMEVNFNFDDPNLIILPLAFGKRVGREFIWNDLLSLETGSLKLANGRVIEKTLYNRRTRQDEPALFVALTFERREVLDSSNIKPMNLIGVDRGENIPAVIALTDPEGCPLSRFKDSLGNPTHILRIGESYKEKQRTIQAKKEVEQRRAGGYSRKYASKAKNLADDMVRNTARDLLYYAVTQDAMLIFENLSRGFGRQGKRTFMAERQYTRMEDWLTAKLAYEGLPSKTYLSKTLAQYTSKTCSNCGFTITSADYDRVLEKLKKTATGWMTTINGKELKVEGQITYYNRYKRQNVVKDLSVELDRLSEESVNNDISSWTKGRSGEALSLLKKRFSHRPVQEKFVCLNCGFETHADEQAALNIARSWLFLRSQEYKKYQTNKTTGNTDKRAFVETWQSFYRKKLKEVWKPAV

SEQ ID NO: 39499 - protein, 980 aa, synthetic construct
  REGION 1..980: note = engineered CasX variant
QEIGKRINKIRRRLVKDSNTKKAGKTGPMKTLLVRVMTPDLRERLENLRKKPENIPQPISNTSRANLNKLLTDYTEMKKAILHVYWEEFQKDPVGLMSRVAQPASKKIDQNKLKPEMDEKGNLTTAGFACSQCGQPLFVYKLEQVSEKGKAYTNYFGRCNVAEHEKLILLAQLKPEKDSDEAVTYSLGKFGQRALDFYSIHVTKESTHPVKPLAQIAGNRYASGPVGKALRDACMGTIASFLSKYQDIIIEHQKVVKGNQKRLESLRELAGKENLEYPSVTLPPQPHTKEGVDAYNEVIARVRMWVNLNLWQKLKLSRDDAKPLLRLKGFPSFPLVERQANEVDWWDMVCNVKKLINEKKEDGKVFWQNLAGYKRQEALRPYLSSEEDRKKGKKFARYQLGDLLLHLEKKHGEDWGKVYDEAWERIDKKVEGLSKHIKLEEERRSEDAQSKAALTDWLRAKASFVIEGLKEADKDEFCRCELKLQKWYGDLRGKPFAIEAENSILDISGFSKQYNCAFIWQKDGVKKLNLYLIINYFKGGKLRFKKIKPEAFEANRFYTVINKKSGEIVPMEVNFNFDDPNLIILPLAFGKRQGREFIWNDLLSLETGSLKLANGRVIEKTLYNRRTRQDEPALFVALTFERREVLDSSNIKTPMNLIGVDRGENIPAVIALTDPEGCPLSRFKDSLGNPTHILRIGESYKEKQRTIQAKKEVEQRRAGGYSRKYASKAKNLADDMVRNTARDLLYYAVTQDAMLIFENLSRGFGRQGKRTFMAERQYTRMEDWLTAKLAYEGLPSKTYLSKTLAQYTSKTCSNCGFTITSADYDRVLEKLKKTATGWMTTINGKELKVEGQITYYNRYKRQNVVKDLSVELDRLSEESVNNDISSWTKGRSGEALSLLKKRFSHRPVQEKFVCLNCGFETHADEQAALNIARSWLFLRSQEYKKYQTNKTTGNTDKRAFVETWQSFYRKKLKEVWKPAV

SEQ ID NO: 39500 - protein, 980 aa, synthetic construct
  REGION 1..980: note = engineered CasX variant
QEIGKRINKIRRRLVKDSNTKKAGKTGPMKTLLVRVMTPDLRERLENLRKKPENIPQPISNTSRANLNKLLTDYTEMKKAILHVYWEEFQKDPVGLMSRVAQPASKKIDQNKLKPEMDEKGNLTTAGFACSQCGQPLFVYKLEQVSEKGKAYTNYFGRCNVAEHEKLILLAQLKPEKDSDEAVTYSLGKFGQRALDFYSIHVTKESTHPVKPLAQIAGNRYASGPVGKALRDACMGTIASFLSKYQDIIIEHQKVVKGNQKRLESLRELAGKENLEYPSVTLPPQPHTKEGVDAYNEVIARVRMWVNLNLWQKLKLSRDDAKPLLRLKGFPSFPLVERQANEVDWWDMVCNVKKLINEKKEDGKVFWQNLAGYKRQEALRPYLSSEEDRKKGKKFARYQLGDLLLHLEKKHGEDWGKVYDEAWERIDKKVEGLSKHIKLEEERRSEDAQSKAALTDWLRAKASFVIEGLKEADKDEFCRCELKLQKWYGDLRGKPFAIEAENSILDISGFSKQYNCAFIWQKDGVKKLNLYLIINYFKGGKLRFKKIKPEAFEANRFYTVINKKSGEIVPMEVNFNFDDPNLIILPLAFGKRQGREFIWNDLLSLETGSLKLANGRVIEKTLYNRRTRQDEPALFVALTFERREVLDSSNIKPMSNLIGVDRGENIPAVIALTDPEGCPLSRFKDSLGNPTHILRIGESYKEKQRTIQAKKEVEQRRAGGYSRKYASKAKNLADDMVRNTARDLLYYAVTQDAMLIFENLSRGFGRQGKRTFMAERQYTRMEDWLTAKLAYEGLPSKTYLSKTLAQYTSKTCSNCGFTITSADYDRVLEKLKKTATGWMTTINGKELKVEGQITYYNRYKRQNVVKDLSVELDRLSEESVNNDISSWTKGRSGEALSLLKKRFSHRPVQEKFVCLNCGFETHADEQAALNIARSWLFLRSQEYKKYQTNKTTGNTDKRAFVETWQSFYRKKLKEVWKPAV

SEQ ID NO: 39501 - protein, 979 aa, synthetic construct
  REGION 1..979: note = engineered CasX variant
QEIGKRINKIRRRLVKDSNTKKAGKTGPMKTLLVRVMTPDLRERLENLRKKPENIPQPISNTSRANLNKLLTDYTEMKKAILHVYWEEFQKDPVGLMSRVAQPASKKIDQNKLKPEMDEKGNLTTAGFACSQCGQPLFVYKLEQVSEKGKAYTNYFGRCNVAEHEKLILLAQLKPEKDSDEAVTYSLGKFGQRALDFYSIHVTKESTHPVKPLAQIAGNRYASGPVGKALRDACMGTIASFLSKYQDIIIEHQKVVKGNQKRLESLRELAGKENLEYPSVTLPPQPHTKEGVDAYNEVIARVRMWVNLNLWQKLKLSRDDAKPLLRLKGFPSFPLVERQANEVDWWDMVCNVKKLINEKKEDGKVFWQNLAGYKRQEALRPYLSSEEDRKKGKKFARYQLGDLLLHLEKKHGEDWGKVYDEAWERIDKKVEGLSKHIKLEEERRSEDAQSKAALTDWLRAKASFVIEGLKEADKDEFCRCELKLQKWYGDLRGKPFAIEAENSILDISGFSKQYNCAFIWQKDGVKKLNLYLIINYFKGGKLRFKKIKPEAFEANRFYTVINKKSGEIVPMEVNFNFDDPNLIILPLAFGKRQGREFIWNDLLSLETGSLKLANGRVIEKTLYNRRTRQDEPALFVALTFERREVLDSSNIKPMNLIGVDRGENIPAVIALTDPEGCPLSRFKDSLGNPTHILRIRESYKEKQRTIQAKKEVEQRRAGGYSRKYASKAKNLADDMVRNTARDLLYYAVTQDAMLIFENLSRGFGRQGKRTFMAERQYTRMEDWLTAKLAYEGLPSKTYLSKTLAQYTSKTCSNCGFTITSADYDRVLEKLKKTATGWMTTINGKELKVEGQITYYNRYKRQNVVKDLSVELDRLSEESVNNDISSWTKGRSGEALSLLKKRFSHRPVQEKFVCLNCGFETHADEQAALNIARSWLFLRSQEYKKYQTNKTTGNTDKRAFVETWQSFYRKKLKEVWKPAV

SEQ ID NO: 39502 - protein, 979 aa, synthetic construct
  REGION 1..979: note = engineered CasX variant
QEIGKRINKIRRRLVKDSNTKKAGKTGPMKTLLVRVMTPDLRERLENLRKKPENIPQPISNTSRANLNKLLTDYTEMKKAILHVYWEEFQKDPVGLMSRVAQPASKKIDQNKLKPEMDEKGNLTTAGFACSQCGQPLFVYKLEQVSEKGKAYTNYFGRCNVAEHEKLILLAQLKPEKDSDEAVTYSLGKFGQRALDFYSIHVTKESTHPVKPLAQIAGNRYASGPVGKALRDACMGTIASFLSKYQDIIIEHQKVVKGNQKRLESLRELAGKENLEYPSVTLPPQPHTKEGVDAYNEVIARVRMWVNLNLWQKLKLSRDDAKPLLRLKGFPSFPLVERQANEVDWWDMVCNVKKLINEKKEDGKVFWQNLAGYKRQEALRPYLSSEEDRKKGKKFARYQLGDLLLHLEKKHGEDWGKVYDEAWERIDKKVEGLSKHIKLEEERRSEDAQSKAALTDWLRAKASFVIEGLKEADKDEFCRCELKLQKWYGDLRGKPFAIEAENSILDISGFSKQYNCAFIWQKDGVKKLNLYLIINYFKGGKLRFKKIKPEAFEANRFYTVINKKSGEIVPMEVNFNFDDPNLIILPLAFGKRQGREFIWNDLLSLETGSLKLANGRVIEKTLYNRRTRQDEPALFVALTFERREVLDSSNIKPMNLIGVDRGENIPAVIALTDPEGCPLSRFKDSLGNPTHILRIGESYKEKQRTIQAKKEVEQRRAGGYSRKYASKAKNLADDMVRNTARDLLYYAVTQDAMLIFENLSRGFGRQGKRTFSAERQYTRMEDWLTAKLAYEGLPSKTYLSKTLAQYTSKTCSNCGFTITSADYDRVLEKLKKTATGWMTTINGKELKVEGQITYYNRYKRQNVVKDLSVELDRLSEESVNNDISSWTKGRSGEALSLLKKRFSHRPVQEKFVCLNCGFETHADEQAALNIARSWLFLRSQEYKKYQTNKTTGNTDKRAFVETWQSFYRKKLKEVWKPAV

SEQ ID NO: 39503 - protein, 979 aa, synthetic construct
  REGION 1..979: note = engineered CasX variant
QEIGKRINKIRRRLVKDSNTKKAGKTGPMKTLLVRVMTPDLRERLENLRKKPENIPQPISNTSRANLNKLLTDYTEMKKAILHVYWEEFQKDPVGLMSRVAQPASKKIDQNKLKPEMDEKGNLTTAGFACSQCGQPLFVYKLEQVSEKGKAYTNYFGRCNVAEHEKLILLAQLKPEKDSDEAVTYSLGKFGQRALDFYSIHVTKESTHPVKPLAQIAGNRYASGPVGKALRDACMGTIASFLSKYQDIIIEHQKVVKGNQKRLESLRELAGKENLEYPSVTLPPQPHTKEGVDAYNEVIARVRMWVNLNLWQKLKLSRDDAKPLLRLKGFPSFPLVERQANEVDWWDMVCNVKKLINEKKEDGKVFWQNLAGYKRQEALRPYLSSEEDRKKGKKFARYQLGDLLLHLEKKHGEDWGKVYDEAWERIDKKVEGLSKHIKLEEERRSEDAQSKAALTDWLRAKASFVIEGLKEADKDEFCRCELKLQKWYGDLRGKPFAIEAENSILDISGFSKQYNCAFIWQKDGVKKLNLYLIINYFKGGKLRFKKIKPEAFEANRFYTVINKKSGEIVPMEVNFNFDDPNLIILPLAFGKRQGREFIWNDLLSLETGSLKLANGRVIEKTLYNRRTRQDEPALFVALTFERREVLDSSNIKPMNLIGVDRGENIPAVIALTDPEGCPLSRFKDSLGNPTHILRIGESYKEKQRTIQAKKEVEQRRAGGYSRKYASKAKNLADDMVRNTARDLLYYAVTQDAMLIFENLSRGFGRQGKRTFMAERQYTRMEDWLTAKLAYEGLPSKTYLSKTLAQYTSKTCSNCGFTITSADYDRVLEKLKKTATGWMTTINGKELKVEGQITYYNRYKRQNVVKDLSVELDRLSEESVNNDISSWDKGRSGEALSLLKKRFSHRPVQEKFVCLNCGFETHADEQAALNIARSWLFLRSQEYKKYQTNKTTGNTDKRAFVETWQSFYRKKLKEVWKPAV

SEQ ID NO: 39504 - protein, 979 aa, synthetic construct
  REGION 1..979: note = engineered CasX variant
QEIGKRINKIRRRLVKDSNTKKAGKTGPMKTLLVRVMTPDLRERLENLRKKPENIPQPISNTSRANLNKLLTDYTEMKKAILHVYWEEFQVDPVGLMSRVAQPASKKIDQNKLKPEMDEKGNLTTAGFACSQCGQPLFVYKLEQVSEKGKAYTNYFGRCNVAEHEKLILLAQLKPEKDSDEAVTYSLGKFGQRALDFYSIHVTKESTHPVKPLAQIAGNRYASGPVGKALRDACMGTIASFLSKYQDIIIEHQKVVKGNQKRLESLRELAGKENLEYPSVTLPPQPHTKEGVDAYNEVIARVRMWVNLNLWQKLKLSRDDAKPLLRLKGFPSFPLVERQANEVDWWDMVCNVKKLINEKKEDGKVFWQNLAGYKRQEALRPYLSSEEDRKKGKKFARYQLGDLLLHLEKKHGEDWGKVYDEAWERIDKKVEGLSKHIKLEEERRSEDAQSKAALTDWLRAKASFVIEGLKEADKDEFCRCELKLQKWYGDLRGKPFAIEAENSILDISGFSKQYNCAFIWQKDGVKKLNLYLIINYFKGGKLRFKKIKPEAFEANRFYTVINKKSGEIVPMEVNFNFDDPNLIILPLAFGKRQGREFIWNDLLSLETGSLKLANGRVIEKTLYNRRTRQDEPALFVALTFERREVLDSSNIKPMNLIGVDRGENIPAVIALTDPEGCPLSRFKDSLGNPTHILRIGESYKEKQRTIQAKKEVEQRRAGGYSRKYASKAKNLADDMVRNTARDLLYYAVTQDAMLIFENLSRGFGRQGKRTFMAERQYTRMEDWLTAKLAYEGLPSKTYLSKTLAQYTSKTCSNCGFTITSADYDRVLEKLKKTATGWMTTINGKELKVEGQITYYNRYKRQNVVKDLSVELDRLSEESVNNDISSWTKGRSGEALSLLKKRFSHRPVQEKFVCLNCGFETHADEQAALNIARSWLFLRSQEYKKYQTNKTTGNTDKRAFVETWQSFYRKKLKEVWKPAV

SEQ ID NO: 39505 - protein, 979 aa, synthetic construct
  REGION 1..979: note = engineered CasX variant
QEIGKRLNKIRRRLVKDSNTKKAGKTGPMKTLLVRVMTPDLRERLENLRKKPENIPQPISNTSRANLNKLLTDYTEMKKAILHVYWEEFQKDPVGLMSRVAQPASKKIDQNKLKPEMDEKGNLTTAGFACSQCGQPLFVYKLEQVSEKGKAYTNYFGRCNVAEHEKLILLAQLKPEKDSDEAVTYSLGKFGQRALDFYSIHVTKESTHPVKPLAQIAGNRYASGPVGKALRDACMGTIASFLSKYQDIIIEHQKVVKGNQKRLESLRELAGKENLEYPSVTLPPQPHTKEGVDAYNEVIARVRMWVNLNLWQKLKLSRDDAKPLLRLKGFPSFPLVERQANEVDWWDMVCNVKKLINEKKEDGKVFWQNLAGYKRQEALRPYLSSEEDRKKGKKFARYQLGDLLLHLEKKHGEDWGKVYDEAWERIDKKVEGLSKHIKLEEERRSEDAQSKAALTDWLRAKASFVIEGLKEADKDEFCRCELKLQKWYGDLRGKPFAIEAENSILDISGFSKQYNCAFIWQKDGVKKLNLYLIINYFKGGKLRFKKIKPEAFEANRFYTVINKKSGEIVPMEVNFNFDDPNLIILPLAFGKRQGREFIWNDLLSLETGSLKLANGRVIEKTLYNRRTRQDEPALFVALTFERREVLDSSNIKPMNLIGVDRGENIPAVIALTDPEGCPLSRFKDSLGNPTHILRIGESYKEKQRTIQAKKEVEQRRAGGYSRKYASKAKNLADDMVRNTARDLLYYAVTQDAMLIFENLSRGFGRQGKRTFMAERQYTRMEDWLTAKLAYEGLPSKTYLSKTLAQYTSKTCSNCGFTITSADYDRVLEKLKKTATGWMTTINGKELKVEGQITYYNRYKRQNVVKDLSVELDRLSEESVNNDISSWTKGRSGEALSLLKKRFSHRPVQEKFVCLNCGFETHADEQAALNIARSWLFLRSQEYKKYQTNKTTGNTDKRAFVETWQSFYRKKLKEVWKPAV

SEQ ID NO: 39506 - protein, 979 aa, synthetic construct
  REGION 1..979: note = engineered CasX variant
QEIGKRINKIRRRLVKDSNTKKAGKTGPMKTLLVRVMTPDLRERLENLRKKPENIPQPISNTSRANLNKLLTDYTEMKKAILHVYWEEFQKDPVGLMSRVAQPASKKIDQNKLKPEMDEKGNLTTAGFACSQCGQPLFVYKLEQVSEKGKAYTNYVGRCNVAEHEKLILLAQLKPEKDSDEAVTYSLGKFGQRALDFYSIHVTKESTHPVKPLAQIAGNRYASGPVGKALRDACMGTIASFLSKYQDIIIEHQKVVKGNQKRLESLRELAGKENLEYPSVTLPPQPHTKEGVDAYNEVIARVRMWVNLNLWQKLKLSRDDAKPLLRLKGFPSFPLVERQANEVDWWDMVCNVKKLINEKKEDGKVFWQNLAGYKRQEALRPYLSSEEDRKKGKKFARYQLGDLLLHLEKKHGEDWGKVYDEAWERIDKKVEGLSKHIKLEEERRSEDAQSKAALTDWLRAKASFVIEGLKEADKDEFCRCELKLQKWYGDLRGKPFAIEAENSILDISGFSKQYNCAFIWQKDGVKKLNLYLIINYFKGGKLRFKKIKPEAFEANRFYTVINKKSGEIVPMEVNFNFDDPNLIILPLAFGKRQGREFIWNDLLSLETGSLKLANGRVIEKTLYNRRTRQDEPALFVALTFERREVLDSSNIKPMNLIGVDRGENIPAVIALTDPEGCPLSRFKDSLGNPTHILRIGESYKEKQRTIQAKKEVEQRRAGGYSRKYASKAKNLADDMVRNTARDLLYYAVTQDAMLIFENLSRGFGRQGKRTFMAERQYTRMEDWLTAKLAYEGLPSKTYLSKTLAQYTSKTCSNCGFTITSADYDRVLEKLKKTATGWMTTINGKELKVEGQITYYNRYKRQNVVKDLSVELDRLSEESVNNDISSWTKGRSGEALSLLKKRFSHRPVQEKFVCLNCGFETHADEQAALNIARSWLFLRSQEYKKYQTNKTTGNTDKRAFVETWQSFYRKKLKEVWKPAV

SEQ ID NO: 39507 - protein, 979 aa, synthetic construct
  REGION 1..979: note = engineered CasX variant
QEIGKRINKIRRRLVKDSNTKKAGKTGPMKTLLVRVMTPDLRERLENLRKKPENIPQPISNTSRANLNKLLTDYTEMKKAILHVYWEEFQKDPVGLMSRVAQPASKKIDQNKLKPEMDEKGNLTTAGFACSQCGQPLFVYKLEQVSEKGKAYTNYFGRCNVAEHEKLILLAQLKPEKDSDEAVTYSLGKFGQRALDFYSIHVTKESTHPVKPLAQIAGNRYASGPVGKALRDACMGTIASFLSKYQDIIIEHQKVVKGNQKRLESLRELAGKENLEYPSVTLPPQPHTKEGVDAYNEVIARVRMWVNLNLWQKLKLSRDDAKPLLRLKGFPSFPLVERQANEVDWWDMVCNVKKLINEKKEDGKVFWQNLAGYKRQEALRPYLSSEEDRKKGKKFARYQLGDLLLHLEKKHGEDWGKVYDEAWERIDKKVEGLSKHIKLEEERRSEDAQSKAALTDWLRAKASFVIEGLKEADKDEFCRCELKLQKWYGDLRGKPFAIEAENSILDISGFSKQYNCAFIWQKDGVKKLNLYLIINYFKGGKLRFKKIKPEAFEANRFYTVINKKSGEIVPMEVNFNFDDPNLIILPLAFGKRQGREFIWNDLLSLETGSLKLANGRVIEKTLYNRRTRQDEPALFVALTFERREVLDSSNIKPMNLIGVDRGENIPAVIALTDPEGCPLSRFKDSLGNPTHILRIGESYKEKQRTIQAKKEVEQRRAGGYSRKYASKAKNLADDMVRNTARDLLYYAVTQDAMLIFENLSRGFGRQGKRTFMAERQYTRMEDWLTAKLAYEGLASKTYLSKTLAQYTSKTCSNCGFTITSADYDRVLEKLKKTATGWMTTINGKELKVEGQITYYNRYKRQNVVKDLSVELDRLSEESVNNDISSWTKGRSGEALSLLKKRFSHRPVQEKFVCLNCGFETHADEQAALNIARSWLFLRSQEYKKYQTNKTTGNTDKRAFVETWQSFYRKKLKEVWKPAV

SEQ ID NO: 39508 - protein, 979 aa, synthetic construct
  REGION 1..979: note = engineered CasX variant
QEIGKRINKIRRRLVKDSNTKKAGKTGPMKTLLVRVMTPDLRERLENLRKKPENIPQPISNTSRANLNKLLTDYTEMKKAILHVYWEEFQKDPVGLMSRVAQPASKKIDQNKLKPEMDEKGNLTTAGFACSQCGQPLFVYKLEQVSEKGKAYTNYFGRCNVAEHEKLILLAQLKPEKDSDEAVTYSLGKFGQRALDFYSIHVTKESTHPVKPLAQIAGNRYASGPVGKALRDACMGTIASFLSKYQDIIIEHQKVVKGNQKRLESLRELAGKENLEYPSVTLPPQPHTKEGVDAYNEVIARVRMWVNLNLWQKLKLSRDDAKPLLRLKGFPSFPLVERQANEVDWWDMVCNVKKLINEKKEDGKVFWQNLAGYKRQEALRPYLSSEEDRKKGKKFARYQLGDLLLHLEKKHGEDWGKVYDEAWERIDKKVEGLSKHIKLEEERRSEDAQSKAALTDWLRAKASFVIEGLKEADKDEFCRCELKLQKWYGDLRGKPFAIEAENSILDISGFSKQYNCAFIWQKDGVKKLNLYLIINYFKGGKLRFKKIKPEAFEANRFYTVINKKSGEIVPMEVNFNFDDPNLIILPLAFGKRQGREFIWNDLLSLETGSLKLANGRVIEKTLYNRRTRQDEPALFVALTFERREVLDSSNIKPMNLIGVDRGENIPAVIALTDPEGCPLSRFKDSLGNPTHILRIGESYKEKQRTIQAKKEVEQRRAGGYSRKYASKAKNLADDMVRNTARDLLYYAVTQDAMLIFENLSRGFGRQGKRTFMAERQYTRMEDWLTAKLAYEGLPSKVYLSKTLAQYTSKTCSNCGFTITSADYDRVLEKLKKTATGWMTTINGKELKVEGQITYYNRYKRQNVVKDLSVELDRLSEESVNNDISSWTKGRSGEALSLLKKRFSHRPVQEKFVCLNCGFETHADEQAALNIARSWLFLRSQEYKKYQTNKTTGNTDKRAFVETWQSFYRKKLKEVWKPAV

SEQ ID NO: 39509 - protein, 980 aa, synthetic construct
  REGION 1..980: note = engineered CasX variant
QEIGKRINKIRRRLVKDSNTKKAGKTGPMKTLLVRVMTPDLRERLENLRKKPENIPQPISNTSRANLNKLLTDYTEMKKAILHVYWEEFQKDPVGLMSRVAQPASKKIDQNKLKPEMDEKGNLTTAGFACSQCGQPLFVYKLEQVSEKGKAYTNYFGRCNVAEHEKLILLAQLKPEKDSDEAVTYSLGKFGQRALDFYSIHVTKESTHPVKPLAQIAGNRYASGPVGKALRDACMGTIASFLSKYQDIIIEHQKVVKGNQKRLESLRELAGKENLEYPSVTLPPQPHTKEGVDAYNEVIARVRMWVNLNLWQKLKLSRDDAKPLLRLKGFPSFPLVERQANEVDWWDMVCNVKKLINEKKEDGKVFWQNLAGYKRQEALRPYLSSEEDRKKGKKFARYQLGDLLLHLEKKHGEDWGKVYDEAWERIDKKVEGLSKHIKLEEERRSEDAQSKAALTDWLRAKASFVIEGLKEADKDEFCRCELKLQKWYGDLRGKPFAIEAENSILDISGFSKQYNCAFIWQKDGVKKLNLYLIINYFKGGKLRFKKIKPEAFEANRFYTVINKKSGEIVPMEVNFNFDDPNLIILPLAFGKRQGREFIWNDLLSLETGSLKLANGRVIEKTLYNRRTRQDEPALFVALTFERREVLDSSNIKPMNLIGVDRGENIPAVIALTDPEGCPLSRFKDSLGNPTHILRIGESYKEKQRTIQAKKEVEQRRAGGYSRKYASKAKNLADDMVRNTARDLLYYAVTQDAMLIFENLSRGFGRQGKRTFMAERQYTRMEDWLTAKLAYEGPLPSKTYLSKTLAQYTSKTCSNCGFTITSADYDRVLEKLKKTATGWMTTINGKELKVEGQITYYNRYKRQNVVKDLSVELDRLSEESVNNDISSWTKGRSGEALSLLKKRFSHRPVQEKFVCLNCGFETHADEQAALNIARSWLFLRSQEYKKYQTNKTTGNTDKRAFVETWQSFYRKKLKEVWKPAV

SEQ ID NO: 39510 - protein, 980 aa, synthetic construct
  REGION 1..980: note = engineered CasX variant
QEIGKRINKIRRRLVKDSNTKKAGKTGPMKTLLVRVMTPDLRERLENLRKKPENIPQPISNTSRANLNKLLTDYTEMKKAILHVYWEEFQKDPVGLMSRVAQPASKKIDQNKLKPEMDEKGNLTTAGFACSQCGQPLFVYKLEQVSEKGKAYTNYFGRCNVAEHEKLILLAQLKPEKDSDEAVTYSLGKFGQRALDFYSIHVTKESTHPVKPLAQIAGNRYASGPVGKALRDACMGTIASFLSKYQDIIIEHQKVVKGNQKRLESLRELAGKENLEYPSVTLPPQPHTKEGVDAYNEVIARVRMWVNLNLWQKLKLSRDDAKPLLRLKGFPSFPLVERQANEVDWWDMVCNVKKLINEKKEDGKVFWQNLAGYKRQEALRPYLSSEEDVRKKGKKFARYQLGDLLLHLEKKHGEDWGKVYDEAWERIDKKVEGLSKHIKLEEERRSEDAQSKAALTDWLRAKASFVIEGLKEADKDEFCRCELKLQKWYGDLRGKPFAIEAENSILDISGFSKQYNCAFIWQKDGVKKLNLYLIINYFKGGKLRFKKIKPEAFEANRFYTVINKKSGEIVPMEVNFNFDDPNLIILPLAFGKRQGREFIWNDLLSLETGSLKLANGRVIEKTLYNRRTRQDEPALFVALTFERREVLDSSNIKPMNLIGVDRGENIPAVIALTDPEGCPLSRFKDSLGNPTHILRIGESYKEKQRTIQAKKEVEQRRAGGYSRKYASKAKNLADDMVRNTARDLLYYAVTQDAMLIFENLSRGFGRQGKRTFMAERQYTRMEDWLTAKLAYEGLPSKTYLSKTLAQYTSKTCSNCGFTITSADYDRVLEKLKKTATGWMTTINGKELKVEGQITYYNRYKRQNVVKDLSVELDRLSEESVNNDISSWTKGRSGEALSLLKKRFSHRPVQEKFVCLNCGFETHADEQAALNIARSWLFLRSQEYKKYQTNKTTGNTDKRAFVETWQSFYRKKLKEVWKPAV

SEQ ID NO: 39511 - protein, 979 aa, synthetic construct
  REGION 1..979: note = engineered CasX variant
QEIGKRINKIRRRLVKDSNTKKAGKTGPMKTLLVRVMTPDLRERLENLRKKPENIPQPISNTSRANLNKLLTDYTEMKKAILHVYWEEFQKDPVGLMSRVAQPASKKIDQNKLKPEMDEKGNLTTAGFACSQCGQPLFVYKLEQVSEKGKAYTNYFGRCNVAEHEKLILLAQLKPEKDSDEAVTYSLGKFGQRALDFYSIHVTKESTHPVKPLAQIAGNRYASGPVGKALRDACMGTIASFLSKYQDIIIEHQKVVKGNQKRLESLRELAGKENLEYPSVTLPPQPHTKEGVDAYNEVIARVRMWVNLNLWQKLKLSRDDAKPLLRLKGFPSFPLVERQANEVDWWDMVCNVKKLINEKKEDGKVFWQNLAGYKRQEALRPYLSSEEDRKKGKKFARYQLGDLLLHLEKKHGEDWGKVYDEAWERIDKKVEGLSKHIKLEEERRSEDAQSKAALTDWLRAKASFVIEGLKEADKDEFCRCELKLQKWYGDLRGKPFAIEAENSILDISGFSKQYNCAFIWQKDGVKKLNLYLIINYFKGGKLRFKKIKPEAFEANRFYTVINKKSGEIVPMEVNFNFDDPNLIILPLAFGKRQGREFIWNDLLSLETGSLKLANGRVIEKTLYNRRTRQDEPALFVALTFERREVLDSSNIKPMNLIGVDRGENIPAVIALTDPEGCPLSRFKDSLGNPTHILRIGESYKEKQRTIQAKKEVEQRRAGGYSRKYASKAKNLADDMVRNTARDLLYYAVTQDAMLIFENLSRGFGRQGKRTFMAERQYTRMEDWLTAKLAYEGLPSKTYLSKTLAQYTSKTCSNCGFTITSADYDRMLEKLKKTATGWMTTINGKELKVEGQITYYNRYKRQNVVKDLSVELDRLSEESVNNDISSWTKGRSGEALSLLKKRFSHRPVQEKFVCLNCGFETHADEQAALNIARSWLFLRSQEYKKYQTNKTTGNTDKRAFVETWQSFYRKKLKEVWKPAV

SEQ ID NO: 39512 - protein, 979 aa, synthetic construct
  REGION 1..979: note = engineered CasX variant
QEIGKRINKIRRRLVKDSNTKKAGKTGPMKTLLVRVMTPDLRERLENLRKKPENIPQPISNTSRANLNKLLTDYTEMKKAILHVYWEEFQKDPVGLMSRVAQPASKKIDQNKLKPEMDEKGNLTTAGFACSQCGQPLFVYKLEQVSEKGKAYTNYFGRCNVAEHEKLILLAQLKPEKDSDEAVTYSLGKFGQRALDFYSIHVTKESTHPVKPLAQIAGNRYASGPVGKALRDACMGTIASFLSKYQDIIIEHQKVVKGNQKRLESLRELAGKENLEYPSVTLPPQPHTKEGVDAYNEVIARVRMWVNLNLWQKLKLSRDDAKPLLRLKGFPSFPLVERQANEVDWWDMVCNVKKLINEKKEDGKVFWQNLAGYKRQEALRPYLSSEEDRKKGKKFARYQLGDLLLHLEKKHGEDWGKVYDEAWERIDKKVEGLSKHIKLEEERRSEDAQSKAALTDWLRAKASFVIEGLKEADKDEFCRCELKLQKWYGDLRGKPFAIEAENSILDISGFSKQYNCAFIWQKDGVKKLNLYLIINYFKGGKLRFKKIKPEAFEANRFYTVINKKSGEIVPMEVNFNFDDPNLIILPLAFGKRQGREFIWNDLLSLETGSLKLANGRVIEKTLYNRRTRQDEPALFVALTFERREVLDSSNIKPMNLIGVDRGENIPAVIALTDPEGCPLSRFKDSLGNPTHILRIGESYKEKQRTIQAKKEVEQRRAGGYSRKYASKAKNLADDMVRNTARDLLYYAVTQDAMLIFENLSRGFGRQGKRTFMAERQYTRMEDWLTAKLAYEGLPSKTYLSKTLAQYTSKTCSNCGFTITSADYDRVLEKLKKTATGWMTTINGKELKVEGQITYYNRYKRQNVVKDLSVELDRLSEESVNNDISSWTKGRQGEALSLLKKRFSHRPVQEKFVCLNCGFETHADEQAALNIARSWLFLRSQEYKKYQTNKTTGNTDKRAFVETWQSFYRKKLKEVWKPAV

SEQ ID NO: 39513 - protein, 979 aa, synthetic construct
  REGION 1..979: note = engineered CasX variant
QEIGKRINKIRRRLVKDSNTKKAGKTGPMKTLLVRVMTPDLRERLENLRKKPENIPQPISNTSRANLNKLLTDYTEMKKAILHVYWEEFQKDPVGLMSRVAQPASKKIDQNKLKPEMDEKGNLTTAGFACSQCGQPLFVYKLEQVSEKGKAYTNYFGRCNVAEHEKLILLAQLKPEKDSDEAVTYSLGKFGQRALDFYSIHVTKESTHPVKPLAQIAGNRYASGPVGKALRDACMGTIASFLSKYQDIIIEHQKVVKGNQKRLESLRELAGKENLEYPSVTLPPQPHTKEGVDAYNEVIARVRMWVNLNLWQKLKLSRDDAKPLLRLKGFPSFPLVERQANEVDWWDMVCNVKKLINEKKEDGKVFWQNLAGYKRQEALRPYLSSEEDRKKGKKFARYQLGDLLLHLEKKHGEDWGKVYDEAWERIDKKVEGLSKHIKLEEERRSEDAQSKAALTDWLRAKASFVIEGLKEADKDEFCRCELKLQKWYGDLRGKPFAIEAENSILDISGFSKQYNCAFIWQKDGVKKLNLYLIINYFKGGKLRFKKIKPEAFEANRFYTVINKKSGEIVPMEVNFNFDDPNLIILPLAFGKRQGREFIWNDLLSLETGSLKLANGRVIEKTLYNRRTRQDEPALFVALTFERREVLDSSNIKPMNLIGVDRGENIPAVIALTDPEGCPLSRFKDSLGNPTHILRIGESYKEKQRTIQAKKEVEQRRAGGYSRKYASKAKNLADDMVRNTARDLLYYAVTQDAMLIFENLSRGFGRQGKRTFMAERQYTRMEDWLTAKLAYEGLPSKTYLSKTLAQYTSKTCSNCGFTITSADYDRVLEKLKKTATGWMTTINGKELKVEGQITYYNRYKRQNVVKDLSVELDRLSEESVNNDISSWTKGRSGEALSLLKKRFSHRPVQEKFVCLNCEFETHADEQAALNIARSWLFLRSQEYKKYQTNKTTGNTDKRAFVETWQSFYRKKLKEVWKPAV

SEQ ID NO: 39514 - protein, 980 aa, synthetic construct
  REGION 1..980: note = engineered CasX variant
QEIGKRINKIRRRLVKDSNTKKAGKTGPMKTLLVRVMTPDLRERLENLRKKPENIPQPISNTSRANLNKLLTDYTEMKKAILHVYWEEFQKDPVGLMSRVAQPASKKIDQNKLKPEMDEKGNLTTAGFACSQCGQPLFVYKLEQVSEKGKAYTNYFGRCNVAEHEKLILLAQLKPEKDSDEAVTYSLGKFGQRALDFYSIHVTKESTHPVKPLAQIAGNRYASGPVGKALRDACMGTIASFLSKYQDIIIEHQKVVKGNQKRLESLRELAGKENLEYPSVTLPPQPHTKEGVDAYNEVIARVRMWVNLNLWQKLKLSRDDAKPLLRLKGFPSFPLVERQANEVDWWDMVCNVKKLINEKKEDGKVFWQNLAGYKRQEALRPYLSSEEDRKKGKKFARYQLGDLLLHLEKKHGEDWGKVYDEAWERIDKKVEGLSKHIKLEEERRSEDAQSKAALTDWLRAKASFVIEGLKEADKDEFCRCELKLQKWYGDLRGKPFAIEAENSILDISGFSKQYNCAFIWQKDGVKKLNLYLIINYFKGGKLRFKKIKPEAFEANRFYTVINKKSGEIVPMEVNFNFDDPNLIILPLAFGKRQGREFIWNDLLSLETGSLKLANGRVIEKTLYNRRTRQDEPALFVALTFERREVLDSSNIKPMNLIGVDRGENIPAVIALTDPEGCPLSRFKDSLGNPTHILRIGESYKEKQRTIQAKKEVEQRRAGGYSRKYASKAKNLADDMVRNTARDLLYYAVTQDAMLIFENLSRGFGRQGKRTFMAERQYTRMEDWLTAKLAYEGLPSKTYLSKTLAQYTSKTCSNCGFTITSADYDRVLEKLKKTATGWMTTINGKELKVEGQITYYNRYKRQNVVKDLSVELDRLSEESVNNDISSWTKGRSGEALSLLKKRFSHRPVQEKFVCLNCGFETHADEQAALNIARSWLFLRSQEYKKYQTNKTSTGNTDKRAFVETWQSFYRKKLKEVWKPAV

SEQ ID NO: 39515 - protein, 980 aa, synthetic construct
  REGION 1..980: note = engineered CasX variant
QEIGKRINKIRRRLVKDSNTKKAGKTGPMKTLLVRVMTPDLRERLENLRKKPENIPQPISNTSRANLNKLLTDYTEMKKAILHVYWEEFQKDPVGLMSRVAQPASKKIDQNKLKPEMDEKGNLTTAGFACSQCGQPLFVYKLEQVSEKGKAYTNYFGRCNVAEHEKLILLAQLKPEKDSDEAVTYSLGKFGQRALDFYSIHVTKESTHPVKPLAQIAGNRYASGPVGKALRDACMGTIASFLSKYQDIIIEHQKVVKGNQKRLESLRELAGKENLEYPSVTLPPQPHTKEGVDAYNEVIARVRMWVNLNLWQKLKLSRDDAKPLLRLKGFPSFPLVERQANEVDWWDMVCNVKKLINEKKEDGKVFWQNLAGYKRQEALRPYLSSEEDRKKGKKFARYQLGDLLLHLEKKHGEDWGKVYDEAWERIDKKVEGLSKHIKLEEERRSEDAQSKAALTDWLRAKASFVIEGLKEADKDEFCRCELKLQKWYGDLRGKPFAIEAENSILDISGFSKQYNCAFIWQKDGVKKLNLYLIINYFKGGKLRFKKIKPEAFEANRFYTVINKKSGEIVPMEVNFNFDDPNLIILPLAFGKRQGREFIWNDLLSLETGSLKLANGRVIEKTLYNRRTRQDEPALFVALTFERREVLDSSNIKPMNLIGVDRGENIPAVIALTDPEGCPLSRFKDSLGNPTHILRIGESYKEKQRTIQAKKEVEQRRAGGYSRKYASKAKNLADDMVRNTARDLLYYAVTQDAMLIFENLSRGFGRQGKRTFMAERQYTRMEDWLTAKLAYEGLPSKTYLSKTLAQYTSKTCSNCGFTITSADYDRVLEKLKKTATGWMTTINGKELKVEGQITYYNRYKRQNVVKDLSVELDRLSEESVNNDISSWTKGRSGEALSLLKKRFSHRPVQEKFVCLNCGFETHADEQAALNIARSWLFLRSQEYKKYQTNKTTGKNTDKRAFVETWQSFYRKKLKEVWKPAV

SEQ ID NO: 39516 - protein, 979 aa, synthetic construct
  REGION 1..979: note = engineered CasX variant
QEIGKRINKIRRRLVKDSNTKKAGKTGPMKTLLVRVMTPDLRERLENLRKKPENIPQPISNTSRANLNKLLTDYTEMKKAILHVYWEEFQKDPVGLMSRVAQPASKKIDQNKLKPEMDEKGNLTTAGFACSQCGQPLFVYKLEQVSEKGKAYTNYFGRCNVAEHEKLILLAQLKPEKDSDEAVTYSLGKFGQRALDFYSIHVTKESTHPVKPLAQIAGNRYASGPVGKALRDACMGTIASFLSKYQDIIIEHQKVVKGNQKRLESLRELAGKENLEYPSVTLPPQPHTKEGVDAYNEVIARVRMWVNLNLWQKLKLSRDDAKPLLRLKKFPSFPLVERQANEVDWWDMVCNVKKLINEKKEDGKVFWQNLAGYKRQEALRPYLSSEEDRKKGKKFARYQLGDLLLHLEKKHGEDWGKVYDEAWERIDKKVEGLSKHIKLEEERRSEDAQSKAALTDWLRAKASFVIEGLKEADKDEFCRCELKLQKWYGDLRGKPFAIEAENSILDISGFSKQYNCAFIWQKDGVKKLNLYLIINYFKGGKLRFKKIKPEAFEANRFYTVINKKSGEIVPMEVNFNFDDPNLIILPLAFGKRQGREFIWNDLLSLETGSLKLANGRVIEKTLYNRRTRQDEPALFVALTFERREVLDSSNIKPMNLIGVDRGENIPAVIALTDPEGCPLSRFKDSLGNPTHILRIGESYKEKQRTIQAKKEVEQRRAGGYSRKYASKAKNLADDMVRNTARDLLYYAVTQDAMLIFENLSRGFGRQGKRTFMAERQYTRMEDWLTAKLAYEGLPSKTYLSKTLAQYTSKTCSNCGFTITSADYDRVLEKLKKTATGWMTTINGKELKVEGQITYYNRYKRQNVVKDLSVELDRLSEESVNNDISSWTKGRSGEALSLLKKRFSHRPVQEKFVCLNCGFETHADEQAALNIARSWLFLRSQEYKKYQTNKTTGNTDKRAFVETWQSFYRKKLKEVWKPAV

SEQ ID NO: 39517 - protein, 979 aa, synthetic construct
  REGION 1..979: note = engineered CasX variant
QEIGKRINKIRRRLVKDSNTKKAGKTGPMKTLLVRVMTPDLRERLENLRKKPENIPQPISNTSRANLNKLLTDYTEMKKAILHVYWEEFQKDPVGLMSRVAQPASKKIDQNKLKPEMDEKGNLTTAGFACSQCGQPLFVYKLEQVSEKGKAYTNYFGRCNVAEHEKLILLAQLKPEKDSDEAVTYSLGKFGQRALDFYSIHVTKESTHPVKPLAQIAGNRYASGPVGKALRDACMGTIASFLSKYQDIIIEHQKVVKGNQKRLESLRELAGKENLEYPSVTLPPQPHTKEGVDAYNEVIARVRMWVNLNLWQKLKLSRDDAKPLLRLKGFPSFPLVERQANEVDWWDMVCNVKKLINEKKEDGKVFWQNLAGYKRQEALRPYLSSEEDRKKGKKFARYQLGDLLLHLEKKHGEDWGKVYDEAWERIDKKVEGLSKHIKLEEERRSEDAQSKAALTDWLRAKASFVIEGLKEADKDEFCRCELKLQKWYGDLRGKPFAIEAENSILDISGFSKQYNCAFIWQKDGVKKLNLYLIINYFKGGKLRFKKIKPEAFEANRFYTVINKKSGEIVPMEVNFNFDDPNLIILPLAFGKRQGREFIWNDLLSLETGSLKLANGRVIEKTLYNRRTRQDEPALFVALTFERREVLDSSNIKPMNLIGVDRGENIPAVIALTDPEGCPLSRFKDSLGNPTHILRIGERYKEKQRTIQAKKEVEQRRAGGYSRKYASKAKNLADDMVRNTARDLLYYAVTQDAMLIFENLSRGFGRQGKRTFMAERQYTRMEDWLTAKLAYEGLPSKTYLSKTLAQYTSKTCSNCGFTITSADYDRVLEKLKKTATGWMTTINGKELKVEGQITYYNRYKRQNVVKDLSVELDRLSEESVNNDISSWTKGRSGEALSLLKKRFSHRPVQEKFVCLNCGFETHADEQAALNIARSWLFLRSQEYKKYQTNKTTGNTDKRAFVETWQSFYRKKLKEVWKPAV

SEQ ID NO: 39518 - protein, 979 aa, synthetic construct
  REGION 1..979: note = engineered CasX variant
QEIGKRINKIRRRLVKDSNTKKAGKTGPMKTLLVRVMTPDLRERLENLRKKPENIPQPISNTSRANLNKLLTDYTEMKKAILHVYWEEFQKDPVGLMSRVAQPASKKIDQNKLKPEMDEKGNLTTAGFACSQCGQPLFVYKLEQVSEKGKAYTNYFGRCNVAEHEKLILLAQLKPEKDSDEAVTYSLGKFGQRALDFYSIHVTKESTHPVKPLAQIAGNRYASGPVGKALRDACMGTIASFLSKYQDIIIEHQKVVKGNQKRLESLRELAGKENLEYPSVTLPPQPHTKEGVDAYNEVIARVRMWVNLNLWQKLKLSRDDAKPLLRLKGFPSFPLVERQANEVDWWDMVCNVKKLINEKKEDGKVFWQNLAGYKRQEALRPYLSSEEDRKKGKKFARYQLGDLLLHLEKKHGEDWGKVYDEAWERIDKKVEGLSKHIKLEEERRSEDAQSKAALTDWLRAKASFVIEGLKEADKDEFCRCELKLQKWYGDLRGKPFAIEAENSILDISGFSKQYNCAFIWQKDGVKKLNLYLIINYFKGGKLRFKKIKPEAFEANRFYTVINKKSGEIVPMEVNFNFDDPNLIILPLAFGKRQGREFIWNDLLSLETGSLQLANGRVIEKTLYNRRTRQDEPALFVALTFERREVLDSSNIKPMNLIGVDRGENIPAVIALTDPEGCPLSRFKDSLGNPTHILRIGESYKEKQRTIQAKKEVEQRRAGGYSRKYASKAKNLADDMVRNTARDLLYYAVTQDAMLIFENLSRGFGRQGKRTFMAERQYTRMEDWLTAKLAYEGLPSKTYLSKTLAQYTSKTCSNCGFTITSADYDRVLEKLKKTATGWMTTINGKELKVEGQITYYNRYKRQNVVKDLSVELDRLSEESVNNDISSWTKGRSGEALSLLKKRFSHRPVQEKFVCLNCGFETHADEQAALNIARSWLFLRSQEYKKYQTNKTTGNTDKRAFVETWQSFYRKKLKEVWKPAV

SEQ ID NO: 39519 - protein, 980 aa, synthetic construct
  REGION 1..980: note = engineered CasX variant
QEIGGKRINKIRRRLVKDSNTKKAGKTGPMKTLLVRVMTPDLRERLENLRKKPENIPQPISNTSRANLNKLLTDYTEMKKAILHVYWEEFQKDPVGLMSRVAQPASKKIDQNKLKPEMDEKGNLTTAGFACSQCGQPLFVYKLEQVSEKGKAYTNYFGRCNVAEHEKLILLAQLKPEKDSDEAVTYSLGKFGQRALDFYSIHVTKESTHPVKPLAQIAGNRYASGPVGKALRDACMGTIASFLSKYQDIIIEHQKVVKGNQKRLESLRELAGKENLEYPSVTLPPQPHTKEGVDAYNEVIARVRMWVNLNLWQKLKLSRDDAKPLLRLKGFPSFPLVERQANEVDWWDMVCNVKKLINEKKEDGKVFWQNLAGYKRQEALRPYLSSEEDRKKGKKFARYQLGDLLLHLEKKHGEDWGKVYDEAWERIDKKVEGLSKHIKLEEERRSEDAQSKAALTDWLRAKASFVIEGLKEADKDEFCRCELKLQKWYGDLRGKPFAIEAENSILDISGFSKQYNCAFIWQKDGVKKLNLYLIINYFKGGKLRFKKIKPEAFEANRFYTVINKKSGEIVPMEVNFNFDDPNLIILPLAFGKRQGREFIWNDLLSLETGSLKLANGRVIEKTLYNRRTRQDEPALFVALTFERREVLDSSNIKPMNLIGVDRGENIPAVIALTDPEGCPLSRFKDSLGNPTHILRIGESYKEKQRTIQAKKEVEQRRAGGYSRKYASKAKNLADDMVRNTARDLLYYAVTQDAMLIFENLSRGFGRQGKRTFMAERQYTRMEDWLTAKLAYEGLPSKTYLSKTLAQYTSKTCSNCGFTITSADYDRVLEKLKKTATGWMTTINGKELKVEGQITYYNRYKRQNVVKDLSVELDRLSEESVNNDISSWTKGRSGEALSLLKKRFSHRPVQEKFVCLNCGFETHADEQAALNIARSWLFLRSQEYKKYQTNKTTGNTDKRAFVETWQSFYRKKLKEVWKPAV

SEQ ID NO: 39520 - protein, 978 aa, synthetic construct
  REGION 1..978: note = engineered CasX variant
QEIGRANKIRRRLVKDSNTKKAGKTGPMKTLLVRVMTPDLRERLENLRKKPENIPQPISNTSRANLNKLLTDYTEMKKAILHVYWEEFQKDPVGLMSRVAQPASKKIDQNKLKPEMDEKGNLTTAGFACSQCGQPLFVYKLEQVSEKGKAYTNYFGRCNVAEHEKLILLAQLKPEKDSDEAVTYSLGKFGQRALDFYSIHVTKESTHPVKPLAQIAGNRYASGPVGKALRDACMGTIASFLSKYQDIIIEHQKVVKGNQKRLESLRELAGKENLEYPSVTLPPQPHTKEGVDAYNEVIARVRMWVNLNLWQKLKLSRDDAKPLLRLKGFPSFPLVERQANEVDWWDMVCNVKKLINEKKEDGKVFWQNLAGYKRQEALRPYLSSEEDRKKGKKFARYQLGDLLLHLEKKHGEDWGKVYDEAWERIDKKVEGLSKHIKLEEERRSEDAQSKAALTDWLRAKASFVIEGLKEADKDEFCRCELKLQKWYGDLRGKPFAIEAENSILDISGFSKQYNCAFIWQKDGVKKLNLYLIINYFKGGKLRFKKIKPEAFEANRFYTVINKKSGEIVPMEVNFNFDDPNLIILPLAFGKRQGREFIWNDLLSLETGSLKLANGRVIEKTLYNRRTRQDEPALFVALTFERREVLDSSNIKPMNLIGVDRGENIPAVIALTDPEGCPLSRFKDSLGNPTHILRIGESYKEKQRTIQAKKEVEQRRAGGYSRKYASKAKNLADDMVRNTARDLLYYAVTQDAMLIFENLSRGFGRQGKRTFMAERQYTRMEDWLTAKLAYEGLPSKTYLSKTLAQYTSKTCSNCGFTITSADYDRVLEKLKKTATGWMTTINGKELKVEGQITYYNRYKRQNVVKDLSVELDRLSEESVNNDISSWTKGRSGEALSLLKKRFSHRPVQEKFVCLNCGFETHADEQAALNIARSWLFLRSQEYKKYQTNKTTGNTDKRAFVETWQSFYRKKLKEVWKPAV

SEQ ID NO: 39521 - protein, 978 aa, synthetic construct
  REGION 1..978: note = engineered CasX variant
QEIGRISKIRRRLVKDSNTKKAGKTGPMKTLLVRVMTPDLRERLENLRKKPENIPQPISNTSRANLNKLLTDYTEMKKAILHVYWEEFQKDPVGLMSRVAQPASKKIDQNKLKPEMDEKGNLTTAGFACSQCGQPLFVYKLEQVSEKGKAYTNYFGRCNVAEHEKLILLAQLKPEKDSDEAVTYSLGKFGQRALDFYSIHVTKESTHPVKPLAQIAGNRYASGPVGKALRDACMGTIASFLSKYQDIIIEHQKVVKGNQKRLESLRELAGKENLEYPSVTLPPQPHTKEGVDAYNEVIARVRMWVNLNLWQKLKLSRDDAKPLLRLKGFPSFPLVERQANEVDWWDMVCNVKKLINEKKEDGKVFWQNLAGYKRQEALRPYLSSEEDRKKGKKFARYQLGDLLLHLEKKHGEDWGKVYDEAWERIDKKVEGLSKHIKLEEERRSEDAQSKAALTDWLRAKASFVIEGLKEADKDEFCRCELKLQKWYGDLRGKPFAIEAENSILDISGFSKQYNCAFIWQKDGVKKLNLYLIINYFKGGKLRFKKIKPEAFEANRFYTVINKKSGEIVPMEVNFNFDDPNLIILPLAFGKRQGREFIWNDLLSLETGSLKLANGRVIEKTLYNRRTRQDEPALFVALTFERREVLDSSNIKPMNLIGVDRGENIPAVIALTDPEGCPLSRFKDSLGNPTHILRIGESYKEKQRTIQAKKEVEQRRAGGYSRKYASKAKNLADDMVRNTARDLLYYAVTQDAMLIFENLSRGFGRQGKRTFMAERQYTRMEDWLTAKLAYEGLPSKTYLSKTLAQYTSKTCSNCGFTITSADYDRVLEKLKKTATGWMTTINGKELKVEGQITYYNRYKRQNVVKDLSVELDRLSEESVNNDISSWTKGRSGEALSLLKKRFSHRPVQEKFVCLNCGFETHADEQAALNIARSWLFLRSQEYKKYQTNKTTGNTDKRAFVETWQSFYRKKLKEVWKPAV

SEQ ID NO: 39522 - protein, 978 aa, synthetic construct
  REGION 1..978: note = engineered CasX variant
QEIGRINGIRRRLVKDSNTKKAGKTGPMKTLLVRVMTPDLRERLENLRKKPENIPQPISNTSRANLNKLLTDYTEMKKAILHVYWEEFQKDPVGLMSRVAQPASKKIDQNKLKPEMDEKGNLTTAGFACSQCGQPLFVYKLEQVSEKGKAYTNYFGRCNVAEHEKLILLAQLKPEKDSDEAVTYSLGKFGQRALDFYSIHVTKESTHPVKPLAQIAGNRYASGPVGKALRDACMGTIASFLSKYQDIIIEHQKVVKGNQKRLESLRELAGKENLEYPSVTLPPQPHTKEGVDAYNEVIARVRMWVNLNLWQKLKLSRDDAKPLLRLKGFPSFPLVERQANEVDWWDMVCNVKKLINEKKEDGKVFWQNLAGYKRQEALRPYLSSEEDRKKGKKFARYQLGDLLLHLEKKHGEDWGKVYDEAWERIDKKVEGLSKHIKLEEERRSEDAQSKAALTDWLRAKASFVIEGLKEADKDEFCRCELKLQKWYGDLRGKPFAIEAENSILDISGFSKQYNCAFIWQKDGVKKLNLYLIINYFKGGKLRFKKIKPEAFEANRFYTVINKKSGEIVPMEVNFNFDDPNLIILPLAFGKRQGREFIWNDLLSLETGSLKLANGRVIEKTLYNRRTRQDEPALFVALTFERREVLDSSNIKPMNLIGVDRGENIPAVIALTDPEGCPLSRFKDSLGNPTHILRIGESYKEKQRTIQAKKEVEQRRAGGYSRKYASKAKNLADDMVRNTARDLLYYAVTQDAMLIFENLSRGFGRQGKRTFMAERQYTRMEDWLTAKLAYEGLPSKTYLSKTLAQYTSKTCSNCGFTITSADYDRVLEKLKKTATGWMTTINGKELKVEGQITYYNRYKRQNVVKDLSVELDRLSEESVNNDISSWTKGRSGEALSLLKKRFSHRPVQEKFVCLNCGFETHADEQAALNIARSWLFLRSQEYKKYQTNKTTGNTDKRAFVETWQSFYRKKLKEVWKPAV

SEQ ID NO: 39523 - protein, 978 aa, synthetic construct
  REGION 1..978: note = engineered CasX variant
QEIGRINKIRRRLVKDSNTKKAGKTGPMKTLLVPVMTPDLRERLENLRKKPENIPQPISNTSRANLNKLLTDYTEMKKAILHVYWEEFQKDPVGLMSRVAQPASKKIDQNKLKPEMDEKGNLTTAGFACSQCGQPLFVYKLEQVSEKGKAYTNYFGRCNVAEHEKLILLAQLKPEKDSDEAVTYSLGKFGQRALDFYSIHVTKESTHPVKPLAQIAGNRYASGPVGKALRDACMGTIASFLSKYQDIIIEHQKVVKGNQKRLESLRELAGKENLEYPSVTLPPQPHTKEGVDAYNEVIARVRMWVNLNLWQKLKLSRDDAKPLLRLKGFPSFPLVERQANEVDWWDMVCNVKKLINEKKEDGKVFWQNLAGYKRQEALRPYLSSEEDRKKGKKFARYQLGDLLLHLEKKHGEDWGKVYDEAWERIDKKVEGLSKHIKLEEERRSEDAQSKAALTDWLRAKASFVIEGLKEADKDEFCRCELKLQKWYGDLRGKPFAIEAENSILDISGFSKQYNCAFIWQKDGVKKLNLYLIINYFKGGKLRFKKIKPEAFEANRFYTVINKKSGEIVPMEVNFNFDDPNLIILPLAFGKRQGREFIWNDLLSLETGSLKLANGRVIEKTLYNRRTRQDEPALFVALTFERREVLDSSNIKPMNLIGVDRGENIPAVIALTDPEGCPLSRFKDSLGNPTHILRIGESYKEKQRTIQAKKEVEQRRAGGYSRKYASKAKNLADDMVRNTARDLLYYAVTQDAMLIFENLSRGFGRQGKRTFMAERQYTRMEDWLTAKLAYEGLPSKTYLSKTLAQYTSKTCSNCGFTITSADYDRVLEKLKKTATGWMTTINGKELKVEGQITYYNRYKRQNVVKDLSVELDRLSEESVNNDISSWTKGRSGEALSLLKKRFSHRPVQEKFVCLNCGFETHADEQAALNIARSWLFLRSQEYKKYQTNKTTGNTDKRAFVETWQSFYRKKLKEVWKPAV

SEQ ID NO: 39524 - protein, 978 aa, synthetic construct
  REGION 1..978: note = engineered CasX variant
QEIGRINKIRRRLVKDSNTKKAGKTGPMKTLLVRVMTPDLRERLENLRKKPPNIPQPISNTSRANLNKLLTDYTEMKKAILHVYWEEFQKDPVGLMSRVAQPASKKIDQNKLKPEMDEKGNLTTAGFACSQCGQPLFVYKLEQVSEKGKAYTNYFGRCNVAEHEKLILLAQLKPEKDSDEAVTYSLGKFGQRALDFYSIHVTKESTHPVKPLAQIAGNRYASGPVGKALRDACMGTIASFLSKYQDIIIEHQKVVKGNQKRLESLRELAGKENLEYPSVTLPPQPHTKEGVDAYNEVIARVRMWVNLNLWQKLKLSRDDAKPLLRLKGFPSFPLVERQANEVDWWDMVCNVKKLINEKKEDGKVFWQNLAGYKRQEALRPYLSSEEDRKKGKKFARYQLGDLLLHLEKKHGEDWGKVYDEAWERIDKKVEGLSKHIKLEEERRSEDAQSKAALTDWLRAKASFVIEGLKEADKDEFCRCELKLQKWYGDLRGKPFAIEAENSILDISGFSKQYNCAFIWQKDGVKKLNLYLIINYFKGGKLRFKKIKPEAFEANRFYTVINKKSGEIVPMEVNFNFDDPNLIILPLAFGKRQGREFIWNDLLSLETGSLKLANGRVIEKTLYNRRTRQDEPALFVALTFERREVLDSSNIKPMNLIGVDRGENIPAVIALTDPEGCPLSRFKDSLGNPTHILRIGESYKEKQRTIQAKKEVEQRRAGGYSRKYASKAKNLADDMVRNTARDLLYYAVTQDAMLIFENLSRGFGRQGKRTFMAERQYTRMEDWLTAKLAYEGLPSKTYLSKTLAQYTSKTCSNCGFTITSADYDRVLEKLKKTATGWMTTINGKELKVEGQITYYNRYKRQNVVKDLSVELDRLSEESVNNDISSWTKGRSGEALSLLKKRFSHRPVQEKFVCLNCGFETHADEQAALNIARSWLFLRSQEYKKYQTNKTTGNTDKRAFVETWQSFYRKKLKEVWKPAV

SEQ ID NO: 39525 - protein, 978 aa, synthetic construct
  REGION 1..978: note = engineered CasX variant
QEIGRINKIRRRLVKDSNTKKAGKTGPMKTLLVRVMTPDLRERLENLRKKPENIPQPISNTSQANLNKLLTDYTEMKKAILHVYWEEFQKDPVGLMSRVAQPASKKIDQNKLKPEMDEKGNLTTAGFACSQCGQPLFVYKLEQVSEKGKAYTNYFGRCNVAEHEKLILLAQLKPEKDSDEAVTYSLGKFGQRALDFYSIHVTKESTHPVKPLAQIAGNRYASGPVGKALRDACMGTIASFLSKYQDIIIEHQKVVKGNQKRLESLRELAGKENLEYPSVTLPPQPHTKEGVDAYNEVIARVRMWVNLNLWQKLKLSRDDAKPLLRLKGFPSFPLVERQANEVDWWDMVCNVKKLINEKKEDGKVFWQNLAGYKRQEALRPYLSSEEDRKKGKKFARYQLGDLLLHLEKKHGEDWGKVYDEAWERIDKKVEGLSKHIKLEEERRSEDAQSKAALTDWLRAKASFVIEGLKEADKDEFCRCELKLQKWYGDLRGKPFAIEAENSILDISGFSKQYNCAFIWQKDGVKKLNLYLIINYFKGGKLRFKKIKPEAFEANRFYTVINKKSGEIVPMEVNFNFDDPNLIILPLAFGKRQGREFIWNDLLSLETGSLKLANGRVIEKTLYNRRTRQDEPALFVALTFERREVLDSSNIKPMNLIGVDRGENIPAVIALTDPEGCPLSRFKDSLGNPTHILRIGESYKEKQRTIQAKKEVEQRRAGGYSRKYASKAKNLADDMVRNTARDLLYYAVTQDAMLIFENLSRGFGRQGKRTFMAERQYTRMEDWLTAKLAYEGLPSKTYLSKTLAQYTSKTCSNCGFTITSADYDRVLEKLKKTATGWMTTINGKELKVEGQITYYNRYKRQNVVKDLSVELDRLSEESVNNDISSWTKGRSGEALSLLKKRFSHRPVQEKFVCLNCGFETHADEQAALNIARSWLFLRSQEYKKYQTNKTTGNTDKRAFVETWQSFYRKKLKEVWKPAV

SEQ ID NO: 39526 - protein, 978 aa, synthetic construct
  REGION 1..978: note = engineered CasX variant
QEIGRINKIRRRLVKDSNTKKAGKTGPMKTLLVRVMTPDLRERLENLRKKPENIPQPISNTSRANLNKLLTDYTEMKKAILHVYDEEFQKDPVGLMSRVAQPASKKIDQNKLKPEMDEKGNLTTAGFACSQCGQPLFVYKLEQVSEKGKAYTNYFGRCNVAEHEKLILLAQLKPEKDSDEAVTYSLGKFGQRALDFYSIHVTKESTHPVKPLAQIAGNRYASGPVGKALRDACMGTIASFLSKYQDIIIEHQKVVKGNQKRLESLRELAGKENLEYPSVTLPPQPHTKEGVDAYNEVIARVRMWVNLNLWQKLKLSRDDAKPLLRLKGFPSFPLVERQANEVDWWDMVCNVKKLINEKKEDGKVFWQNLAGYKRQEALRPYLSSEEDRKKGKKFARYQLGDLLLHLEKKHGEDWGKVYDEAWERIDKKVEGLSKHIKLEEERRSEDAQSKAALTDWLRAKASFVIEGLKEADKDEFCRCELKLQKWYGDLRGKPFAIEAENSILDISGFSKQYNCAFIWQKDGVKKLNLYLIINYFKGGKLRFKKIKPEAFEANRFYTVINKKSGEIVPMEVNFNFDDPNLIILPLAFGKRQGREFIWNDLLSLETGSLKLANGRVIEKTLYNRRTRQDEPALFVALTFERREVLDSSNIKPMNLIGVDRGENIPAVIALTDPEGCPLSRFKDSLGNPTHILRIGESYKEKQRTIQAKKEVEQRRAGGYSRKYASKAKNLADDMVRNTARDLLYYAVTQDAMLIFENLSRGFGRQGKRTFMAERQYTRMEDWLTAKLAYEGLPSKTYLSKTLAQYTSKTCSNCGFTITSADYDRVLEKLKKTATGWMTTINGKELKVEGQITYYNRYKRQNVVKDLSVELDRLSEESVNNDISSWTKGRSGEALSLLKKRFSHRPVQEKFVCLNCGFETHADEQAALNIARSWLFLRSQEYKKYQTNKTTGNTDKRAFVETWQSFYRKKLKEVWKPAV

SEQ ID NO: 39527 - protein, 978 aa, synthetic construct
  REGION 1..978: note = engineered CasX variant
QEIGRINKIRRRLVKDSNTKKAGKTGPMKTLLVRVMTPDLRERLENLRKKPENIPQPISNTSRANLNKLLTDYTEMKKAILHVYWEEFQKDPVGLMSRVAQPASKKIDQNKLKPEMDEKGNLTTAGFACSQCGQPLFVYKLEQVSEKGKAYTNYFGRCNVAEHEKLIKLAQLKPEKDSDEAVTYSLGKFGQRALDFYSIHVTKESTHPVKPLAQIAGNRYASGPVGKALRDACMGTIASFLSKYQDIIIEHQKVVKGNQKRLESLRELAGKENLEYPSVTLPPQPHTKEGVDAYNEVIARVRMWVNLNLWQKLKLSRDDAKPLLRLKGFPSFPLVERQANEVDWWDMVCNVKKLINEKKEDGKVFWQNLAGYKRQEALRPYLSSEEDRKKGKKFARYQLGDLLLHLEKKHGEDWGKVYDEAWERIDKKVEGLSKHIKLEEERRSEDAQSKAALTDWLRAKASFVIEGLKEADKDEFCRCELKLQKWYGDLRGKPFAIEAENSILDISGFSKQYNCAFIWQKDGVKKLNLYLIINYFKGGKLRFKKIKPEAFEANRFYTVINKKSGEIVPMEVNFNFDDPNLIILPLAFGKRQGREFIWNDLLSLETGSLKLANGRVIEKTLYNRRTRQDEPALFVALTFERREVLDSSNIKPMNLIGVDRGENIPAVIALTDPEGCPLSRFKDSLGNPTHILRIGESYKEKQRTIQAKKEVEQRRAGGYSRKYASKAKNLADDMVRNTARDLLYYAVTQDAMLIFENLSRGFGRQGKRTFMAERQYTRMEDWLTAKLAYEGLPSKTYLSKTLAQYTSKTCSNCGFTITSADYDRVLEKLKKTATGWMTTINGKELKVEGQITYYNRYKRQNVVKDLSVELDRLSEESVNNDISSWTKGRSGEALSLLKKRFSHRPVQEKFVCLNCGFETHADEQAALNIARSWLFLRSQEYKKYQTNKTTGNTDKRAFVETWQSFYRKKLKEVWKPAV

SEQ ID NO: 39528 - protein, 978 aa, synthetic construct
  REGION 1..978: note = engineered CasX variant
QEIGRINKIRRRLVKDSNTKKAGKTGPMKTLLVRVMTPDLRERLENLRKKPENIPQPISNTSRANLNKLLTDYTEMKKAILHVYWEEFQKDPVGLMSRVAQPASKKIDQNKLKPEMDEKGNLTTAGFACSQCGQPLFVYKLEQVSEKGKAYTNYFGRCNVAEHEKLILLYQLKPEKDSDEAVTYSLGKFGQRALDFYSIHVTKESTHPVKPLAQIAGNRYASGPVGKALRDACMGTIASFLSKYQDIIIEHQKVVKGNQKRLESLRELAGKENLEYPSVTLPPQPHTKEGVDAYNEVIARVRMWVNLNLWQKLKLSRDDAKPLLRLKGFPSFPLVERQANEVDWWDMVCNVKKLINEKKEDGKVFWQNLAGYKRQEALRPYLSSEEDRKKGKKFARYQLGDLLLHLEKKHGEDWGKVYDEAWERIDKKVEGLSKHIKLEEERRSEDAQSKAALTDWLRAKASFVIEGLKEADKDEFCRCELKLQKWYGDLRGKPFAIEAENSILDISGFSKQYNCAFIWQKDGVKKLNLYLIINYFKGGKLRFKKIKPEAFEANRFYTVINKKSGEIVPMEVNFNFDDPNLIILPLAFGKRQGREFIWNDLLSLETGSLKLANGRVIEKTLYNRRTRQDEPALFVALTFERREVLDSSNIKPMNLIGVDRGENIPAVIALTDPEGCPLSRFKDSLGNPTHILRIGESYKEKQRTIQAKKEVEQRRAGGYSRKYASKAKNLADDMVRNTARDLLYYAVTQDAMLIFENLSRGFGRQGKRTFMAERQYTRMEDWLTAKLAYEGLPSKTYLSKTLAQYTSKTCSNCGFTITSADYDRVLEKLKKTATGWMTTINGKELKVEGQITYYNRYKRQNVVKDLSVELDRLSEESVNNDISSWTKGRSGEALSLLKKRFSHRPVQEKFVCLNCGFETHADEQAALNIARSWLFLRSQEYKKYQTNKTTGNTDKRAFVETWQSFYRKKLKEVWKPAV

SEQ ID NO: 39529 - protein, 978 aa, synthetic construct
  REGION 1..978: note = engineered CasX variant
QEIGRINKIRRRLVKDSNTKKAGKTGPMKTLLVRVMTPDLRERLENLRKKPENIPQPISNTSRANLNKLLTDYTEMKKAILHVYWEEFQKDPVGLMSRVAQPASKKIDQNKLKPEMDEKGNLTTAGFACSQCGQPLFVYKLEQVSEKGKAYTNYFGRCNVAEHEKLILLSQLKPEKDSDEAVTYSLGKFGQRALDFYSIHVTKESTHPVKPLAQIAGNRYASGPVGKALRDACMGTIASFLSKYQDIIIEHQKVVKGNQKRLESLRELAGKENLEYPSVTLPPQPHTKEGVDAYNEVIARVRMWVNLNLWQKLKLSRDDAKPLLRLKGFPSFPLVERQANEVDWWDMVCNVKKLINEKKEDGKVFWQNLAGYKRQEALRPYLSSEEDRKKGKKFARYQLGDLLLHLEKKHGEDWGKVYDEAWERIDKKVEGLSKHIKLEEERRSEDAQSKAALTDWLRAKASFVIEGLKEADKDEFCRCELKLQKWYGDLRGKPFAIEAENSILDISGFSKQYNCAFIWQKDGVKKLNLYLIINYFKGGKLRFKKIKPEAFEANRFYTVINKKSGEIVPMEVNFNFDDPNLIILPLAFGKRQGREFIWNDLLSLETGSLKLANGRVIEKTLYNRRTRQDEPALFVALTFERREVLDSSNIKPMNLIGVDRGENIPAVIALTDPEGCPLSRFKDSLGNPTHILRIGESYKEKQRTIQAKKEVEQRRAGGYSRKYASKAKNLADDMVRNTARDLLYYAVTQDAMLIFENLSRGFGRQGKRTFMAERQYTRMEDWLTAKLAYEGLPSKTYLSKTLAQYTSKTCSNCGFTITSADYDRVLEKLKKTATGWMTTINGKELKVEGQITYYNRYKRQNVVKDLSVELDRLSEESVNNDISSWTKGRSGEALSLLKKRFSHRPVQEKFVCLNCGFETHADEQAALNIARSWLFLRSQEYKKYQTNKTTGNTDKRAFVETWQSFYRKKLKEVWKPAV

SEQ ID NO: 39530 - protein, 977 aa, synthetic construct
  REGION 1..977: note = engineered CasX variant
QEIGRINKIRRRLVKDSNTKKAGKTGPMKTLLVRVMTPDLRERLENLRKKPENIPQPISNTSRANLNKLLTDYTEMKKAILHVYWEEFQKDPVGLMSRVAQPASKKIDQNKLKPEMDEKGNLTTAGFACSQCGQPLFVYKLEQVSEKGKAYTNYFGRCNVAEHEKLILLAQLKPEKDSDEAVTYSLGKFGQRALDFYSIHVTKESTHPVKPLAQIAGNRYASPVGKALRDACMGTIASFLSKYQDIIIEHQKVVKGNQKRLESLRELAGKENLEYPSVTLPPQPHTKEGVDAYNEVIARVRMWVNLNLWQKLKLSRDDAKPLLRLKGFPSFPLVERQANEVDWWDMVCNVKKLINEKKEDGKVFWQNLAGYKRQEALRPYLSSEEDRKKGKKFARYQLGDLLLHLEKKHGEDWGKVYDEAWERIDKKVEGLSKHIKLEEERRSEDAQSKAALTDWLRAKASFVIEGLKEADKDEFCRCELKLQKWYGDLRGKPFAIEAENSILDISGFSKQYNCAFIWQKDGVKKLNLYLIINYFKGGKLRFKKIKPEAFEANRFYTVINKKSGEIVPMEVNFNFDDPNLIILPLAFGKRQGREFIWNDLLSLETGSLKLANGRVIEKTLYNRRTRQDEPALFVALTFERREVLDSSNIKPMNLIGVDRGENIPAVIALTDPEGCPLSRFKDSLGNPTHILRIGESYKEKQRTIQAKKEVEQRRAGGYSRKYASKAKNLADDMVRNTARDLLYYAVTQDAMLIFENLSRGFGRQGKRTFMAERQYTRMEDWLTAKLAYEGLPSKTYLSKTLAQYTSKTCSNCGFTITSADYDRVLEKLKKTATGWMTTINGKELKVEGQITYYNRYKRQNVVKDLSVELDRLSEESVNNDISSWTKGRSGEALSLLKKRFSHRPVQEKFVCLNCGFETHADEQAALNIARSWLFLRSQEYKKYQTNKTTGNTDKRAFVETWQSFYRKKLKEVWKPAV

SEQ ID NO: 39531 - protein, 978 aa, synthetic construct
  REGION 1..978: note = engineered CasX variant
QEIGRINKIRRRLVKDSNTKKAGKTGPMKTLLVRVMTPDLRERLENLRKKPENIPQPISNTSRANLNKLLTDYTEMKKAILHVYWEEFQKDPVGLMSRVAQPASKKIDQNKLKPEMDEKGNLTTAGFACSQCGQPLFVYKLEQVSEKGKAYTNYFGRCNVAEHEKLILLAQLKPEKDSDEAVTYSLGKFGQRALDFYSIHVTKESTHPVKPLAQIAGNRYASGPVGKALRDACMGTIASFLSKYQDIIIEHQKVVKGNQKRLESLRELAGKENLEYPSVTLPPQPHTSEGVDAYNEVIARVRMWVNLNLWQKLKLSRDDAKPLLRLKGFPSFPLVERQANEVDWWDMVCNVKKLINEKKEDGKVFWQNLAGYKRQEALRPYLSSEEDRKKGKKFARYQLGDLLLHLEKKHGEDWGKVYDEAWERIDKKVEGLSKHIKLEEERRSEDAQSKAALTDWLRAKASFVIEGLKEADKDEFCRCELKLQKWYGDLRGKPFAIEAENSILDISGFSKQYNCAFIWQKDGVKKLNLYLIINYFKGGKLRFKKIKPEAFEANRFYTVINKKSGEIVPMEVNFNFDDPNLIILPLAFGKRQGREFIWNDLLSLETGSLKLANGRVIEKTLYNRRTRQDEPALFVALTFERREVLDSSNIKPMNLIGVDRGENIPAVIALTDPEGCPLSRFKDSLGNPTHILRIGESYKEKQRTIQAKKEVEQRRAGGYSRKYASKAKNLADDMVRNTARDLLYYAVTQDAMLIFENLSRGFGRQGKRTFMAERQYTRMEDWLTAKLAYEGLPSKTYLSKTLAQYTSKTCSNCGFTITSADYDRVLEKLKKTATGWMTTINGKELKVEGQITYYNRYKRQNVVKDLSVELDRLSEESVNNDISSWTKGRSGEALSLLKKRFSHRPVQEKFVCLNCGFETHADEQAALNIARSWLFLRSQEYKKYQTNKTTGNTDKRAFVETWQSFYRKKLKEVWKPAV

SEQ ID NO: 39532 - protein, 978 aa, synthetic construct
  REGION 1..978: note = engineered CasX variant
QEIGRINKIRRRLVKDSNTKKAGKTGPMKTLLVRVMTPDLRERLENLRKKPENIPQPISNTSRANLNKLLTDYTEMKKAILHVYWEEFQKDPVGLMSRVAQPASKKIDQNKLKPEMDEKGNLTTAGFACSQCGQPLFVYKLEQVSEKGKAYTNYFGRCNVAEHEKLILLAQLKPEKDSDEAVTYSLGKFGQRALDFYSIHVTKESTHPVKPLAQIAGNRYASGPVGKALRDACMGTIASFLSKYQDIIIEHQKVVKGNQKRLESLRELAGKENLEYPSVTLPPQPHTKEGLDAYNEVIARVRMWVNLNLWQKLKLSRDDAKPLLRLKGFPSFPLVERQANEVDWWDMVCNVKKLINEKKEDGKVFWQNLAGYKRQEALRPYLSSEEDRKKGKKFARYQLGDLLLHLEKKHGEDWGKVYDEAWERIDKKVEGLSKHIKLEEERRSEDAQSKAALTDWLRAKASFVIEGLKEADKDEFCRCELKLQKWYGDLRGKPFAIEAENSILDISGFSKQYNCAFIWQKDGVKKLNLYLIINYFKGGKLRFKKIKPEAFEANRFYTVINKKSGEIVPMEVNFNFDDPNLIILPLAFGKRQGREFIWNDLLSLETGSLKLANGRVIEKTLYNRRTRQDEPALFVALTFERREVLDSSNIKPMNLIGVDRGENIPAVIALTDPEGCPLSRFKDSLGNPTHILRIGESYKEKQRTIQAKKEVEQRRAGGYSRKYASKAKNLADDMVRNTARDLLYYAVTQDAMLIFENLSRGFGRQGKRTFMAERQYTRMEDWLTAKLAYEGLPSKTYLSKTLAQYTSKTCSNCGFTITSADYDRVLEKLKKTATGWMTTINGKELKVEGQITYYNRYKRQNVVKDLSVELDRLSEESVNNDISSWTKGRSGEALSLLKKRFSHRPVQEKFVCLNCGFETHADEQAALNIARSWLFLRSQEYKKYQTNKTTGNTDKRAFVETWQSFYRKKLKEVWKPAV

SEQ ID NO: 39533 - protein, 978 aa, synthetic construct
  REGION 1..978: note = engineered CasX variant
QEIGRINKIRRRLVKDSNTKKAGKTGPMKTLLVRVMTPDLRERLENLRKKPENIPQPISNTSRANLNKLLTDYTEMKKAILHVYWEEFQKDPVGLMSRVAQPASKKIDQNKLKPEMDEKGNLTTAGFACSQCGQPLFVYKLEQVSEKGKAYTNYFGRCNVAEHEKLILLAQLKPEKDSDEAVTYSLGKFGQRALDFYSIHVTKESTHPVKPLAQIAGNRYASGPVGKALRDACMGTIASFLSKYQDIIIEHQKVVKGNQKRLESLRELAGKENLEYPSVTLPPQPHTKEGVDAYNEVIARVRTWVNLNLWQKLKLSRDDAKPLLRLKGFPSFPLVERQANEVDWWDMVCNVKKLINEKKEDGKVFWQNLAGYKRQEALRPYLSSEEDRKKGKKFARYQLGDLLLHLEKKHGEDWGKVYDEAWERIDKKVEGLSKHIKLEEERRSEDAQSKAALTDWLRAKASFVIEGLKEADKDEFCRCELKLQKWYGDLRGKPFAIEAENSILDISGFSKQYNCAFIWQKDGVKKLNLYLIINYFKGGKLRFKKIKPEAFEANRFYTVINKKSGEIVPMEVNFNFDDPNLIILPLAFGKRQGREFIWNDLLSLETGSLKLANGRVIEKTLYNRRTRQDEPALFVALTFERREVLDSSNIKPMNLIGVDRGENIPAVIALTDPEGCPLSRFKDSLGNPTHILRIGESYKEKQRTIQAKKEVEQRRAGGYSRKYASKAKNLADDMVRNTARDLLYYAVTQDAMLIFENLSRGFGRQGKRTFMAERQYTRMEDWLTAKLAYEGLPSKTYLSKTLAQYTSKTCSNCGFTITSADYDRVLEKLKKTATGWMTTINGKELKVEGQITYYNRYKRQNVVKDLSVELDRLSEESVNNDISSWTKGRSGEALSLLKKRFSHRPVQEKFVCLNCGFETHADEQAALNIARSWLFLRSQEYKKYQTNKTTGNTDKRAFVETWQSFYRKKLKEVWKPAV

SEQ ID NO: 39534 - protein, 978 aa, synthetic construct
  REGION 1..978: note = engineered CasX variant
QEIGRINKIRRRLVKDSNTKKAGKTGPMKTLLVRVMTPDLRERLENLRKKPENIPQPISNTSRANLNKLLTDYTEMKKAILHVYWEEFQKDPVGLMSRVAQPASKKIDQNKLKPEMDEKGNLTTAGFACSQCGQPLFVYKLEQVSEKGKAYTNYFGRCNVAEHEKLILLAQLKPEKDSDEAVTYSLGKFGQRALDFYSIHVTKESTHPVKPLAQIAGNRYASGPVGKALRDACMGTIASFLSKYQDIIIEHQKVVKGNQKRLESLRELAGKENLEYPSVTLPPQPHTKEGVDAYNEVIARVRWWVNLNLWQKLKLSRDDAKPLLRLKGFPSFPLVERQANEVDWWDMVCNVKKLINEKKEDGKVFWQNLAGYKRQEALRPYLSSEEDRKKGKKFARYQLGDLLLHLEKKHGEDWGKVYDEAWERIDKKVEGLSKHIKLEEERRSEDAQSKAALTDWLRAKASFVIEGLKEADKDEFCRCELKLQKWYGDLRGKPFAIEAENSILDISGFSKQYNCAFIWQKDGVKKLNLYLIINYFKGGKLRFKKIKPEAFEANRFYTVINKKSGEIVPMEVNFNFDDPNLIILPLAFGKRQGREFIWNDLLSLETGSLKLANGRVIEKTLYNRRTRQDEPALFVALTFERREVLDSSNIKPMNLIGVDRGENIPAVIALTDPEGCPLSRFKDSLGNPTHILRIGESYKEKQRTIQAKKEVEQRRAGGYSRKYASKAKNLADDMVRNTARDLLYYAVTQDAMLIFENLSRGFGRQGKRTFMAERQYTRMEDWLTAKLAYEGLPSKTYLSKTLAQYTSKTCSNCGFTITSADYDRVLEKLKKTATGWMTTINGKELKVEGQITYYNRYKRQNVVKDLSVELDRLSEESVNNDISSWTKGRSGEALSLLKKRFSHRPVQEKFVCLNCGFETHADEQAALNIARSWLFLRSQEYKKYQTNKTTGNTDKRAFVETWQSFYRKKLKEVWKPAV

SEQ ID NO: 39535 - protein, 979 aa, synthetic construct
  REGION 1..979: note = engineered CasX variant
QEIGRINKIRRRLVKDSNTKKAGKTGPMKTLLVRVMTPDLRERLENLRKKPENIPQPISNTSRANLNKLLTDYTEMKKAILHVYWEEFQKDPVGLMSRVAQPASKKIDQNKLKPEMDEKGNLTTAGFACSQCGQPLFVYKLEQVSEKGKAYTNYFGRCNVAEHEKLILLAQLKPEKDSDEAVTYSLGKFGQRALDFYSIHVTKESTHPVKPLAQIAGNRYASGPVGKALRDACMGTIASFLSKYQDIIIEHQKVVKGNQKRLESLRELAGKENLEYPSVTLPPQPHTKEGVDAYNEVIARVRMWVNLNLWQKLKLSRDDAKPLLRLKGFPSFPLVERQQANEVDWWDMVCNVKKLINEKKEDGKVFWQNLAGYKRQEALRPYLSSEEDRKKGKKFARYQLGDLLLHLEKKHGEDWGKVYDEAWERIDKKVEGLSKHIKLEEERRSEDAQSKAALTDWLRAKASFVIEGLKEADKDEFCRCELKLQKWYGDLRGKPFAIEAENSILDISGFSKQYNCAFIWQKDGVKKLNLYLIINYFKGGKLRFKKIKPEAFEANRFYTVINKKSGEIVPMEVNFNFDDPNLIILPLAFGKRQGREFIWNDLLSLETGSLKLANGRVIEKTLYNRRTRQDEPALFVALTFERREVLDSSNIKPMNLIGVDRGENIPAVIALTDPEGCPLSRFKDSLGNPTHILRIGESYKEKQRTIQAKKEVEQRRAGGYSRKYASKAKNLADDMVRNTARDLLYYAVTQDAMLIFENLSRGFGRQGKRTFMAERQYTRMEDWLTAKLAYEGLPSKTYLSKTLAQYTSKTCSNCGFTITSADYDRVLEKLKKTATGWMTTINGKELKVEGQITYYNRYKRQNVVKDLSVELDRLSEESVNNDISSWTKGRSGEALSLLKKRFSHRPVQEKFVCLNCGFETHADEQAALNIARSWLFLRSQEYKKYQTNKTTGNTDKRAFVETWQSFYRKKLKEVWKPAV

SEQ ID NO: 39536 - protein, 979 aa, synthetic construct
  REGION 1..979: note = engineered CasX variant
QEIGRINKIRRRLVKDSNTKKAGKTGPMKTLLVRVMTPDLRERLENLRKKPENIPQPISNTSRANLNKLLTDYTEMKKAILHVYWEEFQKDPVGLMSRVAQPASKKIDQNKLKPEMDEKGNLTTAGFACSQCGQPLFVYKLEQVSEKGKAYTNYFGRCNVAEHEKLILLAQLKPEKDSDEAVTYSLGKFGQRALDFYSIHVTKESTHPVKPLAQIAGNRYASGPVGKALRDACMGTIASFLSKYQDIIIEHQKVVKGNQKRLESLRELAGKENLEYPSVTLPPQPHTKEGVDAYNEVIARVRMWVNLNLWQKLKLSRDDAKPLLRLKGFPSFPLVERQANAEVDWWDMVCNVKKLINEKKEDGKVFWQNLAGYKRQEALRPYLSSEEDRKKGKKFARYQLGDLLLHLEKKHGEDWGKVYDEAWERIDKKVEGLSKHIKLEEERRSEDAQSKAALTDWLRAKASFVIEGLKEADKDEFCRCELKLQKWYGDLRGKPFAIEAENSILDISGFSKQYNCAFIWQKDGVKKLNLYLIINYFKGGKLRFKKIKPEAFEANRFYTVINKKSGEIVPMEVNFNFDDPNLIILPLAFGKRQGREFIWNDLLSLETGSLKLANGRVIEKTLYNRRTRQDEPALFVALTFERREVLDSSNIKPMNLIGVDRGENIPAVIALTDPEGCPLSRFKDSLGNPTHILRIGESYKEKQRTIQAKKEVEQRRAGGYSRKYASKAKNLADDMVRNTARDLLYYAVTQDAMLIFENLSRGFGRQGKRTFMAERQYTRMEDWLTAKLAYEGLPSKTYLSKTLAQYTSKTCSNCGFTITSADYDRVLEKLKKTATGWMTTINGKELKVEGQITYYNRYKRQNVVKDLSVELDRLSEESVNNDISSWTKGRSGEALSLLKKRFSHRPVQEKFVCLNCGFETHADEQAALNIARSWLFLRSQEYKKYQTNKTTGNTDKRAFVETWQSFYRKKLKEVWKPAV

SEQ ID NO: 39537 - protein, 978 aa, synthetic construct
  REGION 1..978: note = engineered CasX variant
QEIGRINKIRRRLVKDSNTKKAGKTGPMKTLLVRVMTPDLRERLENLRKKPENIPQPISNTSRANLNKLLTDYTEMKKAILHVYWEEFQKDPVGLMSRVAQPASKKIDQNKLKPEMDEKGNLTTAGFACSQCGQPLFVYKLEQVSEKGKAYTNYFGRCNVAEHEKLILLAQLKPEKDSDEAVTYSLGKFGQRALDFYSIHVTKESTHPVKPLAQIAGNRYASGPVGKALRDACMGTIASFLSKYQDIIIEHQKVVKGNQKRLESLRELAGKENLEYPSVTLPPQPHTKEGVDAYNEVIARVRMWVNLNLWQKLKLSRDDAKPLLRLKGFPSFPLVERQANEVDWWDMVCNVKKLINEKKEDGKVFWQNLAGYKRQEALRPYLSSEEDRKKGKKFARTQLGDLLLHLEKKHGEDWGKVYDEAWERIDKKVEGLSKHIKLEEERRSEDAQSKAALTDWLRAKASFVIEGLKEADKDEFCRCELKLQKWYGDLRGKPFAIEAENSILDISGFSKQYNCAFIWQKDGVKKLNLYLIINYFKGGKLRFKKIKPEAFEANRFYTVINKKSGEIVPMEVNFNFDDPNLIILPLAFGKRQGREFIWNDLLSLETGSLKLANGRVIEKTLYNRRTRQDEPALFVALTFERREVLDSSNIKPMNLIGVDRGENIPAVIALTDPEGCPLSRFKDSLGNPTHILRIGESYKEKQRTIQAKKEVEQRRAGGYSRKYASKAKNLADDMVRNTARDLLYYAVTQDAMLIFENLSRGFGRQGKRTFMAERQYTRMEDWLTAKLAYEGLPSKTYLSKTLAQYTSKTCSNCGFTITSADYDRVLEKLKKTATGWMTTINGKELKVEGQITYYNRYKRQNVVKDLSVELDRLSEESVNNDISSWTKGRSGEALSLLKKRFSHRPVQEKFVCLNCGFETHADEQAALNIARSWLFLRSQEYKKYQTNKTTGNTDKRAFVETWQSFYRKKLKEVWKPAV

SEQ ID NO: 39538 - protein, 979 aa, synthetic construct
  REGION 1..979: note = engineered CasX variant
QEIGRINKIRRRLVKDSNTKKAGKTGPMKTLLVRVMTPDLRERLENLRKKPENIPQPISNTSRANLNKLLTDYTEMKKAILHVYWEEFQKDPVGLMSRVAQPASKKIDQNKLKPEMDEKGNLTTAGFACSQCGQPLFVYKLEQVSEKGKAYTNYFGRCNVAEHEKLILLAQLKPEKDSDEAVTYSLGKFGQRALDFYSIHVTKESTHPVKPLAQIAGNRYASGPVGKALRDACMGTIASFLSKYQDIIIEHQKVVKGNQKRLESLRELAGKENLEYPSVTLPPQPHTKEGVDAYNEVIARVRMWVNLNLWQKLKLSRDDAKPLLRLKGFPSFPLVERQANEVDWWDMVCNVKKLINEKKEDGKVFWQNLAGYKRQEALRPYLSSEEDRKKGKKFARYQLGDLLLHLEKKHEGEDWGKVYDEAWERIDKKVEGLSKHIKLEEERRSEDAQSKAALTDWLRAKASFVIEGLKEADKDEFCRCELKLQKWYGDLRGKPFAIEAENSILDISGFSKQYNCAFIWQKDGVKKLNLYLIINYFKGGKLRFKKIKPEAFEANRFYTVINKKSGEIVPMEVNFNFDDPNLIILPLAFGKRQGREFIWNDLLSLETGSLKLANGRVIEKTLYNRRTRQDEPALFVALTFERREVLDSSNIKPMNLIGVDRGENIPAVIALTDPEGCPLSRFKDSLGNPTHILRIGESYKEKQRTIQAKKEVEQRRAGGYSRKYASKAKNLADDMVRNTARDLLYYAVTQDAMLIFENLSRGFGRQGKRTFMAERQYTRMEDWLTAKLAYEGLPSKTYLSKTLAQYTSKTCSNCGFTITSADYDRVLEKLKKTATGWMTTINGKELKVEGQITYYNRYKRQNVVKDLSVELDRLSEESVNNDISSWTKGRSGEALSLLKKRFSHRPVQEKFVCLNCGFETHADEQAALNIARSWLFLRSQEYKKYQTNKTTGNTDKRAFVETWQSFYRKKLKEVWKPAV

SEQ ID NO: 39539 - protein, 978 aa, synthetic construct
  REGION 1..978: note = engineered CasX variant
QEIGRINKIRRRLVKDSNTKKAGKTGPMKTLLVRVMTPDLRERLENLRKKPENIPQPISNTSRANLNKLLTDYTEMKKAILHVYWEEFQKDPVGLMSRVAQPASKKIDQNKLKPEMDEKGNLTTAGFACSQCGQPLFVYKLEQVSEKGKAYTNYFGRCNVAEHEKLILLAQLKPEKDSDEAVTYSLGKFGQRALDFYSIHVTKESTHPVKPLAQIAGNRYASGPVGKALRDACMGTIASFLSKYQDIIIEHQKVVKGNQKRLESLRELAGKENLEYPSVTLPPQPHTKEGVDAYNEVIARVRMWVNLNLWQKLKLSRDDAKPLLRLKGFPSFPLVERQANEVDWWDMVCNVKKLINEKKEDGKVFWQNLAGYKRQEALRPYLSSEEDRKKGKKFARYQLGDLLLHLEKKHGEDWGKVYDEAWERIDKKVEGLSKHIKLEEERRSEDAQSKAALTDWLRAKASFVIEGLKEADKDEFCRCDLKLQKWYGDLRGKPFAIEAENSILDISGFSKQYNCAFIWQKDGVKKLNLYLIINYFKGGKLRFKKIKPEAFEANRFYTVINKKSGEIVPMEVNFNFDDPNLIILPLAFGKRQGREFIWNDLLSLETGSLKLANGRVIEKTLYNRRTRQDEPALFVALTFERREVLDSSNIKPMNLIGVDRGENIPAVIALTDPEGCPLSRFKDSLGNPTHILRIGESYKEKQRTIQAKKEVEQRRAGGYSRKYASKAKNLADDMVRNTARDLLYYAVTQDAMLIFENLSRGFGRQGKRTFMAERQYTRMEDWLTAKLAYEGLPSKTYLSKTLAQYTSKTCSNCGFTITSADYDRVLEKLKKTATGWMTTINGKELKVEGQITYYNRYKRQNVVKDLSVELDRLSEESVNNDISSWTKGRSGEALSLLKKRFSHRPVQEKFVCLNCGFETHADEQAALNIARSWLFLRSQEYKKYQTNKTTGNTDKRAFVETWQSFYRKKLKEVWKPAV

SEQ ID NO: 39540 - protein, 978 aa, synthetic construct
  REGION 1..978: note = engineered CasX variant
QEIGRINKIRRRLVKDSNTKKAGKTGPMKTLLVRVMTPDLRERLENLRKKPENIPQPISNTSRANLNKLLTDYTEMKKAILHVYWEEFQKDPVGLMSRVAQPASKKIDQNKLKPEMDEKGNLTTAGFACSQCGQPLFVYKLEQVSEKGKAYTNYFGRCNVAEHEKLILLAQLKPEKDSDEAVTYSLGKFGQRALDFYSIHVTKESTHPVKPLAQIAGNRYASGPVGKALRDACMGTIASFLSKYQDIIIEHQKVVKGNQKRLESLRELAGKENLEYPSVTLPPQPHTKEGVDAYNEVIARVRMWVNLNLWQKLKLSRDDAKPLLRLKGFPSFPLVERQANEVDWWDMVCNVKKLINEKKEDGKVFWQNLAGYKRQEALRPYLSSEEDRKKGKKFARYQLGDLLLHLEKKHGEDWGKVYDEAWERIDKKVEGLSKHIKLEEERRSEDAQSKAALTDWLRAKASFVIEGLKEADKDEFCRCELKLQKWYGDLRGKPFAIEAENSILDISGFSKQYNCAFIWQKDGVKKLNLYLIINYFKGGKLRFKKIKPEAFEANRFYTVINKKSGEIVPMEVNFNFDDPNLIILPLAFGKRFGREFIWNDLLSLETGSLKLANGRVIEKTLYNRRTRQDEPALFVALTFERREVLDSSNIKPMNLIGVDRGENIPAVIALTDPEGCPLSRFKDSLGNPTHILRIGESYKEKQRTIQAKKEVEQRRAGGYSRKYASKAKNLADDMVRNTARDLLYYAVTQDAMLIFENLSRGFGRQGKRTFMAERQYTRMEDWLTAKLAYEGLPSKTYLSKTLAQYTSKTCSNCGFTITSADYDRVLEKLKKTATGWMTTINGKELKVEGQITYYNRYKRQNVVKDLSVELDRLSEESVNNDISSWTKGRSGEALSLLKKRFSHRPVQEKFVCLNCGFETHADEQAALNIARSWLFLRSQEYKKYQTNKTTGNTDKRAFVETWQSFYRKKLKEVWKPAV

SEQ ID NO: 39541 - protein, 978 aa, synthetic construct
  REGION 1..978: note = engineered CasX variant
QEIGRINKIRRRLVKDSNTKKAGKTGPMKTLLVRVMTPDLRERLENLRKKPENIPQPISNTSRANLNKLLTDYTEMKKAILHVYWEEFQKDPVGLMSRVAQPASKKIDQNKLKPEMDEKGNLTTAGFACSQCGQPLFVYKLEQVSEKGKAYTNYFGRCNVAEHEKLILLAQLKPEKDSDEAVTYSLGKFGQRALDFYSIHVTKESTHPVKPLAQIAGNRYASGPVGKALRDACMGTIASFLSKYQDIIIEHQKVVKGNQKRLESLRELAGKENLEYPSVTLPPQPHTKEGVDAYNEVIARVRMWVNLNLWQKLKLSRDDAKPLLRLKGFPSFPLVERQANEVDWWDMVCNVKKLINEKKEDGKVFWQNLAGYKRQEALRPYLSSEEDRKKGKKFARYQLGDLLLHLEKKHGEDWGKVYDEAWERIDKKVEGLSKHIKLEEERRSEDAQSKAALTDWLRAKASFVIEGLKEADKDEFCRCELKLQKWYGDLRGKPFAIEAENSILDISGFSKQYNCAFIWQKDGVKKLNLYLIINYFKGGKLRFKKIKPEAFEANRFYTVINKKSGEIVPMEVNFNFDDPNLIILPLAFGKRVGREFIWNDLLSLETGSLKLANGRVIEKTLYNRRTRQDEPALFVALTFERREVLDSSNIKPMNLIGVDRGENIPAVIALTDPEGCPLSRFKDSLGNPTHILRIGESYKEKQRTIQAKKEVEQRRAGGYSRKYASKAKNLADDMVRNTARDLLYYAVTQDAMLIFENLSRGFGRQGKRTFMAERQYTRMEDWLTAKLAYEGLPSKTYLSKTLAQYTSKTCSNCGFTITSADYDRVLEKLKKTATGWMTTINGKELKVEGQITYYNRYKRQNVVKDLSVELDRLSEESVNNDISSWTKGRSGEALSLLKKRFSHRPVQEKFVCLNCGFETHADEQAALNIARSWLFLRSQEYKKYQTNKTTGNTDKRAFVETWQSFYRKKLKEVWKPAV

SEQ ID NO: 39542 - protein, 979 aa, synthetic construct
  REGION 1..979: note = engineered CasX variant
QEIGRINKIRRRLVKDSNTKKAGKTGPMKTLLVRVMTPDLRERLENLRKKPENIPQPISNTSRANLNKLLTDYTEMKKAILHVYWEEFQKDPVGLMSRVAQPASKKIDQNKLKPEMDEKGNLTTAGFACSQCGQPLFVYKLEQVSEKGKAYTNYFGRCNVAEHEKLILLAQLKPEKDSDEAVTYSLGKFGQRALDFYSIHVTKESTHPVKPLAQIAGNRYASGPVGKALRDACMGTIASFLSKYQDIIIEHQKVVKGNQKRLESLRELAGKENLEYPSVTLPPQPHTKEGVDAYNEVIARVRMWVNLNLWQKLKLSRDDAKPLLRLKGFPSFPLVERQANEVDWWDMVCNVKKLINEKKEDGKVFWQNLAGYKRQEALRPYLSSEEDRKKGKKFARYQLGDLLLHLEKKHGEDWGKVYDEAWERIDKKVEGLSKHIKLEEERRSEDAQSKAALTDWLRAKASFVIEGLKEADKDEFCRCELKLQKWYGDLRGKPFAIEAENSILDISGFSKQYNCAFIWQKDGVKKLNLYLIINYFKGGKLRFKKIKPEAFEANRFYTVINKKSGEIVPMEVNFNFDDPNLIILPLAFGKRQGREFIWNDLLSLETGSLKLANGRVIEKTLYNRRTRQDEPALFVALTFERREVLDSSNIKTPMNLIGVDRGENIPAVIALTDPEGCPLSRFKDSLGNPTHILRIGESYKEKQRTIQAKKEVEQRRAGGYSRKYASKAKNLADDMVRNTARDLLYYAVTQDAMLIFENLSRGFGRQGKRTFMAERQYTRMEDWLTAKLAYEGLPSKTYLSKTLAQYTSKTCSNCGFTITSADYDRVLEKLKKTATGWMTTINGKELKVEGQITYYNRYKRQNVVKDLSVELDRLSEESVNNDISSWTKGRSGEALSLLKKRFSHRPVQEKFVCLNCGFETHADEQAALNIARSWLFLRSQEYKKYQTNKTTGNTDKRAFVETWQSFYRKKLKEVWKPAV

SEQ ID NO: 39543 - protein, 979 aa, synthetic construct
  REGION 1..979: note = engineered CasX variant
QEIGRINKIRRRLVKDSNTKKAGKTGPMKTLLVRVMTPDLRERLENLRKKPENIPQPISNTSRANLNKLLTDYTEMKKAILHVYWEEFQKDPVGLMSRVAQPASKKIDQNKLKPEMDEKGNLTTAGFACSQCGQPLFVYKLEQVSEKGKAYTNYFGRCNVAEHEKLILLAQLKPEKDSDEAVTYSLGKFGQRALDFYSIHVTKESTHPVKPLAQIAGNRYASGPVGKALRDACMGTIASFLSKYQDIIIEHQKVVKGNQKRLESLRELAGKENLEYPSVTLPPQPHTKEGVDAYNEVIARVRMWVNLNLWQKLKLSRDDAKPLLRLKGFPSFPLVERQANEVDWWDMVCNVKKLINEKKEDGKVFWQNLAGYKRQEALRPYLSSEEDRKKGKKFARYQLGDLLLHLEKKHGEDWGKVYDEAWERIDKKVEGLSKHIKLEEERRSEDAQSKAALTDWLRAKASFVIEGLKEADKDEFCRCELKLQKWYGDLRGKPFAIEAENSILDISGFSKQYNCAFIWQKDGVKKLNLYLIINYFKGGKLRFKKIKPEAFEANRFYTVINKKSGEIVPMEVNFNFDDPNLIILPLAFGKRQGREFIWNDLLSLETGSLKLANGRVIEKTLYNRRTRQDEPALFVALTFERREVLDSSNIKPMSNLIGVDRGENIPAVIALTDPEGCPLSRFKDSLGNPTHILRIGESYKEKQRTIQAKKEVEQRRAGGYSRKYASKAKNLADDMVRNTARDLLYYAVTQDAMLIFENLSRGFGRQGKRTFMAERQYTRMEDWLTAKLAYEGLPSKTYLSKTLAQYTSKTCSNCGFTITSADYDRVLEKLKKTATGWMTTINGKELKVEGQITYYNRYKRQNVVKDLSVELDRLSEESVNNDISSWTKGRSGEALSLLKKRFSHRPVQEKFVCLNCGFETHADEQAALNIARSWLFLRSQEYKKYQTNKTTGNTDKRAFVETWQSFYRKKLKEVWKPAV

SEQ ID NO: 39544 - protein, 978 aa, synthetic construct
  REGION 1..978: note = engineered CasX variant
QEIGRINKIRRRLVKDSNTKKAGKTGPMKTLLVRVMTPDLRERLENLRKKPENIPQPISNTSRANLNKLLTDYTEMKKAILHVYWEEFQKDPVGLMSRVAQPASKKIDQNKLKPEMDEKGNLTTAGFACSQCGQPLFVYKLEQVSEKGKAYTNYFGRCNVAEHEKLILLAQLKPEKDSDEAVTYSLGKFGQRALDFYSIHVTKESTHPVKPLAQIAGNRYASGPVGKALRDACMGTIASFLSKYQDIIIEHQKVVKGNQKRLESLRELAGKENLEYPSVTLPPQPHTKEGVDAYNEVIARVRMWVNLNLWQKLKLSRDDAKPLLRLKGFPSFPLVERQANEVDWWDMVCNVKKLINEKKEDGKVFWQNLAGYKRQEALRPYLSSEEDRKKGKKFARYQLGDLLLHLEKKHGEDWGKVYDEAWERIDKKVEGLSKHIKLEEERRSEDAQSKAALTDWLRAKASFVIEGLKEADKDEFCRCELKLQKWYGDLRGKPFAIEAENSILDISGFSKQYNCAFIWQKDGVKKLNLYLIINYFKGGKLRFKKIKPEAFEANRFYTVINKKSGEIVPMEVNFNFDDPNLIILPLAFGKRQGREFIWNDLLSLETGSLKLANGRVIEKTLYNRRTRQDEPALFVALTFERREVLDSSNIKPMNLIGVDRGENIPAVIALTDPEGCPLSRFKDSLGNPTHILRIRESYKEKQRTIQAKKEVEQRRAGGYSRKYASKAKNLADDMVRNTARDLLYYAVTQDAMLIFENLSRGFGRQGKRTFMAERQYTRMEDWLTAKLAYEGLPSKTYLSKTLAQYTSKTCSNCGFTITSADYDRVLEKLKKTATGWMTTINGKELKVEGQITYYNRYKRQNVVKDLSVELDRLSEESVNNDISSWTKGRSGEALSLLKKRFSHRPVQEKFVCLNCGFETHADEQAALNIARSWLFLRSQEYKKYQTNKTTGNTDKRAFVETWQSFYRKKLKEVWKPAV

SEQ ID NO: 39545 - protein, 978 aa, synthetic construct
  REGION 1..978: note = engineered CasX variant
QEIGRINKIRRRLVKDSNTKKAGKTGPMKTLLVRVMTPDLRERLENLRKKPENIPQPISNTSRANLNKLLTDYTEMKKAILHVYWEEFQKDPVGLMSRVAQPASKKIDQNKLKPEMDEKGNLTTAGFACSQCGQPLFVYKLEQVSEKGKAYTNYFGRCNVAEHEKLILLAQLKPEKDSDEAVTYSLGKFGQRALDFYSIHVTKESTHPVKPLAQIAGNRYASGPVGKALRDACMGTIASFLSKYQDIIIEHQKVVKGNQKRLESLRELAGKENLEYPSVTLPPQPHTKEGVDAYNEVIARVRMWVNLNLWQKLKLSRDDAKPLLRLKGFPSFPLVERQANEVDWWDMVCNVKKLINEKKEDGKVFWQNLAGYKRQEALRPYLSSEEDRKKGKKFARYQLGDLLLHLEKKHGEDWGKVYDEAWERIDKKVEGLSKHIKLEEERRSEDAQSKAALTDWLRAKASFVIEGLKEADKDEFCRCELKLQKWYGDLRGKPFAIEAENSILDISGFSKQYNCAFIWQKDGVKKLNLYLIINYFKGGKLRFKKIKPEAFEANRFYTVINKKSGEIVPMEVNFNFDDPNLIILPLAFGKRQGREFIWNDLLSLETGSLKLANGRVIEKTLYNRRTRQDEPALFVALTFERREVLDSSNIKPMNLIGVDRGENIPAVIALTDPEGCPLSRFKDSLGNPTHILRIGESYKEKQRTIQAKKEVEQRRAGGYSRKYASKAKNLADDMVRNTARDLLYYAVTQDAMLIFENLSRGFGRQGKRTFSAERQYTRMEDWLTAKLAYEGLPSKTYLSKTLAQYTSKTCSNCGFTITSADYDRVLEKLKKTATGWMTTINGKELKVEGQITYYNRYKRQNVVKDLSVELDRLSEESVNNDISSWTKGRSGEALSLLKKRFSHRPVQEKFVCLNCGFETHADEQAALNIARSWLFLRSQEYKKYQTNKTTGNTDKRAFVETWQSFYRKKLKEVWKPAV

SEQ ID NO: 39546 - protein, 978 aa, synthetic construct
  REGION 1..978: note = engineered CasX variant
QEIGRINKIRRRLVKDSNTKKAGKTGPMKTLLVRVMTPDLRERLENLRKKPENIPQPISNTSRANLNKLLTDYTEMKKAILHVYWEEFQKDPVGLMSRVAQPASKKIDQNKLKPEMDEKGNLTTAGFACSQCGQPLFVYKLEQVSEKGKAYTNYFGRCNVAEHEKLILLAQLKPEKDSDEAVTYSLGKFGQRALDFYSIHVTKESTHPVKPLAQIAGNRYASGPVGKALRDACMGTIASFLSKYQDIIIEHQKVVKGNQKRLESLRELAGKENLEYPSVTLPPQPHTKEGVDAYNEVIARVRMWVNLNLWQKLKLSRDDAKPLLRLKGFPSFPLVERQANEVDWWDMVCNVKKLINEKKEDGKVFWQNLAGYKRQEALRPYLSSEEDRKKGKKFARYQLGDLLLHLEKKHGEDWGKVYDEAWERIDKKVEGLSKHIKLEEERRSEDAQSKAALTDWLRAKASFVIEGLKEADKDEFCRCELKLQKWYGDLRGKPFAIEAENSILDISGFSKQYNCAFIWQKDGVKKLNLYLIINYFKGGKLRFKKIKPEAFEANRFYTVINKKSGEIVPMEVNFNFDDPNLIILPLAFGKRQGREFIWNDLLSLETGSLKLANGRVIEKTLYNRRTRQDEPALFVALTFERREVLDSSNIKPMNLIGVDRGENIPAVIALTDPEGCPLSRFKDSLGNPTHILRIGESYKEKQRTIQAKKEVEQRRAGGYSRKYASKAKNLADDMVRNTARDLLYYAVTQDAMLIFENLSRGFGRQGKRTFMAERQYTRMEDWLTAKLAYEGLPSKTYLSKTLAQYTSKTCSNCGFTITSADYDRVLEKLKKTATGWMTTINGKELKVEGQITYYNRYKRQNVVKDLSVELDRLSEESVNNDISSWDKGRSGEALSLLKKRFSHRPVQEKFVCLNCGFETHADEQAALNIARSWLFLRSQEYKKYQTNKTTGNTDKRAFVETWQSFYRKKLKEVWKPAV

SEQ ID NO: 39547 - protein, 978 aa, synthetic construct
  REGION 1..978: note = engineered CasX variant
QEIGRINKIRRRLVKDSNTKKAGKTGPMKTLLVRVMTPDLRERLENLRKKPENIPQPISNTSRANLNKLLTDYTEMKKAILHVYWEEFQVDPVGLMSRVAQPASKKIDQNKLKPEMDEKGNLTTAGFACSQCGQPLFVYKLEQVSEKGKAYTNYFGRCNVAEHEKLILLAQLKPEKDSDEAVTYSLGKFGQRALDFYSIHVTKESTHPVKPLAQIAGNRYASGPVGKALRDACMGTIASFLSKYQDIIIEHQKVVKGNQKRLESLRELAGKENLEYPSVTLPPQPHTKEGVDAYNEVIARVRMWVNLNLWQKLKLSRDDAKPLLRLKGFPSFPLVERQANEVDWWDMVCNVKKLINEKKEDGKVFWQNLAGYKRQEALRPYLSSEEDRKKGKKFARYQLGDLLLHLEKKHGEDWGKVYDEAWERIDKKVEGLSKHIKLEEERRSEDAQSKAALTDWLRAKASFVIEGLKEADKDEFCRCELKLQKWYGDLRGKPFAIEAENSILDISGFSKQYNCAFIWQKDGVKKLNLYLIINYFKGGKLRFKKIKPEAFEANRFYTVINKKSGEIVPMEVNFNFDDPNLIILPLAFGKRQGREFIWNDLLSLETGSLKLANGRVIEKTLYNRRTRQDEPALFVALTFERREVLDSSNIKPMNLIGVDRGENIPAVIALTDPEGCPLSRFKDSLGNPTHILRIGESYKEKQRTIQAKKEVEQRRAGGYSRKYASKAKNLADDMVRNTARDLLYYAVTQDAMLIFENLSRGFGRQGKRTFMAERQYTRMEDWLTAKLAYEGLPSKTYLSKTLAQYTSKTCSNCGFTITSADYDRVLEKLKKTATGWMTTINGKELKVEGQITYYNRYKRQNVVKDLSVELDRLSEESVNNDISSWTKGRSGEALSLLKKRFSHRPVQEKFVCLNCGFETHADEQAALNIARSWLFLRSQEYKKYQTNKTTGNTDKRAFVETWQSFYRKKLKEVWKPAV

SEQ ID NO: 39548 - protein, 978 aa, synthetic construct
  REGION 1..978: note = engineered CasX variant
QEIGRLNKIRRRLVKDSNTKKAGKTGPMKTLLVRVMTPDLRERLENLRKKPENIPQPISNTSRANLNKLLTDYTEMKKAILHVYWEEFQKDPVGLMSRVAQPASKKIDQNKLKPEMDEKGNLTTAGFACSQCGQPLFVYKLEQVSEKGKAYTNYFGRCNVAEHEKLILLAQLKPEKDSDEAVTYSLGKFGQRALDFYSIHVTKESTHPVKPLAQIAGNRYASGPVGKALRDACMGTIASFLSKYQDIIIEHQKVVKGNQKRLESLRELAGKENLEYPSVTLPPQPHTKEGVDAYNEVIARVRMWVNLNLWQKLKLSRDDAKPLLRLKGFPSFPLVERQANEVDWWDMVCNVKKLINEKKEDGKVFWQNLAGYKRQEALRPYLSSEEDRKKGKKFARYQLGDLLLHLEKKHGEDWGKVYDEAWERIDKKVEGLSKHIKLEEERRSEDAQSKAALTDWLRAKASFVIEGLKEADKDEFCRCELKLQKWYGDLRGKPFAIEAENSILDISGFSKQYNCAFIWQKDGVKKLNLYLIINYFKGGKLRFKKIKPEAFEANRFYTVINKKSGEIVPMEVNFNFDDPNLIILPLAFGKRQGREFIWNDLLSLETGSLKLANGRVIEKTLYNRRTRQDEPALFVALTFERREVLDSSNIKPMNLIGVDRGENIPAVIALTDPEGCPLSRFKDSLGNPTHILRIGESYKEKQRTIQAKKEVEQRRAGGYSRKYASKAKNLADDMVRNTARDLLYYAVTQDAMLIFENLSRGFGRQGKRTFMAERQYTRMEDWLTAKLAYEGLPSKTYLSKTLAQYTSKTCSNCGFTITSADYDRVLEKLKKTATGWMTTINGKELKVEGQITYYNRYKRQNVVKDLSVELDRLSEESVNNDISSWTKGRSGEALSLLKKRFSHRPVQEKFVCLNCGFETHADEQAALNIARSWLFLRSQEYKKYQTNKTTGNTDKRAFVETWQSFYRKKLKEVWKPAV

SEQ ID NO: 39549 - protein, 978 aa, synthetic construct
  REGION 1..978: note = engineered CasX variant
QEIGRINKIRRRLVKDSNTKKAGKTGPMKTLLVRVMTPDLRERLENLRKKPENIPQPISNTSRANLNKLLTDYTEMKKAILHVYWEEFQKDPVGLMSRVAQPASKKIDQNKLKPEMDEKGNLTTAGFACSQCGQPLFVYKLEQVSEKGKAYTNYVGRCNVAEHEKLILLAQLKPEKDSDEAVTYSLGKFGQRALDFYSIHVTKESTHPVKPLAQIAGNRYASGPVGKALRDACMGTIASFLSKYQDIIIEHQKVVKGNQKRLESLRELAGKENLEYPSVTLPPQPHTKEGVDAYNEVIARVRMWVNLNLWQKLKLSRDDAKPLLRLKGFPSFPLVERQANEVDWWDMVCNVKKLINEKKEDGKVFWQNLAGYKRQEALRPYLSSEEDRKKGKKFARYQLGDLLLHLEKKHGEDWGKVYDEAWERIDKKVEGLSKHIKLEEERRSEDAQSKAALTDWLRAKASFVIEGLKEADKDEFCRCELKLQKWYGDLRGKPFAIEAENSILDISGFSKQYNCAFIWQKDGVKKLNLYLIINYFKGGKLRFKKIKPEAFEANRFYTVINKKSGEIVPMEVNFNFDDPNLIILPLAFGKRQGREFIWNDLLSLETGSLKLANGRVIEKTLYNRRTRQDEPALFVALTFERREVLDSSNIKPMNLIGVDRGENIPAVIALTDPEGCPLSRFKDSLGNPTHILRIGESYKEKQRTIQAKKEVEQRRAGGYSRKYASKAKNLADDMVRNTARDLLYYAVTQDAMLIFENLSRGFGRQGKRTFMAERQYTRMEDWLTAKLAYEGLPSKTYLSKTLAQYTSKTCSNCGFTITSADYDRVLEKLKKTATGWMTTINGKELKVEGQITYYNRYKRQNVVKDLSVELDRLSEESVNNDISSWTKGRSGEALSLLKKRFSHRPVQEKFVCLNCGFETHADEQAALNIARSWLFLRSQEYKKYQTNKTTGNTDKRAFVETWQSFYRKKLKEVWKPAV

SEQ ID NO: 39550 - protein, 978 aa, synthetic construct
  REGION 1..978: note = engineered CasX variant
QEIGRINKIRRRLVKDSNTKKAGKTGPMKTLLVRVMTPDLRERLENLRKKPENIPQPISNTSRANLNKLLTDYTEMKKAILHVYWEEFQKDPVGLMSRVAQPASKKIDQNKLKPEMDEKGNLTTAGFACSQCGQPLFVYKLEQVSEKGKAYTNYFGRCNVAEHEKLILLAQLKPEKDSDEAVTYSLGKFGQRALDFYSIHVTKESTHPVKPLAQIAGNRYASGPVGKALRDACMGTIASFLSKYQDIIIEHQKVVKGNQKRLESLRELAGKENLEYPSVTLPPQPHTKEGVDAYNEVIARVRMWVNLNLWQKLKLSRDDAKPLLRLKGFPSFPLVERQANEVDWWDMVCNVKKLINEKKEDGKVFWQNLAGYKRQEALRPYLSSEEDRKKGKKFARYQLGDLLLHLEKKHGEDWGKVYDEAWERIDKKVEGLSKHIKLEEERRSEDAQSKAALTDWLRAKASFVIEGLKEADKDEFCRCELKLQKWYGDLRGKPFAIEAENSILDISGFSKQYNCAFIWQKDGVKKLNLYLIINYFKGGKLRFKKIKPEAFEANRFYTVINKKSGEIVPMEVNFNFDDPNLIILPLAFGKRQGREFIWNDLLSLETGSLKLANGRVIEKTLYNRRTRQDEPALFVALTFERREVLDSSNIKPMNLIGVDRGENIPAVIALTDPEGCPLSRFKDSLGNPTHILRIGESYKEKQRTIQAKKEVEQRRAGGYSRKYASKAKNLADDMVRNTARDLLYYAVTQDAMLIFENLSRGFGRQGKRTFMAERQYTRMEDWLTAKLAYEGLASKTYLSKTLAQYTSKTCSNCGFTITSADYDRVLEKLKKTATGWMTTINGKELKVEGQITYYNRYKRQNVVKDLSVELDRLSEESVNNDISSWTKGRSGEALSLLKKRFSHRPVQEKFVCLNCGFETHADEQAALNIARSWLFLRSQEYKKYQTNKTTGNTDKRAFVETWQSFYRKKLKEVWKPAV

SEQ ID NO: 39551 - protein, 978 aa, synthetic construct
  REGION 1..978: note = engineered CasX variant
QEIGRINKIRRRLVKDSNTKKAGKTGPMKTLLVRVMTPDLRERLENLRKKPENIPQPISNTSRANLNKLLTDYTEMKKAILHVYWEEFQKDPVGLMSRVAQPASKKIDQNKLKPEMDEKGNLTTAGFACSQCGQPLFVYKLEQVSEKGKAYTNYFGRCNVAEHEKLILLAQLKPEKDSDEAVTYSLGKFGQRALDFYSIHVTKESTHPVKPLAQIAGNRYASGPVGKALRDACMGTIASFLSKYQDIIIEHQKVVKGNQKRLESLRELAGKENLEYPSVTLPPQPHTKEGVDAYNEVIARVRMWVNLNLWQKLKLSRDDAKPLLRLKGFPSFPLVERQANEVDWWDMVCNVKKLINEKKEDGKVFWQNLAGYKRQEALRPYLSSEEDRKKGKKFARYQLGDLLLHLEKKHGEDWGKVYDEAWERIDKKVEGLSKHIKLEEERRSEDAQSKAALTDWLRAKASFVIEGLKEADKDEFCRCELKLQKWYGDLRGKPFAIEAENSILDISGFSKQYNCAFIWQKDGVKKLNLYLIINYFKGGKLRFKKIKPEAFEANRFYTVINKKSGEIVPMEVNFNFDDPNLIILPLAFGKRQGREFIWNDLLSLETGSLKLANGRVIEKTLYNRRTRQDEPALFVALTFERREVLDSSNIKPMNLIGVDRGENIPAVIALTDPEGCPLSRFKDSLGNPTHILRIGESYKEKQRTIQAKKEVEQRRAGGYSRKYASKAKNLADDMVRNTARDLLYYAVTQDAMLIFENLSRGFGRQGKRTFMAERQYTRMEDWLTAKLAYEGLPSKVYLSKTLAQYTSKTCSNCGFTITSADYDRVLEKLKKTATGWMTTINGKELKVEGQITYYNRYKRQNVVKDLSVELDRLSEESVNNDISSWTKGRSGEALSLLKKRFSHRPVQEKFVCLNCGFETHADEQAALNIARSWLFLRSQEYKKYQTNKTTGNTDKRAFVETWQSFYRKKLKEVWKPAV

SEQ ID NO: 39552 - protein, 979 aa, synthetic construct
  REGION 1..979: note = engineered CasX variant
QEIGRINKIRRRLVKDSNTKKAGKTGPMKTLLVRVMTPDLRERLENLRKKPENIPQPISNTSRANLNKLLTDYTEMKKAILHVYWEEFQKDPVGLMSRVAQPASKKIDQNKLKPEMDEKGNLTTAGFACSQCGQPLFVYKLEQVSEKGKAYTNYFGRCNVAEHEKLILLAQLKPEKDSDEAVTYSLGKFGQRALDFYSIHVTKESTHPVKPLAQIAGNRYASGPVGKALRDACMGTIASFLSKYQDIIIEHQKVVKGNQKRLESLRELAGKENLEYPSVTLPPQPHTKEGVDAYNEVIARVRMWVNLNLWQKLKLSRDDAKPLLRLKGFPSFPLVERQANEVDWWDMVCNVKKLINEKKEDGKVFWQNLAGYKRQEALRPYLSSEEDRKKGKKFARYQLGDLLLHLEKKHGEDWGKVYDEAWERIDKKVEGLSKHIKLEEERRSEDAQSKAALTDWLRAKASFVIEGLKEADKDEFCRCELKLQKWYGDLRGKPFAIEAENSILDISGFSKQYNCAFIWQKDGVKKLNLYLIINYFKGGKLRFKKIKPEAFEANRFYTVINKKSGEIVPMEVNFNFDDPNLIILPLAFGKRQGREFIWNDLLSLETGSLKLANGRVIEKTLYNRRTRQDEPALFVALTFERREVLDSSNIKPMNLIGVDRGENIPAVIALTDPEGCPLSRFKDSLGNPTHILRIGESYKEKQRTIQAKKEVEQRRAGGYSRKYASKAKNLADDMVRNTARDLLYYAVTQDAMLIFENLSRGFGRQGKRTFMAERQYTRMEDWLTAKLAYEGPLPSKTYLSKTLAQYTSKTCSNCGFTITSADYDRVLEKLKKTATGWMTTINGKELKVEGQITYYNRYKRQNVVKDLSVELDRLSEESVNNDISSWTKGRSGEALSLLKKRFSHRPVQEKFVCLNCGFETHADEQAALNIARSWLFLRSQEYKKYQTNKTTGNTDKRAFVETWQSFYRKKLKEVWKPAV

SEQ ID NO: 39553 - protein, 979 aa, synthetic construct
  REGION 1..979: note = engineered CasX variant
QEIGRINKIRRRLVKDSNTKKAGKTGPMKTLLVRVMTPDLRERLENLRKKPENIPQPISNTSRANLNKLLTDYTEMKKAILHVYWEEFQKDPVGLMSRVAQPASKKIDQNKLKPEMDEKGNLTTAGFACSQCGQPLFVYKLEQVSEKGKAYTNYFGRCNVAEHEKLILLAQLKPEKDSDEAVTYSLGKFGQRALDFYSIHVTKESTHPVKPLAQIAGNRYASGPVGKALRDACMGTIASFLSKYQDIIIEHQKVVKGNQKRLESLRELAGKENLEYPSVTLPPQPHTKEGVDAYNEVIARVRMWVNLNLWQKLKLSRDDAKPLLRLKGFPSFPLVERQANEVDWWDMVCNVKKLINEKKEDGKVFWQNLAGYKRQEALRPYLSSEEDVRKKGKKFARYQLGDLLLHLEKKHGEDWGKVYDEAWERIDKKVEGLSKHIKLEEERRSEDAQSKAALTDWLRAKASFVIEGLKEADKDEFCRCELKLQKWYGDLRGKPFAIEAENSILDISGFSKQYNCAFIWQKDGVKKLNLYLIINYFKGGKLRFKKIKPEAFEANRFYTVINKKSGEIVPMEVNFNFDDPNLIILPLAFGKRQGREFIWNDLLSLETGSLKLANGRVIEKTLYNRRTRQDEPALFVALTFERREVLDSSNIKPMNLIGVDRGENIPAVIALTDPEGCPLSRFKDSLGNPTHILRIGESYKEKQRTIQAKKEVEQRRAGGYSRKYASKAKNLADDMVRNTARDLLYYAVTQDAMLIFENLSRGFGRQGKRTFMAERQYTRMEDWLTAKLAYEGLPSKTYLSKTLAQYTSKTCSNCGFTITSADYDRVLEKLKKTATGWMTTINGKELKVEGQITYYNRYKRQNVVKDLSVELDRLSEESVNNDISSWTKGRSGEALSLLKKRFSHRPVQEKFVCLNCGFETHADEQAALNIARSWLFLRSQEYKKYQTNKTTGNTDKRAFVETWQSFYRKKLKEVWKPAV

SEQ ID NO: 39554 - protein, 978 aa, synthetic construct
  REGION 1..978: note = engineered CasX variant
QEIGRINKIRRRLVKDSNTKKAGKTGPMKTLLVRVMTPDLRERLENLRKKPENIPQPISNTSRANLNKLLTDYTEMKKAILHVYWEEFQKDPVGLMSRVAQPASKKIDQNKLKPEMDEKGNLTTAGFACSQCGQPLFVYKLEQVSEKGKAYTNYFGRCNVAEHEKLILLAQLKPEKDSDEAVTYSLGKFGQRALDFYSIHVTKESTHPVKPLAQIAGNRYASGPVGKALRDACMGTIASFLSKYQDIIIEHQKVVKGNQKRLESLRELAGKENLEYPSVTLPPQPHTKEGVDAYNEVIARVRMWVNLNLWQKLKLSRDDAKPLLRLKGFPSFPLVERQANEVDWWDMVCNVKKLINEKKEDGKVFWQNLAGYKRQEALRPYLSSEEDRKKGKKFARYQLGDLLLHLEKKHGEDWGKVYDEAWERIDKKVEGLSKHIKLEEERRSEDAQSKAALTDWLRAKASFVIEGLKEADKDEFCRCELKLQKWYGDLRGKPFAIEAENSILDISGFSKQYNCAFIWQKDGVKKLNLYLIINYFKGGKLRFKKIKPEAFEANRFYTVINKKSGEIVPMEVNFNFDDPNLIILPLAFGKRQGREFIWNDLLSLETGSLKLANGRVIEKTLYNRRTRQDEPALFVALTFERREVLDSSNIKPMNLIGVDRGENIPAVIALTDPEGCPLSRFKDSLGNPTHILRIGESYKEKQRTIQAKKEVEQRRAGGYSRKYASKAKNLADDMVRNTARDLLYYAVTQDAMLIFENLSRGFGRQGKRTFMAERQYTRMEDWLTAKLAYEGLPSKTYLSKTLAQYTSKTCSNCGFTITSADYDRMLEKLKKTATGWMTTINGKELKVEGQITYYNRYKRQNVVKDLSVELDRLSEESVNNDISSWTKGRSGEALSLLKKRFSHRPVQEKFVCLNCGFETHADEQAALNIARSWLFLRSQEYKKYQTNKTTGNTDKRAFVETWQSFYRKKLKEVWKPAV

SEQ ID NO: 39555 - protein, 978 aa, synthetic construct
  REGION 1..978: note = engineered CasX variant
QEIGRINKIRRRLVKDSNTKKAGKTGPMKTLLVRVMTPDLRERLENLRKKPENIPQPISNTSRANLNKLLTDYTEMKKAILHVYWEEFQKDPVGLMSRVAQPASKKIDQNKLKPEMDEKGNLTTAGFACSQCGQPLFVYKLEQVSEKGKAYTNYFGRCNVAEHEKLILLAQLKPEKDSDEAVTYSLGKFGQRALDFYSIHVTKESTHPVKPLAQIAGNRYASGPVGKALRDACMGTIASFLSKYQDIIIEHQKVVKGNQKRLESLRELAGKENLEYPSVTLPPQPHTKEGVDAYNEVIARVRMWVNLNLWQKLKLSRDDAKPLLRLKGFPSFPLVERQANEVDWWDMVCNVKKLINEKKEDGKVFWQNLAGYKRQEALRPYLSSEEDRKKGKKFARYQLGDLLLHLEKKHGEDWGKVYDEAWERIDKKVEGLSKHIKLEEERRSEDAQSKAALTDWLRAKASFVIEGLKEADKDEFCRCELKLQKWYGDLRGKPFAIEAENSILDISGFSKQYNCAFIWQKDGVKKLNLYLIINYFKGGKLRFKKIKPEAFEANRFYTVINKKSGEIVPMEVNFNFDDPNLIILPLAFGKRQGREFIWNDLLSLETGSLKLANGRVIEKTLYNRRTRQDEPALFVALTFERREVLDSSNIKPMNLIGVDRGENIPAVIALTDPEGCPLSRFKDSLGNPTHILRIGESYKEKQRTIQAKKEVEQRRAGGYSRKYASKAKNLADDMVRNTARDLLYYAVTQDAMLIFENLSRGFGRQGKRTFMAERQYTRMEDWLTAKLAYEGLPSKTYLSKTLAQYTSKTCSNCGFTITSADYDRVLEKLKKTATGWMTTINGKELKVEGQITYYNRYKRQNVVKDLSVELDRLSEESVNNDISSWTKGRQGEALSLLKKRFSHRPVQEKFVCLNCGFETHADEQAALNIARSWLFLRSQEYKKYQTNKTTGNTDKRAFVETWQSFYRKKLKEVWKPAV

SEQ ID NO: 39556 - protein, 978 aa, synthetic construct
  REGION 1..978: note = engineered CasX variant
QEIGRINKIRRRLVKDSNTKKAGKTGPMKTLLVRVMTPDLRERLENLRKKPENIPQPISNTSRANLNKLLTDYTEMKKAILHVYWEEFQKDPVGLMSRVAQPASKKIDQNKLKPEMDEKGNLTTAGFACSQCGQPLFVYKLEQVSEKGKAYTNYFGRCNVAEHEKLILLAQLKPEKDSDEAVTYSLGKFGQRALDFYSIHVTKESTHPVKPLAQIAGNRYASGPVGKALRDACMGTIASFLSKYQDIIIEHQKVVKGNQKRLESLRELAGKENLEYPSVTLPPQPHTKEGVDAYNEVIARVRMWVNLNLWQKLKLSRDDAKPLLRLKGFPSFPLVERQANEVDWWDMVCNVKKLINEKKEDGKVFWQNLAGYKRQEALRPYLSSEEDRKKGKKFARYQLGDLLLHLEKKHGEDWGKVYDEAWERIDKKVEGLSKHIKLEEERRSEDAQSKAALTDWLRAKASFVIEGLKEADKDEFCRCELKLQKWYGDLRGKPFAIEAENSILDISGFSKQYNCAFIWQKDGVKKLNLYLIINYFKGGKLRFKKIKPEAFEANRFYTVINKKSGEIVPMEVNFNFDDPNLIILPLAFGKRQGREFIWNDLLSLETGSLKLANGRVIEKTLYNRRTRQDEPALFVALTFERREVLDSSNIKPMNLIGVDRGENIPAVIALTDPEGCPLSRFKDSLGNPTHILRIGESYKEKQRTIQAKKEVEQRRAGGYSRKYASKAKNLADDMVRNTARDLLYYAVTQDAMLIFENLSRGFGRQGKRTFMAERQYTRMEDWLTAKLAYEGLPSKTYLSKTLAQYTSKTCSNCGFTITSADYDRVLEKLKKTATGWMTTINGKELKVEGQITYYNRYKRQNVVKDLSVELDRLSEESVNNDISSWTKGRSGEALSLLKKRFSHRPVQEKFVCLNCEFETHADEQAALNIARSWLFLRSQEYKKYQTNKTTGNTDKRAFVETWQSFYRKKLKEVWKPAV

SEQ ID NO: 39557 - protein, 979 aa, synthetic construct
  REGION 1..979: note = engineered CasX variant
QEIGRINKIRRRLVKDSNTKKAGKTGPMKTLLVRVMTPDLRERLENLRKKPENIPQPISNTSRANLNKLLTDYTEMKKAILHVYWEEFQKDPVGLMSRVAQPASKKIDQNKLKPEMDEKGNLTTAGFACSQCGQPLFVYKLEQVSEKGKAYTNYFGRCNVAEHEKLILLAQLKPEKDSDEAVTYSLGKFGQRALDFYSIHVTKESTHPVKPLAQIAGNRYASGPVGKALRDACMGTIASFLSKYQDIIIEHQKVVKGNQKRLESLRELAGKENLEYPSVTLPPQPHTKEGVDAYNEVIARVRMWVNLNLWQKLKLSRDDAKPLLRLKGFPSFPLVERQANEVDWWDMVCNVKKLINEKKEDGKVFWQNLAGYKRQEALRPYLSSEEDRKKGKKFARYQLGDLLLHLEKKHGEDWGKVYDEAWERIDKKVEGLSKHIKLEEERRSEDAQSKAALTDWLRAKASFVIEGLKEADKDEFCRCELKLQKWYGDLRGKPFAIEAENSILDISGFSKQYNCAFIWQKDGVKKLNLYLIINYFKGGKLRFKKIKPEAFEANRFYTVINKKSGEIVPMEVNFNFDDPNLIILPLAFGKRQGREFIWNDLLSLETGSLKLANGRVIEKTLYNRRTRQDEPALFVALTFERREVLDSSNIKPMNLIGVDRGENIPAVIALTDPEGCPLSRFKDSLGNPTHILRIGESYKEKQRTIQAKKEVEQRRAGGYSRKYASKAKNLADDMVRNTARDLLYYAVTQDAMLIFENLSRGFGRQGKRTFMAERQYTRMEDWLTAKLAYEGLPSKTYLSKTLAQYTSKTCSNCGFTITSADYDRVLEKLKKTATGWMTTINGKELKVEGQITYYNRYKRQNVVKDLSVELDRLSEESVNNDISSWTKGRSGEALSLLKKRFSHRPVQEKFVCLNCGFETHADEQAALNIARSWLFLRSQEYKKYQTNKTSTGNTDKRAFVETWQSFYRKKLKEVWKPAV

SEQ ID NO: 39558 - protein, 979 aa, synthetic construct
  REGION 1..979: note = engineered CasX variant
QEIGRINKIRRRLVKDSNTKKAGKTGPMKTLLVRVMTPDLRERLENLRKKPENIPQPISNTSRANLNKLLTDYTEMKKAILHVYWEEFQKDPVGLMSRVAQPASKKIDQNKLKPEMDEKGNLTTAGFACSQCGQPLFVYKLEQVSEKGKAYTNYFGRCNVAEHEKLILLAQLKPEKDSDEAVTYSLGKFGQRALDFYSIHVTKESTHPVKPLAQIAGNRYASGPVGKALRDACMGTIASFLSKYQDIIIEHQKVVKGNQKRLESLRELAGKENLEYPSVTLPPQPHTKEGVDAYNEVIARVRMWVNLNLWQKLKLSRDDAKPLLRLKGFPSFPLVERQANEVDWWDMVCNVKKLINEKKEDGKVFWQNLAGYKRQEALRPYLSSEEDRKKGKKFARYQLGDLLLHLEKKHGEDWGKVYDEAWERIDKKVEGLSKHIKLEEERRSEDAQSKAALTDWLRAKASFVIEGLKEADKDEFCRCELKLQKWYGDLRGKPFAIEAENSILDISGFSKQYNCAFIWQKDGVKKLNLYLIINYFKGGKLRFKKIKPEAFEANRFYTVINKKSGEIVPMEVNFNFDDPNLIILPLAFGKRQGREFIWNDLLSLETGSLKLANGRVIEKTLYNRRTRQDEPALFVALTFERREVLDSSNIKPMNLIGVDRGENIPAVIALTDPEGCPLSRFKDSLGNPTHILRIGESYKEKQRTIQAKKEVEQRRAGGYSRKYASKAKNLADDMVRNTARDLLYYAVTQDAMLIFENLSRGFGRQGKRTFMAERQYTRMEDWLTAKLAYEGLPSKTYLSKTLAQYTSKTCSNCGFTITSADYDRVLEKLKKTATGWMTTINGKELKVEGQITYYNRYKRQNVVKDLSVELDRLSEESVNNDISSWTKGRSGEALSLLKKRFSHRPVQEKFVCLNCGFETHADEQAALNIARSWLFLRSQEYKKYQTNKTTGKNTDKRAFVETWQSFYRKKLKEVWKPAV

SEQ ID NO: 39559 - protein, 978 aa, synthetic construct
  REGION 1..978: note = engineered CasX variant
QEIGRINKIRRRLVKDSNTKKAGKTGPMKTLLVRVMTPDLRERLENLRKKPENIPQPISNTSRANLNKLLTDYTEMKKAILHVYWEEFQKDPVGLMSRVAQPASKKIDQNKLKPEMDEKGNLTTAGFACSQCGQPLFVYKLEQVSEKGKAYTNYFGRCNVAEHEKLILLAQLKPEKDSDEAVTYSLGKFGQRALDFYSIHVTKESTHPVKPLAQIAGNRYASGPVGKALRDACMGTIASFLSKYQDIIIEHQKVVKGNQKRLESLRELAGKENLEYPSVTLPPQPHTKEGVDAYNEVIARVRMWVNLNLWQKLKLSRDDAKPLLRLKKFPSFPLVERQANEVDWWDMVCNVKKLINEKKEDGKVFWQNLAGYKRQEALRPYLSSEEDRKKGKKFARYQLGDLLLHLEKKHGEDWGKVYDEAWERIDKKVEGLSKHIKLEEERRSEDAQSKAALTDWLRAKASFVIEGLKEADKDEFCRCELKLQKWYGDLRGKPFAIEAENSILDISGFSKQYNCAFIWQKDGVKKLNLYLIINYFKGGKLRFKKIKPEAFEANRFYTVINKKSGEIVPMEVNFNFDDPNLIILPLAFGKRQGREFIWNDLLSLETGSLKLANGRVIEKTLYNRRTRQDEPALFVALTFERREVLDSSNIKPMNLIGVDRGENIPAVIALTDPEGCPLSRFKDSLGNPTHILRIGESYKEKQRTIQAKKEVEQRRAGGYSRKYASKAKNLADDMVRNTARDLLYYAVTQDAMLIFENLSRGFGRQGKRTFMAERQYTRMEDWLTAKLAYEGLPSKTYLSKTLAQYTSKTCSNCGFTITSADYDRVLEKLKKTATGWMTTINGKELKVEGQITYYNRYKRQNVVKDLSVELDRLSEESVNNDISSWTKGRSGEALSLLKKRFSHRPVQEKFVCLNCGFETHADEQAALNIARSWLFLRSQEYKKYQTNKTTGNTDKRAFVETWQSFYRKKLKEVWKPAV

SEQ ID NO: 39560 - protein, 978 aa, synthetic construct
  REGION 1..978: note = engineered CasX variant
QEIGRINKIRRRLVKDSNTKKAGKTGPMKTLLVRVMTPDLRERLENLRKKPENIPQPISNTSRANLNKLLTDYTEMKKAILHVYWEEFQKDPVGLMSRVAQPASKKIDQNKLKPEMDEKGNLTTAGFACSQCGQPLFVYKLEQVSEKGKAYTNYFGRCNVAEHEKLILLAQLKPEKDSDEAVTYSLGKFGQRALDFYSIHVTKESTHPVKPLAQIAGNRYASGPVGKALRDACMGTIASFLSKYQDIIIEHQKVVKGNQKRLESLRELAGKENLEYPSVTLPPQPHTKEGVDAYNEVIARVRMWVNLNLWQKLKLSRDDAKPLLRLKGFPSFPLVERQANEVDWWDMVCNVKKLINEKKEDGKVFWQNLAGYKRQEALRPYLSSEEDRKKGKKFARYQLGDLLLHLEKKHGEDWGKVYDEAWERIDKKVEGLSKHIKLEEERRSEDAQSKAALTDWLRAKASFVIEGLKEADKDEFCRCELKLQKWYGDLRGKPFAIEAENSILDISGFSKQYNCAFIWQKDGVKKLNLYLIINYFKGGKLRFKKIKPEAFEANRFYTVINKKSGEIVPMEVNFNFDDPNLIILPLAFGKRQGREFIWNDLLSLETGSLKLANGRVIEKTLYNRRTRQDEPALFVALTFERREVLDSSNIKPMNLIGVDRGENIPAVIALTDPEGCPLSRFKDSLGNPTHILRIGERYKEKQRTIQAKKEVEQRRAGGYSRKYASKAKNLADDMVRNTARDLLYYAVTQDAMLIFENLSRGFGRQGKRTFMAERQYTRMEDWLTAKLAYEGLPSKTYLSKTLAQYTSKTCSNCGFTITSADYDRVLEKLKKTATGWMTTINGKELKVEGQITYYNRYKRQNVVKDLSVELDRLSEESVNNDISSWTKGRSGEALSLLKKRFSHRPVQEKFVCLNCGFETHADEQAALNIARSWLFLRSQEYKKYQTNKTTGNTDKRAFVETWQSFYRKKLKEVWKPAV

SEQ ID NO: 39561 - protein, 978 aa, synthetic construct
  REGION 1..978: note = engineered CasX variant
QEIGRINKIRRRLVKDSNTKKAGKTGPMKTLLVRVMTPDLRERLENLRKKPENIPQPISNTSRANLNKLLTDYTEMKKAILHVYWEEFQKDPVGLMSRVAQPASKKIDQNKLKPEMDEKGNLTTAGFACSQCGQPLFVYKLEQVSEKGKAYTNYFGRCNVAEHEKLILLAQLKPEKDSDEAVTYSLGKFGQRALDFYSIHVTKESTHPVKPLAQIAGNRYASGPVGKALRDACMGTIASFLSKYQDIIIEHQKVVKGNQKRLESLRELAGKENLEYPSVTLPPQPHTKEGVDAYNEVIARVRMWVNLNLWQKLKLSRDDAKPLLRLKGFPSFPLVERQANEVDWWDMVCNVKKLINEKKEDGKVFWQNLAGYKRQEALRPYLSSEEDRKKGKKFARYQLGDLLLHLEKKHGEDWGKVYDEAWERIDKKVEGLSKHIKLEEERRSEDAQSKAALTDWLRAKASFVIEGLKEADKDEFCRCELKLQKWYGDLRGKPFAIEAENSILDISGFSKQYNCAFIWQKDGVKKLNLYLIINYFKGGKLRFKKIKPEAFEANRFYTVINKKSGEIVPMEVNFNFDDPNLIILPLAFGKRQGREFIWNDLLSLETGSLQLANGRVIEKTLYNRRTRQDEPALFVALTFERREVLDSSNIKPMNLIGVDRGENIPAVIALTDPEGCPLSRFKDSLGNPTHILRIGESYKEKQRTIQAKKEVEQRRAGGYSRKYASKAKNLADDMVRNTARDLLYYAVTQDAMLIFENLSRGFGRQGKRTFMAERQYTRMEDWLTAKLAYEGLPSKTYLSKTLAQYTSKTCSNCGFTITSADYDRVLEKLKKTATGWMTTINGKELKVEGQITYYNRYKRQNVVKDLSVELDRLSEESVNNDISSWTKGRSGEALSLLKKRFSHRPVQEKFVCLNCGFETHADEQAALNIARSWLFLRSQEYKKYQTNKTTGNTDKRAFVETWQSFYRKKLKEVWKPAV

SEQ ID NO: 39562 - protein, 979 aa, synthetic construct
  REGION 1..979: note = engineered CasX variant
QEIKGRANKIRRRLVKDSNTKKAGKTGPMKTLLVRVMTPDLRERLENLRKKPENIPQPISNTSRANLNKLLTDYTEMKKAILHVYWEEFQKDPVGLMSRVAQPASKKIDQNKLKPEMDEKGNLTTAGFACSQCGQPLFVYKLEQVSEKGKAYTNYFGRCNVAEHEKLILLAQLKPEKDSDEAVTYSLGKFGQRALDFYSIHVTKESTHPVKPLAQIAGNRYASGPVGKALRDACMGTIASFLSKYQDIIIEHQKVVKGNQKRLESLRELAGKENLEYPSVTLPPQPHTKEGVDAYNEVIARVRMWVNLNLWQKLKLSRDDAKPLLRLKGFPSFPLVERQANEVDWWDMVCNVKKLINEKKEDGKVFWQNLAGYKRQEALRPYLSSEEDRKKGKKFARYQLGDLLLHLEKKHGEDWGKVYDEAWERIDKKVEGLSKHIKLEEERRSEDAQSKAALTDWLRAKASFVIEGLKEADKDEFCRCELKLQKWYGDLRGKPFAIEAENSILDISGFSKQYNCAFIWQKDGVKKLNLYLIINYFKGGKLRFKKIKPEAFEANRFYTVINKKSGEIVPMEVNFNFDDPNLIILPLAFGKRQGREFIWNDLLSLETGSLKLANGRVIEKTLYNRRTRQDEPALFVALTFERREVLDSSNIKPMNLIGVDRGENIPAVIALTDPEGCPLSRFKDSLGNPTHILRIGESYKEKQRTIQAKKEVEQRRAGGYSRKYASKAKNLADDMVRNTARDLLYYAVTQDAMLIFENLSRGFGRQGKRTFMAERQYTRMEDWLTAKLAYEGLPSKTYLSKTLAQYTSKTCSNCGFTITSADYDRVLEKLKKTATGWMTTINGKELKVEGQITYYNRYKRQNVVKDLSVELDRLSEESVNNDISSWTKGRSGEALSLLKKRFSHRPVQEKFVCLNCGFETHADEQAALNIARSWLFLRSQEYKKYQTNKTTGNTDKRAFVETWQSFYRKKLKEVWKPAV

SEQ ID NO: 39563 - protein, 979 aa, synthetic construct
  REGION 1..979: note = engineered CasX variant
QEIKGRISKIRRRLVKDSNTKKAGKTGPMKTLLVRVMTPDLRERLENLRKKPENIPQPISNTSRANLNKLLTDYTEMKKAILHVYWEEFQKDPVGLMSRVAQPASKKIDQNKLKPEMDEKGNLTTAGFACSQCGQPLFVYKLEQVSEKGKAYTNYFGRCNVAEHEKLILLAQLKPEKDSDEAVTYSLGKFGQRALDFYSIHVTKESTHPVKPLAQIAGNRYASGPVGKALRDACMGTIASFLSKYQDIIIEHQKVVKGNQKRLESLRELAGKENLEYPSVTLPPQPHTKEGVDAYNEVIARVRMWVNLNLWQKLKLSRDDAKPLLRLKGFPSFPLVERQANEVDWWDMVCNVKKLINEKKEDGKVFWQNLAGYKRQEALRPYLSSEEDRKKGKKFARYQLGDLLLHLEKKHGEDWGKVYDEAWERIDKKVEGLSKHIKLEEERRSEDAQSKAALTDWLRAKASFVIEGLKEADKDEFCRCELKLQKWYGDLRGKPFAIEAENSILDISGFSKQYNCAFIWQKDGVKKLNLYLIINYFKGGKLRFKKIKPEAFEANRFYTVINKKSGEIVPMEVNFNFDDPNLIILPLAFGKRQGREFIWNDLLSLETGSLKLANGRVIEKTLYNRRTRQDEPALFVALTFERREVLDSSNIKPMNLIGVDRGENIPAVIALTDPEGCPLSRFKDSLGNPTHILRIGESYKEKQRTIQAKKEVEQRRAGGYSRKYASKAKNLADDMVRNTARDLLYYAVTQDAMLIFENLSRGFGRQGKRTFMAERQYTRMEDWLTAKLAYEGLPSKTYLSKTLAQYTSKTCSNCGFTITSADYDRVLEKLKKTATGWMTTINGKELKVEGQITYYNRYKRQNVVKDLSVELDRLSEESVNNDISSWTKGRSGEALSLLKKRFSHRPVQEKFVCLNCGFETHADEQAALNIARSWLFLRSQEYKKYQTNKTTGNTDKRAFVETWQSFYRKKLKEVWKPAV

SEQ ID NO: 39564 - protein, 979 aa, synthetic construct
  REGION 1..979: note = engineered CasX variant
QEIKGRINGIRRRLVKDSNTKKAGKTGPMKTLLVRVMTPDLRERLENLRKKPENIPQPISNTSRANLNKLLTDYTEMKKAILHVYWEEFQKDPVGLMSRVAQPASKKIDQNKLKPEMDEKGNLTTAGFACSQCGQPLFVYKLEQVSEKGKAYTNYFGRCNVAEHEKLILLAQLKPEKDSDEAVTYSLGKFGQRALDFYSIHVTKESTHPVKPLAQIAGNRYASGPVGKALRDACMGTIASFLSKYQDIIIEHQKVVKGNQKRLESLRELAGKENLEYPSVTLPPQPHTKEGVDAYNEVIARVRMWVNLNLWQKLKLSRDDAKPLLRLKGFPSFPLVERQANEVDWWDMVCNVKKLINEKKEDGKVFWQNLAGYKRQEALRPYLSSEEDRKKGKKFARYQLGDLLLHLEKKHGEDWGKVYDEAWERIDKKVEGLSKHIKLEEERRSEDAQSKAALTDWLRAKASFVIEGLKEADKDEFCRCELKLQKWYGDLRGKPFAIEAENSILDISGFSKQYNCAFIWQKDGVKKLNLYLIINYFKGGKLRFKKIKPEAFEANRFYTVINKKSGEIVPMEVNFNFDDPNLIILPLAFGKRQGREFIWNDLLSLETGSLKLANGRVIEKTLYNRRTRQDEPALFVALTFERREVLDSSNIKPMNLIGVDRGENIPAVIALTDPEGCPLSRFKDSLGNPTHILRIGESYKEKQRTIQAKKEVEQRRAGGYSRKYASKAKNLADDMVRNTARDLLYYAVTQDAMLIFENLSRGFGRQGKRTFMAERQYTRMEDWLTAKLAYEGLPSKTYLSKTLAQYTSKTCSNCGFTITSADYDRVLEKLKKTATGWMTTINGKELKVEGQITYYNRYKRQNVVKDLSVELDRLSEESVNNDISSWTKGRSGEALSLLKKRFSHRPVQEKFVCLNCGFETHADEQAALNIARSWLFLRSQEYKKYQTNKTTGNTDKRAFVETWQSFYRKKLKEVWKPAV

SEQ ID NO: 39565 - protein, 979 aa, synthetic construct
  REGION 1..979: note = engineered CasX variant
QEIKGRINKIRRRLVKDSNTKKAGKTGPMKTLLVPVMTPDLRERLENLRKKPENIPQPISNTSRANLNKLLTDYTEMKKAILHVYWEEFQKDPVGLMSRVAQPASKKIDQNKLKPEMDEKGNLTTAGFACSQCGQPLFVYKLEQVSEKGKAYTNYFGRCNVAEHEKLILLAQLKPEKDSDEAVTYSLGKFGQRALDFYSIHVTKESTHPVKPLAQIAGNRYASGPVGKALRDACMGTIASFLSKYQDIIIEHQKVVKGNQKRLESLRELAGKENLEYPSVTLPPQPHTKEGVDAYNEVIARVRMWVNLNLWQKLKLSRDDAKPLLRLKGFPSFPLVERQANEVDWWDMVCNVKKLINEKKEDGKVFWQNLAGYKRQEALRPYLSSEEDRKKGKKFARYQLGDLLLHLEKKHGEDWGKVYDEAWERIDKKVEGLSKHIKLEEERRSEDAQSKAALTDWLRAKASFVIEGLKEADKDEFCRCELKLQKWYGDLRGKPFAIEAENSILDISGFSKQYNCAFIWQKDGVKKLNLYLIINYFKGGKLRFKKIKPEAFEANRFYTVINKKSGEIVPMEVNFNFDDPNLIILPLAFGKRQGREFIWNDLLSLETGSLKLANGRVIEKTLYNRRTRQDEPALFVALTFERREVLDSSNIKPMNLIGVDRGENIPAVIALTDPEGCPLSRFKDSLGNPTHILRIGESYKEKQRTIQAKKEVEQRRAGGYSRKYASKAKNLADDMVRNTARDLLYYAVTQDAMLIFENLSRGFGRQGKRTFMAERQYTRMEDWLTAKLAYEGLPSKTYLSKTLAQYTSKTCSNCGFTITSADYDRVLEKLKKTATGWMTTINGKELKVEGQITYYNRYKRQNVVKDLSVELDRLSEESVNNDISSWTKGRSGEALSLLKKRFSHRPVQEKFVCLNCGFETHADEQAALNIARSWLFLRSQEYKKYQTNKTTGNTDKRAFVETWQSFYRKKLKEVWKPAV

SEQ ID NO: 39566 - protein, 979 aa, synthetic construct
  REGION 1..979: note = engineered CasX variant
QEIKGRINKIRRRLVKDSNTKKAGKTGPMKTLLVRVMTPDLRERLENLRKKPPNIPQPISNTSRANLNKLLTDYTEMKKAILHVYWEEFQKDPVGLMSRVAQPASKKIDQNKLKPEMDEKGNLTTAGFACSQCGQPLFVYKLEQVSEKGKAYTNYFGRCNVAEHEKLILLAQLKPEKDSDEAVTYSLGKFGQRALDFYSIHVTKESTHPVKPLAQIAGNRYASGPVGKALRDACMGTIASFLSKYQDIIIEHQKVVKGNQKRLESLRELAGKENLEYPSVTLPPQPHTKEGVDAYNEVIARVRMWVNLNLWQKLKLSRDDAKPLLRLKGFPSFPLVERQANEVDWWDMVCNVKKLINEKKEDGKVFWQNLAGYKRQEALRPYLSSEEDRKKGKKFARYQLGDLLLHLEKKHGEDWGKVYDEAWERIDKKVEGLSKHIKLEEERRSEDAQSKAALTDWLRAKASFVIEGLKEADKDEFCRCELKLQKWYGDLRGKPFAIEAENSILDISGFSKQYNCAFIWQKDGVKKLNLYLIINYFKGGKLRFKKIKPEAFEANRFYTVINKKSGEIVPMEVNFNFDDPNLIILPLAFGKRQGREFIWNDLLSLETGSLKLANGRVIEKTLYNRRTRQDEPALFVALTFERREVLDSSNIKPMNLIGVDRGENIPAVIALTDPEGCPLSRFKDSLGNPTHILRIGESYKEKQRTIQAKKEVEQRRAGGYSRKYASKAKNLADDMVRNTARDLLYYAVTQDAMLIFENLSRGFGRQGKRTFMAERQYTRMEDWLTAKLAYEGLPSKTYLSKTLAQYTSKTCSNCGFTITSADYDRVLEKLKKTATGWMTTINGKELKVEGQITYYNRYKRQNVVKDLSVELDRLSEESVNNDISSWTKGRSGEALSLLKKRFSHRPVQEKFVCLNCGFETHADEQAALNIARSWLFLRSQEYKKYQTNKTTGNTDKRAFVETWQSFYRKKLKEVWKPAV

SEQ ID NO: 39567 - protein, 979 aa, synthetic construct
  REGION 1..979: note = engineered CasX variant
QEIKGRINKIRRRLVKDSNTKKAGKTGPMKTLLVRVMTPDLRERLENLRKKPENIPQPISNTSQANLNKLLTDYTEMKKAILHVYWEEFQKDPVGLMSRVAQPASKKIDQNKLKPEMDEKGNLTTAGFACSQCGQPLFVYKLEQVSEKGKAYTNYFGRCNVAEHEKLILLAQLKPEKDSDEAVTYSLGKFGQRALDFYSIHVTKESTHPVKPLAQIAGNRYASGPVGKALRDACMGTIASFLSKYQDIIIEHQKVVKGNQKRLESLRELAGKENLEYPSVTLPPQPHTKEGVDAYNEVIARVRMWVNLNLWQKLKLSRDDAKPLLRLKGFPSFPLVERQANEVDWWDMVCNVKKLINEKKEDGKVFWQNLAGYKRQEALRPYLSSEEDRKKGKKFARYQLGDLLLHLEKKHGEDWGKVYDEAWERIDKKVEGLSKHIKLEEERRSEDAQSKAALTDWLRAKASFVIEGLKEADKDEFCRCELKLQKWYGDLRGKPFAIEAENSILDISGFSKQYNCAFIWQKDGVKKLNLYLIINYFKGGKLRFKKIKPEAFEANRFYTVINKKSGEIVPMEVNFNFDDPNLIILPLAFGKRQGREFIWNDLLSLETGSLKLANGRVIEKTLYNRRTRQDEPALFVALTFERREVLDSSNIKPMNLIGVDRGENIPAVIALTDPEGCPLSRFKDSLGNPTHILRIGESYKEKQRTIQAKKEVEQRRAGGYSRKYASKAKNLADDMVRNTARDLLYYAVTQDAMLIFENLSRGFGRQGKRTFMAERQYTRMEDWLTAKLAYEGLPSKTYLSKTLAQYTSKTCSNCGFTITSADYDRVLEKLKKTATGWMTTINGKELKVEGQITYYNRYKRQNVVKDLSVELDRLSEESVNNDISSWTKGRSGEALSLLKKRFSHRPVQEKFVCLNCGFETHADEQAALNIARSWLFLRSQEYKKYQTNKTTGNTDKRAFVETWQSFYRKKLKEVWKPAV

SEQ ID NO: 39568 - protein, 979 aa, synthetic construct
  REGION 1..979: note = engineered CasX variant
QEIKGRINKIRRRLVKDSNTKKAGKTGPMKTLLVRVMTPDLRERLENLRKKPENIPQPISNTSRANLNKLLTDYTEMKKAILHVYDEEFQKDPVGLMSRVAQPASKKIDQNKLKPEMDEKGNLTTAGFACSQCGQPLFVYKLEQVSEKGKAYTNYFGRCNVAEHEKLILLAQLKPEKDSDEAVTYSLGKFGQRALDFYSIHVTKESTHPVKPLAQIAGNRYASGPVGKALRDACMGTIASFLSKYQDIIIEHQKVVKGNQKRLESLRELAGKENLEYPSVTLPPQPHTKEGVDAYNEVIARVRMWVNLNLWQKLKLSRDDAKPLLRLKGFPSFPLVERQANEVDWWDMVCNVKKLINEKKEDGKVFWQNLAGYKRQEALRPYLSSEEDRKKGKKFARYQLGDLLLHLEKKHGEDWGKVYDEAWERIDKKVEGLSKHIKLEEERRSEDAQSKAALTDWLRAKASFVIEGLKEADKDEFCRCELKLQKWYGDLRGKPFAIEAENSILDISGFSKQYNCAFIWQKDGVKKLNLYLIINYFKGGKLRFKKIKPEAFEANRFYTVINKKSGEIVPMEVNFNFDDPNLIILPLAFGKRQGREFIWNDLLSLETGSLKLANGRVIEKTLYNRRTRQDEPALFVALTFERREVLDSSNIKPMNLIGVDRGENIPAVIALTDPEGCPLSRFKDSLGNPTHILRIGESYKEKQRTIQAKKEVEQRRAGGYSRKYASKAKNLADDMVRNTARDLLYYAVTQDAMLIFENLSRGFGRQGKRTFMAERQYTRMEDWLTAKLAYEGLPSKTYLSKTLAQYTSKTCSNCGFTITSADYDRVLEKLKKTATGWMTTINGKELKVEGQITYYNRYKRQNVVKDLSVELDRLSEESVNNDISSWTKGRSGEALSLLKKRFSHRPVQEKFVCLNCGFETHADEQAALNIARSWLFLRSQEYKKYQTNKTTGNTDKRAFVETWQSFYRKKLKEVWKPAV

SEQ ID NO: 39569 - protein, 979 aa, synthetic construct
  REGION 1..979: note = engineered CasX variant
QEIKGRINKIRRRLVKDSNTKKAGKTGPMKTLLVRVMTPDLRERLENLRKKPENIPQPISNTSRANLNKLLTDYTEMKKAILHVYWEEFQKDPVGLMSRVAQPASKKIDQNKLKPEMDEKGNLTTAGFACSQCGQPLFVYKLEQVSEKGKAYTNYFGRCNVAEHEKLIKLAQLKPEKDSDEAVTYSLGKFGQRALDFYSIHVTKESTHPVKPLAQIAGNRYASGPVGKALRDACMGTIASFLSKYQDIIIEHQKVVKGNQKRLESLRELAGKENLEYPSVTLPPQPHTKEGVDAYNEVIARVRMWVNLNLWQKLKLSRDDAKPLLRLKGFPSFPLVERQANEVDWWDMVCNVKKLINEKKEDGKVFWQNLAGYKRQEALRPYLSSEEDRKKGKKFARYQLGDLLLHLEKKHGEDWGKVYDEAWERIDKKVEGLSKHIKLEEERRSEDAQSKAALTDWLRAKASFVIEGLKEADKDEFCRCELKLQKWYGDLRGKPFAIEAENSILDISGFSKQYNCAFIWQKDGVKKLNLYLIINYFKGGKLRFKKIKPEAFEANRFYTVINKKSGEIVPMEVNFNFDDPNLIILPLAFGKRQGREFIWNDLLSLETGSLKLANGRVIEKTLYNRRTRQDEPALFVALTFERREVLDSSNIKPMNLIGVDRGENIPAVIALTDPEGCPLSRFKDSLGNPTHILRIGESYKEKQRTIQAKKEVEQRRAGGYSRKYASKAKNLADDMVRNTARDLLYYAVTQDAMLIFENLSRGFGRQGKRTFMAERQYTRMEDWLTAKLAYEGLPSKTYLSKTLAQYTSKTCSNCGFTITSADYDRVLEKLKKTATGWMTTINGKELKVEGQITYYNRYKRQNVVKDLSVELDRLSEESVNNDISSWTKGRSGEALSLLKKRFSHRPVQEKFVCLNCGFETHADEQAALNIARSWLFLRSQEYKKYQTNKTTGNTDKRAFVETWQSFYRKKLKEVWKPAV

SEQ ID NO: 39570 - protein, 979 aa, synthetic construct
  REGION 1..979: note = engineered CasX variant
QEIKGRINKIRRRLVKDSNTKKAGKTGPMKTLLVRVMTPDLRERLENLRKKPENIPQPISNTSRANLNKLLTDYTEMKKAILHVYWEEFQKDPVGLMSRVAQPASKKIDQNKLKPEMDEKGNLTTAGFACSQCGQPLFVYKLEQVSEKGKAYTNYFGRCNVAEHEKLILLYQLKPEKDSDEAVTYSLGKFGQRALDFYSIHVTKESTHPVKPLAQIAGNRYASGPVGKALRDACMGTIASFLSKYQDIIIEHQKVVKGNQKRLESLRELAGKENLEYPSVTLPPQPHTKEGVDAYNEVIARVRMWVNLNLWQKLKLSRDDAKPLLRLKGFPSFPLVERQANEVDWWDMVCNVKKLINEKKEDGKVFWQNLAGYKRQEALRPYLSSEEDRKKGKKFARYQLGDLLLHLEKKHGEDWGKVYDEAWERIDKKVEGLSKHIKLEEERRSEDAQSKAALTDWLRAKASFVIEGLKEADKDEFCRCELKLQKWYGDLRGKPFAIEAENSILDISGFSKQYNCAFIWQKDGVKKLNLYLIINYFKGGKLRFKKIKPEAFEANRFYTVINKKSGEIVPMEVNFNFDDPNLIILPLAFGKRQGREFIWNDLLSLETGSLKLANGRVIEKTLYNRRTRQDEPALFVALTFERREVLDSSNIKPMNLIGVDRGENIPAVIALTDPEGCPLSRFKDSLGNPTHILRIGESYKEKQRTIQAKKEVEQRRAGGYSRKYASKAKNLADDMVRNTARDLLYYAVTQDAMLIFENLSRGFGRQGKRTFMAERQYTRMEDWLTAKLAYEGLPSKTYLSKTLAQYTSKTCSNCGFTITSADYDRVLEKLKKTATGWMTTINGKELKVEGQITYYNRYKRQNVVKDLSVELDRLSEESVNNDISSWTKGRSGEALSLLKKRFSHRPVQEKFVCLNCGFETHADEQAALNIARSWLFLRSQEYKKYQTNKTTGNTDKRAFVETWQSFYRKKLKEVWKPAV

SEQ ID NO: 39571 - protein, 979 aa, synthetic construct
  REGION 1..979: note = engineered CasX variant
QEIKGRINKIRRRLVKDSNTKKAGKTGPMKTLLVRVMTPDLRERLENLRKKPENIPQPISNTSRANLNKLLTDYTEMKKAILHVYWEEFQKDPVGLMSRVAQPASKKIDQNKLKPEMDEKGNLTTAGFACSQCGQPLFVYKLEQVSEKGKAYTNYFGRCNVAEHEKLILLSQLKPEKDSDEAVTYSLGKFGQRALDFYSIHVTKESTHPVKPLAQIAGNRYASGPVGKALRDACMGTIASFLSKYQDIIIEHQKVVKGNQKRLESLRELAGKENLEYPSVTLPPQPHTKEGVDAYNEVIARVRMWVNLNLWQKLKLSRDDAKPLLRLKGFPSFPLVERQANEVDWWDMVCNVKKLINEKKEDGKVFWQNLAGYKRQEALRPYLSSEEDRKKGKKFARYQLGDLLLHLEKKHGEDWGKVYDEAWERIDKKVEGLSKHIKLEEERRSEDAQSKAALTDWLRAKASFVIEGLKEADKDEFCRCELKLQKWYGDLRGKPFAIEAENSILDISGFSKQYNCAFIWQKDGVKKLNLYLIINYFKGGKLRFKKIKPEAFEANRFYTVINKKSGEIVPMEVNFNFDDPNLIILPLAFGKRQGREFIWNDLLSLETGSLKLANGRVIEKTLYNRRTRQDEPALFVALTFERREVLDSSNIKPMNLIGVDRGENIPAVIALTDPEGCPLSRFKDSLGNPTHILRIGESYKEKQRTIQAKKEVEQRRAGGYSRKYASKAKNLADDMVRNTARDLLYYAVTQDAMLIFENLSRGFGRQGKRTFMAERQYTRMEDWLTAKLAYEGLPSKTYLSKTLAQYTSKTCSNCGFTITSADYDRVLEKLKKTATGWMTTINGKELKVEGQITYYNRYKRQNVVKDLSVELDRLSEESVNNDISSWTKGRSGEALSLLKKRFSHRPVQEKFVCLNCGFETHADEQAALNIARSWLFLRSQEYKKYQTNKTTGNTDKRAFVETWQSFYRKKLKEVWKPAV

SEQ ID NO: 39572 - protein, 978 aa, synthetic construct
  REGION 1..978: note = engineered CasX variant
QEIKGRINKIRRRLVKDSNTKKAGKTGPMKTLLVRVMTPDLRERLENLRKKPENIPQPISNTSRANLNKLLTDYTEMKKAILHVYWEEFQKDPVGLMSRVAQPASKKIDQNKLKPEMDEKGNLTTAGFACSQCGQPLFVYKLEQVSEKGKAYTNYFGRCNVAEHEKLILLAQLKPEKDSDEAVTYSLGKFGQRALDFYSIHVTKESTHPVKPLAQIAGNRYASPVGKALRDACMGTIASFLSKYQDIIIEHQKVVKGNQKRLESLRELAGKENLEYPSVTLPPQPHTKEGVDAYNEVIARVRMWVNLNLWQKLKLSRDDAKPLLRLKGFPSFPLVERQANEVDWWDMVCNVKKLINEKKEDGKVFWQNLAGYKRQEALRPYLSSEEDRKKGKKFARYQLGDLLLHLEKKHGEDWGKVYDEAWERIDKKVEGLSKHIKLEEERRSEDAQSKAALTDWLRAKASFVIEGLKEADKDEFCRCELKLQKWYGDLRGKPFAIEAENSILDISGFSKQYNCAFIWQKDGVKKLNLYLIINYFKGGKLRFKKIKPEAFEANRFYTVINKKSGEIVPMEVNFNFDDPNLIILPLAFGKRQGREFIWNDLLSLETGSLKLANGRVIEKTLYNRRTRQDEPALFVALTFERREVLDSSNIKPMNLIGVDRGENIPAVIALTDPEGCPLSRFKDSLGNPTHILRIGESYKEKQRTIQAKKEVEQRRAGGYSRKYASKAKNLADDMVRNTARDLLYYAVTQDAMLIFENLSRGFGRQGKRTFMAERQYTRMEDWLTAKLAYEGLPSKTYLSKTLAQYTSKTCSNCGFTITSADYDRVLEKLKKTATGWMTTINGKELKVEGQITYYNRYKRQNVVKDLSVELDRLSEESVNNDISSWTKGRSGEALSLLKKRFSHRPVQEKFVCLNCGFETHADEQAALNIARSWLFLRSQEYKKYQTNKTTGNTDKRAFVETWQSFYRKKLKEVWKPAV

SEQ ID NO: 39573 - protein, 979 aa, synthetic construct
  REGION 1..979: note = engineered CasX variant
QEIKGRINKIRRRLVKDSNTKKAGKTGPMKTLLVRVMTPDLRERLENLRKKPENIPQPISNTSRANLNKLLTDYTEMKKAILHVYWEEFQKDPVGLMSRVAQPASKKIDQNKLKPEMDEKGNLTTAGFACSQCGQPLFVYKLEQVSEKGKAYTNYFGRCNVAEHEKLILLAQLKPEKDSDEAVTYSLGKFGQRALDFYSIHVTKESTHPVKPLAQIAGNRYASGPVGKALRDACMGTIASFLSKYQDIIIEHQKVVKGNQKRLESLRELAGKENLEYPSVTLPPQPHTSEGVDAYNEVIARVRMWVNLNLWQKLKLSRDDAKPLLRLKGFPSFPLVERQANEVDWWDMVCNVKKLINEKKEDGKVFWQNLAGYKRQEALRPYLSSEEDRKKGKKFARYQLGDLLLHLEKKHGEDWGKVYDEAWERIDKKVEGLSKHIKLEEERRSEDAQSKAALTDWLRAKASFVIEGLKEADKDEFCRCELKLQKWYGDLRGKPFAIEAENSILDISGFSKQYNCAFIWQKDGVKKLNLYLIINYFKGGKLRFKKIKPEAFEANRFYTVINKKSGEIVPMEVNFNFDDPNLIILPLAFGKRQGREFIWNDLLSLETGSLKLANGRVIEKTLYNRRTRQDEPALFVALTFERREVLDSSNIKPMNLIGVDRGENIPAVIALTDPEGCPLSRFKDSLGNPTHILRIGESYKEKQRTIQAKKEVEQRRAGGYSRKYASKAKNLADDMVRNTARDLLYYAVTQDAMLIFENLSRGFGRQGKRTFMAERQYTRMEDWLTAKLAYEGLPSKTYLSKTLAQYTSKTCSNCGFTITSADYDRVLEKLKKTATGWMTTINGKELKVEGQITYYNRYKRQNVVKDLSVELDRLSEESVNNDISSWTKGRSGEALSLLKKRFSHRPVQEKFVCLNCGFETHADEQAALNIARSWLFLRSQEYKKYQTNKTTGNTDKRAFVETWQSFYRKKLKEVWKPAV

SEQ ID NO: 39574 - protein, 979 aa, synthetic construct
  REGION 1..979: note = engineered CasX variant
QEIKGRINKIRRRLVKDSNTKKAGKTGPMKTLLVRVMTPDLRERLENLRKKPENIPQPISNTSRANLNKLLTDYTEMKKAILHVYWEEFQKDPVGLMSRVAQPASKKIDQNKLKPEMDEKGNLTTAGFACSQCGQPLFVYKLEQVSEKGKAYTNYFGRCNVAEHEKLILLAQLKPEKDSDEAVTYSLGKFGQRALDFYSIHVTKESTHPVKPLAQIAGNRYASGPVGKALRDACMGTIASFLSKYQDIIIEHQKVVKGNQKRLESLRELAGKENLEYPSVTLPPQPHTKEGLDAYNEVIARVRMWVNLNLWQKLKLSRDDAKPLLRLKGFPSFPLVERQANEVDWWDMVCNVKKLINEKKEDGKVFWQNLAGYKRQEALRPYLSSEEDRKKGKKFARYQLGDLLLHLEKKHGEDWGKVYDEAWERIDKKVEGLSKHIKLEEERRSEDAQSKAALTDWLRAKASFVIEGLKEADKDEFCRCELKLQKWYGDLRGKPFAIEAENSILDISGFSKQYNCAFIWQKDGVKKLNLYLIINYFKGGKLRFKKIKPEAFEANRFYTVINKKSGEIVPMEVNFNFDDPNLIILPLAFGKRQGREFIWNDLLSLETGSLKLANGRVIEKTLYNRRTRQDEPALFVALTFERREVLDSSNIKPMNLIGVDRGENIPAVIALTDPEGCPLSRFKDSLGNPTHILRIGESYKEKQRTIQAKKEVEQRRAGGYSRKYASKAKNLADDMVRNTARDLLYYAVTQDAMLIFENLSRGFGRQGKRTFMAERQYTRMEDWLTAKLAYEGLPSKTYLSKTLAQYTSKTCSNCGFTITSADYDRVLEKLKKTATGWMTTINGKELKVEGQITYYNRYKRQNVVKDLSVELDRLSEESVNNDISSWTKGRSGEALSLLKKRFSHRPVQEKFVCLNCGFETHADEQAALNIARSWLFLRSQEYKKYQTNKTTGNTDKRAFVETWQSFYRKKLKEVWKPAV

SEQ ID NO: 39575 - protein, 979 aa, synthetic construct
  REGION 1..979: note = engineered CasX variant
QEIKGRINKIRRRLVKDSNTKKAGKTGPMKTLLVRVMTPDLRERLENLRKKPENIPQPISNTSRANLNKLLTDYTEMKKAILHVYWEEFQKDPVGLMSRVAQPASKKIDQNKLKPEMDEKGNLTTAGFACSQCGQPLFVYKLEQVSEKGKAYTNYFGRCNVAEHEKLILLAQLKPEKDSDEAVTYSLGKFGQRALDFYSIHVTKESTHPVKPLAQIAGNRYASGPVGKALRDACMGTIASFLSKYQDIIIEHQKVVKGNQKRLESLRELAGKENLEYPSVTLPPQPHTKEGVDAYNEVIARVRTWVNLNLWQKLKLSRDDAKPLLRLKGFPSFPLVERQANEVDWWDMVCNVKKLINEKKEDGKVFWQNLAGYKRQEALRPYLSSEEDRKKGKKFARYQLGDLLLHLEKKHGEDWGKVYDEAWERIDKKVEGLSKHIKLEEERRSEDAQSKAALTDWLRAKASFVIEGLKEADKDEFCRCELKLQKWYGDLRGKPFAIEAENSILDISGFSKQYNCAFIWQKDGVKKLNLYLIINYFKGGKLRFKKIKPEAFEANRFYTVINKKSGEIVPMEVNFNFDDPNLIILPLAFGKRQGREFIWNDLLSLETGSLKLANGRVIEKTLYNRRTRQDEPALFVALTFERREVLDSSNIKPMNLIGVDRGENIPAVIALTDPEGCPLSRFKDSLGNPTHILRIGESYKEKQRTIQAKKEVEQRRAGGYSRKYASKAKNLADDMVRNTARDLLYYAVTQDAMLIFENLSRGFGRQGKRTFMAERQYTRMEDWLTAKLAYEGLPSKTYLSKTLAQYTSKTCSNCGFTITSADYDRVLEKLKKTATGWMTTINGKELKVEGQITYYNRYKRQNVVKDLSVELDRLSEESVNNDISSWTKGRSGEALSLLKKRFSHRPVQEKFVCLNCGFETHADEQAALNIARSWLFLRSQEYKKYQTNKTTGNTDKRAFVETWQSFYRKKLKEVWKPAV

SEQ ID NO: 39576 - protein, 979 aa, synthetic construct
  REGION 1..979: note = engineered CasX variant
QEIKGRINKIRRRLVKDSNTKKAGKTGPMKTLLVRVMTPDLRERLENLRKKPENIPQPISNTSRANLNKLLTDYTEMKKAILHVYWEEFQKDPVGLMSRVAQPASKKIDQNKLKPEMDEKGNLTTAGFACSQCGQPLFVYKLEQVSEKGKAYTNYFGRCNVAEHEKLILLAQLKPEKDSDEAVTYSLGKFGQRALDFYSIHVTKESTHPVKPLAQIAGNRYASGPVGKALRDACMGTIASFLSKYQDIIIEHQKVVKGNQKRLESLRELAGKENLEYPSVTLPPQPHTKEGVDAYNEVIARVRWWVNLNLWQKLKLSRDDAKPLLRLKGFPSFPLVERQANEVDWWDMVCNVKKLINEKKEDGKVFWQNLAGYKRQEALRPYLSSEEDRKKGKKFARYQLGDLLLHLEKKHGEDWGKVYDEAWERIDKKVEGLSKHIKLEEERRSEDAQSKAALTDWLRAKASFVIEGLKEADKDEFCRCELKLQKWYGDLRGKPFAIEAENSILDISGFSKQYNCAFIWQKDGVKKLNLYLIINYFKGGKLRFKKIKPEAFEANRFYTVINKKSGEIVPMEVNFNFDDPNLIILPLAFGKRQGREFIWNDLLSLETGSLKLANGRVIEKTLYNRRTRQDEPALFVALTFERREVLDSSNIKPMNLIGVDRGENIPAVIALTDPEGCPLSRFKDSLGNPTHILRIGESYKEKQRTIQAKKEVEQRRAGGYSRKYASKAKNLADDMVRNTARDLLYYAVTQDAMLIFENLSRGFGRQGKRTFMAERQYTRMEDWLTAKLAYEGLPSKTYLSKTLAQYTSKTCSNCGFTITSADYDRVLEKLKKTATGWMTTINGKELKVEGQITYYNRYKRQNVVKDLSVELDRLSEESVNNDISSWTKGRSGEALSLLKKRFSHRPVQEKFVCLNCGFETHADEQAALNIARSWLFLRSQEYKKYQTNKTTGNTDKRAFVETWQSFYRKKLKEVWKPAV

SEQ ID NO: 39577 - protein, 980 aa, synthetic construct
  REGION 1..980: note = engineered CasX variant
QEIKGRINKIRRRLVKDSNTKKAGKTGPMKTLLVRVMTPDLRERLENLRKKPENIPQPISNTSRANLNKLLTDYTEMKKAILHVYWEEFQKDPVGLMSRVAQPASKKIDQNKLKPEMDEKGNLTTAGFACSQCGQPLFVYKLEQVSEKGKAYTNYFGRCNVAEHEKLILLAQLKPEKDSDEAVTYSLGKFGQRALDFYSIHVTKESTHPVKPLAQIAGNRYASGPVGKALRDACMGTIASFLSKYQDIIIEHQKVVKGNQKRLESLRELAGKENLEYPSVTLPPQPHTKEGVDAYNEVIARVRMWVNLNLWQKLKLSRDDAKPLLRLKGFPSFPLVERQQANEVDWWDMVCNVKKLINEKKEDGKVFWQNLAGYKRQEALRPYLSSEEDRKKGKKFARYQLGDLLLHLEKKHGEDWGKVYDEAWERIDKKVEGLSKHIKLEEERRSEDAQSKAALTDWLRAKASFVIEGLKEADKDEFCRCELKLQKWYGDLRGKPFAIEAENSILDISGFSKQYNCAFIWQKDGVKKLNLYLIINYFKGGKLRFKKIKPEAFEANRFYTVINKKSGEIVPMEVNFNFDDPNLIILPLAFGKRQGREFIWNDLLSLETGSLKLANGRVIEKTLYNRRTRQDEPALFVALTFERREVLDSSNIKPMNLIGVDRGENIPAVIALTDPEGCPLSRFKDSLGNPTHILRIGESYKEKQRTIQAKKEVEQRRAGGYSRKYASKAKNLADDMVRNTARDLLYYAVTQDAMLIFENLSRGFGRQGKRTFMAERQYTRMEDWLTAKLAYEGLPSKTYLSKTLAQYTSKTCSNCGFTITSADYDRVLEKLKKTATGWMTTINGKELKVEGQITYYNRYKRQNVVKDLSVELDRLSEESVNNDISSWTKGRSGEALSLLKKRFSHRPVQEKFVCLNCGFETHADEQAALNIARSWLFLRSQEYKKYQTNKTTGNTDKRAFVETWQSFYRKKLKEVWKPAV

SEQ ID NO: 39578 - protein, 980 aa, synthetic construct
  REGION 1..980: note = engineered CasX variant
QEIKGRINKIRRRLVKDSNTKKAGKTGPMKTLLVRVMTPDLRERLENLRKKPENIPQPISNTSRANLNKLLTDYTEMKKAILHVYWEEFQKDPVGLMSRVAQPASKKIDQNKLKPEMDEKGNLTTAGFACSQCGQPLFVYKLEQVSEKGKAYTNYFGRCNVAEHEKLILLAQLKPEKDSDEAVTYSLGKFGQRALDFYSIHVTKESTHPVKPLAQIAGNRYASGPVGKALRDACMGTIASFLSKYQDIIIEHQKVVKGNQKRLESLRELAGKENLEYPSVTLPPQPHTKEGVDAYNEVIARVRMWVNLNLWQKLKLSRDDAKPLLRLKGFPSFPLVERQANAEVDWWDMVCNVKKLINEKKEDGKVFWQNLAGYKRQEALRPYLSSEEDRKKGKKFARYQLGDLLLHLEKKHGEDWGKVYDEAWERIDKKVEGLSKHIKLEEERRSEDAQSKAALTDWLRAKASFVIEGLKEADKDEFCRCELKLQKWYGDLRGKPFAIEAENSILDISGFSKQYNCAFIWQKDGVKKLNLYLIINYFKGGKLRFKKIKPEAFEANRFYTVINKKSGEIVPMEVNFNFDDPNLIILPLAFGKRQGREFIWNDLLSLETGSLKLANGRVIEKTLYNRRTRQDEPALFVALTFERREVLDSSNIKPMNLIGVDRGENIPAVIALTDPEGCPLSRFKDSLGNPTHILRIGESYKEKQRTIQAKKEVEQRRAGGYSRKYASKAKNLADDMVRNTARDLLYYAVTQDAMLIFENLSRGFGRQGKRTFMAERQYTRMEDWLTAKLAYEGLPSKTYLSKTLAQYTSKTCSNCGFTITSADYDRVLEKLKKTATGWMTTINGKELKVEGQITYYNRYKRQNVVKDLSVELDRLSEESVNNDISSWTKGRSGEALSLLKKRFSHRPVQEKFVCLNCGFETHADEQAALNIARSWLFLRSQEYKKYQTNKTTGNTDKRAFVETWQSFYRKKLKEVWKPAV

SEQ ID NO: 39579 - protein, 979 aa, synthetic construct
  REGION 1..979: note = engineered CasX variant
QEIKGRINKIRRRLVKDSNTKKAGKTGPMKTLLVRVMTPDLRERLENLRKKPENIPQPISNTSRANLNKLLTDYTEMKKAILHVYWEEFQKDPVGLMSRVAQPASKKIDQNKLKPEMDEKGNLTTAGFACSQCGQPLFVYKLEQVSEKGKAYTNYFGRCNVAEHEKLILLAQLKPEKDSDEAVTYSLGKFGQRALDFYSIHVTKESTHPVKPLAQIAGNRYASGPVGKALRDACMGTIASFLSKYQDIIIEHQKVVKGNQKRLESLRELAGKENLEYPSVTLPPQPHTKEGVDAYNEVIARVRMWVNLNLWQKLKLSRDDAKPLLRLKGFPSFPLVERQANEVDWWDMVCNVKKLINEKKEDGKVFWQNLAGYKRQEALRPYLSSEEDRKKGKKFARTQLGDLLLHLEKKHGEDWGKVYDEAWERIDKKVEGLSKHIKLEEERRSEDAQSKAALTDWLRAKASFVIEGLKEADKDEFCRCELKLQKWYGDLRGKPFAIEAENSILDISGFSKQYNCAFIWQKDGVKKLNLYLIINYFKGGKLRFKKIKPEAFEANRFYTVINKKSGEIVPMEVNFNFDDPNLIILPLAFGKRQGREFIWNDLLSLETGSLKLANGRVIEKTLYNRRTRQDEPALFVALTFERREVLDSSNIKPMNLIGVDRGENIPAVIALTDPEGCPLSRFKDSLGNPTHILRIGESYKEKQRTIQAKKEVEQRRAGGYSRKYASKAKNLADDMVRNTARDLLYYAVTQDAMLIFENLSRGFGRQGKRTFMAERQYTRMEDWLTAKLAYEGLPSKTYLSKTLAQYTSKTCSNCGFTITSADYDRVLEKLKKTATGWMTTINGKELKVEGQITYYNRYKRQNVVKDLSVELDRLSEESVNNDISSWTKGRSGEALSLLKKRFSHRPVQEKFVCLNCGFETHADEQAALNIARSWLFLRSQEYKKYQTNKTTGNTDKRAFVETWQSFYRKKLKEVWKPAV

SEQ ID NO: 39580 - protein, 980 aa, synthetic construct
  REGION 1..980: note = engineered CasX variant
QEIKGRINKIRRRLVKDSNTKKAGKTGPMKTLLVRVMTPDLRERLENLRKKPENIPQPISNTSRANLNKLLTDYTEMKKAILHVYWEEFQKDPVGLMSRVAQPASKKIDQNKLKPEMDEKGNLTTAGFACSQCGQPLFVYKLEQVSEKGKAYTNYFGRCNVAEHEKLILLAQLKPEKDSDEAVTYSLGKFGQRALDFYSIHVTKESTHPVKPLAQIAGNRYASGPVGKALRDACMGTIASFLSKYQDIIIEHQKVVKGNQKRLESLRELAGKENLEYPSVTLPPQPHTKEGVDAYNEVIARVRMWVNLNLWQKLKLSRDDAKPLLRLKGFPSFPLVERQANEVDWWDMVCNVKKLINEKKEDGKVFWQNLAGYKRQEALRPYLSSEEDRKKGKKFARYQLGDLLLHLEKKHEGEDWGKVYDEAWERIDKKVEGLSKHIKLEEERRSEDAQSKAALTDWLRAKASFVIEGLKEADKDEFCRCELKLQKWYGDLRGKPFAIEAENSILDISGFSKQYNCAFIWQKDGVKKLNLYLIINYFKGGKLRFKKIKPEAFEANRFYTVINKKSGEIVPMEVNFNFDDPNLIILPLAFGKRQGREFIWNDLLSLETGSLKLANGRVIEKTLYNRRTRQDEPALFVALTFERREVLDSSNIKPMNLIGVDRGENIPAVIALTDPEGCPLSRFKDSLGNPTHILRIGESYKEKQRTIQAKKEVEQRRAGGYSRKYASKAKNLADDMVRNTARDLLYYAVTQDAMLIFENLSRGFGRQGKRTFMAERQYTRMEDWLTAKLAYEGLPSKTYLSKTLAQYTSKTCSNCGFTITSADYDRVLEKLKKTATGWMTTINGKELKVEGQITYYNRYKRQNVVKDLSVELDRLSEESVNNDISSWTKGRSGEALSLLKKRFSHRPVQEKFVCLNCGFETHADEQAALNIARSWLFLRSQEYKKYQTNKTTGNTDKRAFVETWQSFYRKKLKEVWKPAV

SEQ ID NO: 39581 - protein, 979 aa, synthetic construct
  REGION 1..979: note = engineered CasX variant
QEIKGRINKIRRRLVKDSNTKKAGKTGPMKTLLVRVMTPDLRERLENLRKKPENIPQPISNTSRANLNKLLTDYTEMKKAILHVYWEEFQKDPVGLMSRVAQPASKKIDQNKLKPEMDEKGNLTTAGFACSQCGQPLFVYKLEQVSEKGKAYTNYFGRCNVAEHEKLILLAQLKPEKDSDEAVTYSLGKFGQRALDFYSIHVTKESTHPVKPLAQIAGNRYASGPVGKALRDACMGTIASFLSKYQDIIIEHQKVVKGNQKRLESLRELAGKENLEYPSVTLPPQPHTKEGVDAYNEVIARVRMWVNLNLWQKLKLSRDDAKPLLRLKGFPSFPLVERQANEVDWWDMVCNVKKLINEKKEDGKVFWQNLAGYKRQEALRPYLSSEEDRKKGKKFARYQLGDLLLHLEKKHGEDWGKVYDEAWERIDKKVEGLSKHIKLEEERRSEDAQSKAALTDWLRAKASFVIEGLKEADKDEFCRCDLKLQKWYGDLRGKPFAIEAENSILDISGFSKQYNCAFIWQKDGVKKLNLYLIINYFKGGKLRFKKIKPEAFEANRFYTVINKKSGEIVPMEVNFNFDDPNLIILPLAFGKRQGREFIWNDLLSLETGSLKLANGRVIEKTLYNRRTRQDEPALFVALTFERREVLDSSNIKPMNLIGVDRGENIPAVIALTDPEGCPLSRFKDSLGNPTHILRIGESYKEKQRTIQAKKEVEQRRAGGYSRKYASKAKNLADDMVRNTARDLLYYAVTQDAMLIFENLSRGFGRQGKRTFMAERQYTRMEDWLTAKLAYEGLPSKTYLSKTLAQYTSKTCSNCGFTITSADYDRVLEKLKKTATGWMTTINGKELKVEGQITYYNRYKRQNVVKDLSVELDRLSEESVNNDISSWTKGRSGEALSLLKKRFSHRPVQEKFVCLNCGFETHADEQAALNIARSWLFLRSQEYKKYQTNKTTGNTDKRAFVETWQSFYRKKLKEVWKPAV

SEQ ID NO: 39582 - protein, 979 aa, synthetic construct
  REGION 1..979: note = engineered CasX variant
QEIKGRINKIRRRLVKDSNTKKAGKTGPMKTLLVRVMTPDLRERLENLRKKPENIPQPISNTSRANLNKLLTDYTEMKKAILHVYWEEFQKDPVGLMSRVAQPASKKIDQNKLKPEMDEKGNLTTAGFACSQCGQPLFVYKLEQVSEKGKAYTNYFGRCNVAEHEKLILLAQLKPEKDSDEAVTYSLGKFGQRALDFYSIHVTKESTHPVKPLAQIAGNRYASGPVGKALRDACMGTIASFLSKYQDIIIEHQKVVKGNQKRLESLRELAGKENLEYPSVTLPPQPHTKEGVDAYNEVIARVRMWVNLNLWQKLKLSRDDAKPLLRLKGFPSFPLVERQANEVDWWDMVCNVKKLINEKKEDGKVFWQNLAGYKRQEALRPYLSSEEDRKKGKKFARYQLGDLLLHLEKKHGEDWGKVYDEAWERIDKKVEGLSKHIKLEEERRSEDAQSKAALTDWLRAKASFVIEGLKEADKDEFCRCELKLQKWYGDLRGKPFAIEAENSILDISGFSKQYNCAFIWQKDGVKKLNLYLIINYFKGGKLRFKKIKPEAFEANRFYTVINKKSGEIVPMEVNFNFDDPNLIILPLAFGKRFGREFIWNDLLSLETGSLKLANGRVIEKTLYNRRTRQDEPALFVALTFERREVLDSSNIKPMNLIGVDRGENIPAVIALTDPEGCPLSRFKDSLGNPTHILRIGESYKEKQRTIQAKKEVEQRRAGGYSRKYASKAKNLADDMVRNTARDLLYYAVTQDAMLIFENLSRGFGRQGKRTFMAERQYTRMEDWLTAKLAYEGLPSKTYLSKTLAQYTSKTCSNCGFTITSADYDRVLEKLKKTATGWMTTINGKELKVEGQITYYNRYKRQNVVKDLSVELDRLSEESVNNDISSWTKGRSGEALSLLKKRFSHRPVQEKFVCLNCGFETHADEQAALNIARSWLFLRSQEYKKYQTNKTTGNTDKRAFVETWQSFYRKKLKEVWKPAV

SEQ ID NO: 39583 - protein, 979 aa, synthetic construct
  REGION 1..979: note = engineered CasX variant
QEIKGRINKIRRRLVKDSNTKKAGKTGPMKTLLVRVMTPDLRERLENLRKKPENIPQPISNTSRANLNKLLTDYTEMKKAILHVYWEEFQKDPVGLMSRVAQPASKKIDQNKLKPEMDEKGNLTTAGFACSQCGQPLFVYKLEQVSEKGKAYTNYFGRCNVAEHEKLILLAQLKPEKDSDEAVTYSLGKFGQRALDFYSIHVTKESTHPVKPLAQIAGNRYASGPVGKALRDACMGTIASFLSKYQDIIIEHQKVVKGNQKRLESLRELAGKENLEYPSVTLPPQPHTKEGVDAYNEVIARVRMWVNLNLWQKLKLSRDDAKPLLRLKGFPSFPLVERQANEVDWWDMVCNVKKLINEKKEDGKVFWQNLAGYKRQEALRPYLSSEEDRKKGKKFARYQLGDLLLHLEKKHGEDWGKVYDEAWERIDKKVEGLSKHIKLEEERRSEDAQSKAALTDWLRAKASFVIEGLKEADKDEFCRCELKLQKWYGDLRGKPFAIEAENSILDISGFSKQYNCAFIWQKDGVKKLNLYLIINYFKGGKLRFKKIKPEAFEANRFYTVINKKSGEIVPMEVNFNFDDPNLIILPLAFGKRVGREFIWNDLLSLETGSLKLANGRVIEKTLYNRRTRQDEPALFVALTFERREVLDSSNIKPMNLIGVDRGENIPAVIALTDPEGCPLSRFKDSLGNPTHILRIGESYKEKQRTIQAKKEVEQRRAGGYSRKYASKAKNLADDMVRNTARDLLYYAVTQDAMLIFENLSRGFGRQGKRTFMAERQYTRMEDWLTAKLAYEGLPSKTYLSKTLAQYTSKTCSNCGFTITSADYDRVLEKLKKTATGWMTTINGKELKVEGQITYYNRYKRQNVVKDLSVELDRLSEESVNNDISSWTKGRSGEALSLLKKRFSHRPVQEKFVCLNCGFETHADEQAALNIARSWLFLRSQEYKKYQTNKTTGNTDKRAFVETWQSFYRKKLKEVWKPAV

SEQ ID NO: 39584 - protein, 980 aa, synthetic construct
  REGION 1..980: note = engineered CasX variant
QEIKGRINKIRRRLVKDSNTKKAGKTGPMKTLLVRVMTPDLRERLENLRKKPENIPQPISNTSRANLNKLLTDYTEMKKAILHVYWEEFQKDPVGLMSRVAQPASKKIDQNKLKPEMDEKGNLTTAGFACSQCGQPLFVYKLEQVSEKGKAYTNYFGRCNVAEHEKLILLAQLKPEKDSDEAVTYSLGKFGQRALDFYSIHVTKESTHPVKPLAQIAGNRYASGPVGKALRDACMGTIASFLSKYQDIIIEHQKVVKGNQKRLESLRELAGKENLEYPSVTLPPQPHTKEGVDAYNEVIARVRMWVNLNLWQKLKLSRDDAKPLLRLKGFPSFPLVERQANEVDWWDMVCNVKKLINEKKEDGKVFWQNLAGYKRQEALRPYLSSEEDRKKGKKFARYQLGDLLLHLEKKHGEDWGKVYDEAWERIDKKVEGLSKHIKLEEERRSEDAQSKAALTDWLRAKASFVIEGLKEADKDEFCRCELKLQKWYGDLRGKPFAIEAENSILDISGFSKQYNCAFIWQKDGVKKLNLYLIINYFKGGKLRFKKIKPEAFEANRFYTVINKKSGEIVPMEVNFNFDDPNLIILPLAFGKRQGREFIWNDLLSLETGSLKLANGRVIEKTLYNRRTRQDEPALFVALTFERREVLDSSNIKTPMNLIGVDRGENIPAVIALTDPEGCPLSRFKDSLGNPTHILRIGESYKEKQRTIQAKKEVEQRRAGGYSRKYASKAKNLADDMVRNTARDLLYYAVTQDAMLIFENLSRGFGRQGKRTFMAERQYTRMEDWLTAKLAYEGLPSKTYLSKTLAQYTSKTCSNCGFTITSADYDRVLEKLKKTATGWMTTINGKELKVEGQITYYNRYKRQNVVKDLSVELDRLSEESVNNDISSWTKGRSGEALSLLKKRFSHRPVQEKFVCLNCGFETHADEQAALNIARSWLFLRSQEYKKYQTNKTTGNTDKRAFVETWQSFYRKKLKEVWKPAV

SEQ ID NO: 39585 - protein, 980 aa, synthetic construct
  REGION 1..980: note = engineered CasX variant
QEIKGRINKIRRRLVKDSNTKKAGKTGPMKTLLVRVMTPDLRERLENLRKKPENIPQPISNTSRANLNKLLTDYTEMKKAILHVYWEEFQKDPVGLMSRVAQPASKKIDQNKLKPEMDEKGNLTTAGFACSQCGQPLFVYKLEQVSEKGKAYTNYFGRCNVAEHEKLILLAQLKPEKDSDEAVTYSLGKFGQRALDFYSIHVTKESTHPVKPLAQIAGNRYASGPVGKALRDACMGTIASFLSKYQDIIIEHQKVVKGNQKRLESLRELAGKENLEYPSVTLPPQPHTKEGVDAYNEVIARVRMWVNLNLWQKLKLSRDDAKPLLRLKGFPSFPLVERQANEVDWWDMVCNVKKLINEKKEDGKVFWQNLAGYKRQEALRPYLSSEEDRKKGKKFARYQLGDLLLHLEKKHGEDWGKVYDEAWERIDKKVEGLSKHIKLEEERRSEDAQSKAALTDWLRAKASFVIEGLKEADKDEFCRCELKLQKWYGDLRGKPFAIEAENSILDISGFSKQYNCAFIWQKDGVKKLNLYLIINYFKGGKLRFKKIKPEAFEANRFYTVINKKSGEIVPMEVNFNFDDPNLIILPLAFGKRQGREFIWNDLLSLETGSLKLANGRVIEKTLYNRRTRQDEPALFVALTFERREVLDSSNIKPMSNLIGVDRGENIPAVIALTDPEGCPLSRFKDSLGNPTHILRIGESYKEKQRTIQAKKEVEQRRAGGYSRKYASKAKNLADDMVRNTARDLLYYAVTQDAMLIFENLSRGFGRQGKRTFMAERQYTRMEDWLTAKLAYEGLPSKTYLSKTLAQYTSKTCSNCGFTITSADYDRVLEKLKKTATGWMTTINGKELKVEGQITYYNRYKRQNVVKDLSVELDRLSEESVNNDISSWTKGRSGEALSLLKKRFSHRPVQEKFVCLNCGFETHADEQAALNIARSWLFLRSQEYKKYQTNKTTGNTDKRAFVETWQSFYRKKLKEVWKPAV

SEQ ID NO: 39586 - protein, 979 aa, synthetic construct
  REGION 1..979: note = engineered CasX variant
QEIKGRINKIRRRLVKDSNTKKAGKTGPMKTLLVRVMTPDLRERLENLRKKPENIPQPISNTSRANLNKLLTDYTEMKKAILHVYWEEFQKDPVGLMSRVAQPASKKIDQNKLKPEMDEKGNLTTAGFACSQCGQPLFVYKLEQVSEKGKAYTNYFGRCNVAEHEKLILLAQLKPEKDSDEAVTYSLGKFGQRALDFYSIHVTKESTHPVKPLAQIAGNRYASGPVGKALRDACMGTIASFLSKYQDIIIEHQKVVKGNQKRLESLRELAGKENLEYPSVTLPPQPHTKEGVDAYNEVIARVRMWVNLNLWQKLKLSRDDAKPLLRLKGFPSFPLVERQANEVDWWDMVCNVKKLINEKKEDGKVFWQNLAGYKRQEALRPYLSSEEDRKKGKKFARYQLGDLLLHLEKKHGEDWGKVYDEAWERIDKKVEGLSKHIKLEEERRSEDAQSKAALTDWLRAKASFVIEGLKEADKDEFCRCELKLQKWYGDLRGKPFAIEAENSILDISGFSKQYNCAFIWQKDGVKKLNLYLIINYFKGGKLRFKKIKPEAFEANRFYTVINKKSGEIVPMEVNFNFDDPNLIILPLAFGKRQGREFIWNDLLSLETGSLKLANGRVIEKTLYNRRTRQDEPALFVALTFERREVLDSSNIKPMNLIGVDRGENIPAVIALTDPEGCPLSRFKDSLGNPTHILRIRESYKEKQRTIQAKKEVEQRRAGGYSRKYASKAKNLADDMVRNTARDLLYYAVTQDAMLIFENLSRGFGRQGKRTFMAERQYTRMEDWLTAKLAYEGLPSKTYLSKTLAQYTSKTCSNCGFTITSADYDRVLEKLKKTATGWMTTINGKELKVEGQITYYNRYKRQNVVKDLSVELDRLSEESVNNDISSWTKGRSGEALSLLKKRFSHRPVQEKFVCLNCGFETHADEQAALNIARSWLFLRSQEYKKYQTNKTTGNTDKRAFVETWQSFYRKKLKEVWKPAV

SEQ ID NO: 39587 - protein, 979 aa, synthetic construct
  REGION 1..979: note = engineered CasX variant
QEIKGRINKIRRRLVKDSNTKKAGKTGPMKTLLVRVMTPDLRERLENLRKKPENIPQPISNTSRANLNKLLTDYTEMKKAILHVYWEEFQKDPVGLMSRVAQPASKKIDQNKLKPEMDEKGNLTTAGFACSQCGQPLFVYKLEQVSEKGKAYTNYFGRCNVAEHEKLILLAQLKPEKDSDEAVTYSLGKFGQRALDFYSIHVTKESTHPVKPLAQIAGNRYASGPVGKALRDACMGTIASFLSKYQDIIIEHQKVVKGNQKRLESLRELAGKENLEYPSVTLPPQPHTKEGVDAYNEVIARVRMWVNLNLWQKLKLSRDDAKPLLRLKGFPSFPLVERQANEVDWWDMVCNVKKLINEKKEDGKVFWQNLAGYKRQEALRPYLSSEEDRKKGKKFARYQLGDLLLHLEKKHGEDWGKVYDEAWERIDKKVEGLSKHIKLEEERRSEDAQSKAALTDWLRAKASFVIEGLKEADKDEFCRCELKLQKWYGDLRGKPFAIEAENSILDISGFSKQYNCAFIWQKDGVKKLNLYLIINYFKGGKLRFKKIKPEAFEANRFYTVINKKSGEIVPMEVNFNFDDPNLIILPLAFGKRQGREFIWNDLLSLETGSLKLANGRVIEKTLYNRRTRQDEPALFVALTFERREVLDSSNIKPMNLIGVDRGENIPAVIALTDPEGCPLSRFKDSLGNPTHILRIGESYKEKQRTIQAKKEVEQRRAGGYSRKYASKAKNLADDMVRNTARDLLYYAVTQDAMLIFENLSRGFGRQGKRTFSAERQYTRMEDWLTAKLAYEGLPSKTYLSKTLAQYTSKTCSNCGFTITSADYDRVLEKLKKTATGWMTTINGKELKVEGQITYYNRYKRQNVVKDLSVELDRLSEESVNNDISSWTKGRSGEALSLLKKRFSHRPVQEKFVCLNCGFETHADEQAALNIARSWLFLRSQEYKKYQTNKTTGNTDKRAFVETWQSFYRKKLKEVWKPAV

SEQ ID NO: 39588 - protein, 979 aa, synthetic construct
  REGION 1..979: note = engineered CasX variant
QEIKGRINKIRRRLVKDSNTKKAGKTGPMKTLLVRVMTPDLRERLENLRKKPENIPQPISNTSRANLNKLLTDYTEMKKAILHVYWEEFQKDPVGLMSRVAQPASKKIDQNKLKPEMDEKGNLTTAGFACSQCGQPLFVYKLEQVSEKGKAYTNYFGRCNVAEHEKLILLAQLKPEKDSDEAVTYSLGKFGQRALDFYSIHVTKESTHPVKPLAQIAGNRYASGPVGKALRDACMGTIASFLSKYQDIIIEHQKVVKGNQKRLESLRELAGKENLEYPSVTLPPQPHTKEGVDAYNEVIARVRMWVNLNLWQKLKLSRDDAKPLLRLKGFPSFPLVERQANEVDWWDMVCNVKKLINEKKEDGKVFWQNLAGYKRQEALRPYLSSEEDRKKGKKFARYQLGDLLLHLEKKHGEDWGKVYDEAWERIDKKVEGLSKHIKLEEERRSEDAQSKAALTDWLRAKASFVIEGLKEADKDEFCRCELKLQKWYGDLRGKPFAIEAENSILDISGFSKQYNCAFIWQKDGVKKLNLYLIINYFKGGKLRFKKIKPEAFEANRFYTVINKKSGEIVPMEVNFNFDDPNLIILPLAFGKRQGREFIWNDLLSLETGSLKLANGRVIEKTLYNRRTRQDEPALFVALTFERREVLDSSNIKPMNLIGVDRGENIPAVIALTDPEGCPLSRFKDSLGNPTHILRIGESYKEKQRTIQAKKEVEQRRAGGYSRKYASKAKNLADDMVRNTARDLLYYAVTQDAMLIFENLSRGFGRQGKRTFMAERQYTRMEDWLTAKLAYEGLPSKTYLSKTLAQYTSKTCSNCGFTITSADYDRVLEKLKKTATGWMTTINGKELKVEGQITYYNRYKRQNVVKDLSVELDRLSEESVNNDISSWDKGRSGEALSLLKKRFSHRPVQEKFVCLNCGFETHADEQAALNIARSWLFLRSQEYKKYQTNKTTGNTDKRAFVETWQSFYRKKLKEVWKPAV

SEQ ID NO: 39589 - protein, 979 aa, synthetic construct
  REGION 1..979: note = engineered CasX variant
QEIKGRINKIRRRLVKDSNTKKAGKTGPMKTLLVRVMTPDLRERLENLRKKPENIPQPISNTSRANLNKLLTDYTEMKKAILHVYWEEFQVDPVGLMSRVAQPASKKIDQNKLKPEMDEKGNLTTAGFACSQCGQPLFVYKLEQVSEKGKAYTNYFGRCNVAEHEKLILLAQLKPEKDSDEAVTYSLGKFGQRALDFYSIHVTKESTHPVKPLAQIAGNRYASGPVGKALRDACMGTIASFLSKYQDIIIEHQKVVKGNQKRLESLRELAGKENLEYPSVTLPPQPHTKEGVDAYNEVIARVRMWVNLNLWQKLKLSRDDAKPLLRLKGFPSFPLVERQANEVDWWDMVCNVKKLINEKKEDGKVFWQNLAGYKRQEALRPYLSSEEDRKKGKKFARYQLGDLLLHLEKKHGEDWGKVYDEAWERIDKKVEGLSKHIKLEEERRSEDAQSKAALTDWLRAKASFVIEGLKEADKDEFCRCELKLQKWYGDLRGKPFAIEAENSILDISGFSKQYNCAFIWQKDGVKKLNLYLIINYFKGGKLRFKKIKPEAFEANRFYTVINKKSGEIVPMEVNFNFDDPNLIILPLAFGKRQGREFIWNDLLSLETGSLKLANGRVIEKTLYNRRTRQDEPALFVALTFERREVLDSSNIKPMNLIGVDRGENIPAVIALTDPEGCPLSRFKDSLGNPTHILRIGESYKEKQRTIQAKKEVEQRRAGGYSRKYASKAKNLADDMVRNTARDLLYYAVTQDAMLIFENLSRGFGRQGKRTFMAERQYTRMEDWLTAKLAYEGLPSKTYLSKTLAQYTSKTCSNCGFTITSADYDRVLEKLKKTATGWMTTINGKELKVEGQITYYNRYKRQNVVKDLSVELDRLSEESVNNDISSWTKGRSGEALSLLKKRFSHRPVQEKFVCLNCGFETHADEQAALNIARSWLFLRSQEYKKYQTNKTTGNTDKRAFVETWQSFYRKKLKEVWKPAV

SEQ ID NO: 39590 - protein, 979 aa, synthetic construct
  REGION 1..979: note = engineered CasX variant
QEIKGRLNKIRRRLVKDSNTKKAGKTGPMKTLLVRVMTPDLRERLENLRKKPENIPQPISNTSRANLNKLLTDYTEMKKAILHVYWEEFQKDPVGLMSRVAQPASKKIDQNKLKPEMDEKGNLTTAGFACSQCGQPLFVYKLEQVSEKGKAYTNYFGRCNVAEHEKLILLAQLKPEKDSDEAVTYSLGKFGQRALDFYSIHVTKESTHPVKPLAQIAGNRYASGPVGKALRDACMGTIASFLSKYQDIIIEHQKVVKGNQKRLESLRELAGKENLEYPSVTLPPQPHTKEGVDAYNEVIARVRMWVNLNLWQKLKLSRDDAKPLLRLKGFPSFPLVERQANEVDWWDMVCNVKKLINEKKEDGKVFWQNLAGYKRQEALRPYLSSEEDRKKGKKFARYQLGDLLLHLEKKHGEDWGKVYDEAWERIDKKVEGLSKHIKLEEERRSEDAQSKAALTDWLRAKASFVIEGLKEADKDEFCRCELKLQKWYGDLRGKPFAIEAENSILDISGFSKQYNCAFIWQKDGVKKLNLYLIINYFKGGKLRFKKIKPEAFEANRFYTVINKKSGEIVPMEVNFNFDDPNLIILPLAFGKRQGREFIWNDLLSLETGSLKLANGRVIEKTLYNRRTRQDEPALFVALTFERREVLDSSNIKPMNLIGVDRGENIPAVIALTDPEGCPLSRFKDSLGNPTHILRIGESYKEKQRTIQAKKEVEQRRAGGYSRKYASKAKNLADDMVRNTARDLLYYAVTQDAMLIFENLSRGFGRQGKRTFMAERQYTRMEDWLTAKLAYEGLPSKTYLSKTLAQYTSKTCSNCGFTITSADYDRVLEKLKKTATGWMTTINGKELKVEGQITYYNRYKRQNVVKDLSVELDRLSEESVNNDISSWTKGRSGEALSLLKKRFSHRPVQEKFVCLNCGFETHADEQAALNIARSWLFLRSQEYKKYQTNKTTGNTDKRAFVETWQSFYRKKLKEVWKPAV

SEQ ID NO: 39591 - protein, 979 aa, synthetic construct
  REGION 1..979: note = engineered CasX variant
QEIKGRINKIRRRLVKDSNTKKAGKTGPMKTLLVRVMTPDLRERLENLRKKPENIPQPISNTSRANLNKLLTDYTEMKKAILHVYWEEFQKDPVGLMSRVAQPASKKIDQNKLKPEMDEKGNLTTAGFACSQCGQPLFVYKLEQVSEKGKAYTNYVGRCNVAEHEKLILLAQLKPEKDSDEAVTYSLGKFGQRALDFYSIHVTKESTHPVKPLAQIAGNRYASGPVGKALRDACMGTIASFLSKYQDIIIEHQKVVKGNQKRLESLRELAGKENLEYPSVTLPPQPHTKEGVDAYNEVIARVRMWVNLNLWQKLKLSRDDAKPLLRLKGFPSFPLVERQANEVDWWDMVCNVKKLINEKKEDGKVFWQNLAGYKRQEALRPYLSSEEDRKKGKKFARYQLGDLLLHLEKKHGEDWGKVYDEAWERIDKKVEGLSKHIKLEEERRSEDAQSKAALTDWLRAKASFVIEGLKEADKDEFCRCELKLQKWYGDLRGKPFAIEAENSILDISGFSKQYNCAFIWQKDGVKKLNLYLIINYFKGGKLRFKKIKPEAFEANRFYTVINKKSGEIVPMEVNFNFDDPNLIILPLAFGKRQGREFIWNDLLSLETGSLKLANGRVIEKTLYNRRTRQDEPALFVALTFERREVLDSSNIKPMNLIGVDRGENIPAVIALTDPEGCPLSRFKDSLGNPTHILRIGESYKEKQRTIQAKKEVEQRRAGGYSRKYASKAKNLADDMVRNTARDLLYYAVTQDAMLIFENLSRGFGRQGKRTFMAERQYTRMEDWLTAKLAYEGLPSKTYLSKTLAQYTSKTCSNCGFTITSADYDRVLEKLKKTATGWMTTINGKELKVEGQITYYNRYKRQNVVKDLSVELDRLSEESVNNDISSWTKGRSGEALSLLKKRFSHRPVQEKFVCLNCGFETHADEQAALNIARSWLFLRSQEYKKYQTNKTTGNTDKRAFVETWQSFYRKKLKEVWKPAV

SEQ ID NO: 39592 - protein, 979 aa, synthetic construct
  REGION 1..979: note = engineered CasX variant
QEIKGRINKIRRRLVKDSNTKKAGKTGPMKTLLVRVMTPDLRERLENLRKKPENIPQPISNTSRANLNKLLTDYTEMKKAILHVYWEEFQKDPVGLMSRVAQPASKKIDQNKLKPEMDEKGNLTTAGFACSQCGQPLFVYKLEQVSEKGKAYTNYFGRCNVAEHEKLILLAQLKPEKDSDEAVTYSLGKFGQRALDFYSIHVTKESTHPVKPLAQIAGNRYASGPVGKALRDACMGTIASFLSKYQDIIIEHQKVVKGNQKRLESLRELAGKENLEYPSVTLPPQPHTKEGVDAYNEVIARVRMWVNLNLWQKLKLSRDDAKPLLRLKGFPSFPLVERQANEVDWWDMVCNVKKLINEKKEDGKVFWQNLAGYKRQEALRPYLSSEEDRKKGKKFARYQLGDLLLHLEKKHGEDWGKVYDEAWERIDKKVEGLSKHIKLEEERRSEDAQSKAALTDWLRAKASFVIEGLKEADKDEFCRCELKLQKWYGDLRGKPFAIEAENSILDISGFSKQYNCAFIWQKDGVKKLNLYLIINYFKGGKLRFKKIKPEAFEANRFYTVINKKSGEIVPMEVNFNFDDPNLIILPLAFGKRQGREFIWNDLLSLETGSLKLANGRVIEKTLYNRRTRQDEPALFVALTFERREVLDSSNIKPMNLIGVDRGENIPAVIALTDPEGCPLSRFKDSLGNPTHILRIGESYKEKQRTIQAKKEVEQRRAGGYSRKYASKAKNLADDMVRNTARDLLYYAVTQDAMLIFENLSRGFGRQGKRTFMAERQYTRMEDWLTAKLAYEGLASKTYLSKTLAQYTSKTCSNCGFTITSADYDRVLEKLKKTATGWMTTINGKELKVEGQITYYNRYKRQNVVKDLSVELDRLSEESVNNDISSWTKGRSGEALSLLKKRFSHRPVQEKFVCLNCGFETHADEQAALNIARSWLFLRSQEYKKYQTNKTTGNTDKRAFVETWQSFYRKKLKEVWKPAV

SEQ ID NO: 39593 - protein, 979 aa, synthetic construct
  REGION 1..979: note = engineered CasX variant
QEIKGRINKIRRRLVKDSNTKKAGKTGPMKTLLVRVMTPDLRERLENLRKKPENIPQPISNTSRANLNKLLTDYTEMKKAILHVYWEEFQKDPVGLMSRVAQPASKKIDQNKLKPEMDEKGNLTTAGFACSQCGQPLFVYKLEQVSEKGKAYTNYFGRCNVAEHEKLILLAQLKPEKDSDEAVTYSLGKFGQRALDFYSIHVTKESTHPVKPLAQIAGNRYASGPVGKALRDACMGTIASFLSKYQDIIIEHQKVVKGNQKRLESLRELAGKENLEYPSVTLPPQPHTKEGVDAYNEVIARVRMWVNLNLWQKLKLSRDDAKPLLRLKGFPSFPLVERQANEVDWWDMVCNVKKLINEKKEDGKVFWQNLAGYKRQEALRPYLSSEEDRKKGKKFARYQLGDLLLHLEKKHGEDWGKVYDEAWERIDKKVEGLSKHIKLEEERRSEDAQSKAALTDWLRAKASFVIEGLKEADKDEFCRCELKLQKWYGDLRGKPFAIEAENSILDISGFSKQYNCAFIWQKDGVKKLNLYLIINYFKGGKLRFKKIKPEAFEANRFYTVINKKSGEIVPMEVNFNFDDPNLIILPLAFGKRQGREFIWNDLLSLETGSLKLANGRVIEKTLYNRRTRQDEPALFVALTFERREVLDSSNIKPMNLIGVDRGENIPAVIALTDPEGCPLSRFKDSLGNPTHILRIGESYKEKQRTIQAKKEVEQRRAGGYSRKYASKAKNLADDMVRNTARDLLYYAVTQDAMLIFENLSRGFGRQGKRTFMAERQYTRMEDWLTAKLAYEGLPSKVYLSKTLAQYTSKTCSNCGFTITSADYDRVLEKLKKTATGWMTTINGKELKVEGQITYYNRYKRQNVVKDLSVELDRLSEESVNNDISSWTKGRSGEALSLLKKRFSHRPVQEKFVCLNCGFETHADEQAALNIARSWLFLRSQEYKKYQTNKTTGNTDKRAFVETWQSFYRKKLKEVWKPAV

SEQ ID NO: 39594 - protein, 980 aa, synthetic construct
  REGION 1..980: note = engineered CasX variant
QEIKGRINKIRRRLVKDSNTKKAGKTGPMKTLLVRVMTPDLRERLENLRKKPENIPQPISNTSRANLNKLLTDYTEMKKAILHVYWEEFQKDPVGLMSRVAQPASKKIDQNKLKPEMDEKGNLTTAGFACSQCGQPLFVYKLEQVSEKGKAYTNYFGRCNVAEHEKLILLAQLKPEKDSDEAVTYSLGKFGQRALDFYSIHVTKESTHPVKPLAQIAGNRYASGPVGKALRDACMGTIASFLSKYQDIIIEHQKVVKGNQKRLESLRELAGKENLEYPSVTLPPQPHTKEGVDAYNEVIARVRMWVNLNLWQKLKLSRDDAKPLLRLKGFPSFPLVERQANEVDWWDMVCNVKKLINEKKEDGKVFWQNLAGYKRQEALRPYLSSEEDRKKGKKFARYQLGDLLLHLEKKHGEDWGKVYDEAWERIDKKVEGLSKHIKLEEERRSEDAQSKAALTDWLRAKASFVIEGLKEADKDEFCRCELKLQKWYGDLRGKPFAIEAENSILDISGFSKQYNCAFIWQKDGVKKLNLYLIINYFKGGKLRFKKIKPEAFEANRFYTVINKKSGEIVPMEVNFNFDDPNLIILPLAFGKRQGREFIWNDLLSLETGSLKLANGRVIEKTLYNRRTRQDEPALFVALTFERREVLDSSNIKPMNLIGVDRGENIPAVIALTDPEGCPLSRFKDSLGNPTHILRIGESYKEKQRTIQAKKEVEQRRAGGYSRKYASKAKNLADDMVRNTARDLLYYAVTQDAMLIFENLSRGFGRQGKRTFMAERQYTRMEDWLTAKLAYEGPLPSKTYLSKTLAQYTSKTCSNCGFTITSADYDRVLEKLKKTATGWMTTINGKELKVEGQITYYNRYKRQNVVKDLSVELDRLSEESVNNDISSWTKGRSGEALSLLKKRFSHRPVQEKFVCLNCGFETHADEQAALNIARSWLFLRSQEYKKYQTNKTTGNTDKRAFVETWQSFYRKKLKEVWKPAV

SEQ ID NO: 39595 - protein, 980 aa, synthetic construct
  REGION 1..980: note = engineered CasX variant
QEIKGRINKIRRRLVKDSNTKKAGKTGPMKTLLVRVMTPDLRERLENLRKKPENIPQPISNTSRANLNKLLTDYTEMKKAILHVYWEEFQKDPVGLMSRVAQPASKKIDQNKLKPEMDEKGNLTTAGFACSQCGQPLFVYKLEQVSEKGKAYTNYFGRCNVAEHEKLILLAQLKPEKDSDEAVTYSLGKFGQRALDFYSIHVTKESTHPVKPLAQIAGNRYASGPVGKALRDACMGTIASFLSKYQDIIIEHQKVVKGNQKRLESLRELAGKENLEYPSVTLPPQPHTKEGVDAYNEVIARVRMWVNLNLWQKLKLSRDDAKPLLRLKGFPSFPLVERQANEVDWWDMVCNVKKLINEKKEDGKVFWQNLAGYKRQEALRPYLSSEEDVRKKGKKFARYQLGDLLLHLEKKHGEDWGKVYDEAWERIDKKVEGLSKHIKLEEERRSEDAQSKAALTDWLRAKASFVIEGLKEADKDEFCRCELKLQKWYGDLRGKPFAIEAENSILDISGFSKQYNCAFIWQKDGVKKLNLYLIINYFKGGKLRFKKIKPEAFEANRFYTVINKKSGEIVPMEVNFNFDDPNLIILPLAFGKRQGREFIWNDLLSLETGSLKLANGRVIEKTLYNRRTRQDEPALFVALTFERREVLDSSNIKPMNLIGVDRGENIPAVIALTDPEGCPLSRFKDSLGNPTHILRIGESYKEKQRTIQAKKEVEQRRAGGYSRKYASKAKNLADDMVRNTARDLLYYAVTQDAMLIFENLSRGFGRQGKRTFMAERQYTRMEDWLTAKLAYEGLPSKTYLSKTLAQYTSKTCSNCGFTITSADYDRVLEKLKKTATGWMTTINGKELKVEGQITYYNRYKRQNVVKDLSVELDRLSEESVNNDISSWTKGRSGEALSLLKKRFSHRPVQEKFVCLNCGFETHADEQAALNIARSWLFLRSQEYKKYQTNKTTGNTDKRAFVETWQSFYRKKLKEVWKPAV

SEQ ID NO: 39596 - protein, 979 aa, synthetic construct
  REGION 1..979: note = engineered CasX variant
QEIKGRINKIRRRLVKDSNTKKAGKTGPMKTLLVRVMTPDLRERLENLRKKPENIPQPISNTSRANLNKLLTDYTEMKKAILHVYWEEFQKDPVGLMSRVAQPASKKIDQNKLKPEMDEKGNLTTAGFACSQCGQPLFVYKLEQVSEKGKAYTNYFGRCNVAEHEKLILLAQLKPEKDSDEAVTYSLGKFGQRALDFYSIHVTKESTHPVKPLAQIAGNRYASGPVGKALRDACMGTIASFLSKYQDIIIEHQKVVKGNQKRLESLRELAGKENLEYPSVTLPPQPHTKEGVDAYNEVIARVRMWVNLNLWQKLKLSRDDAKPLLRLKGFPSFPLVERQANEVDWWDMVCNVKKLINEKKEDGKVFWQNLAGYKRQEALRPYLSSEEDRKKGKKFARYQLGDLLLHLEKKHGEDWGKVYDEAWERIDKKVEGLSKHIKLEEERRSEDAQSKAALTDWLRAKASFVIEGLKEADKDEFCRCELKLQKWYGDLRGKPFAIEAENSILDISGFSKQYNCAFIWQKDGVKKLNLYLIINYFKGGKLRFKKIKPEAFEANRFYTVINKKSGEIVPMEVNFNFDDPNLIILPLAFGKRQGREFIWNDLLSLETGSLKLANGRVIEKTLYNRRTRQDEPALFVALTFERREVLDSSNIKPMNLIGVDRGENIPAVIALTDPEGCPLSRFKDSLGNPTHILRIGESYKEKQRTIQAKKEVEQRRAGGYSRKYASKAKNLADDMVRNTARDLLYYAVTQDAMLIFENLSRGFGRQGKRTFMAERQYTRMEDWLTAKLAYEGLPSKTYLSKTLAQYTSKTCSNCGFTITSADYDRMLEKLKKTATGWMTTINGKELKVEGQITYYNRYKRQNVVKDLSVELDRLSEESVNNDISSWTKGRSGEALSLLKKRFSHRPVQEKFVCLNCGFETHADEQAALNIARSWLFLRSQEYKKYQTNKTTGNTDKRAFVETWQSFYRKKLKEVWKPAV

SEQ ID NO: 39597 - protein, 979 aa, synthetic construct
  REGION 1..979: note = engineered CasX variant
QEIKGRINKIRRRLVKDSNTKKAGKTGPMKTLLVRVMTPDLRERLENLRKKPENIPQPISNTSRANLNKLLTDYTEMKKAILHVYWEEFQKDPVGLMSRVAQPASKKIDQNKLKPEMDEKGNLTTAGFACSQCGQPLFVYKLEQVSEKGKAYTNYFGRCNVAEHEKLILLAQLKPEKDSDEAVTYSLGKFGQRALDFYSIHVTKESTHPVKPLAQIAGNRYASGPVGKALRDACMGTIASFLSKYQDIIIEHQKVVKGNQKRLESLRELAGKENLEYPSVTLPPQPHTKEGVDAYNEVIARVRMWVNLNLWQKLKLSRDDAKPLLRLKGFPSFPLVERQANEVDWWDMVCNVKKLINEKKEDGKVFWQNLAGYKRQEALRPYLSSEEDRKKGKKFARYQLGDLLLHLEKKHGEDWGKVYDEAWERIDKKVEGLSKHIKLEEERRSEDAQSKAALTDWLRAKASFVIEGLKEADKDEFCRCELKLQKWYGDLRGKPFAIEAENSILDISGFSKQYNCAFIWQKDGVKKLNLYLIINYFKGGKLRFKKIKPEAFEANRFYTVINKKSGEIVPMEVNFNFDDPNLIILPLAFGKRQGREFIWNDLLSLETGSLKLANGRVIEKTLYNRRTRQDEPALFVALTFERREVLDSSNIKPMNLIGVDRGENIPAVIALTDPEGCPLSRFKDSLGNPTHILRIGESYKEKQRTIQAKKEVEQRRAGGYSRKYASKAKNLADDMVRNTARDLLYYAVTQDAMLIFENLSRGFGRQGKRTFMAERQYTRMEDWLTAKLAYEGLPSKTYLSKTLAQYTSKTCSNCGFTITSADYDRVLEKLKKTATGWMTTINGKELKVEGQITYYNRYKRQNVVKDLSVELDRLSEESVNNDISSWTKGRQGEALSLLKKRFSHRPVQEKFVCLNCGFETHADEQAALNIARSWLFLRSQEYKKYQTNKTTGNTDKRAFVETWQSFYRKKLKEVWKPAV

SEQ ID NO: 39598 - protein, 979 aa, synthetic construct
  REGION 1..979: note = engineered CasX variant
QEIKGRINKIRRRLVKDSNTKKAGKTGPMKTLLVRVMTPDLRERLENLRKKPENIPQPISNTSRANLNKLLTDYTEMKKAILHVYWEEFQKDPVGLMSRVAQPASKKIDQNKLKPEMDEKGNLTTAGFACSQCGQPLFVYKLEQVSEKGKAYTNYFGRCNVAEHEKLILLAQLKPEKDSDEAVTYSLGKFGQRALDFYSIHVTKESTHPVKPLAQIAGNRYASGPVGKALRDACMGTIASFLSKYQDIIIEHQKVVKGNQKRLESLRELAGKENLEYPSVTLPPQPHTKEGVDAYNEVIARVRMWVNLNLWQKLKLSRDDAKPLLRLKGFPSFPLVERQANEVDWWDMVCNVKKLINEKKEDGKVFWQNLAGYKRQEALRPYLSSEEDRKKGKKFARYQLGDLLLHLEKKHGEDWGKVYDEAWERIDKKVEGLSKHIKLEEERRSEDAQSKAALTDWLRAKASFVIEGLKEADKDEFCRCELKLQKWYGDLRGKPFAIEAENSILDISGFSKQYNCAFIWQKDGVKKLNLYLIINYFKGGKLRFKKIKPEAFEANRFYTVINKKSGEIVPMEVNFNFDDPNLIILPLAFGKRQGREFIWNDLLSLETGSLKLANGRVIEKTLYNRRTRQDEPALFVALTFERREVLDSSNIKPMNLIGVDRGENIPAVIALTDPEGCPLSRFKDSLGNPTHILRIGESYKEKQRTIQAKKEVEQRRAGGYSRKYASKAKNLADDMVRNTARDLLYYAVTQDAMLIFENLSRGFGRQGKRTFMAERQYTRMEDWLTAKLAYEGLPSKTYLSKTLAQYTSKTCSNCGFTITSADYDRVLEKLKKTATGWMTTINGKELKVEGQITYYNRYKRQNVVKDLSVELDRLSEESVNNDISSWTKGRSGEALSLLKKRFSHRPVQEKFVCLNCEFETHADEQAALNIARSWLFLRSQEYKKYQTNKTTGNTDKRAFVETWQSFYRKKLKEVWKPAV

SEQ ID NO: 39599 - protein, 980 aa, synthetic construct
  REGION 1..980: note = engineered CasX variant
QEIKGRINKIRRRLVKDSNTKKAGKTGPMKTLLVRVMTPDLRERLENLRKKPENIPQPISNTSRANLNKLLTDYTEMKKAILHVYWEEFQKDPVGLMSRVAQPASKKIDQNKLKPEMDEKGNLTTAGFACSQCGQPLFVYKLEQVSEKGKAYTNYFGRCNVAEHEKLILLAQLKPEKDSDEAVTYSLGKFGQRALDFYSIHVTKESTHPVKPLAQIAGNRYASGPVGKALRDACMGTIASFLSKYQDIIIEHQKVVKGNQKRLESLRELAGKENLEYPSVTLPPQPHTKEGVDAYNEVIARVRMWVNLNLWQKLKLSRDDAKPLLRLKGFPSFPLVERQANEVDWWDMVCNVKKLINEKKEDGKVFWQNLAGYKRQEALRPYLSSEEDRKKGKKFARYQLGDLLLHLEKKHGEDWGKVYDEAWERIDKKVEGLSKHIKLEEERRSEDAQSKAALTDWLRAKASFVIEGLKEADKDEFCRCELKLQKWYGDLRGKPFAIEAENSILDISGFSKQYNCAFIWQKDGVKKLNLYLIINYFKGGKLRFKKIKPEAFEANRFYTVINKKSGEIVPMEVNFNFDDPNLIILPLAFGKRQGREFIWNDLLSLETGSLKLANGRVIEKTLYNRRTRQDEPALFVALTFERREVLDSSNIKPMNLIGVDRGENIPAVIALTDPEGCPLSRFKDSLGNPTHILRIGESYKEKQRTIQAKKEVEQRRAGGYSRKYASKAKNLADDMVRNTARDLLYYAVTQDAMLIFENLSRGFGRQGKRTFMAERQYTRMEDWLTAKLAYEGLPSKTYLSKTLAQYTSKTCSNCGFTITSADYDRVLEKLKKTATGWMTTINGKELKVEGQITYYNRYKRQNVVKDLSVELDRLSEESVNNDISSWTKGRSGEALSLLKKRFSHRPVQEKFVCLNCGFETHADEQAALNIARSWLFLRSQEYKKYQTNKTSTGNTDKRAFVETWQSFYRKKLKEVWKPAV

SEQ ID NO: 39600 - protein, 980 aa, synthetic construct
  REGION 1..980: note = engineered CasX variant
QEIKGRINKIRRRLVKDSNTKKAGKTGPMKTLLVRVMTPDLRERLENLRKKPENIPQPISNTSRANLNKLLTDYTEMKKAILHVYWEEFQKDPVGLMSRVAQPASKKIDQNKLKPEMDEKGNLTTAGFACSQCGQPLFVYKLEQVSEKGKAYTNYFGRCNVAEHEKLILLAQLKPEKDSDEAVTYSLGKFGQRALDFYSIHVTKESTHPVKPLAQIAGNRYASGPVGKALRDACMGTIASFLSKYQDIIIEHQKVVKGNQKRLESLRELAGKENLEYPSVTLPPQPHTKEGVDAYNEVIARVRMWVNLNLWQKLKLSRDDAKPLLRLKGFPSFPLVERQANEVDWWDMVCNVKKLINEKKEDGKVFWQNLAGYKRQEALRPYLSSEEDRKKGKKFARYQLGDLLLHLEKKHGEDWGKVYDEAWERIDKKVEGLSKHIKLEEERRSEDAQSKAALTDWLRAKASFVIEGLKEADKDEFCRCELKLQKWYGDLRGKPFAIEAENSILDISGFSKQYNCAFIWQKDGVKKLNLYLIINYFKGGKLRFKKIKPEAFEANRFYTVINKKSGEIVPMEVNFNFDDPNLIILPLAFGKRQGREFIWNDLLSLETGSLKLANGRVIEKTLYNRRTRQDEPALFVALTFERREVLDSSNIKPMNLIGVDRGENIPAVIALTDPEGCPLSRFKDSLGNPTHILRIGESYKEKQRTIQAKKEVEQRRAGGYSRKYASKAKNLADDMVRNTARDLLYYAVTQDAMLIFENLSRGFGRQGKRTFMAERQYTRMEDWLTAKLAYEGLPSKTYLSKTLAQYTSKTCSNCGFTITSADYDRVLEKLKKTATGWMTTINGKELKVEGQITYYNRYKRQNVVKDLSVELDRLSEESVNNDISSWTKGRSGEALSLLKKRFSHRPVQEKFVCLNCGFETHADEQAALNIARSWLFLRSQEYKKYQTNKTTGKNTDKRAFVETWQSFYRKKLKEVWKPAV

SEQ ID NO: 39601 - protein, 979 aa, synthetic construct
  REGION 1..979: note = engineered CasX variant
QEIKGRINKIRRRLVKDSNTKKAGKTGPMKTLLVRVMTPDLRERLENLRKKPENIPQPISNTSRANLNKLLTDYTEMKKAILHVYWEEFQKDPVGLMSRVAQPASKKIDQNKLKPEMDEKGNLTTAGFACSQCGQPLFVYKLEQVSEKGKAYTNYFGRCNVAEHEKLILLAQLKPEKDSDEAVTYSLGKFGQRALDFYSIHVTKESTHPVKPLAQIAGNRYASGPVGKALRDACMGTIASFLSKYQDIIIEHQKVVKGNQKRLESLRELAGKENLEYPSVTLPPQPHTKEGVDAYNEVIARVRMWVNLNLWQKLKLSRDDAKPLLRLKKFPSFPLVERQANEVDWWDMVCNVKKLINEKKEDGKVFWQNLAGYKRQEALRPYLSSEEDRKKGKKFARYQLGDLLLHLEKKHGEDWGKVYDEAWERIDKKVEGLSKHIKLEEERRSEDAQSKAALTDWLRAKASFVIEGLKEADKDEFCRCELKLQKWYGDLRGKPFAIEAENSILDISGFSKQYNCAFIWQKDGVKKLNLYLIINYFKGGKLRFKKIKPEAFEANRFYTVINKKSGEIVPMEVNFNFDDPNLIILPLAFGKRQGREFIWNDLLSLETGSLKLANGRVIEKTLYNRRTRQDEPALFVALTFERREVLDSSNIKPMNLIGVDRGENIPAVIALTDPEGCPLSRFKDSLGNPTHILRIGESYKEKQRTIQAKKEVEQRRAGGYSRKYASKAKNLADDMVRNTARDLLYYAVTQDAMLIFENLSRGFGRQGKRTFMAERQYTRMEDWLTAKLAYEGLPSKTYLSKTLAQYTSKTCSNCGFTITSADYDRVLEKLKKTATGWMTTINGKELKVEGQITYYNRYKRQNVVKDLSVELDRLSEESVNNDISSWTKGRSGEALSLLKKRFSHRPVQEKFVCLNCGFETHADEQAALNIARSWLFLRSQEYKKYQTNKTTGNTDKRAFVETWQSFYRKKLKEVWKPAV

SEQ ID NO: 39602 - protein, 979 aa, synthetic construct
  REGION 1..979: note = engineered CasX variant
QEIKGRINKIRRRLVKDSNTKKAGKTGPMKTLLVRVMTPDLRERLENLRKKPENIPQPISNTSRANLNKLLTDYTEMKKAILHVYWEEFQKDPVGLMSRVAQPASKKIDQNKLKPEMDEKGNLTTAGFACSQCGQPLFVYKLEQVSEKGKAYTNYFGRCNVAEHEKLILLAQLKPEKDSDEAVTYSLGKFGQRALDFYSIHVTKESTHPVKPLAQIAGNRYASGPVGKALRDACMGTIASFLSKYQDIIIEHQKVVKGNQKRLESLRELAGKENLEYPSVTLPPQPHTKEGVDAYNEVIARVRMWVNLNLWQKLKLSRDDAKPLLRLKGFPSFPLVERQANEVDWWDMVCNVKKLINEKKEDGKVFWQNLAGYKRQEALRPYLSSEEDRKKGKKFARYQLGDLLLHLEKKHGEDWGKVYDEAWERIDKKVEGLSKHIKLEEERRSEDAQSKAALTDWLRAKASFVIEGLKEADKDEFCRCELKLQKWYGDLRGKPFAIEAENSILDISGFSKQYNCAFIWQKDGVKKLNLYLIINYFKGGKLRFKKIKPEAFEANRFYTVINKKSGEIVPMEVNFNFDDPNLIILPLAFGKRQGREFIWNDLLSLETGSLKLANGRVIEKTLYNRRTRQDEPALFVALTFERREVLDSSNIKPMNLIGVDRGENIPAVIALTDPEGCPLSRFKDSLGNPTHILRIGERYKEKQRTIQAKKEVEQRRAGGYSRKYASKAKNLADDMVRNTARDLLYYAVTQDAMLIFENLSRGFGRQGKRTFMAERQYTRMEDWLTAKLAYEGLPSKTYLSKTLAQYTSKTCSNCGFTITSADYDRVLEKLKKTATGWMTTINGKELKVEGQITYYNRYKRQNVVKDLSVELDRLSEESVNNDISSWTKGRSGEALSLLKKRFSHRPVQEKFVCLNCGFETHADEQAALNIARSWLFLRSQEYKKYQTNKTTGNTDKRAFVETWQSFYRKKLKEVWKPAV

SEQ ID NO: 39603 - protein, 979 aa, synthetic construct
  REGION 1..979: note = engineered CasX variant
QEIKGRINKIRRRLVKDSNTKKAGKTGPMKTLLVRVMTPDLRERLENLRKKPENIPQPISNTSRANLNKLLTDYTEMKKAILHVYWEEFQKDPVGLMSRVAQPASKKIDQNKLKPEMDEKGNLTTAGFACSQCGQPLFVYKLEQVSEKGKAYTNYFGRCNVAEHEKLILLAQLKPEKDSDEAVTYSLGKFGQRALDFYSIHVTKESTHPVKPLAQIAGNRYASGPVGKALRDACMGTIASFLSKYQDIIIEHQKVVKGNQKRLESLRELAGKENLEYPSVTLPPQPHTKEGVDAYNEVIARVRMWVNLNLWQKLKLSRDDAKPLLRLKGFPSFPLVERQANEVDWWDMVCNVKKLINEKKEDGKVFWQNLAGYKRQEALRPYLSSEEDRKKGKKFARYQLGDLLLHLEKKHGEDWGKVYDEAWERIDKKVEGLSKHIKLEEERRSEDAQSKAALTDWLRAKASFVIEGLKEADKDEFCRCELKLQKWYGDLRGKPFAIEAENSILDISGFSKQYNCAFIWQKDGVKKLNLYLIINYFKGGKLRFKKIKPEAFEANRFYTVINKKSGEIVPMEVNFNFDDPNLIILPLAFGKRQGREFIWNDLLSLETGSLQLANGRVIEKTLYNRRTRQDEPALFVALTFERREVLDSSNIKPMNLIGVDRGENIPAVIALTDPEGCPLSRFKDSLGNPTHILRIGESYKEKQRTIQAKKEVEQRRAGGYSRKYASKAKNLADDMVRNTARDLLYYAVTQDAMLIFENLSRGFGRQGKRTFMAERQYTRMEDWLTAKLAYEGLPSKTYLSKTLAQYTSKTCSNCGFTITSADYDRVLEKLKKTATGWMTTINGKELKVEGQITYYNRYKRQNVVKDLSVELDRLSEESVNNDISSWTKGRSGEALSLLKKRFSHRPVQEKFVCLNCGFETHADEQAALNIARSWLFLRSQEYKKYQTNKTTGNTDKRAFVETWQSFYRKKLKEVWKPAV

SEQ ID NO: 39604 - protein, 978 aa, synthetic construct
  REGION 1..978: note = engineered CasX variant
QEIKRASKIRRRLVKDSNTKKAGKTGPMKTLLVRVMTPDLRERLENLRKKPENIPQPISNTSRANLNKLLTDYTEMKKAILHVYWEEFQKDPVGLMSRVAQPASKKIDQNKLKPEMDEKGNLTTAGFACSQCGQPLFVYKLEQVSEKGKAYTNYFGRCNVAEHEKLILLAQLKPEKDSDEAVTYSLGKFGQRALDFYSIHVTKESTHPVKPLAQIAGNRYASGPVGKALRDACMGTIASFLSKYQDIIIEHQKVVKGNQKRLESLRELAGKENLEYPSVTLPPQPHTKEGVDAYNEVIARVRMWVNLNLWQKLKLSRDDAKPLLRLKGFPSFPLVERQANEVDWWDMVCNVKKLINEKKEDGKVFWQNLAGYKRQEALRPYLSSEEDRKKGKKFARYQLGDLLLHLEKKHGEDWGKVYDEAWERIDKKVEGLSKHIKLEEERRSEDAQSKAALTDWLRAKASFVIEGLKEADKDEFCRCELKLQKWYGDLRGKPFAIEAENSILDISGFSKQYNCAFIWQKDGVKKLNLYLIINYFKGGKLRFKKIKPEAFEANRFYTVINKKSGEIVPMEVNFNFDDPNLIILPLAFGKRQGREFIWNDLLSLETGSLKLANGRVIEKTLYNRRTRQDEPALFVALTFERREVLDSSNIKPMNLIGVDRGENIPAVIALTDPEGCPLSRFKDSLGNPTHILRIGESYKEKQRTIQAKKEVEQRRAGGYSRKYASKAKNLADDMVRNTARDLLYYAVTQDAMLIFENLSRGFGRQGKRTFMAERQYTRMEDWLTAKLAYEGLPSKTYLSKTLAQYTSKTCSNCGFTITSADYDRVLEKLKKTATGWMTTINGKELKVEGQITYYNRYKRQNVVKDLSVELDRLSEESVNNDISSWTKGRSGEALSLLKKRFSHRPVQEKFVCLNCGFETHADEQAALNIARSWLFLRSQEYKKYQTNKTTGNTDKRAFVETWQSFYRKKLKEVWKPAV

SEQ ID NO: 39605 - protein, 978 aa, synthetic construct
  REGION 1..978: note = engineered CasX variant
QEIKRANGIRRRLVKDSNTKKAGKTGPMKTLLVRVMTPDLRERLENLRKKPENIPQPISNTSRANLNKLLTDYTEMKKAILHVYWEEFQKDPVGLMSRVAQPASKKIDQNKLKPEMDEKGNLTTAGFACSQCGQPLFVYKLEQVSEKGKAYTNYFGRCNVAEHEKLILLAQLKPEKDSDEAVTYSLGKFGQRALDFYSIHVTKESTHPVKPLAQIAGNRYASGPVGKALRDACMGTIASFLSKYQDIIIEHQKVVKGNQKRLESLRELAGKENLEYPSVTLPPQPHTKEGVDAYNEVIARVRMWVNLNLWQKLKLSRDDAKPLLRLKGFPSFPLVERQANEVDWWDMVCNVKKLINEKKEDGKVFWQNLAGYKRQEALRPYLSSEEDRKKGKKFARYQLGDLLLHLEKKHGEDWGKVYDEAWERIDKKVEGLSKHIKLEEERRSEDAQSKAALTDWLRAKASFVIEGLKEADKDEFCRCELKLQKWYGDLRGKPFAIEAENSILDISGFSKQYNCAFIWQKDGVKKLNLYLIINYFKGGKLRFKKIKPEAFEANRFYTVINKKSGEIVPMEVNFNFDDPNLIILPLAFGKRQGREFIWNDLLSLETGSLKLANGRVIEKTLYNRRTRQDEPALFVALTFERREVLDSSNIKPMNLIGVDRGENIPAVIALTDPEGCPLSRFKDSLGNPTHILRIGESYKEKQRTIQAKKEVEQRRAGGYSRKYASKAKNLADDMVRNTARDLLYYAVTQDAMLIFENLSRGFGRQGKRTFMAERQYTRMEDWLTAKLAYEGLPSKTYLSKTLAQYTSKTCSNCGFTITSADYDRVLEKLKKTATGWMTTINGKELKVEGQITYYNRYKRQNVVKDLSVELDRLSEESVNNDISSWTKGRSGEALSLLKKRFSHRPVQEKFVCLNCGFETHADEQAALNIARSWLFLRSQEYKKYQTNKTTGNTDKRAFVETWQSFYRKKLKEVWKPAV

SEQ ID NO: 39606 - protein, 978 aa, synthetic construct
  REGION 1..978: note = engineered CasX variant
QEIKRANKIRRRLVKDSNTKKAGKTGPMKTLLVPVMTPDLRERLENLRKKPENIPQPISNTSRANLNKLLTDYTEMKKAILHVYWEEFQKDPVGLMSRVAQPASKKIDQNKLKPEMDEKGNLTTAGFACSQCGQPLFVYKLEQVSEKGKAYTNYFGRCNVAEHEKLILLAQLKPEKDSDEAVTYSLGKFGQRALDFYSIHVTKESTHPVKPLAQIAGNRYASGPVGKALRDACMGTIASFLSKYQDIIIEHQKVVKGNQKRLESLRELAGKENLEYPSVTLPPQPHTKEGVDAYNEVIARVRMWVNLNLWQKLKLSRDDAKPLLRLKGFPSFPLVERQANEVDWWDMVCNVKKLINEKKEDGKVFWQNLAGYKRQEALRPYLSSEEDRKKGKKFARYQLGDLLLHLEKKHGEDWGKVYDEAWERIDKKVEGLSKHIKLEEERRSEDAQSKAALTDWLRAKASFVIEGLKEADKDEFCRCELKLQKWYGDLRGKPFAIEAENSILDISGFSKQYNCAFIWQKDGVKKLNLYLIINYFKGGKLRFKKIKPEAFEANRFYTVINKKSGEIVPMEVNFNFDDPNLIILPLAFGKRQGREFIWNDLLSLETGSLKLANGRVIEKTLYNRRTRQDEPALFVALTFERREVLDSSNIKPMNLIGVDRGENIPAVIALTDPEGCPLSRFKDSLGNPTHILRIGESYKEKQRTIQAKKEVEQRRAGGYSRKYASKAKNLADDMVRNTARDLLYYAVTQDAMLIFENLSRGFGRQGKRTFMAERQYTRMEDWLTAKLAYEGLPSKTYLSKTLAQYTSKTCSNCGFTITSADYDRVLEKLKKTATGWMTTINGKELKVEGQITYYNRYKRQNVVKDLSVELDRLSEESVNNDISSWTKGRSGEALSLLKKRFSHRPVQEKFVCLNCGFETHADEQAALNIARSWLFLRSQEYKKYQTNKTTGNTDKRAFVETWQSFYRKKLKEVWKPAV

SEQ ID NO: 39607 - protein, 978 aa, synthetic construct
  REGION 1..978: note = engineered CasX variant
QEIKRANKIRRRLVKDSNTKKAGKTGPMKTLLVRVMTPDLRERLENLRKKPPNIPQPISNTSRANLNKLLTDYTEMKKAILHVYWEEFQKDPVGLMSRVAQPASKKIDQNKLKPEMDEKGNLTTAGFACSQCGQPLFVYKLEQVSEKGKAYTNYFGRCNVAEHEKLILLAQLKPEKDSDEAVTYSLGKFGQRALDFYSIHVTKESTHPVKPLAQIAGNRYASGPVGKALRDACMGTIASFLSKYQDIIIEHQKVVKGNQKRLESLRELAGKENLEYPSVTLPPQPHTKEGVDAYNEVIARVRMWVNLNLWQKLKLSRDDAKPLLRLKGFPSFPLVERQANEVDWWDMVCNVKKLINEKKEDGKVFWQNLAGYKRQEALRPYLSSEEDRKKGKKFARYQLGDLLLHLEKKHGEDWGKVYDEAWERIDKKVEGLSKHIKLEEERRSEDAQSKAALTDWLRAKASFVIEGLKEADKDEFCRCELKLQKWYGDLRGKPFAIEAENSILDISGFSKQYNCAFIWQKDGVKKLNLYLIINYFKGGKLRFKKIKPEAFEANRFYTVINKKSGEIVPMEVNFNFDDPNLIILPLAFGKRQGREFIWNDLLSLETGSLKLANGRVIEKTLYNRRTRQDEPALFVALTFERREVLDSSNIKPMNLIGVDRGENIPAVIALTDPEGCPLSRFKDSLGNPTHILRIGESYKEKQRTIQAKKEVEQRRAGGYSRKYASKAKNLADDMVRNTARDLLYYAVTQDAMLIFENLSRGFGRQGKRTFMAERQYTRMEDWLTAKLAYEGLPSKTYLSKTLAQYTSKTCSNCGFTITSADYDRVLEKLKKTATGWMTTINGKELKVEGQITYYNRYKRQNVVKDLSVELDRLSEESVNNDISSWTKGRSGEALSLLKKRFSHRPVQEKFVCLNCGFETHADEQAALNIARSWLFLRSQEYKKYQTNKTTGNTDKRAFVETWQSFYRKKLKEVWKPAV

SEQ ID NO: 39608 - protein, 978 aa, synthetic construct
  REGION 1..978: note = engineered CasX variant
QEIKRANKIRRRLVKDSNTKKAGKTGPMKTLLVRVMTPDLRERLENLRKKPENIPQPISNTSQANLNKLLTDYTEMKKAILHVYWEEFQKDPVGLMSRVAQPASKKIDQNKLKPEMDEKGNLTTAGFACSQCGQPLFVYKLEQVSEKGKAYTNYFGRCNVAEHEKLILLAQLKPEKDSDEAVTYSLGKFGQRALDFYSIHVTKESTHPVKPLAQIAGNRYASGPVGKALRDACMGTIASFLSKYQDIIIEHQKVVKGNQKRLESLRELAGKENLEYPSVTLPPQPHTKEGVDAYNEVIARVRMWVNLNLWQKLKLSRDDAKPLLRLKGFPSFPLVERQANEVDWWDMVCNVKKLINEKKEDGKVFWQNLAGYKRQEALRPYLSSEEDRKKGKKFARYQLGDLLLHLEKKHGEDWGKVYDEAWERIDKKVEGLSKHIKLEEERRSEDAQSKAALTDWLRAKASFVIEGLKEADKDEFCRCELKLQKWYGDLRGKPFAIEAENSILDISGFSKQYNCAFIWQKDGVKKLNLYLIINYFKGGKLRFKKIKPEAFEANRFYTVINKKSGEIVPMEVNFNFDDPNLIILPLAFGKRQGREFIWNDLLSLETGSLKLANGRVIEKTLYNRRTRQDEPALFVALTFERREVLDSSNIKPMNLIGVDRGENIPAVIALTDPEGCPLSRFKDSLGNPTHILRIGESYKEKQRTIQAKKEVEQRRAGGYSRKYASKAKNLADDMVRNTARDLLYYAVTQDAMLIFENLSRGFGRQGKRTFMAERQYTRMEDWLTAKLAYEGLPSKTYLSKTLAQYTSKTCSNCGFTITSADYDRVLEKLKKTATGWMTTINGKELKVEGQITYYNRYKRQNVVKDLSVELDRLSEESVNNDISSWTKGRSGEALSLLKKRFSHRPVQEKFVCLNCGFETHADEQAALNIARSWLFLRSQEYKKYQTNKTTGNTDKRAFVETWQSFYRKKLKEVWKPAV

SEQ ID NO: 39609 - protein, 978 aa, synthetic construct
  REGION 1..978: note = engineered CasX variant
QEIKRANKIRRRLVKDSNTKKAGKTGPMKTLLVRVMTPDLRERLENLRKKPENIPQPISNTSRANLNKLLTDYTEMKKAILHVYDEEFQKDPVGLMSRVAQPASKKIDQNKLKPEMDEKGNLTTAGFACSQCGQPLFVYKLEQVSEKGKAYTNYFGRCNVAEHEKLILLAQLKPEKDSDEAVTYSLGKFGQRALDFYSIHVTKESTHPVKPLAQIAGNRYASGPVGKALRDACMGTIASFLSKYQDIIIEHQKVVKGNQKRLESLRELAGKENLEYPSVTLPPQPHTKEGVDAYNEVIARVRMWVNLNLWQKLKLSRDDAKPLLRLKGFPSFPLVERQANEVDWWDMVCNVKKLINEKKEDGKVFWQNLAGYKRQEALRPYLSSEEDRKKGKKFARYQLGDLLLHLEKKHGEDWGKVYDEAWERIDKKVEGLSKHIKLEEERRSEDAQSKAALTDWLRAKASFVIEGLKEADKDEFCRCELKLQKWYGDLRGKPFAIEAENSILDISGFSKQYNCAFIWQKDGVKKLNLYLIINYFKGGKLRFKKIKPEAFEANRFYTVINKKSGEIVPMEVNFNFDDPNLIILPLAFGKRQGREFIWNDLLSLETGSLKLANGRVIEKTLYNRRTRQDEPALFVALTFERREVLDSSNIKPMNLIGVDRGENIPAVIALTDPEGCPLSRFKDSLGNPTHILRIGESYKEKQRTIQAKKEVEQRRAGGYSRKYASKAKNLADDMVRNTARDLLYYAVTQDAMLIFENLSRGFGRQGKRTFMAERQYTRMEDWLTAKLAYEGLPSKTYLSKTLAQYTSKTCSNCGFTITSADYDRVLEKLKKTATGWMTTINGKELKVEGQITYYNRYKRQNVVKDLSVELDRLSEESVNNDISSWTKGRSGEALSLLKKRFSHRPVQEKFVCLNCGFETHADEQAALNIARSWLFLRSQEYKKYQTNKTTGNTDKRAFVETWQSFYRKKLKEVWKPAV

SEQ ID NO: 39610 - protein, 978 aa, synthetic construct
  REGION 1..978: note = engineered CasX variant
QEIKRANKIRRRLVKDSNTKKAGKTGPMKTLLVRVMTPDLRERLENLRKKPENIPQPISNTSRANLNKLLTDYTEMKKAILHVYWEEFQKDPVGLMSRVAQPASKKIDQNKLKPEMDEKGNLTTAGFACSQCGQPLFVYKLEQVSEKGKAYTNYFGRCNVAEHEKLIKLAQLKPEKDSDEAVTYSLGKFGQRALDFYSIHVTKESTHPVKPLAQIAGNRYASGPVGKALRDACMGTIASFLSKYQDIIIEHQKVVKGNQKRLESLRELAGKENLEYPSVTLPPQPHTKEGVDAYNEVIARVRMWVNLNLWQKLKLSRDDAKPLLRLKGFPSFPLVERQANEVDWWDMVCNVKKLINEKKEDGKVFWQNLAGYKRQEALRPYLSSEEDRKKGKKFARYQLGDLLLHLEKKHGEDWGKVYDEAWERIDKKVEGLSKHIKLEEERRSEDAQSKAALTDWLRAKASFVIEGLKEADKDEFCRCELKLQKWYGDLRGKPFAIEAENSILDISGFSKQYNCAFIWQKDGVKKLNLYLIINYFKGGKLRFKKIKPEAFEANRFYTVINKKSGEIVPMEVNFNFDDPNLIILPLAFGKRQGREFIWNDLLSLETGSLKLANGRVIEKTLYNRRTRQDEPALFVALTFERREVLDSSNIKPMNLIGVDRGENIPAVIALTDPEGCPLSRFKDSLGNPTHILRIGESYKEKQRTIQAKKEVEQRRAGGYSRKYASKAKNLADDMVRNTARDLLYYAVTQDAMLIFENLSRGFGRQGKRTFMAERQYTRMEDWLTAKLAYEGLPSKTYLSKTLAQYTSKTCSNCGFTITSADYDRVLEKLKKTATGWMTTINGKELKVEGQITYYNRYKRQNVVKDLSVELDRLSEESVNNDISSWTKGRSGEALSLLKKRFSHRPVQEKFVCLNCGFETHADEQAALNIARSWLFLRSQEYKKYQTNKTTGNTDKRAFVETWQSFYRKKLKEVWKPAV

SEQ ID NO: 39611 - protein, 978 aa, synthetic construct
  REGION 1..978: note = engineered CasX variant
QEIKRANKIRRRLVKDSNTKKAGKTGPMKTLLVRVMTPDLRERLENLRKKPENIPQPISNTSRANLNKLLTDYTEMKKAILHVYWEEFQKDPVGLMSRVAQPASKKIDQNKLKPEMDEKGNLTTAGFACSQCGQPLFVYKLEQVSEKGKAYTNYFGRCNVAEHEKLILLYQLKPEKDSDEAVTYSLGKFGQRALDFYSIHVTKESTHPVKPLAQIAGNRYASGPVGKALRDACMGTIASFLSKYQDIIIEHQKVVKGNQKRLESLRELAGKENLEYPSVTLPPQPHTKEGVDAYNEVIARVRMWVNLNLWQKLKLSRDDAKPLLRLKGFPSFPLVERQANEVDWWDMVCNVKKLINEKKEDGKVFWQNLAGYKRQEALRPYLSSEEDRKKGKKFARYQLGDLLLHLEKKHGEDWGKVYDEAWERIDKKVEGLSKHIKLEEERRSEDAQSKAALTDWLRAKASFVIEGLKEADKDEFCRCELKLQKWYGDLRGKPFAIEAENSILDISGFSKQYNCAFIWQKDGVKKLNLYLIINYFKGGKLRFKKIKPEAFEANRFYTVINKKSGEIVPMEVNFNFDDPNLIILPLAFGKRQGREFIWNDLLSLETGSLKLANGRVIEKTLYNRRTRQDEPALFVALTFERREVLDSSNIKPMNLIGVDRGENIPAVIALTDPEGCPLSRFKDSLGNPTHILRIGESYKEKQRTIQAKKEVEQRRAGGYSRKYASKAKNLADDMVRNTARDLLYYAVTQDAMLIFENLSRGFGRQGKRTFMAERQYTRMEDWLTAKLAYEGLPSKTYLSKTLAQYTSKTCSNCGFTITSADYDRVLEKLKKTATGWMTTINGKELKVEGQITYYNRYKRQNVVKDLSVELDRLSEESVNNDISSWTKGRSGEALSLLKKRFSHRPVQEKFVCLNCGFETHADEQAALNIARSWLFLRSQEYKKYQTNKTTGNTDKRAFVETWQSFYRKKLKEVWKPAV

SEQ ID NO: 39612 - protein, 978 aa, synthetic construct
  REGION 1..978: note = engineered CasX variant
QEIKRANKIRRRLVKDSNTKKAGKTGPMKTLLVRVMTPDLRERLENLRKKPENIPQPISNTSRANLNKLLTDYTEMKKAILHVYWEEFQKDPVGLMSRVAQPASKKIDQNKLKPEMDEKGNLTTAGFACSQCGQPLFVYKLEQVSEKGKAYTNYFGRCNVAEHEKLILLSQLKPEKDSDEAVTYSLGKFGQRALDFYSIHVTKESTHPVKPLAQIAGNRYASGPVGKALRDACMGTIASFLSKYQDIIIEHQKVVKGNQKRLESLRELAGKENLEYPSVTLPPQPHTKEGVDAYNEVIARVRMWVNLNLWQKLKLSRDDAKPLLRLKGFPSFPLVERQANEVDWWDMVCNVKKLINEKKEDGKVFWQNLAGYKRQEALRPYLSSEEDRKKGKKFARYQLGDLLLHLEKKHGEDWGKVYDEAWERIDKKVEGLSKHIKLEEERRSEDAQSKAALTDWLRAKASFVIEGLKEADKDEFCRCELKLQKWYGDLRGKPFAIEAENSILDISGFSKQYNCAFIWQKDGVKKLNLYLIINYFKGGKLRFKKIKPEAFEANRFYTVINKKSGEIVPMEVNFNFDDPNLIILPLAFGKRQGREFIWNDLLSLETGSLKLANGRVIEKTLYNRRTRQDEPALFVALTFERREVLDSSNIKPMNLIGVDRGENIPAVIALTDPEGCPLSRFKDSLGNPTHILRIGESYKEKQRTIQAKKEVEQRRAGGYSRKYASKAKNLADDMVRNTARDLLYYAVTQDAMLIFENLSRGFGRQGKRTFMAERQYTRMEDWLTAKLAYEGLPSKTYLSKTLAQYTSKTCSNCGFTITSADYDRVLEKLKKTATGWMTTINGKELKVEGQITYYNRYKRQNVVKDLSVELDRLSEESVNNDISSWTKGRSGEALSLLKKRFSHRPVQEKFVCLNCGFETHADEQAALNIARSWLFLRSQEYKKYQTNKTTGNTDKRAFVETWQSFYRKKLKEVWKPAV

SEQ ID NO: 39613 - protein, 977 aa, synthetic construct
  REGION 1..977: note = engineered CasX variant
QEIKRANKIRRRLVKDSNTKKAGKTGPMKTLLVRVMTPDLRERLENLRKKPENIPQPISNTSRANLNKLLTDYTEMKKAILHVYWEEFQKDPVGLMSRVAQPASKKIDQNKLKPEMDEKGNLTTAGFACSQCGQPLFVYKLEQVSEKGKAYTNYFGRCNVAEHEKLILLAQLKPEKDSDEAVTYSLGKFGQRALDFYSIHVTKESTHPVKPLAQIAGNRYASPVGKALRDACMGTIASFLSKYQDIIIEHQKVVKGNQKRLESLRELAGKENLEYPSVTLPPQPHTKEGVDAYNEVIARVRMWVNLNLWQKLKLSRDDAKPLLRLKGFPSFPLVERQANEVDWWDMVCNVKKLINEKKEDGKVFWQNLAGYKRQEALRPYLSSEEDRKKGKKFARYQLGDLLLHLEKKHGEDWGKVYDEAWERIDKKVEGLSKHIKLEEERRSEDAQSKAALTDWLRAKASFVIEGLKEADKDEFCRCELKLQKWYGDLRGKPFAIEAENSILDISGFSKQYNCAFIWQKDGVKKLNLYLIINYFKGGKLRFKKIKPEAFEANRFYTVINKKSGEIVPMEVNFNFDDPNLIILPLAFGKRQGREFIWNDLLSLETGSLKLANGRVIEKTLYNRRTRQDEPALFVALTFERREVLDSSNIKPMNLIGVDRGENIPAVIALTDPEGCPLSRFKDSLGNPTHILRIGESYKEKQRTIQAKKEVEQRRAGGYSRKYASKAKNLADDMVRNTARDLLYYAVTQDAMLIFENLSRGFGRQGKRTFMAERQYTRMEDWLTAKLAYEGLPSKTYLSKTLAQYTSKTCSNCGFTITSADYDRVLEKLKKTATGWMTTINGKELKVEGQITYYNRYKRQNVVKDLSVELDRLSEESVNNDISSWTKGRSGEALSLLKKRFSHRPVQEKFVCLNCGFETHADEQAALNIARSWLFLRSQEYKKYQTNKTTGNTDKRAFVETWQSFYRKKLKEVWKPAV

SEQ ID NO: 39614 - protein, 978 aa, synthetic construct
  REGION 1..978: note = engineered CasX variant
QEIKRANKIRRRLVKDSNTKKAGKTGPMKTLLVRVMTPDLRERLENLRKKPENIPQPISNTSRANLNKLLTDYTEMKKAILHVYWEEFQKDPVGLMSRVAQPASKKIDQNKLKPEMDEKGNLTTAGFACSQCGQPLFVYKLEQVSEKGKAYTNYFGRCNVAEHEKLILLAQLKPEKDSDEAVTYSLGKFGQRALDFYSIHVTKESTHPVKPLAQIAGNRYASGPVGKALRDACMGTIASFLSKYQDIIIEHQKVVKGNQKRLESLRELAGKENLEYPSVTLPPQPHTSEGVDAYNEVIARVRMWVNLNLWQKLKLSRDDAKPLLRLKGFPSFPLVERQANEVDWWDMVCNVKKLINEKKEDGKVFWQNLAGYKRQEALRPYLSSEEDRKKGKKFARYQLGDLLLHLEKKHGEDWGKVYDEAWERIDKKVEGLSKHIKLEEERRSEDAQSKAALTDWLRAKASFVIEGLKEADKDEFCRCELKLQKWYGDLRGKPFAIEAENSILDISGFSKQYNCAFIWQKDGVKKLNLYLIINYFKGGKLRFKKIKPEAFEANRFYTVINKKSGEIVPMEVNFNFDDPNLIILPLAFGKRQGREFIWNDLLSLETGSLKLANGRVIEKTLYNRRTRQDEPALFVALTFERREVLDSSNIKPMNLIGVDRGENIPAVIALTDPEGCPLSRFKDSLGNPTHILRIGESYKEKQRTIQAKKEVEQRRAGGYSRKYASKAKNLADDMVRNTARDLLYYAVTQDAMLIFENLSRGFGRQGKRTFMAERQYTRMEDWLTAKLAYEGLPSKTYLSKTLAQYTSKTCSNCGFTITSADYDRVLEKLKKTATGWMTTINGKELKVEGQITYYNRYKRQNVVKDLSVELDRLSEESVNNDISSWTKGRSGEALSLLKKRFSHRPVQEKFVCLNCGFETHADEQAALNIARSWLFLRSQEYKKYQTNKTTGNTDKRAFVETWQSFYRKKLKEVWKPAV

SEQ ID NO: 39615 - protein, 978 aa, synthetic construct
  REGION 1..978: note = engineered CasX variant
QEIKRANKIRRRLVKDSNTKKAGKTGPMKTLLVRVMTPDLRERLENLRKKPENIPQPISNTSRANLNKLLTDYTEMKKAILHVYWEEFQKDPVGLMSRVAQPASKKIDQNKLKPEMDEKGNLTTAGFACSQCGQPLFVYKLEQVSEKGKAYTNYFGRCNVAEHEKLILLAQLKPEKDSDEAVTYSLGKFGQRALDFYSIHVTKESTHPVKPLAQIAGNRYASGPVGKALRDACMGTIASFLSKYQDIIIEHQKVVKGNQKRLESLRELAGKENLEYPSVTLPPQPHTKEGLDAYNEVIARVRMWVNLNLWQKLKLSRDDAKPLLRLKGFPSFPLVERQANEVDWWDMVCNVKKLINEKKEDGKVFWQNLAGYKRQEALRPYLSSEEDRKKGKKFARYQLGDLLLHLEKKHGEDWGKVYDEAWERIDKKVEGLSKHIKLEEERRSEDAQSKAALTDWLRAKASFVIEGLKEADKDEFCRCELKLQKWYGDLRGKPFAIEAENSILDISGFSKQYNCAFIWQKDGVKKLNLYLIINYFKGGKLRFKKIKPEAFEANRFYTVINKKSGEIVPMEVNFNFDDPNLIILPLAFGKRQGREFIWNDLLSLETGSLKLANGRVIEKTLYNRRTRQDEPALFVALTFERREVLDSSNIKPMNLIGVDRGENIPAVIALTDPEGCPLSRFKDSLGNPTHILRIGESYKEKQRTIQAKKEVEQRRAGGYSRKYASKAKNLADDMVRNTARDLLYYAVTQDAMLIFENLSRGFGRQGKRTFMAERQYTRMEDWLTAKLAYEGLPSKTYLSKTLAQYTSKTCSNCGFTITSADYDRVLEKLKKTATGWMTTINGKELKVEGQITYYNRYKRQNVVKDLSVELDRLSEESVNNDISSWTKGRSGEALSLLKKRFSHRPVQEKFVCLNCGFETHADEQAALNIARSWLFLRSQEYKKYQTNKTTGNTDKRAFVETWQSFYRKKLKEVWKPAV

SEQ ID NO: 39616 - protein, 978 aa, synthetic construct
  REGION 1..978: note = engineered CasX variant
QEIKRANKIRRRLVKDSNTKKAGKTGPMKTLLVRVMTPDLRERLENLRKKPENIPQPISNTSRANLNKLLTDYTEMKKAILHVYWEEFQKDPVGLMSRVAQPASKKIDQNKLKPEMDEKGNLTTAGFACSQCGQPLFVYKLEQVSEKGKAYTNYFGRCNVAEHEKLILLAQLKPEKDSDEAVTYSLGKFGQRALDFYSIHVTKESTHPVKPLAQIAGNRYASGPVGKALRDACMGTIASFLSKYQDIIIEHQKVVKGNQKRLESLRELAGKENLEYPSVTLPPQPHTKEGVDAYNEVIARVRTWVNLNLWQKLKLSRDDAKPLLRLKGFPSFPLVERQANEVDWWDMVCNVKKLINEKKEDGKVFWQNLAGYKRQEALRPYLSSEEDRKKGKKFARYQLGDLLLHLEKKHGEDWGKVYDEAWERIDKKVEGLSKHIKLEEERRSEDAQSKAALTDWLRAKASFVIEGLKEADKDEFCRCELKLQKWYGDLRGKPFAIEAENSILDISGFSKQYNCAFIWQKDGVKKLNLYLIINYFKGGKLRFKKIKPEAFEANRFYTVINKKSGEIVPMEVNFNFDDPNLIILPLAFGKRQGREFIWNDLLSLETGSLKLANGRVIEKTLYNRRTRQDEPALFVALTFERREVLDSSNIKPMNLIGVDRGENIPAVIALTDPEGCPLSRFKDSLGNPTHILRIGESYKEKQRTIQAKKEVEQRRAGGYSRKYASKAKNLADDMVRNTARDLLYYAVTQDAMLIFENLSRGFGRQGKRTFMAERQYTRMEDWLTAKLAYEGLPSKTYLSKTLAQYTSKTCSNCGFTITSADYDRVLEKLKKTATGWMTTINGKELKVEGQITYYNRYKRQNVVKDLSVELDRLSEESVNNDISSWTKGRSGEALSLLKKRFSHRPVQEKFVCLNCGFETHADEQAALNIARSWLFLRSQEYKKYQTNKTTGNTDKRAFVETWQSFYRKKLKEVWKPAV

SEQ ID NO: 39617 - protein, 978 aa, synthetic construct
  REGION 1..978: note = engineered CasX variant
QEIKRANKIRRRLVKDSNTKKAGKTGPMKTLLVRVMTPDLRERLENLRKKPENIPQPISNTSRANLNKLLTDYTEMKKAILHVYWEEFQKDPVGLMSRVAQPASKKIDQNKLKPEMDEKGNLTTAGFACSQCGQPLFVYKLEQVSEKGKAYTNYFGRCNVAEHEKLILLAQLKPEKDSDEAVTYSLGKFGQRALDFYSIHVTKESTHPVKPLAQIAGNRYASGPVGKALRDACMGTIASFLSKYQDIIIEHQKVVKGNQKRLESLRELAGKENLEYPSVTLPPQPHTKEGVDAYNEVIARVRWWVNLNLWQKLKLSRDDAKPLLRLKGFPSFPLVERQANEVDWWDMVCNVKKLINEKKEDGKVFWQNLAGYKRQEALRPYLSSEEDRKKGKKFARYQLGDLLLHLEKKHGEDWGKVYDEAWERIDKKVEGLSKHIKLEEERRSEDAQSKAALTDWLRAKASFVIEGLKEADKDEFCRCELKLQKWYGDLRGKPFAIEAENSILDISGFSKQYNCAFIWQKDGVKKLNLYLIINYFKGGKLRFKKIKPEAFEANRFYTVINKKSGEIVPMEVNFNFDDPNLIILPLAFGKRQGREFIWNDLLSLETGSLKLANGRVIEKTLYNRRTRQDEPALFVALTFERREVLDSSNIKPMNLIGVDRGENIPAVIALTDPEGCPLSRFKDSLGNPTHILRIGESYKEKQRTIQAKKEVEQRRAGGYSRKYASKAKNLADDMVRNTARDLLYYAVTQDAMLIFENLSRGFGRQGKRTFMAERQYTRMEDWLTAKLAYEGLPSKTYLSKTLAQYTSKTCSNCGFTITSADYDRVLEKLKKTATGWMTTINGKELKVEGQITYYNRYKRQNVVKDLSVELDRLSEESVNNDISSWTKGRSGEALSLLKKRFSHRPVQEKFVCLNCGFETHADEQAALNIARSWLFLRSQEYKKYQTNKTTGNTDKRAFVETWQSFYRKKLKEVWKPAV

SEQ ID NO: 39618 - protein, 979 aa, synthetic construct
  REGION 1..979: note = engineered CasX variant
QEIKRANKIRRRLVKDSNTKKAGKTGPMKTLLVRVMTPDLRERLENLRKKPENIPQPISNTSRANLNKLLTDYTEMKKAILHVYWEEFQKDPVGLMSRVAQPASKKIDQNKLKPEMDEKGNLTTAGFACSQCGQPLFVYKLEQVSEKGKAYTNYFGRCNVAEHEKLILLAQLKPEKDSDEAVTYSLGKFGQRALDFYSIHVTKESTHPVKPLAQIAGNRYASGPVGKALRDACMGTIASFLSKYQDIIIEHQKVVKGNQKRLESLRELAGKENLEYPSVTLPPQPHTKEGVDAYNEVIARVRMWVNLNLWQKLKLSRDDAKPLLRLKGFPSFPLVERQQANEVDWWDMVCNVKKLINEKKEDGKVFWQNLAGYKRQEALRPYLSSEEDRKKGKKFARYQLGDLLLHLEKKHGEDWGKVYDEAWERIDKKVEGLSKHIKLEEERRSEDAQSKAALTDWLRAKASFVIEGLKEADKDEFCRCELKLQKWYGDLRGKPFAIEAENSILDISGFSKQYNCAFIWQKDGVKKLNLYLIINYFKGGKLRFKKIKPEAFEANRFYTVINKKSGEIVPMEVNFNFDDPNLIILPLAFGKRQGREFIWNDLLSLETGSLKLANGRVIEKTLYNRRTRQDEPALFVALTFERREVLDSSNIKPMNLIGVDRGENIPAVIALTDPEGCPLSRFKDSLGNPTHILRIGESYKEKQRTIQAKKEVEQRRAGGYSRKYASKAKNLADDMVRNTARDLLYYAVTQDAMLIFENLSRGFGRQGKRTFMAERQYTRMEDWLTAKLAYEGLPSKTYLSKTLAQYTSKTCSNCGFTITSADYDRVLEKLKKTATGWMTTINGKELKVEGQITYYNRYKRQNVVKDLSVELDRLSEESVNNDISSWTKGRSGEALSLLKKRFSHRPVQEKFVCLNCGFETHADEQAALNIARSWLFLRSQEYKKYQTNKTTGNTDKRAFVETWQSFYRKKLKEVWKPAV

SEQ ID NO: 39619 - protein, 979 aa, synthetic construct
  REGION 1..979: note = engineered CasX variant
QEIKRANKIRRRLVKDSNTKKAGKTGPMKTLLVRVMTPDLRERLENLRKKPENIPQPISNTSRANLNKLLTDYTEMKKAILHVYWEEFQKDPVGLMSRVAQPASKKIDQNKLKPEMDEKGNLTTAGFACSQCGQPLFVYKLEQVSEKGKAYTNYFGRCNVAEHEKLILLAQLKPEKDSDEAVTYSLGKFGQRALDFYSIHVTKESTHPVKPLAQIAGNRYASGPVGKALRDACMGTIASFLSKYQDIIIEHQKVVKGNQKRLESLRELAGKENLEYPSVTLPPQPHTKEGVDAYNEVIARVRMWVNLNLWQKLKLSRDDAKPLLRLKGFPSFPLVERQANAEVDWWDMVCNVKKLINEKKEDGKVFWQNLAGYKRQEALRPYLSSEEDRKKGKKFARYQLGDLLLHLEKKHGEDWGKVYDEAWERIDKKVEGLSKHIKLEEERRSEDAQSKAALTDWLRAKASFVIEGLKEADKDEFCRCELKLQKWYGDLRGKPFAIEAENSILDISGFSKQYNCAFIWQKDGVKKLNLYLIINYFKGGKLRFKKIKPEAFEANRFYTVINKKSGEIVPMEVNFNFDDPNLIILPLAFGKRQGREFIWNDLLSLETGSLKLANGRVIEKTLYNRRTRQDEPALFVALTFERREVLDSSNIKPMNLIGVDRGENIPAVIALTDPEGCPLSRFKDSLGNPTHILRIGESYKEKQRTIQAKKEVEQRRAGGYSRKYASKAKNLADDMVRNTARDLLYYAVTQDAMLIFENLSRGFGRQGKRTFMAERQYTRMEDWLTAKLAYEGLPSKTYLSKTLAQYTSKTCSNCGFTITSADYDRVLEKLKKTATGWMTTINGKELKVEGQITYYNRYKRQNVVKDLSVELDRLSEESVNNDISSWTKGRSGEALSLLKKRFSHRPVQEKFVCLNCGFETHADEQAALNIARSWLFLRSQEYKKYQTNKTTGNTDKRAFVETWQSFYRKKLKEVWKPAV

SEQ ID NO: 39620 - protein, 978 aa, synthetic construct
  REGION 1..978: note = engineered CasX variant
QEIKRANKIRRRLVKDSNTKKAGKTGPMKTLLVRVMTPDLRERLENLRKKPENIPQPISNTSRANLNKLLTDYTEMKKAILHVYWEEFQKDPVGLMSRVAQPASKKIDQNKLKPEMDEKGNLTTAGFACSQCGQPLFVYKLEQVSEKGKAYTNYFGRCNVAEHEKLILLAQLKPEKDSDEAVTYSLGKFGQRALDFYSIHVTKESTHPVKPLAQIAGNRYASGPVGKALRDACMGTIASFLSKYQDIIIEHQKVVKGNQKRLESLRELAGKENLEYPSVTLPPQPHTKEGVDAYNEVIARVRMWVNLNLWQKLKLSRDDAKPLLRLKGFPSFPLVERQANEVDWWDMVCNVKKLINEKKEDGKVFWQNLAGYKRQEALRPYLSSEEDRKKGKKFARTQLGDLLLHLEKKHGEDWGKVYDEAWERIDKKVEGLSKHIKLEEERRSEDAQSKAALTDWLRAKASFVIEGLKEADKDEFCRCELKLQKWYGDLRGKPFAIEAENSILDISGFSKQYNCAFIWQKDGVKKLNLYLIINYFKGGKLRFKKIKPEAFEANRFYTVINKKSGEIVPMEVNFNFDDPNLIILPLAFGKRQGREFIWNDLLSLETGSLKLANGRVIEKTLYNRRTRQDEPALFVALTFERREVLDSSNIKPMNLIGVDRGENIPAVIALTDPEGCPLSRFKDSLGNPTHILRIGESYKEKQRTIQAKKEVEQRRAGGYSRKYASKAKNLADDMVRNTARDLLYYAVTQDAMLIFENLSRGFGRQGKRTFMAERQYTRMEDWLTAKLAYEGLPSKTYLSKTLAQYTSKTCSNCGFTITSADYDRVLEKLKKTATGWMTTINGKELKVEGQITYYNRYKRQNVVKDLSVELDRLSEESVNNDISSWTKGRSGEALSLLKKRFSHRPVQEKFVCLNCGFETHADEQAALNIARSWLFLRSQEYKKYQTNKTTGNTDKRAFVETWQSFYRKKLKEVWKPAV

SEQ ID NO: 39621 - protein, 979 aa, synthetic construct
  REGION 1..979: note = engineered CasX variant
QEIKRANKIRRRLVKDSNTKKAGKTGPMKTLLVRVMTPDLRERLENLRKKPENIPQPISNTSRANLNKLLTDYTEMKKAILHVYWEEFQKDPVGLMSRVAQPASKKIDQNKLKPEMDEKGNLTTAGFACSQCGQPLFVYKLEQVSEKGKAYTNYFGRCNVAEHEKLILLAQLKPEKDSDEAVTYSLGKFGQRALDFYSIHVTKESTHPVKPLAQIAGNRYASGPVGKALRDACMGTIASFLSKYQDIIIEHQKVVKGNQKRLESLRELAGKENLEYPSVTLPPQPHTKEGVDAYNEVIARVRMWVNLNLWQKLKLSRDDAKPLLRLKGFPSFPLVERQANEVDWWDMVCNVKKLINEKKEDGKVFWQNLAGYKRQEALRPYLSSEEDRKKGKKFARYQLGDLLLHLEKKHEGEDWGKVYDEAWERIDKKVEGLSKHIKLEEERRSEDAQSKAALTDWLRAKASFVIEGLKEADKDEFCRCELKLQKWYGDLRGKPFAIEAENSILDISGFSKQYNCAFIWQKDGVKKLNLYLIINYFKGGKLRFKKIKPEAFEANRFYTVINKKSGEIVPMEVNFNFDDPNLIILPLAFGKRQGREFIWNDLLSLETGSLKLANGRVIEKTLYNRRTRQDEPALFVALTFERREVLDSSNIKPMNLIGVDRGENIPAVIALTDPEGCPLSRFKDSLGNPTHILRIGESYKEKQRTIQAKKEVEQRRAGGYSRKYASKAKNLADDMVRNTARDLLYYAVTQDAMLIFENLSRGFGRQGKRTFMAERQYTRMEDWLTAKLAYEGLPSKTYLSKTLAQYTSKTCSNCGFTITSADYDRVLEKLKKTATGWMTTINGKELKVEGQITYYNRYKRQNVVKDLSVELDRLSEESVNNDISSWTKGRSGEALSLLKKRFSHRPVQEKFVCLNCGFETHADEQAALNIARSWLFLRSQEYKKYQTNKTTGNTDKRAFVETWQSFYRKKLKEVWKPAV

SEQ ID NO: 39622 - protein, 978 aa, synthetic construct
  REGION 1..978: note = engineered CasX variant
QEIKRANKIRRRLVKDSNTKKAGKTGPMKTLLVRVMTPDLRERLENLRKKPENIPQPISNTSRANLNKLLTDYTEMKKAILHVYWEEFQKDPVGLMSRVAQPASKKIDQNKLKPEMDEKGNLTTAGFACSQCGQPLFVYKLEQVSEKGKAYTNYFGRCNVAEHEKLILLAQLKPEKDSDEAVTYSLGKFGQRALDFYSIHVTKESTHPVKPLAQIAGNRYASGPVGKALRDACMGTIASFLSKYQDIIIEHQKVVKGNQKRLESLRELAGKENLEYPSVTLPPQPHTKEGVDAYNEVIARVRMWVNLNLWQKLKLSRDDAKPLLRLKGFPSFPLVERQANEVDWWDMVCNVKKLINEKKEDGKVFWQNLAGYKRQEALRPYLSSEEDRKKGKKFARYQLGDLLLHLEKKHGEDWGKVYDEAWERIDKKVEGLSKHIKLEEERRSEDAQSKAALTDWLRAKASFVIEGLKEADKDEFCRCDLKLQKWYGDLRGKPFAIEAENSILDISGFSKQYNCAFIWQKDGVKKLNLYLIINYFKGGKLRFKKIKPEAFEANRFYTVINKKSGEIVPMEVNFNFDDPNLIILPLAFGKRQGREFIWNDLLSLETGSLKLANGRVIEKTLYNRRTRQDEPALFVALTFERREVLDSSNIKPMNLIGVDRGENIPAVIALTDPEGCPLSRFKDSLGNPTHILRIGESYKEKQRTIQAKKEVEQRRAGGYSRKYASKAKNLADDMVRNTARDLLYYAVTQDAMLIFENLSRGFGRQGKRTFMAERQYTRMEDWLTAKLAYEGLPSKTYLSKTLAQYTSKTCSNCGFTITSADYDRVLEKLKKTATGWMTTINGKELKVEGQITYYNRYKRQNVVKDLSVELDRLSEESVNNDISSWTKGRSGEALSLLKKRFSHRPVQEKFVCLNCGFETHADEQAALNIARSWLFLRSQEYKKYQTNKTTGNTDKRAFVETWQSFYRKKLKEVWKPAV

SEQ ID NO: 39623 - protein, 978 aa, synthetic construct
  REGION 1..978: note = engineered CasX variant
QEIKRANKIRRRLVKDSNTKKAGKTGPMKTLLVRVMTPDLRERLENLRKKPENIPQPISNTSRANLNKLLTDYTEMKKAILHVYWEEFQKDPVGLMSRVAQPASKKIDQNKLKPEMDEKGNLTTAGFACSQCGQPLFVYKLEQVSEKGKAYTNYFGRCNVAEHEKLILLAQLKPEKDSDEAVTYSLGKFGQRALDFYSIHVTKESTHPVKPLAQIAGNRYASGPVGKALRDACMGTIASFLSKYQDIIIEHQKVVKGNQKRLESLRELAGKENLEYPSVTLPPQPHTKEGVDAYNEVIARVRMWVNLNLWQKLKLSRDDAKPLLRLKGFPSFPLVERQANEVDWWDMVCNVKKLINEKKEDGKVFWQNLAGYKRQEALRPYLSSEEDRKKGKKFARYQLGDLLLHLEKKHGEDWGKVYDEAWERIDKKVEGLSKHIKLEEERRSEDAQSKAALTDWLRAKASFVIEGLKEADKDEFCRCELKLQKWYGDLRGKPFAIEAENSILDISGFSKQYNCAFIWQKDGVKKLNLYLIINYFKGGKLRFKKIKPEAFEANRFYTVINKKSGEIVPMEVNFNFDDPNLIILPLAFGKRFGREFIWNDLLSLETGSLKLANGRVIEKTLYNRRTRQDEPALFVALTFERREVLDSSNIKPMNLIGVDRGENIPAVIALTDPEGCPLSRFKDSLGNPTHILRIGESYKEKQRTIQAKKEVEQRRAGGYSRKYASKAKNLADDMVRNTARDLLYYAVTQDAMLIFENLSRGFGRQGKRTFMAERQYTRMEDWLTAKLAYEGLPSKTYLSKTLAQYTSKTCSNCGFTITSADYDRVLEKLKKTATGWMTTINGKELKVEGQITYYNRYKRQNVVKDLSVELDRLSEESVNNDISSWTKGRSGEALSLLKKRFSHRPVQEKFVCLNCGFETHADEQAALNIARSWLFLRSQEYKKYQTNKTTGNTDKRAFVETWQSFYRKKLKEVWKPAV

SEQ ID NO: 39624 - protein, 978 aa, synthetic construct
  REGION 1..978: note = engineered CasX variant
QEIKRANKIRRRLVKDSNTKKAGKTGPMKTLLVRVMTPDLRERLENLRKKPENIPQPISNTSRANLNKLLTDYTEMKKAILHVYWEEFQKDPVGLMSRVAQPASKKIDQNKLKPEMDEKGNLTTAGFACSQCGQPLFVYKLEQVSEKGKAYTNYFGRCNVAEHEKLILLAQLKPEKDSDEAVTYSLGKFGQRALDFYSIHVTKESTHPVKPLAQIAGNRYASGPVGKALRDACMGTIASFLSKYQDIIIEHQKVVKGNQKRLESLRELAGKENLEYPSVTLPPQPHTKEGVDAYNEVIARVRMWVNLNLWQKLKLSRDDAKPLLRLKGFPSFPLVERQANEVDWWDMVCNVKKLINEKKEDGKVFWQNLAGYKRQEALRPYLSSEEDRKKGKKFARYQLGDLLLHLEKKHGEDWGKVYDEAWERIDKKVEGLSKHIKLEEERRSEDAQSKAALTDWLRAKASFVIEGLKEADKDEFCRCELKLQKWYGDLRGKPFAIEAENSILDISGFSKQYNCAFIWQKDGVKKLNLYLIINYFKGGKLRFKKIKPEAFEANRFYTVINKKSGEIVPMEVNFNFDDPNLIILPLAFGKRVGREFIWNDLLSLETGSLKLANGRVIEKTLYNRRTRQDEPALFVALTFERREVLDSSNIKPMNLIGVDRGENIPAVIALTDPEGCPLSRFKDSLGNPTHILRIGESYKEKQRTIQAKKEVEQRRAGGYSRKYASKAKNLADDMVRNTARDLLYYAVTQDAMLIFENLSRGFGRQGKRTFMAERQYTRMEDWLTAKLAYEGLPSKTYLSKTLAQYTSKTCSNCGFTITSADYDRVLEKLKKTATGWMTTINGKELKVEGQITYYNRYKRQNVVKDLSVELDRLSEESVNNDISSWTKGRSGEALSLLKKRFSHRPVQEKFVCLNCGFETHADEQAALNIARSWLFLRSQEYKKYQTNKTTGNTDKRAFVETWQSFYRKKLKEVWKPAV

SEQ ID NO: 39625 - protein, 979 aa, synthetic construct
  REGION 1..979: note = engineered CasX variant
QEIKRANKIRRRLVKDSNTKKAGKTGPMKTLLVRVMTPDLRERLENLRKKPENIPQPISNTSRANLNKLLTDYTEMKKAILHVYWEEFQKDPVGLMSRVAQPASKKIDQNKLKPEMDEKGNLTTAGFACSQCGQPLFVYKLEQVSEKGKAYTNYFGRCNVAEHEKLILLAQLKPEKDSDEAVTYSLGKFGQRALDFYSIHVTKESTHPVKPLAQIAGNRYASGPVGKALRDACMGTIASFLSKYQDIIIEHQKVVKGNQKRLESLRELAGKENLEYPSVTLPPQPHTKEGVDAYNEVIARVRMWVNLNLWQKLKLSRDDAKPLLRLKGFPSFPLVERQANEVDWWDMVCNVKKLINEKKEDGKVFWQNLAGYKRQEALRPYLSSEEDRKKGKKFARYQLGDLLLHLEKKHGEDWGKVYDEAWERIDKKVEGLSKHIKLEEERRSEDAQSKAALTDWLRAKASFVIEGLKEADKDEFCRCELKLQKWYGDLRGKPFAIEAENSILDISGFSKQYNCAFIWQKDGVKKLNLYLIINYFKGGKLRFKKIKPEAFEANRFYTVINKKSGEIVPMEVNFNFDDPNLIILPLAFGKRQGREFIWNDLLSLETGSLKLANGRVIEKTLYNRRTRQDEPALFVALTFERREVLDSSNIKTPMNLIGVDRGENIPAVIALTDPEGCPLSRFKDSLGNPTHILRIGESYKEKQRTIQAKKEVEQRRAGGYSRKYASKAKNLADDMVRNTARDLLYYAVTQDAMLIFENLSRGFGRQGKRTFMAERQYTRMEDWLTAKLAYEGLPSKTYLSKTLAQYTSKTCSNCGFTITSADYDRVLEKLKKTATGWMTTINGKELKVEGQITYYNRYKRQNVVKDLSVELDRLSEESVNNDISSWTKGRSGEALSLLKKRFSHRPVQEKFVCLNCGFETHADEQAALNIARSWLFLRSQEYKKYQTNKTTGNTDKRAFVETWQSFYRKKLKEVWKPAV

SEQ ID NO: 39626 - protein, 979 aa, synthetic construct
  REGION 1..979: note = engineered CasX variant
QEIKRANKIRRRLVKDSNTKKAGKTGPMKTLLVRVMTPDLRERLENLRKKPENIPQPISNTSRANLNKLLTDYTEMKKAILHVYWEEFQKDPVGLMSRVAQPASKKIDQNKLKPEMDEKGNLTTAGFACSQCGQPLFVYKLEQVSEKGKAYTNYFGRCNVAEHEKLILLAQLKPEKDSDEAVTYSLGKFGQRALDFYSIHVTKESTHPVKPLAQIAGNRYASGPVGKALRDACMGTIASFLSKYQDIIIEHQKVVKGNQKRLESLRELAGKENLEYPSVTLPPQPHTKEGVDAYNEVIARVRMWVNLNLWQKLKLSRDDAKPLLRLKGFPSFPLVERQANEVDWWDMVCNVKKLINEKKEDGKVFWQNLAGYKRQEALRPYLSSEEDRKKGKKFARYQLGDLLLHLEKKHGEDWGKVYDEAWERIDKKVEGLSKHIKLEEERRSEDAQSKAALTDWLRAKASFVIEGLKEADKDEFCRCELKLQKWYGDLRGKPFAIEAENSILDISGFSKQYNCAFIWQKDGVKKLNLYLIINYFKGGKLRFKKIKPEAFEANRFYTVINKKSGEIVPMEVNFNFDDPNLIILPLAFGKRQGREFIWNDLLSLETGSLKLANGRVIEKTLYNRRTRQDEPALFVALTFERREVLDSSNIKPMSNLIGVDRGENIPAVIALTDPEGCPLSRFKDSLGNPTHILRIGESYKEKQRTIQAKKEVEQRRAGGYSRKYASKAKNLADDMVRNTARDLLYYAVTQDAMLIFENLSRGFGRQGKRTFMAERQYTRMEDWLTAKLAYEGLPSKTYLSKTLAQYTSKTCSNCGFTITSADYDRVLEKLKKTATGWMTTINGKELKVEGQITYYNRYKRQNVVKDLSVELDRLSEESVNNDISSWTKGRSGEALSLLKKRFSHRPVQEKFVCLNCGFETHADEQAALNIARSWLFLRSQEYKKYQTNKTTGNTDKRAFVETWQSFYRKKLKEVWKPAV

SEQ ID NO: 39627 - protein, 978 aa, synthetic construct
  REGION 1..978: note = engineered CasX variant
QEIKRANKIRRRLVKDSNTKKAGKTGPMKTLLVRVMTPDLRERLENLRKKPENIPQPISNTSRANLNKLLTDYTEMKKAILHVYWEEFQKDPVGLMSRVAQPASKKIDQNKLKPEMDEKGNLTTAGFACSQCGQPLFVYKLEQVSEKGKAYTNYFGRCNVAEHEKLILLAQLKPEKDSDEAVTYSLGKFGQRALDFYSIHVTKESTHPVKPLAQIAGNRYASGPVGKALRDACMGTIASFLSKYQDIIIEHQKVVKGNQKRLESLRELAGKENLEYPSVTLPPQPHTKEGVDAYNEVIARVRMWVNLNLWQKLKLSRDDAKPLLRLKGFPSFPLVERQANEVDWWDMVCNVKKLINEKKEDGKVFWQNLAGYKRQEALRPYLSSEEDRKKGKKFARYQLGDLLLHLEKKHGEDWGKVYDEAWERIDKKVEGLSKHIKLEEERRSEDAQSKAALTDWLRAKASFVIEGLKEADKDEFCRCELKLQKWYGDLRGKPFAIEAENSILDISGFSKQYNCAFIWQKDGVKKLNLYLIINYFKGGKLRFKKIKPEAFEANRFYTVINKKSGEIVPMEVNFNFDDPNLIILPLAFGKRQGREFIWNDLLSLETGSLKLANGRVIEKTLYNRRTRQDEPALFVALTFERREVLDSSNIKPMNLIGVDRGENIPAVIALTDPEGCPLSRFKDSLGNPTHILRIRESYKEKQRTIQAKKEVEQRRAGGYSRKYASKAKNLADDMVRNTARDLLYYAVTQDAMLIFENLSRGFGRQGKRTFMAERQYTRMEDWLTAKLAYEGLPSKTYLSKTLAQYTSKTCSNCGFTITSADYDRVLEKLKKTATGWMTTINGKELKVEGQITYYNRYKRQNVVKDLSVELDRLSEESVNNDISSWTKGRSGEALSLLKKRFSHRPVQEKFVCLNCGFETHADEQAALNIARSWLFLRSQEYKKYQTNKTTGNTDKRAFVETWQSFYRKKLKEVWKPAV

SEQ ID NO: 39628 - protein, 978 aa, synthetic construct
  REGION 1..978: note = engineered CasX variant
QEIKRANKIRRRLVKDSNTKKAGKTGPMKTLLVRVMTPDLRERLENLRKKPENIPQPISNTSRANLNKLLTDYTEMKKAILHVYWEEFQKDPVGLMSRVAQPASKKIDQNKLKPEMDEKGNLTTAGFACSQCGQPLFVYKLEQVSEKGKAYTNYFGRCNVAEHEKLILLAQLKPEKDSDEAVTYSLGKFGQRALDFYSIHVTKESTHPVKPLAQIAGNRYASGPVGKALRDACMGTIASFLSKYQDIIIEHQKVVKGNQKRLESLRELAGKENLEYPSVTLPPQPHTKEGVDAYNEVIARVRMWVNLNLWQKLKLSRDDAKPLLRLKGFPSFPLVERQANEVDWWDMVCNVKKLINEKKEDGKVFWQNLAGYKRQEALRPYLSSEEDRKKGKKFARYQLGDLLLHLEKKHGEDWGKVYDEAWERIDKKVEGLSKHIKLEEERRSEDAQSKAALTDWLRAKASFVIEGLKEADKDEFCRCELKLQKWYGDLRGKPFAIEAENSILDISGFSKQYNCAFIWQKDGVKKLNLYLIINYFKGGKLRFKKIKPEAFEANRFYTVINKKSGEIVPMEVNFNFDDPNLIILPLAFGKRQGREFIWNDLLSLETGSLKLANGRVIEKTLYNRRTRQDEPALFVALTFERREVLDSSNIKPMNLIGVDRGENIPAVIALTDPEGCPLSRFKDSLGNPTHILRIGESYKEKQRTIQAKKEVEQRRAGGYSRKYASKAKNLADDMVRNTARDLLYYAVTQDAMLIFENLSRGFGRQGKRTFSAERQYTRMEDWLTAKLAYEGLPSKTYLSKTLAQYTSKTCSNCGFTITSADYDRVLEKLKKTATGWMTTINGKELKVEGQITYYNRYKRQNVVKDLSVELDRLSEESVNNDISSWTKGRSGEALSLLKKRFSHRPVQEKFVCLNCGFETHADEQAALNIARSWLFLRSQEYKKYQTNKTTGNTDKRAFVETWQSFYRKKLKEVWKPAV

SEQ ID NO: 39629 - protein, 978 aa, synthetic construct
  REGION 1..978: note = engineered CasX variant
QEIKRANKIRRRLVKDSNTKKAGKTGPMKTLLVRVMTPDLRERLENLRKKPENIPQPISNTSRANLNKLLTDYTEMKKAILHVYWEEFQKDPVGLMSRVAQPASKKIDQNKLKPEMDEKGNLTTAGFACSQCGQPLFVYKLEQVSEKGKAYTNYFGRCNVAEHEKLILLAQLKPEKDSDEAVTYSLGKFGQRALDFYSIHVTKESTHPVKPLAQIAGNRYASGPVGKALRDACMGTIASFLSKYQDIIIEHQKVVKGNQKRLESLRELAGKENLEYPSVTLPPQPHTKEGVDAYNEVIARVRMWVNLNLWQKLKLSRDDAKPLLRLKGFPSFPLVERQANEVDWWDMVCNVKKLINEKKEDGKVFWQNLAGYKRQEALRPYLSSEEDRKKGKKFARYQLGDLLLHLEKKHGEDWGKVYDEAWERIDKKVEGLSKHIKLEEERRSEDAQSKAALTDWLRAKASFVIEGLKEADKDEFCRCELKLQKWYGDLRGKPFAIEAENSILDISGFSKQYNCAFIWQKDGVKKLNLYLIINYFKGGKLRFKKIKPEAFEANRFYTVINKKSGEIVPMEVNFNFDDPNLIILPLAFGKRQGREFIWNDLLSLETGSLKLANGRVIEKTLYNRRTRQDEPALFVALTFERREVLDSSNIKPMNLIGVDRGENIPAVIALTDPEGCPLSRFKDSLGNPTHILRIGESYKEKQRTIQAKKEVEQRRAGGYSRKYASKAKNLADDMVRNTARDLLYYAVTQDAMLIFENLSRGFGRQGKRTFMAERQYTRMEDWLTAKLAYEGLPSKTYLSKTLAQYTSKTCSNCGFTITSADYDRVLEKLKKTATGWMTTINGKELKVEGQITYYNRYKRQNVVKDLSVELDRLSEESVNNDISSWDKGRSGEALSLLKKRFSHRPVQEKFVCLNCGFETHADEQAALNIARSWLFLRSQEYKKYQTNKTTGNTDKRAFVETWQSFYRKKLKEVWKPAV

SEQ ID NO: 39630 - protein, 978 aa, synthetic construct
  REGION 1..978: note = engineered CasX variant
QEIKRANKIRRRLVKDSNTKKAGKTGPMKTLLVRVMTPDLRERLENLRKKPENIPQPISNTSRANLNKLLTDYTEMKKAILHVYWEEFQVDPVGLMSRVAQPASKKIDQNKLKPEMDEKGNLTTAGFACSQCGQPLFVYKLEQVSEKGKAYTNYFGRCNVAEHEKLILLAQLKPEKDSDEAVTYSLGKFGQRALDFYSIHVTKESTHPVKPLAQIAGNRYASGPVGKALRDACMGTIASFLSKYQDIIIEHQKVVKGNQKRLESLRELAGKENLEYPSVTLPPQPHTKEGVDAYNEVIARVRMWVNLNLWQKLKLSRDDAKPLLRLKGFPSFPLVERQANEVDWWDMVCNVKKLINEKKEDGKVFWQNLAGYKRQEALRPYLSSEEDRKKGKKFARYQLGDLLLHLEKKHGEDWGKVYDEAWERIDKKVEGLSKHIKLEEERRSEDAQSKAALTDWLRAKASFVIEGLKEADKDEFCRCELKLQKWYGDLRGKPFAIEAENSILDISGFSKQYNCAFIWQKDGVKKLNLYLIINYFKGGKLRFKKIKPEAFEANRFYTVINKKSGEIVPMEVNFNFDDPNLIILPLAFGKRQGREFIWNDLLSLETGSLKLANGRVIEKTLYNRRTRQDEPALFVALTFERREVLDSSNIKPMNLIGVDRGENIPAVIALTDPEGCPLSRFKDSLGNPTHILRIGESYKEKQRTIQAKKEVEQRRAGGYSRKYASKAKNLADDMVRNTARDLLYYAVTQDAMLIFENLSRGFGRQGKRTFMAERQYTRMEDWLTAKLAYEGLPSKTYLSKTLAQYTSKTCSNCGFTITSADYDRVLEKLKKTATGWMTTINGKELKVEGQITYYNRYKRQNVVKDLSVELDRLSEESVNNDISSWTKGRSGEALSLLKKRFSHRPVQEKFVCLNCGFETHADEQAALNIARSWLFLRSQEYKKYQTNKTTGNTDKRAFVETWQSFYRKKLKEVWKPAV

SEQ ID NO: 39631 - protein, 979 aa, synthetic construct
  REGION 1..979: note = engineered CasX variant
QEIKRALNKIRRRLVKDSNTKKAGKTGPMKTLLVRVMTPDLRERLENLRKKPENIPQPISNTSRANLNKLLTDYTEMKKAILHVYWEEFQKDPVGLMSRVAQPASKKIDQNKLKPEMDEKGNLTTAGFACSQCGQPLFVYKLEQVSEKGKAYTNYFGRCNVAEHEKLILLAQLKPEKDSDEAVTYSLGKFGQRALDFYSIHVTKESTHPVKPLAQIAGNRYASGPVGKALRDACMGTIASFLSKYQDIIIEHQKVVKGNQKRLESLRELAGKENLEYPSVTLPPQPHTKEGVDAYNEVIARVRMWVNLNLWQKLKLSRDDAKPLLRLKGFPSFPLVERQANEVDWWDMVCNVKKLINEKKEDGKVFWQNLAGYKRQEALRPYLSSEEDRKKGKKFARYQLGDLLLHLEKKHGEDWGKVYDEAWERIDKKVEGLSKHIKLEEERRSEDAQSKAALTDWLRAKASFVIEGLKEADKDEFCRCELKLQKWYGDLRGKPFAIEAENSILDISGFSKQYNCAFIWQKDGVKKLNLYLIINYFKGGKLRFKKIKPEAFEANRFYTVINKKSGEIVPMEVNFNFDDPNLIILPLAFGKRQGREFIWNDLLSLETGSLKLANGRVIEKTLYNRRTRQDEPALFVALTFERREVLDSSNIKPMNLIGVDRGENIPAVIALTDPEGCPLSRFKDSLGNPTHILRIGESYKEKQRTIQAKKEVEQRRAGGYSRKYASKAKNLADDMVRNTARDLLYYAVTQDAMLIFENLSRGFGRQGKRTFMAERQYTRMEDWLTAKLAYEGLPSKTYLSKTLAQYTSKTCSNCGFTITSADYDRVLEKLKKTATGWMTTINGKELKVEGQITYYNRYKRQNVVKDLSVELDRLSEESVNNDISSWTKGRSGEALSLLKKRFSHRPVQEKFVCLNCGFETHADEQAALNIARSWLFLRSQEYKKYQTNKTTGNTDKRAFVETWQSFYRKKLKEVWKPAV

SEQ ID NO: 39632 - protein, 978 aa, synthetic construct
  REGION 1..978: note = engineered CasX variant
QEIKRANKIRRRLVKDSNTKKAGKTGPMKTLLVRVMTPDLRERLENLRKKPENIPQPISNTSRANLNKLLTDYTEMKKAILHVYWEEFQKDPVGLMSRVAQPASKKIDQNKLKPEMDEKGNLTTAGFACSQCGQPLFVYKLEQVSEKGKAYTNYVGRCNVAEHEKLILLAQLKPEKDSDEAVTYSLGKFGQRALDFYSIHVTKESTHPVKPLAQIAGNRYASGPVGKALRDACMGTIASFLSKYQDIIIEHQKVVKGNQKRLESLRELAGKENLEYPSVTLPPQPHTKEGVDAYNEVIARVRMWVNLNLWQKLKLSRDDAKPLLRLKGFPSFPLVERQANEVDWWDMVCNVKKLINEKKEDGKVFWQNLAGYKRQEALRPYLSSEEDRKKGKKFARYQLGDLLLHLEKKHGEDWGKVYDEAWERIDKKVEGLSKHIKLEEERRSEDAQSKAALTDWLRAKASFVIEGLKEADKDEFCRCELKLQKWYGDLRGKPFAIEAENSILDISGFSKQYNCAFIWQKDGVKKLNLYLIINYFKGGKLRFKKIKPEAFEANRFYTVINKKSGEIVPMEVNFNFDDPNLIILPLAFGKRQGREFIWNDLLSLETGSLKLANGRVIEKTLYNRRTRQDEPALFVALTFERREVLDSSNIKPMNLIGVDRGENIPAVIALTDPEGCPLSRFKDSLGNPTHILRIGESYKEKQRTIQAKKEVEQRRAGGYSRKYASKAKNLADDMVRNTARDLLYYAVTQDAMLIFENLSRGFGRQGKRTFMAERQYTRMEDWLTAKLAYEGLPSKTYLSKTLAQYTSKTCSNCGFTITSADYDRVLEKLKKTATGWMTTINGKELKVEGQITYYNRYKRQNVVKDLSVELDRLSEESVNNDISSWTKGRSGEALSLLKKRFSHRPVQEKFVCLNCGFETHADEQAALNIARSWLFLRSQEYKKYQTNKTTGNTDKRAFVETWQSFYRKKLKEVWKPAV

SEQ ID NO: 39633 - protein, 978 aa, synthetic construct
  REGION 1..978: note = engineered CasX variant
QEIKRANKIRRRLVKDSNTKKAGKTGPMKTLLVRVMTPDLRERLENLRKKPENIPQPISNTSRANLNKLLTDYTEMKKAILHVYWEEFQKDPVGLMSRVAQPASKKIDQNKLKPEMDEKGNLTTAGFACSQCGQPLFVYKLEQVSEKGKAYTNYFGRCNVAEHEKLILLAQLKPEKDSDEAVTYSLGKFGQRALDFYSIHVTKESTHPVKPLAQIAGNRYASGPVGKALRDACMGTIASFLSKYQDIIIEHQKVVKGNQKRLESLRELAGKENLEYPSVTLPPQPHTKEGVDAYNEVIARVRMWVNLNLWQKLKLSRDDAKPLLRLKGFPSFPLVERQANEVDWWDMVCNVKKLINEKKEDGKVFWQNLAGYKRQEALRPYLSSEEDRKKGKKFARYQLGDLLLHLEKKHGEDWGKVYDEAWERIDKKVEGLSKHIKLEEERRSEDAQSKAALTDWLRAKASFVIEGLKEADKDEFCRCELKLQKWYGDLRGKPFAIEAENSILDISGFSKQYNCAFIWQKDGVKKLNLYLIINYFKGGKLRFKKIKPEAFEANRFYTVINKKSGEIVPMEVNFNFDDPNLIILPLAFGKRQGREFIWNDLLSLETGSLKLANGRVIEKTLYNRRTRQDEPALFVALTFERREVLDSSNIKPMNLIGVDRGENIPAVIALTDPEGCPLSRFKDSLGNPTHILRIGESYKEKQRTIQAKKEVEQRRAGGYSRKYASKAKNLADDMVRNTARDLLYYAVTQDAMLIFENLSRGFGRQGKRTFMAERQYTRMEDWLTAKLAYEGLASKTYLSKTLAQYTSKTCSNCGFTITSADYDRVLEKLKKTATGWMTTINGKELKVEGQITYYNRYKRQNVVKDLSVELDRLSEESVNNDISSWTKGRSGEALSLLKKRFSHRPVQEKFVCLNCGFETHADEQAALNIARSWLFLRSQEYKKYQTNKTTGNTDKRAFVETWQSFYRKKLKEVWKPAV

SEQ ID NO: 39634 - protein, 978 aa, synthetic construct
  REGION 1..978: note = engineered CasX variant
QEIKRANKIRRRLVKDSNTKKAGKTGPMKTLLVRVMTPDLRERLENLRKKPENIPQPISNTSRANLNKLLTDYTEMKKAILHVYWEEFQKDPVGLMSRVAQPASKKIDQNKLKPEMDEKGNLTTAGFACSQCGQPLFVYKLEQVSEKGKAYTNYFGRCNVAEHEKLILLAQLKPEKDSDEAVTYSLGKFGQRALDFYSIHVTKESTHPVKPLAQIAGNRYASGPVGKALRDACMGTIASFLSKYQDIIIEHQKVVKGNQKRLESLRELAGKENLEYPSVTLPPQPHTKEGVDAYNEVIARVRMWVNLNLWQKLKLSRDDAKPLLRLKGFPSFPLVERQANEVDWWDMVCNVKKLINEKKEDGKVFWQNLAGYKRQEALRPYLSSEEDRKKGKKFARYQLGDLLLHLEKKHGEDWGKVYDEAWERIDKKVEGLSKHIKLEEERRSEDAQSKAALTDWLRAKASFVIEGLKEADKDEFCRCELKLQKWYGDLRGKPFAIEAENSILDISGFSKQYNCAFIWQKDGVKKLNLYLIINYFKGGKLRFKKIKPEAFEANRFYTVINKKSGEIVPMEVNFNFDDPNLIILPLAFGKRQGREFIWNDLLSLETGSLKLANGRVIEKTLYNRRTRQDEPALFVALTFERREVLDSSNIKPMNLIGVDRGENIPAVIALTDPEGCPLSRFKDSLGNPTHILRIGESYKEKQRTIQAKKEVEQRRAGGYSRKYASKAKNLADDMVRNTARDLLYYAVTQDAMLIFENLSRGFGRQGKRTFMAERQYTRMEDWLTAKLAYEGLPSKVYLSKTLAQYTSKTCSNCGFTITSADYDRVLEKLKKTATGWMTTINGKELKVEGQITYYNRYKRQNVVKDLSVELDRLSEESVNNDISSWTKGRSGEALSLLKKRFSHRPVQEKFVCLNCGFETHADEQAALNIARSWLFLRSQEYKKYQTNKTTGNTDKRAFVETWQSFYRKKLKEVWKPAV

SEQ ID NO: 39635 - protein, 979 aa, synthetic construct
  REGION 1..979: note = engineered CasX variant
QEIKRANKIRRRLVKDSNTKKAGKTGPMKTLLVRVMTPDLRERLENLRKKPENIPQPISNTSRANLNKLLTDYTEMKKAILHVYWEEFQKDPVGLMSRVAQPASKKIDQNKLKPEMDEKGNLTTAGFACSQCGQPLFVYKLEQVSEKGKAYTNYFGRCNVAEHEKLILLAQLKPEKDSDEAVTYSLGKFGQRALDFYSIHVTKESTHPVKPLAQIAGNRYASGPVGKALRDACMGTIASFLSKYQDIIIEHQKVVKGNQKRLESLRELAGKENLEYPSVTLPPQPHTKEGVDAYNEVIARVRMWVNLNLWQKLKLSRDDAKPLLRLKGFPSFPLVERQANEVDWWDMVCNVKKLINEKKEDGKVFWQNLAGYKRQEALRPYLSSEEDRKKGKKFARYQLGDLLLHLEKKHGEDWGKVYDEAWERIDKKVEGLSKHIKLEEERRSEDAQSKAALTDWLRAKASFVIEGLKEADKDEFCRCELKLQKWYGDLRGKPFAIEAENSILDISGFSKQYNCAFIWQKDGVKKLNLYLIINYFKGGKLRFKKIKPEAFEANRFYTVINKKSGEIVPMEVNFNFDDPNLIILPLAFGKRQGREFIWNDLLSLETGSLKLANGRVIEKTLYNRRTRQDEPALFVALTFERREVLDSSNIKPMNLIGVDRGENIPAVIALTDPEGCPLSRFKDSLGNPTHILRIGESYKEKQRTIQAKKEVEQRRAGGYSRKYASKAKNLADDMVRNTARDLLYYAVTQDAMLIFENLSRGFGRQGKRTFMAERQYTRMEDWLTAKLAYEGPLPSKTYLSKTLAQYTSKTCSNCGFTITSADYDRVLEKLKKTATGWMTTINGKELKVEGQITYYNRYKRQNVVKDLSVELDRLSEESVNNDISSWTKGRSGEALSLLKKRFSHRPVQEKFVCLNCGFETHADEQAALNIARSWLFLRSQEYKKYQTNKTTGNTDKRAFVETWQSFYRKKLKEVWKPAV

SEQ ID NO: 39636 - protein, 979 aa, synthetic construct
  REGION 1..979: note = engineered CasX variant
QEIKRANKIRRRLVKDSNTKKAGKTGPMKTLLVRVMTPDLRERLENLRKKPENIPQPISNTSRANLNKLLTDYTEMKKAILHVYWEEFQKDPVGLMSRVAQPASKKIDQNKLKPEMDEKGNLTTAGFACSQCGQPLFVYKLEQVSEKGKAYTNYFGRCNVAEHEKLILLAQLKPEKDSDEAVTYSLGKFGQRALDFYSIHVTKESTHPVKPLAQIAGNRYASGPVGKALRDACMGTIASFLSKYQDIIIEHQKVVKGNQKRLESLRELAGKENLEYPSVTLPPQPHTKEGVDAYNEVIARVRMWVNLNLWQKLKLSRDDAKPLLRLKGFPSFPLVERQANEVDWWDMVCNVKKLINEKKEDGKVFWQNLAGYKRQEALRPYLSSEEDVRKKGKKFARYQLGDLLLHLEKKHGEDWGKVYDEAWERIDKKVEGLSKHIKLEEERRSEDAQSKAALTDWLRAKASFVIEGLKEADKDEFCRCELKLQKWYGDLRGKPFAIEAENSILDISGFSKQYNCAFIWQKDGVKKLNLYLIINYFKGGKLRFKKIKPEAFEANRFYTVINKKSGEIVPMEVNFNFDDPNLIILPLAFGKRQGREFIWNDLLSLETGSLKLANGRVIEKTLYNRRTRQDEPALFVALTFERREVLDSSNIKPMNLIGVDRGENIPAVIALTDPEGCPLSRFKDSLGNPTHILRIGESYKEKQRTIQAKKEVEQRRAGGYSRKYASKAKNLADDMVRNTARDLLYYAVTQDAMLIFENLSRGFGRQGKRTFMAERQYTRMEDWLTAKLAYEGLPSKTYLSKTLAQYTSKTCSNCGFTITSADYDRVLEKLKKTATGWMTTINGKELKVEGQITYYNRYKRQNVVKDLSVELDRLSEESVNNDISSWTKGRSGEALSLLKKRFSHRPVQEKFVCLNCGFETHADEQAALNIARSWLFLRSQEYKKYQTNKTTGNTDKRAFVETWQSFYRKKLKEVWKPAV

SEQ ID NO: 39637 - protein, 978 aa, synthetic construct
  REGION 1..978: note = engineered CasX variant
QEIKRANKIRRRLVKDSNTKKAGKTGPMKTLLVRVMTPDLRERLENLRKKPENIPQPISNTSRANLNKLLTDYTEMKKAILHVYWEEFQKDPVGLMSRVAQPASKKIDQNKLKPEMDEKGNLTTAGFACSQCGQPLFVYKLEQVSEKGKAYTNYFGRCNVAEHEKLILLAQLKPEKDSDEAVTYSLGKFGQRALDFYSIHVTKESTHPVKPLAQIAGNRYASGPVGKALRDACMGTIASFLSKYQDIIIEHQKVVKGNQKRLESLRELAGKENLEYPSVTLPPQPHTKEGVDAYNEVIARVRMWVNLNLWQKLKLSRDDAKPLLRLKGFPSFPLVERQANEVDWWDMVCNVKKLINEKKEDGKVFWQNLAGYKRQEALRPYLSSEEDRKKGKKFARYQLGDLLLHLEKKHGEDWGKVYDEAWERIDKKVEGLSKHIKLEEERRSEDAQSKAALTDWLRAKASFVIEGLKEADKDEFCRCELKLQKWYGDLRGKPFAIEAENSILDISGFSKQYNCAFIWQKDGVKKLNLYLIINYFKGGKLRFKKIKPEAFEANRFYTVINKKSGEIVPMEVNFNFDDPNLIILPLAFGKRQGREFIWNDLLSLETGSLKLANGRVIEKTLYNRRTRQDEPALFVALTFERREVLDSSNIKPMNLIGVDRGENIPAVIALTDPEGCPLSRFKDSLGNPTHILRIGESYKEKQRTIQAKKEVEQRRAGGYSRKYASKAKNLADDMVRNTARDLLYYAVTQDAMLIFENLSRGFGRQGKRTFMAERQYTRMEDWLTAKLAYEGLPSKTYLSKTLAQYTSKTCSNCGFTITSADYDRMLEKLKKTATGWMTTINGKELKVEGQITYYNRYKRQNVVKDLSVELDRLSEESVNNDISSWTKGRSGEALSLLKKRFSHRPVQEKFVCLNCGFETHADEQAALNIARSWLFLRSQEYKKYQTNKTTGNTDKRAFVETWQSFYRKKLKEVWKPAV

SEQ ID NO: 39638 - protein, 978 aa, synthetic construct
  REGION 1..978: note = engineered CasX variant
QEIKRANKIRRRLVKDSNTKKAGKTGPMKTLLVRVMTPDLRERLENLRKKPENIPQPISNTSRANLNKLLTDYTEMKKAILHVYWEEFQKDPVGLMSRVAQPASKKIDQNKLKPEMDEKGNLTTAGFACSQCGQPLFVYKLEQVSEKGKAYTNYFGRCNVAEHEKLILLAQLKPEKDSDEAVTYSLGKFGQRALDFYSIHVTKESTHPVKPLAQIAGNRYASGPVGKALRDACMGTIASFLSKYQDIIIEHQKVVKGNQKRLESLRELAGKENLEYPSVTLPPQPHTKEGVDAYNEVIARVRMWVNLNLWQKLKLSRDDAKPLLRLKGFPSFPLVERQANEVDWWDMVCNVKKLINEKKEDGKVFWQNLAGYKRQEALRPYLSSEEDRKKGKKFARYQLGDLLLHLEKKHGEDWGKVYDEAWERIDKKVEGLSKHIKLEEERRSEDAQSKAALTDWLRAKASFVIEGLKEADKDEFCRCELKLQKWYGDLRGKPFAIEAENSILDISGFSKQYNCAFIWQKDGVKKLNLYLIINYFKGGKLRFKKIKPEAFEANRFYTVINKKSGEIVPMEVNFNFDDPNLIILPLAFGKRQGREFIWNDLLSLETGSLKLANGRVIEKTLYNRRTRQDEPALFVALTFERREVLDSSNIKPMNLIGVDRGENIPAVIALTDPEGCPLSRFKDSLGNPTHILRIGESYKEKQRTIQAKKEVEQRRAGGYSRKYASKAKNLADDMVRNTARDLLYYAVTQDAMLIFENLSRGFGRQGKRTFMAERQYTRMEDWLTAKLAYEGLPSKTYLSKTLAQYTSKTCSNCGFTITSADYDRVLEKLKKTATGWMTTINGKELKVEGQITYYNRYKRQNVVKDLSVELDRLSEESVNNDISSWTKGRQGEALSLLKKRFSHRPVQEKFVCLNCGFETHADEQAALNIARSWLFLRSQEYKKYQTNKTTGNTDKRAFVETWQSFYRKKLKEVWKPAV

SEQ ID NO: 39639 - protein, 978 aa, synthetic construct
  REGION 1..978: note = engineered CasX variant
QEIKRANKIRRRLVKDSNTKKAGKTGPMKTLLVRVMTPDLRERLENLRKKPENIPQPISNTSRANLNKLLTDYTEMKKAILHVYWEEFQKDPVGLMSRVAQPASKKIDQNKLKPEMDEKGNLTTAGFACSQCGQPLFVYKLEQVSEKGKAYTNYFGRCNVAEHEKLILLAQLKPEKDSDEAVTYSLGKFGQRALDFYSIHVTKESTHPVKPLAQIAGNRYASGPVGKALRDACMGTIASFLSKYQDIIIEHQKVVKGNQKRLESLRELAGKENLEYPSVTLPPQPHTKEGVDAYNEVIARVRMWVNLNLWQKLKLSRDDAKPLLRLKGFPSFPLVERQANEVDWWDMVCNVKKLINEKKEDGKVFWQNLAGYKRQEALRPYLSSEEDRKKGKKFARYQLGDLLLHLEKKHGEDWGKVYDEAWERIDKKVEGLSKHIKLEEERRSEDAQSKAALTDWLRAKASFVIEGLKEADKDEFCRCELKLQKWYGDLRGKPFAIEAENSILDISGFSKQYNCAFIWQKDGVKKLNLYLIINYFKGGKLRFKKIKPEAFEANRFYTVINKKSGEIVPMEVNFNFDDPNLIILPLAFGKRQGREFIWNDLLSLETGSLKLANGRVIEKTLYNRRTRQDEPALFVALTFERREVLDSSNIKPMNLIGVDRGENIPAVIALTDPEGCPLSRFKDSLGNPTHILRIGESYKEKQRTIQAKKEVEQRRAGGYSRKYASKAKNLADDMVRNTARDLLYYAVTQDAMLIFENLSRGFGRQGKRTFMAERQYTRMEDWLTAKLAYEGLPSKTYLSKTLAQYTSKTCSNCGFTITSADYDRVLEKLKKTATGWMTTINGKELKVEGQITYYNRYKRQNVVKDLSVELDRLSEESVNNDISSWTKGRSGEALSLLKKRFSHRPVQEKFVCLNCEFETHADEQAALNIARSWLFLRSQEYKKYQTNKTTGNTDKRAFVETWQSFYRKKLKEVWKPAV

SEQ ID NO: 39640 - protein, 979 aa, synthetic construct
  REGION 1..979: note = engineered CasX variant
QEIKRANKIRRRLVKDSNTKKAGKTGPMKTLLVRVMTPDLRERLENLRKKPENIPQPISNTSRANLNKLLTDYTEMKKAILHVYWEEFQKDPVGLMSRVAQPASKKIDQNKLKPEMDEKGNLTTAGFACSQCGQPLFVYKLEQVSEKGKAYTNYFGRCNVAEHEKLILLAQLKPEKDSDEAVTYSLGKFGQRALDFYSIHVTKESTHPVKPLAQIAGNRYASGPVGKALRDACMGTIASFLSKYQDIIIEHQKVVKGNQKRLESLRELAGKENLEYPSVTLPPQPHTKEGVDAYNEVIARVRMWVNLNLWQKLKLSRDDAKPLLRLKGFPSFPLVERQANEVDWWDMVCNVKKLINEKKEDGKVFWQNLAGYKRQEALRPYLSSEEDRKKGKKFARYQLGDLLLHLEKKHGEDWGKVYDEAWERIDKKVEGLSKHIKLEEERRSEDAQSKAALTDWLRAKASFVIEGLKEADKDEFCRCELKLQKWYGDLRGKPFAIEAENSILDISGFSKQYNCAFIWQKDGVKKLNLYLIINYFKGGKLRFKKIKPEAFEANRFYTVINKKSGEIVPMEVNFNFDDPNLIILPLAFGKRQGREFIWNDLLSLETGSLKLANGRVIEKTLYNRRTRQDEPALFVALTFERREVLDSSNIKPMNLIGVDRGENIPAVIALTDPEGCPLSRFKDSLGNPTHILRIGESYKEKQRTIQAKKEVEQRRAGGYSRKYASKAKNLADDMVRNTARDLLYYAVTQDAMLIFENLSRGFGRQGKRTFMAERQYTRMEDWLTAKLAYEGLPSKTYLSKTLAQYTSKTCSNCGFTITSADYDRVLEKLKKTATGWMTTINGKELKVEGQITYYNRYKRQNVVKDLSVELDRLSEESVNNDISSWTKGRSGEALSLLKKRFSHRPVQEKFVCLNCGFETHADEQAALNIARSWLFLRSQEYKKYQTNKTSTGNTDKRAFVETWQSFYRKKLKEVWKPAV

SEQ ID NO: 39641 - protein, 979 aa, synthetic construct
  REGION 1..979: note = engineered CasX variant
QEIKRANKIRRRLVKDSNTKKAGKTGPMKTLLVRVMTPDLRERLENLRKKPENIPQPISNTSRANLNKLLTDYTEMKKAILHVYWEEFQKDPVGLMSRVAQPASKKIDQNKLKPEMDEKGNLTTAGFACSQCGQPLFVYKLEQVSEKGKAYTNYFGRCNVAEHEKLILLAQLKPEKDSDEAVTYSLGKFGQRALDFYSIHVTKESTHPVKPLAQIAGNRYASGPVGKALRDACMGTIASFLSKYQDIIIEHQKVVKGNQKRLESLRELAGKENLEYPSVTLPPQPHTKEGVDAYNEVIARVRMWVNLNLWQKLKLSRDDAKPLLRLKGFPSFPLVERQANEVDWWDMVCNVKKLINEKKEDGKVFWQNLAGYKRQEALRPYLSSEEDRKKGKKFARYQLGDLLLHLEKKHGEDWGKVYDEAWERIDKKVEGLSKHIKLEEERRSEDAQSKAALTDWLRAKASFVIEGLKEADKDEFCRCELKLQKWYGDLRGKPFAIEAENSILDISGFSKQYNCAFIWQKDGVKKLNLYLIINYFKGGKLRFKKIKPEAFEANRFYTVINKKSGEIVPMEVNFNFDDPNLIILPLAFGKRQGREFIWNDLLSLETGSLKLANGRVIEKTLYNRRTRQDEPALFVALTFERREVLDSSNIKPMNLIGVDRGENIPAVIALTDPEGCPLSRFKDSLGNPTHILRIGESYKEKQRTIQAKKEVEQRRAGGYSRKYASKAKNLADDMVRNTARDLLYYAVTQDAMLIFENLSRGFGRQGKRTFMAERQYTRMEDWLTAKLAYEGLPSKTYLSKTLAQYTSKTCSNCGFTITSADYDRVLEKLKKTATGWMTTINGKELKVEGQITYYNRYKRQNVVKDLSVELDRLSEESVNNDISSWTKGRSGEALSLLKKRFSHRPVQEKFVCLNCGFETHADEQAALNIARSWLFLRSQEYKKYQTNKTTGKNTDKRAFVETWQSFYRKKLKEVWKPAV

SEQ ID NO: 39642 - protein, 978 aa, synthetic construct
  REGION 1..978: note = engineered CasX variant
QEIKRANKIRRRLVKDSNTKKAGKTGPMKTLLVRVMTPDLRERLENLRKKPENIPQPISNTSRANLNKLLTDYTEMKKAILHVYWEEFQKDPVGLMSRVAQPASKKIDQNKLKPEMDEKGNLTTAGFACSQCGQPLFVYKLEQVSEKGKAYTNYFGRCNVAEHEKLILLAQLKPEKDSDEAVTYSLGKFGQRALDFYSIHVTKESTHPVKPLAQIAGNRYASGPVGKALRDACMGTIASFLSKYQDIIIEHQKVVKGNQKRLESLRELAGKENLEYPSVTLPPQPHTKEGVDAYNEVIARVRMWVNLNLWQKLKLSRDDAKPLLRLKKFPSFPLVERQANEVDWWDMVCNVKKLINEKKEDGKVFWQNLAGYKRQEALRPYLSSEEDRKKGKKFARYQLGDLLLHLEKKHGEDWGKVYDEAWERIDKKVEGLSKHIKLEEERRSEDAQSKAALTDWLRAKASFVIEGLKEADKDEFCRCELKLQKWYGDLRGKPFAIEAENSILDISGFSKQYNCAFIWQKDGVKKLNLYLIINYFKGGKLRFKKIKPEAFEANRFYTVINKKSGEIVPMEVNFNFDDPNLIILPLAFGKRQGREFIWNDLLSLETGSLKLANGRVIEKTLYNRRTRQDEPALFVALTFERREVLDSSNIKPMNLIGVDRGENIPAVIALTDPEGCPLSRFKDSLGNPTHILRIGESYKEKQRTIQAKKEVEQRRAGGYSRKYASKAKNLADDMVRNTARDLLYYAVTQDAMLIFENLSRGFGRQGKRTFMAERQYTRMEDWLTAKLAYEGLPSKTYLSKTLAQYTSKTCSNCGFTITSADYDRVLEKLKKTATGWMTTINGKELKVEGQITYYNRYKRQNVVKDLSVELDRLSEESVNNDISSWTKGRSGEALSLLKKRFSHRPVQEKFVCLNCGFETHADEQAALNIARSWLFLRSQEYKKYQTNKTTGNTDKRAFVETWQSFYRKKLKEVWKPAV

SEQ ID NO: 39643 - protein, 978 aa, synthetic construct
  REGION 1..978: note = engineered CasX variant
QEIKRANKIRRRLVKDSNTKKAGKTGPMKTLLVRVMTPDLRERLENLRKKPENIPQPISNTSRANLNKLLTDYTEMKKAILHVYWEEFQKDPVGLMSRVAQPASKKIDQNKLKPEMDEKGNLTTAGFACSQCGQPLFVYKLEQVSEKGKAYTNYFGRCNVAEHEKLILLAQLKPEKDSDEAVTYSLGKFGQRALDFYSIHVTKESTHPVKPLAQIAGNRYASGPVGKALRDACMGTIASFLSKYQDIIIEHQKVVKGNQKRLESLRELAGKENLEYPSVTLPPQPHTKEGVDAYNEVIARVRMWVNLNLWQKLKLSRDDAKPLLRLKGFPSFPLVERQANEVDWWDMVCNVKKLINEKKEDGKVFWQNLAGYKRQEALRPYLSSEEDRKKGKKFARYQLGDLLLHLEKKHGEDWGKVYDEAWERIDKKVEGLSKHIKLEEERRSEDAQSKAALTDWLRAKASFVIEGLKEADKDEFCRCELKLQKWYGDLRGKPFAIEAENSILDISGFSKQYNCAFIWQKDGVKKLNLYLIINYFKGGKLRFKKIKPEAFEANRFYTVINKKSGEIVPMEVNFNFDDPNLIILPLAFGKRQGREFIWNDLLSLETGSLKLANGRVIEKTLYNRRTRQDEPALFVALTFERREVLDSSNIKPMNLIGVDRGENIPAVIALTDPEGCPLSRFKDSLGNPTHILRIGERYKEKQRTIQAKKEVEQRRAGGYSRKYASKAKNLADDMVRNTARDLLYYAVTQDAMLIFENLSRGFGRQGKRTFMAERQYTRMEDWLTAKLAYEGLPSKTYLSKTLAQYTSKTCSNCGFTITSADYDRVLEKLKKTATGWMTTINGKELKVEGQITYYNRYKRQNVVKDLSVELDRLSEESVNNDISSWTKGRSGEALSLLKKRFSHRPVQEKFVCLNCGFETHADEQAALNIARSWLFLRSQEYKKYQTNKTTGNTDKRAFVETWQSFYRKKLKEVWKPAV

SEQ ID NO: 39644 - protein, 978 aa, synthetic construct
  REGION 1..978: note = engineered CasX variant
QEIKRANKIRRRLVKDSNTKKAGKTGPMKTLLVRVMTPDLRERLENLRKKPENIPQPISNTSRANLNKLLTDYTEMKKAILHVYWEEFQKDPVGLMSRVAQPASKKIDQNKLKPEMDEKGNLTTAGFACSQCGQPLFVYKLEQVSEKGKAYTNYFGRCNVAEHEKLILLAQLKPEKDSDEAVTYSLGKFGQRALDFYSIHVTKESTHPVKPLAQIAGNRYASGPVGKALRDACMGTIASFLSKYQDIIIEHQKVVKGNQKRLESLRELAGKENLEYPSVTLPPQPHTKEGVDAYNEVIARVRMWVNLNLWQKLKLSRDDAKPLLRLKGFPSFPLVERQANEVDWWDMVCNVKKLINEKKEDGKVFWQNLAGYKRQEALRPYLSSEEDRKKGKKFARYQLGDLLLHLEKKHGEDWGKVYDEAWERIDKKVEGLSKHIKLEEERRSEDAQSKAALTDWLRAKASFVIEGLKEADKDEFCRCELKLQKWYGDLRGKPFAIEAENSILDISGFSKQYNCAFIWQKDGVKKLNLYLIINYFKGGKLRFKKIKPEAFEANRFYTVINKKSGEIVPMEVNFNFDDPNLIILPLAFGKRQGREFIWNDLLSLETGSLQLANGRVIEKTLYNRRTRQDEPALFVALTFERREVLDSSNIKPMNLIGVDRGENIPAVIALTDPEGCPLSRFKDSLGNPTHILRIGESYKEKQRTIQAKKEVEQRRAGGYSRKYASKAKNLADDMVRNTARDLLYYAVTQDAMLIFENLSRGFGRQGKRTFMAERQYTRMEDWLTAKLAYEGLPSKTYLSKTLAQYTSKTCSNCGFTITSADYDRVLEKLKKTATGWMTTINGKELKVEGQITYYNRYKRQNVVKDLSVELDRLSEESVNNDISSWTKGRSGEALSLLKKRFSHRPVQEKFVCLNCGFETHADEQAALNIARSWLFLRSQEYKKYQTNKTTGNTDKRAFVETWQSFYRKKLKEVWKPAV

SEQ ID NO: 39645 - protein, 978 aa, synthetic construct
  REGION 1..978: note = engineered CasX variant
QEIKRISGIRRRLVKDSNTKKAGKTGPMKTLLVRVMTPDLRERLENLRKKPENIPQPISNTSRANLNKLLTDYTEMKKAILHVYWEEFQKDPVGLMSRVAQPASKKIDQNKLKPEMDEKGNLTTAGFACSQCGQPLFVYKLEQVSEKGKAYTNYFGRCNVAEHEKLILLAQLKPEKDSDEAVTYSLGKFGQRALDFYSIHVTKESTHPVKPLAQIAGNRYASGPVGKALRDACMGTIASFLSKYQDIIIEHQKVVKGNQKRLESLRELAGKENLEYPSVTLPPQPHTKEGVDAYNEVIARVRMWVNLNLWQKLKLSRDDAKPLLRLKGFPSFPLVERQANEVDWWDMVCNVKKLINEKKEDGKVFWQNLAGYKRQEALRPYLSSEEDRKKGKKFARYQLGDLLLHLEKKHGEDWGKVYDEAWERIDKKVEGLSKHIKLEEERRSEDAQSKAALTDWLRAKASFVIEGLKEADKDEFCRCELKLQKWYGDLRGKPFAIEAENSILDISGFSKQYNCAFIWQKDGVKKLNLYLIINYFKGGKLRFKKIKPEAFEANRFYTVINKKSGEIVPMEVNFNFDDPNLIILPLAFGKRQGREFIWNDLLSLETGSLKLANGRVIEKTLYNRRTRQDEPALFVALTFERREVLDSSNIKPMNLIGVDRGENIPAVIALTDPEGCPLSRFKDSLGNPTHILRIGESYKEKQRTIQAKKEVEQRRAGGYSRKYASKAKNLADDMVRNTARDLLYYAVTQDAMLIFENLSRGFGRQGKRTFMAERQYTRMEDWLTAKLAYEGLPSKTYLSKTLAQYTSKTCSNCGFTITSADYDRVLEKLKKTATGWMTTINGKELKVEGQITYYNRYKRQNVVKDLSVELDRLSEESVNNDISSWTKGRSGEALSLLKKRFSHRPVQEKFVCLNCGFETHADEQAALNIARSWLFLRSQEYKKYQTNKTTGNTDKRAFVETWQSFYRKKLKEVWKPAV

SEQ ID NO: 39646 - protein, 978 aa, synthetic construct
  REGION 1..978: note = engineered CasX variant
QEIKRISKIRRRLVKDSNTKKAGKTGPMKTLLVPVMTPDLRERLENLRKKPENIPQPISNTSRANLNKLLTDYTEMKKAILHVYWEEFQKDPVGLMSRVAQPASKKIDQNKLKPEMDEKGNLTTAGFACSQCGQPLFVYKLEQVSEKGKAYTNYFGRCNVAEHEKLILLAQLKPEKDSDEAVTYSLGKFGQRALDFYSIHVTKESTHPVKPLAQIAGNRYASGPVGKALRDACMGTIASFLSKYQDIIIEHQKVVKGNQKRLESLRELAGKENLEYPSVTLPPQPHTKEGVDAYNEVIARVRMWVNLNLWQKLKLSRDDAKPLLRLKGFPSFPLVERQANEVDWWDMVCNVKKLINEKKEDGKVFWQNLAGYKRQEALRPYLSSEEDRKKGKKFARYQLGDLLLHLEKKHGEDWGKVYDEAWERIDKKVEGLSKHIKLEEERRSEDAQSKAALTDWLRAKASFVIEGLKEADKDEFCRCELKLQKWYGDLRGKPFAIEAENSILDISGFSKQYNCAFIWQKDGVKKLNLYLIINYFKGGKLRFKKIKPEAFEANRFYTVINKKSGEIVPMEVNFNFDDPNLIILPLAFGKRQGREFIWNDLLSLETGSLKLANGRVIEKTLYNRRTRQDEPALFVALTFERREVLDSSNIKPMNLIGVDRGENIPAVIALTDPEGCPLSRFKDSLGNPTHILRIGESYKEKQRTIQAKKEVEQRRAGGYSRKYASKAKNLADDMVRNTARDLLYYAVTQDAMLIFENLSRGFGRQGKRTFMAERQYTRMEDWLTAKLAYEGLPSKTYLSKTLAQYTSKTCSNCGFTITSADYDRVLEKLKKTATGWMTTINGKELKVEGQITYYNRYKRQNVVKDLSVELDRLSEESVNNDISSWTKGRSGEALSLLKKRFSHRPVQEKFVCLNCGFETHADEQAALNIARSWLFLRSQEYKKYQTNKTTGNTDKRAFVETWQSFYRKKLKEVWKPAV

SEQ ID NO: 39647 - protein, 978 aa, synthetic construct
  REGION 1..978: note = engineered CasX variant
QEIKRISKIRRRLVKDSNTKKAGKTGPMKTLLVRVMTPDLRERLENLRKKPPNIPQPISNTSRANLNKLLTDYTEMKKAILHVYWEEFQKDPVGLMSRVAQPASKKIDQNKLKPEMDEKGNLTTAGFACSQCGQPLFVYKLEQVSEKGKAYTNYFGRCNVAEHEKLILLAQLKPEKDSDEAVTYSLGKFGQRALDFYSIHVTKESTHPVKPLAQIAGNRYASGPVGKALRDACMGTIASFLSKYQDIIIEHQKVVKGNQKRLESLRELAGKENLEYPSVTLPPQPHTKEGVDAYNEVIARVRMWVNLNLWQKLKLSRDDAKPLLRLKGFPSFPLVERQANEVDWWDMVCNVKKLINEKKEDGKVFWQNLAGYKRQEALRPYLSSEEDRKKGKKFARYQLGDLLLHLEKKHGEDWGKVYDEAWERIDKKVEGLSKHIKLEEERRSEDAQSKAALTDWLRAKASFVIEGLKEADKDEFCRCELKLQKWYGDLRGKPFAIEAENSILDISGFSKQYNCAFIWQKDGVKKLNLYLIINYFKGGKLRFKKIKPEAFEANRFYTVINKKSGEIVPMEVNFNFDDPNLIILPLAFGKRQGREFIWNDLLSLETGSLKLANGRVIEKTLYNRRTRQDEPALFVALTFERREVLDSSNIKPMNLIGVDRGENIPAVIALTDPEGCPLSRFKDSLGNPTHILRIGESYKEKQRTIQAKKEVEQRRAGGYSRKYASKAKNLADDMVRNTARDLLYYAVTQDAMLIFENLSRGFGRQGKRTFMAERQYTRMEDWLTAKLAYEGLPSKTYLSKTLAQYTSKTCSNCGFTITSADYDRVLEKLKKTATGWMTTINGKELKVEGQITYYNRYKRQNVVKDLSVELDRLSEESVNNDISSWTKGRSGEALSLLKKRFSHRPVQEKFVCLNCGFETHADEQAALNIARSWLFLRSQEYKKYQTNKTTGNTDKRAFVETWQSFYRKKLKEVWKPAV

SEQ ID NO: 39648 - protein, 978 aa, synthetic construct
  REGION 1..978: note = engineered CasX variant
QEIKRISKIRRRLVKDSNTKKAGKTGPMKTLLVRVMTPDLRERLENLRKKPENIPQPISNTSQANLNKLLTDYTEMKKAILHVYWEEFQKDPVGLMSRVAQPASKKIDQNKLKPEMDEKGNLTTAGFACSQCGQPLFVYKLEQVSEKGKAYTNYFGRCNVAEHEKLILLAQLKPEKDSDEAVTYSLGKFGQRALDFYSIHVTKESTHPVKPLAQIAGNRYASGPVGKALRDACMGTIASFLSKYQDIIIEHQKVVKGNQKRLESLRELAGKENLEYPSVTLPPQPHTKEGVDAYNEVIARVRMWVNLNLWQKLKLSRDDAKPLLRLKGFPSFPLVERQANEVDWWDMVCNVKKLINEKKEDGKVFWQNLAGYKRQEALRPYLSSEEDRKKGKKFARYQLGDLLLHLEKKHGEDWGKVYDEAWERIDKKVEGLSKHIKLEEERRSEDAQSKAALTDWLRAKASFVIEGLKEADKDEFCRCELKLQKWYGDLRGKPFAIEAENSILDISGFSKQYNCAFIWQKDGVKKLNLYLIINYFKGGKLRFKKIKPEAFEANRFYTVINKKSGEIVPMEVNFNFDDPNLIILPLAFGKRQGREFIWNDLLSLETGSLKLANGRVIEKTLYNRRTRQDEPALFVALTFERREVLDSSNIKPMNLIGVDRGENIPAVIALTDPEGCPLSRFKDSLGNPTHILRIGESYKEKQRTIQAKKEVEQRRAGGYSRKYASKAKNLADDMVRNTARDLLYYAVTQDAMLIFENLSRGFGRQGKRTFMAERQYTRMEDWLTAKLAYEGLPSKTYLSKTLAQYTSKTCSNCGFTITSADYDRVLEKLKKTATGWMTTINGKELKVEGQITYYNRYKRQNVVKDLSVELDRLSEESVNNDISSWTKGRSGEALSLLKKRFSHRPVQEKFVCLNCGFETHADEQAALNIARSWLFLRSQEYKKYQTNKTTGNTDKRAFVETWQSFYRKKLKEVWKPAV

SEQ ID NO: 39649 - protein, 978 aa, synthetic construct
  REGION 1..978: note = engineered CasX variant
QEIKRISKIRRRLVKDSNTKKAGKTGPMKTLLVRVMTPDLRERLENLRKKPENIPQPISNTSRANLNKLLTDYTEMKKAILHVYDEEFQKDPVGLMSRVAQPASKKIDQNKLKPEMDEKGNLTTAGFACSQCGQPLFVYKLEQVSEKGKAYTNYFGRCNVAEHEKLILLAQLKPEKDSDEAVTYSLGKFGQRALDFYSIHVTKESTHPVKPLAQIAGNRYASGPVGKALRDACMGTIASFLSKYQDIIIEHQKVVKGNQKRLESLRELAGKENLEYPSVTLPPQPHTKEGVDAYNEVIARVRMWVNLNLWQKLKLSRDDAKPLLRLKGFPSFPLVERQANEVDWWDMVCNVKKLINEKKEDGKVFWQNLAGYKRQEALRPYLSSEEDRKKGKKFARYQLGDLLLHLEKKHGEDWGKVYDEAWERIDKKVEGLSKHIKLEEERRSEDAQSKAALTDWLRAKASFVIEGLKEADKDEFCRCELKLQKWYGDLRGKPFAIEAENSILDISGFSKQYNCAFIWQKDGVKKLNLYLIINYFKGGKLRFKKIKPEAFEANRFYTVINKKSGEIVPMEVNFNFDDPNLIILPLAFGKRQGREFIWNDLLSLETGSLKLANGRVIEKTLYNRRTRQDEPALFVALTFERREVLDSSNIKPMNLIGVDRGENIPAVIALTDPEGCPLSRFKDSLGNPTHILRIGESYKEKQRTIQAKKEVEQRRAGGYSRKYASKAKNLADDMVRNTARDLLYYAVTQDAMLIFENLSRGFGRQGKRTFMAERQYTRMEDWLTAKLAYEGLPSKTYLSKTLAQYTSKTCSNCGFTITSADYDRVLEKLKKTATGWMTTINGKELKVEGQITYYNRYKRQNVVKDLSVELDRLSEESVNNDISSWTKGRSGEALSLLKKRFSHRPVQEKFVCLNCGFETHADEQAALNIARSWLFLRSQEYKKYQTNKTTGNTDKRAFVETWQSFYRKKLKEVWKPAV

SEQ ID NO: 39650 - protein, 978 aa, synthetic construct
  REGION 1..978: note = engineered CasX variant
QEIKRISKIRRRLVKDSNTKKAGKTGPMKTLLVRVMTPDLRERLENLRKKPENIPQPISNTSRANLNKLLTDYTEMKKAILHVYWEEFQKDPVGLMSRVAQPASKKIDQNKLKPEMDEKGNLTTAGFACSQCGQPLFVYKLEQVSEKGKAYTNYFGRCNVAEHEKLIKLAQLKPEKDSDEAVTYSLGKFGQRALDFYSIHVTKESTHPVKPLAQIAGNRYASGPVGKALRDACMGTIASFLSKYQDIIIEHQKVVKGNQKRLESLRELAGKENLEYPSVTLPPQPHTKEGVDAYNEVIARVRMWVNLNLWQKLKLSRDDAKPLLRLKGFPSFPLVERQANEVDWWDMVCNVKKLINEKKEDGKVFWQNLAGYKRQEALRPYLSSEEDRKKGKKFARYQLGDLLLHLEKKHGEDWGKVYDEAWERIDKKVEGLSKHIKLEEERRSEDAQSKAALTDWLRAKASFVIEGLKEADKDEFCRCELKLQKWYGDLRGKPFAIEAENSILDISGFSKQYNCAFIWQKDGVKKLNLYLIINYFKGGKLRFKKIKPEAFEANRFYTVINKKSGEIVPMEVNFNFDDPNLIILPLAFGKRQGREFIWNDLLSLETGSLKLANGRVIEKTLYNRRTRQDEPALFVALTFERREVLDSSNIKPMNLIGVDRGENIPAVIALTDPEGCPLSRFKDSLGNPTHILRIGESYKEKQRTIQAKKEVEQRRAGGYSRKYASKAKNLADDMVRNTARDLLYYAVTQDAMLIFENLSRGFGRQGKRTFMAERQYTRMEDWLTAKLAYEGLPSKTYLSKTLAQYTSKTCSNCGFTITSADYDRVLEKLKKTATGWMTTINGKELKVEGQITYYNRYKRQNVVKDLSVELDRLSEESVNNDISSWTKGRSGEALSLLKKRFSHRPVQEKFVCLNCGFETHADEQAALNIARSWLFLRSQEYKKYQTNKTTGNTDKRAFVETWQSFYRKKLKEVWKPAV

SEQ ID NO: 39651 - protein, 978 aa, synthetic construct
  REGION 1..978: note = engineered CasX variant
QEIKRISKIRRRLVKDSNTKKAGKTGPMKTLLVRVMTPDLRERLENLRKKPENIPQPISNTSRANLNKLLTDYTEMKKAILHVYWEEFQKDPVGLMSRVAQPASKKIDQNKLKPEMDEKGNLTTAGFACSQCGQPLFVYKLEQVSEKGKAYTNYFGRCNVAEHEKLILLYQLKPEKDSDEAVTYSLGKFGQRALDFYSIHVTKESTHPVKPLAQIAGNRYASGPVGKALRDACMGTIASFLSKYQDIIIEHQKVVKGNQKRLESLRELAGKENLEYPSVTLPPQPHTKEGVDAYNEVIARVRMWVNLNLWQKLKLSRDDAKPLLRLKGFPSFPLVERQANEVDWWDMVCNVKKLINEKKEDGKVFWQNLAGYKRQEALRPYLSSEEDRKKGKKFARYQLGDLLLHLEKKHGEDWGKVYDEAWERIDKKVEGLSKHIKLEEERRSEDAQSKAALTDWLRAKASFVIEGLKEADKDEFCRCELKLQKWYGDLRGKPFAIEAENSILDISGFSKQYNCAFIWQKDGVKKLNLYLIINYFKGGKLRFKKIKPEAFEANRFYTVINKKSGEIVPMEVNFNFDDPNLIILPLAFGKRQGREFIWNDLLSLETGSLKLANGRVIEKTLYNRRTRQDEPALFVALTFERREVLDSSNIKPMNLIGVDRGENIPAVIALTDPEGCPLSRFKDSLGNPTHILRIGESYKEKQRTIQAKKEVEQRRAGGYSRKYASKAKNLADDMVRNTARDLLYYAVTQDAMLIFENLSRGFGRQGKRTFMAERQYTRMEDWLTAKLAYEGLPSKTYLSKTLAQYTSKTCSNCGFTITSADYDRVLEKLKKTATGWMTTINGKELKVEGQITYYNRYKRQNVVKDLSVELDRLSEESVNNDISSWTKGRSGEALSLLKKRFSHRPVQEKFVCLNCGFETHADEQAALNIARSWLFLRSQEYKKYQTNKTTGNTDKRAFVETWQSFYRKKLKEVWKPAV

SEQ ID NO: 39652 - protein, 978 aa, synthetic construct
  REGION 1..978: note = engineered CasX variant
QEIKRISKIRRRLVKDSNTKKAGKTGPMKTLLVRVMTPDLRERLENLRKKPENIPQPISNTSRANLNKLLTDYTEMKKAILHVYWEEFQKDPVGLMSRVAQPASKKIDQNKLKPEMDEKGNLTTAGFACSQCGQPLFVYKLEQVSEKGKAYTNYFGRCNVAEHEKLILLSQLKPEKDSDEAVTYSLGKFGQRALDFYSIHVTKESTHPVKPLAQIAGNRYASGPVGKALRDACMGTIASFLSKYQDIIIEHQKVVKGNQKRLESLRELAGKENLEYPSVTLPPQPHTKEGVDAYNEVIARVRMWVNLNLWQKLKLSRDDAKPLLRLKGFPSFPLVERQANEVDWWDMVCNVKKLINEKKEDGKVFWQNLAGYKRQEALRPYLSSEEDRKKGKKFARYQLGDLLLHLEKKHGEDWGKVYDEAWERIDKKVEGLSKHIKLEEERRSEDAQSKAALTDWLRAKASFVIEGLKEADKDEFCRCELKLQKWYGDLRGKPFAIEAENSILDISGFSKQYNCAFIWQKDGVKKLNLYLIINYFKGGKLRFKKIKPEAFEANRFYTVINKKSGEIVPMEVNFNFDDPNLIILPLAFGKRQGREFIWNDLLSLETGSLKLANGRVIEKTLYNRRTRQDEPALFVALTFERREVLDSSNIKPMNLIGVDRGENIPAVIALTDPEGCPLSRFKDSLGNPTHILRIGESYKEKQRTIQAKKEVEQRRAGGYSRKYASKAKNLADDMVRNTARDLLYYAVTQDAMLIFENLSRGFGRQGKRTFMAERQYTRMEDWLTAKLAYEGLPSKTYLSKTLAQYTSKTCSNCGFTITSADYDRVLEKLKKTATGWMTTINGKELKVEGQITYYNRYKRQNVVKDLSVELDRLSEESVNNDISSWTKGRSGEALSLLKKRFSHRPVQEKFVCLNCGFETHADEQAALNIARSWLFLRSQEYKKYQTNKTTGNTDKRAFVETWQSFYRKKLKEVWKPAV

SEQ ID NO: 39653 - protein, 977 aa, synthetic construct
  REGION 1..977: note = engineered CasX variant
QEIKRISKIRRRLVKDSNTKKAGKTGPMKTLLVRVMTPDLRERLENLRKKPENIPQPISNTSRANLNKLLTDYTEMKKAILHVYWEEFQKDPVGLMSRVAQPASKKIDQNKLKPEMDEKGNLTTAGFACSQCGQPLFVYKLEQVSEKGKAYTNYFGRCNVAEHEKLILLAQLKPEKDSDEAVTYSLGKFGQRALDFYSIHVTKESTHPVKPLAQIAGNRYASPVGKALRDACMGTIASFLSKYQDIIIEHQKVVKGNQKRLESLRELAGKENLEYPSVTLPPQPHTKEGVDAYNEVIARVRMWVNLNLWQKLKLSRDDAKPLLRLKGFPSFPLVERQANEVDWWDMVCNVKKLINEKKEDGKVFWQNLAGYKRQEALRPYLSSEEDRKKGKKFARYQLGDLLLHLEKKHGEDWGKVYDEAWERIDKKVEGLSKHIKLEEERRSEDAQSKAALTDWLRAKASFVIEGLKEADKDEFCRCELKLQKWYGDLRGKPFAIEAENSILDISGFSKQYNCAFIWQKDGVKKLNLYLIINYFKGGKLRFKKIKPEAFEANRFYTVINKKSGEIVPMEVNFNFDDPNLIILPLAFGKRQGREFIWNDLLSLETGSLKLANGRVIEKTLYNRRTRQDEPALFVALTFERREVLDSSNIKPMNLIGVDRGENIPAVIALTDPEGCPLSRFKDSLGNPTHILRIGESYKEKQRTIQAKKEVEQRRAGGYSRKYASKAKNLADDMVRNTARDLLYYAVTQDAMLIFENLSRGFGRQGKRTFMAERQYTRMEDWLTAKLAYEGLPSKTYLSKTLAQYTSKTCSNCGFTITSADYDRVLEKLKKTATGWMTTINGKELKVEGQITYYNRYKRQNVVKDLSVELDRLSEESVNNDISSWTKGRSGEALSLLKKRFSHRPVQEKFVCLNCGFETHADEQAALNIARSWLFLRSQEYKKYQTNKTTGNTDKRAFVETWQSFYRKKLKEVWKPAV

SEQ ID NO: 39654 - protein, 978 aa, synthetic construct
  REGION 1..978: note = engineered CasX variant
QEIKRISKIRRRLVKDSNTKKAGKTGPMKTLLVRVMTPDLRERLENLRKKPENIPQPISNTSRANLNKLLTDYTEMKKAILHVYWEEFQKDPVGLMSRVAQPASKKIDQNKLKPEMDEKGNLTTAGFACSQCGQPLFVYKLEQVSEKGKAYTNYFGRCNVAEHEKLILLAQLKPEKDSDEAVTYSLGKFGQRALDFYSIHVTKESTHPVKPLAQIAGNRYASGPVGKALRDACMGTIASFLSKYQDIIIEHQKVVKGNQKRLESLRELAGKENLEYPSVTLPPQPHTSEGVDAYNEVIARVRMWVNLNLWQKLKLSRDDAKPLLRLKGFPSFPLVERQANEVDWWDMVCNVKKLINEKKEDGKVFWQNLAGYKRQEALRPYLSSEEDRKKGKKFARYQLGDLLLHLEKKHGEDWGKVYDEAWERIDKKVEGLSKHIKLEEERRSEDAQSKAALTDWLRAKASFVIEGLKEADKDEFCRCELKLQKWYGDLRGKPFAIEAENSILDISGFSKQYNCAFIWQKDGVKKLNLYLIINYFKGGKLRFKKIKPEAFEANRFYTVINKKSGEIVPMEVNFNFDDPNLIILPLAFGKRQGREFIWNDLLSLETGSLKLANGRVIEKTLYNRRTRQDEPALFVALTFERREVLDSSNIKPMNLIGVDRGENIPAVIALTDPEGCPLSRFKDSLGNPTHILRIGESYKEKQRTIQAKKEVEQRRAGGYSRKYASKAKNLADDMVRNTARDLLYYAVTQDAMLIFENLSRGFGRQGKRTFMAERQYTRMEDWLTAKLAYEGLPSKTYLSKTLAQYTSKTCSNCGFTITSADYDRVLEKLKKTATGWMTTINGKELKVEGQITYYNRYKRQNVVKDLSVELDRLSEESVNNDISSWTKGRSGEALSLLKKRFSHRPVQEKFVCLNCGFETHADEQAALNIARSWLFLRSQEYKKYQTNKTTGNTDKRAFVETWQSFYRKKLKEVWKPAV

SEQ ID NO: 39655 - protein, 978 aa, synthetic construct
  REGION 1..978: note = engineered CasX variant
QEIKRISKIRRRLVKDSNTKKAGKTGPMKTLLVRVMTPDLRERLENLRKKPENIPQPISNTSRANLNKLLTDYTEMKKAILHVYWEEFQKDPVGLMSRVAQPASKKIDQNKLKPEMDEKGNLTTAGFACSQCGQPLFVYKLEQVSEKGKAYTNYFGRCNVAEHEKLILLAQLKPEKDSDEAVTYSLGKFGQRALDFYSIHVTKESTHPVKPLAQIAGNRYASGPVGKALRDACMGTIASFLSKYQDIIIEHQKVVKGNQKRLESLRELAGKENLEYPSVTLPPQPHTKEGLDAYNEVIARVRMWVNLNLWQKLKLSRDDAKPLLRLKGFPSFPLVERQANEVDWWDMVCNVKKLINEKKEDGKVFWQNLAGYKRQEALRPYLSSEEDRKKGKKFARYQLGDLLLHLEKKHGEDWGKVYDEAWERIDKKVEGLSKHIKLEEERRSEDAQSKAALTDWLRAKASFVIEGLKEADKDEFCRCELKLQKWYGDLRGKPFAIEAENSILDISGFSKQYNCAFIWQKDGVKKLNLYLIINYFKGGKLRFKKIKPEAFEANRFYTVINKKSGEIVPMEVNFNFDDPNLIILPLAFGKRQGREFIWNDLLSLETGSLKLANGRVIEKTLYNRRTRQDEPALFVALTFERREVLDSSNIKPMNLIGVDRGENIPAVIALTDPEGCPLSRFKDSLGNPTHILRIGESYKEKQRTIQAKKEVEQRRAGGYSRKYASKAKNLADDMVRNTARDLLYYAVTQDAMLIFENLSRGFGRQGKRTFMAERQYTRMEDWLTAKLAYEGLPSKTYLSKTLAQYTSKTCSNCGFTITSADYDRVLEKLKKTATGWMTTINGKELKVEGQITYYNRYKRQNVVKDLSVELDRLSEESVNNDISSWTKGRSGEALSLLKKRFSHRPVQEKFVCLNCGFETHADEQAALNIARSWLFLRSQEYKKYQTNKTTGNTDKRAFVETWQSFYRKKLKEVWKPAV

SEQ ID NO: 39656 - protein, 978 aa, synthetic construct
  REGION 1..978: note = engineered CasX variant
QEIKRISKIRRRLVKDSNTKKAGKTGPMKTLLVRVMTPDLRERLENLRKKPENIPQPISNTSRANLNKLLTDYTEMKKAILHVYWEEFQKDPVGLMSRVAQPASKKIDQNKLKPEMDEKGNLTTAGFACSQCGQPLFVYKLEQVSEKGKAYTNYFGRCNVAEHEKLILLAQLKPEKDSDEAVTYSLGKFGQRALDFYSIHVTKESTHPVKPLAQIAGNRYASGPVGKALRDACMGTIASFLSKYQDIIIEHQKVVKGNQKRLESLRELAGKENLEYPSVTLPPQPHTKEGVDAYNEVIARVRTWVNLNLWQKLKLSRDDAKPLLRLKGFPSFPLVERQANEVDWWDMVCNVKKLINEKKEDGKVFWQNLAGYKRQEALRPYLSSEEDRKKGKKFARYQLGDLLLHLEKKHGEDWGKVYDEAWERIDKKVEGLSKHIKLEEERRSEDAQSKAALTDWLRAKASFVIEGLKEADKDEFCRCELKLQKWYGDLRGKPFAIEAENSILDISGFSKQYNCAFIWQKDGVKKLNLYLIINYFKGGKLRFKKIKPEAFEANRFYTVINKKSGEIVPMEVNFNFDDPNLIILPLAFGKRQGREFIWNDLLSLETGSLKLANGRVIEKTLYNRRTRQDEPALFVALTFERREVLDSSNIKPMNLIGVDRGENIPAVIALTDPEGCPLSRFKDSLGNPTHILRIGESYKEKQRTIQAKKEVEQRRAGGYSRKYASKAKNLADDMVRNTARDLLYYAVTQDAMLIFENLSRGFGRQGKRTFMAERQYTRMEDWLTAKLAYEGLPSKTYLSKTLAQYTSKTCSNCGFTITSADYDRVLEKLKKTATGWMTTINGKELKVEGQITYYNRYKRQNVVKDLSVELDRLSEESVNNDISSWTKGRSGEALSLLKKRFSHRPVQEKFVCLNCGFETHADEQAALNIARSWLFLRSQEYKKYQTNKTTGNTDKRAFVETWQSFYRKKLKEVWKPAV

SEQ ID NO: 39657 - protein, 978 aa, synthetic construct
  REGION 1..978: note = engineered CasX variant
QEIKRISKIRRRLVKDSNTKKAGKTGPMKTLLVRVMTPDLRERLENLRKKPENIPQPISNTSRANLNKLLTDYTEMKKAILHVYWEEFQKDPVGLMSRVAQPASKKIDQNKLKPEMDEKGNLTTAGFACSQCGQPLFVYKLEQVSEKGKAYTNYFGRCNVAEHEKLILLAQLKPEKDSDEAVTYSLGKFGQRALDFYSIHVTKESTHPVKPLAQIAGNRYASGPVGKALRDACMGTIASFLSKYQDIIIEHQKVVKGNQKRLESLRELAGKENLEYPSVTLPPQPHTKEGVDAYNEVIARVRWWVNLNLWQKLKLSRDDAKPLLRLKGFPSFPLVERQANEVDWWDMVCNVKKLINEKKEDGKVFWQNLAGYKRQEALRPYLSSEEDRKKGKKFARYQLGDLLLHLEKKHGEDWGKVYDEAWERIDKKVEGLSKHIKLEEERRSEDAQSKAALTDWLRAKASFVIEGLKEADKDEFCRCELKLQKWYGDLRGKPFAIEAENSILDISGFSKQYNCAFIWQKDGVKKLNLYLIINYFKGGKLRFKKIKPEAFEANRFYTVINKKSGEIVPMEVNFNFDDPNLIILPLAFGKRQGREFIWNDLLSLETGSLKLANGRVIEKTLYNRRTRQDEPALFVALTFERREVLDSSNIKPMNLIGVDRGENIPAVIALTDPEGCPLSRFKDSLGNPTHILRIGESYKEKQRTIQAKKEVEQRRAGGYSRKYASKAKNLADDMVRNTARDLLYYAVTQDAMLIFENLSRGFGRQGKRTFMAERQYTRMEDWLTAKLAYEGLPSKTYLSKTLAQYTSKTCSNCGFTITSADYDRVLEKLKKTATGWMTTINGKELKVEGQITYYNRYKRQNVVKDLSVELDRLSEESVNNDISSWTKGRSGEALSLLKKRFSHRPVQEKFVCLNCGFETHADEQAALNIARSWLFLRSQEYKKYQTNKTTGNTDKRAFVETWQSFYRKKLKEVWKPAV

SEQ ID NO: 39658 - protein, 979 aa, synthetic construct
  REGION 1..979: note = engineered CasX variant
QEIKRISKIRRRLVKDSNTKKAGKTGPMKTLLVRVMTPDLRERLENLRKKPENIPQPISNTSRANLNKLLTDYTEMKKAILHVYWEEFQKDPVGLMSRVAQPASKKIDQNKLKPEMDEKGNLTTAGFACSQCGQPLFVYKLEQVSEKGKAYTNYFGRCNVAEHEKLILLAQLKPEKDSDEAVTYSLGKFGQRALDFYSIHVTKESTHPVKPLAQIAGNRYASGPVGKALRDACMGTIASFLSKYQDIIIEHQKVVKGNQKRLESLRELAGKENLEYPSVTLPPQPHTKEGVDAYNEVIARVRMWVNLNLWQKLKLSRDDAKPLLRLKGFPSFPLVERQQANEVDWWDMVCNVKKLINEKKEDGKVFWQNLAGYKRQEALRPYLSSEEDRKKGKKFARYQLGDLLLHLEKKHGEDWGKVYDEAWERIDKKVEGLSKHIKLEEERRSEDAQSKAALTDWLRAKASFVIEGLKEADKDEFCRCELKLQKWYGDLRGKPFAIEAENSILDISGFSKQYNCAFIWQKDGVKKLNLYLIINYFKGGKLRFKKIKPEAFEANRFYTVINKKSGEIVPMEVNFNFDDPNLIILPLAFGKRQGREFIWNDLLSLETGSLKLANGRVIEKTLYNRRTRQDEPALFVALTFERREVLDSSNIKPMNLIGVDRGENIPAVIALTDPEGCPLSRFKDSLGNPTHILRIGESYKEKQRTIQAKKEVEQRRAGGYSRKYASKAKNLADDMVRNTARDLLYYAVTQDAMLIFENLSRGFGRQGKRTFMAERQYTRMEDWLTAKLAYEGLPSKTYLSKTLAQYTSKTCSNCGFTITSADYDRVLEKLKKTATGWMTTINGKELKVEGQITYYNRYKRQNVVKDLSVELDRLSEESVNNDISSWTKGRSGEALSLLKKRFSHRPVQEKFVCLNCGFETHADEQAALNIARSWLFLRSQEYKKYQTNKTTGNTDKRAFVETWQSFYRKKLKEVWKPAV

SEQ ID NO: 39659 - protein, 979 aa, synthetic construct
  REGION 1..979: note = engineered CasX variant
QEIKRISKIRRRLVKDSNTKKAGKTGPMKTLLVRVMTPDLRERLENLRKKPENIPQPISNTSRANLNKLLTDYTEMKKAILHVYWEEFQKDPVGLMSRVAQPASKKIDQNKLKPEMDEKGNLTTAGFACSQCGQPLFVYKLEQVSEKGKAYTNYFGRCNVAEHEKLILLAQLKPEKDSDEAVTYSLGKFGQRALDFYSIHVTKESTHPVKPLAQIAGNRYASGPVGKALRDACMGTIASFLSKYQDIIIEHQKVVKGNQKRLESLRELAGKENLEYPSVTLPPQPHTKEGVDAYNEVIARVRMWVNLNLWQKLKLSRDDAKPLLRLKGFPSFPLVERQANAEVDWWDMVCNVKKLINEKKEDGKVFWQNLAGYKRQEALRPYLSSEEDRKKGKKFARYQLGDLLLHLEKKHGEDWGKVYDEAWERIDKKVEGLSKHIKLEEERRSEDAQSKAALTDWLRAKASFVIEGLKEADKDEFCRCELKLQKWYGDLRGKPFAIEAENSILDISGFSKQYNCAFIWQKDGVKKLNLYLIINYFKGGKLRFKKIKPEAFEANRFYTVINKKSGEIVPMEVNFNFDDPNLIILPLAFGKRQGREFIWNDLLSLETGSLKLANGRVIEKTLYNRRTRQDEPALFVALTFERREVLDSSNIKPMNLIGVDRGENIPAVIALTDPEGCPLSRFKDSLGNPTHILRIGESYKEKQRTIQAKKEVEQRRAGGYSRKYASKAKNLADDMVRNTARDLLYYAVTQDAMLIFENLSRGFGRQGKRTFMAERQYTRMEDWLTAKLAYEGLPSKTYLSKTLAQYTSKTCSNCGFTITSADYDRVLEKLKKTATGWMTTINGKELKVEGQITYYNRYKRQNVVKDLSVELDRLSEESVNNDISSWTKGRSGEALSLLKKRFSHRPVQEKFVCLNCGFETHADEQAALNIARSWLFLRSQEYKKYQTNKTTGNTDKRAFVETWQSFYRKKLKEVWKPAV

SEQ ID NO: 39660 - protein, 978 aa, synthetic construct
  REGION 1..978: note = engineered CasX variant
QEIKRISKIRRRLVKDSNTKKAGKTGPMKTLLVRVMTPDLRERLENLRKKPENIPQPISNTSRANLNKLLTDYTEMKKAILHVYWEEFQKDPVGLMSRVAQPASKKIDQNKLKPEMDEKGNLTTAGFACSQCGQPLFVYKLEQVSEKGKAYTNYFGRCNVAEHEKLILLAQLKPEKDSDEAVTYSLGKFGQRALDFYSIHVTKESTHPVKPLAQIAGNRYASGPVGKALRDACMGTIASFLSKYQDIIIEHQKVVKGNQKRLESLRELAGKENLEYPSVTLPPQPHTKEGVDAYNEVIARVRMWVNLNLWQKLKLSRDDAKPLLRLKGFPSFPLVERQANEVDWWDMVCNVKKLINEKKEDGKVFWQNLAGYKRQEALRPYLSSEEDRKKGKKFARTQLGDLLLHLEKKHGEDWGKVYDEAWERIDKKVEGLSKHIKLEEERRSEDAQSKAALTDWLRAKASFVIEGLKEADKDEFCRCELKLQKWYGDLRGKPFAIEAENSILDISGFSKQYNCAFIWQKDGVKKLNLYLIINYFKGGKLRFKKIKPEAFEANRFYTVINKKSGEIVPMEVNFNFDDPNLIILPLAFGKRQGREFIWNDLLSLETGSLKLANGRVIEKTLYNRRTRQDEPALFVALTFERREVLDSSNIKPMNLIGVDRGENIPAVIALTDPEGCPLSRFKDSLGNPTHILRIGESYKEKQRTIQAKKEVEQRRAGGYSRKYASKAKNLADDMVRNTARDLLYYAVTQDAMLIFENLSRGFGRQGKRTFMAERQYTRMEDWLTAKLAYEGLPSKTYLSKTLAQYTSKTCSNCGFTITSADYDRVLEKLKKTATGWMTTINGKELKVEGQITYYNRYKRQNVVKDLSVELDRLSEESVNNDISSWTKGRSGEALSLLKKRFSHRPVQEKFVCLNCGFETHADEQAALNIARSWLFLRSQEYKKYQTNKTTGNTDKRAFVETWQSFYRKKLKEVWKPAV

SEQ ID NO: 39661 - protein, 979 aa, synthetic construct
  REGION 1..979: note = engineered CasX variant
QEIKRISKIRRRLVKDSNTKKAGKTGPMKTLLVRVMTPDLRERLENLRKKPENIPQPISNTSRANLNKLLTDYTEMKKAILHVYWEEFQKDPVGLMSRVAQPASKKIDQNKLKPEMDEKGNLTTAGFACSQCGQPLFVYKLEQVSEKGKAYTNYFGRCNVAEHEKLILLAQLKPEKDSDEAVTYSLGKFGQRALDFYSIHVTKESTHPVKPLAQIAGNRYASGPVGKALRDACMGTIASFLSKYQDIIIEHQKVVKGNQKRLESLRELAGKENLEYPSVTLPPQPHTKEGVDAYNEVIARVRMWVNLNLWQKLKLSRDDAKPLLRLKGFPSFPLVERQANEVDWWDMVCNVKKLINEKKEDGKVFWQNLAGYKRQEALRPYLSSEEDRKKGKKFARYQLGDLLLHLEKKHEGEDWGKVYDEAWERIDKKVEGLSKHIKLEEERRSEDAQSKAALTDWLRAKASFVIEGLKEADKDEFCRCELKLQKWYGDLRGKPFAIEAENSILDISGFSKQYNCAFIWQKDGVKKLNLYLIINYFKGGKLRFKKIKPEAFEANRFYTVINKKSGEIVPMEVNFNFDDPNLIILPLAFGKRQGREFIWNDLLSLETGSLKLANGRVIEKTLYNRRTRQDEPALFVALTFERREVLDSSNIKPMNLIGVDRGENIPAVIALTDPEGCPLSRFKDSLGNPTHILRIGESYKEKQRTIQAKKEVEQRRAGGYSRKYASKAKNLADDMVRNTARDLLYYAVTQDAMLIFENLSRGFGRQGKRTFMAERQYTRMEDWLTAKLAYEGLPSKTYLSKTLAQYTSKTCSNCGFTITSADYDRVLEKLKKTATGWMTTINGKELKVEGQITYYNRYKRQNVVKDLSVELDRLSEESVNNDISSWTKGRSGEALSLLKKRFSHRPVQEKFVCLNCGFETHADEQAALNIARSWLFLRSQEYKKYQTNKTTGNTDKRAFVETWQSFYRKKLKEVWKPAV

SEQ ID NO: 39662 - protein, 978 aa, synthetic construct
  REGION 1..978: note = engineered CasX variant
QEIKRISKIRRRLVKDSNTKKAGKTGPMKTLLVRVMTPDLRERLENLRKKPENIPQPISNTSRANLNKLLTDYTEMKKAILHVYWEEFQKDPVGLMSRVAQPASKKIDQNKLKPEMDEKGNLTTAGFACSQCGQPLFVYKLEQVSEKGKAYTNYFGRCNVAEHEKLILLAQLKPEKDSDEAVTYSLGKFGQRALDFYSIHVTKESTHPVKPLAQIAGNRYASGPVGKALRDACMGTIASFLSKYQDIIIEHQKVVKGNQKRLESLRELAGKENLEYPSVTLPPQPHTKEGVDAYNEVIARVRMWVNLNLWQKLKLSRDDAKPLLRLKGFPSFPLVERQANEVDWWDMVCNVKKLINEKKEDGKVFWQNLAGYKRQEALRPYLSSEEDRKKGKKFARYQLGDLLLHLEKKHGEDWGKVYDEAWERIDKKVEGLSKHIKLEEERRSEDAQSKAALTDWLRAKASFVIEGLKEADKDEFCRCDLKLQKWYGDLRGKPFAIEAENSILDISGFSKQYNCAFIWQKDGVKKLNLYLIINYFKGGKLRFKKIKPEAFEANRFYTVINKKSGEIVPMEVNFNFDDPNLIILPLAFGKRQGREFIWNDLLSLETGSLKLANGRVIEKTLYNRRTRQDEPALFVALTFERREVLDSSNIKPMNLIGVDRGENIPAVIALTDPEGCPLSRFKDSLGNPTHILRIGESYKEKQRTIQAKKEVEQRRAGGYSRKYASKAKNLADDMVRNTARDLLYYAVTQDAMLIFENLSRGFGRQGKRTFMAERQYTRMEDWLTAKLAYEGLPSKTYLSKTLAQYTSKTCSNCGFTITSADYDRVLEKLKKTATGWMTTINGKELKVEGQITYYNRYKRQNVVKDLSVELDRLSEESVNNDISSWTKGRSGEALSLLKKRFSHRPVQEKFVCLNCGFETHADEQAALNIARSWLFLRSQEYKKYQTNKTTGNTDKRAFVETWQSFYRKKLKEVWKPAV

SEQ ID NO: 39663 - protein, 978 aa, synthetic construct
  REGION 1..978: note = engineered CasX variant
QEIKRISKIRRRLVKDSNTKKAGKTGPMKTLLVRVMTPDLRERLENLRKKPENIPQPISNTSRANLNKLLTDYTEMKKAILHVYWEEFQKDPVGLMSRVAQPASKKIDQNKLKPEMDEKGNLTTAGFACSQCGQPLFVYKLEQVSEKGKAYTNYFGRCNVAEHEKLILLAQLKPEKDSDEAVTYSLGKFGQRALDFYSIHVTKESTHPVKPLAQIAGNRYASGPVGKALRDACMGTIASFLSKYQDIIIEHQKVVKGNQKRLESLRELAGKENLEYPSVTLPPQPHTKEGVDAYNEVIARVRMWVNLNLWQKLKLSRDDAKPLLRLKGFPSFPLVERQANEVDWWDMVCNVKKLINEKKEDGKVFWQNLAGYKRQEALRPYLSSEEDRKKGKKFARYQLGDLLLHLEKKHGEDWGKVYDEAWERIDKKVEGLSKHIKLEEERRSEDAQSKAALTDWLRAKASFVIEGLKEADKDEFCRCELKLQKWYGDLRGKPFAIEAENSILDISGFSKQYNCAFIWQKDGVKKLNLYLIINYFKGGKLRFKKIKPEAFEANRFYTVINKKSGEIVPMEVNFNFDDPNLIILPLAFGKRFGREFIWNDLLSLETGSLKLANGRVIEKTLYNRRTRQDEPALFVALTFERREVLDSSNIKPMNLIGVDRGENIPAVIALTDPEGCPLSRFKDSLGNPTHILRIGESYKEKQRTIQAKKEVEQRRAGGYSRKYASKAKNLADDMVRNTARDLLYYAVTQDAMLIFENLSRGFGRQGKRTFMAERQYTRMEDWLTAKLAYEGLPSKTYLSKTLAQYTSKTCSNCGFTITSADYDRVLEKLKKTATGWMTTINGKELKVEGQITYYNRYKRQNVVKDLSVELDRLSEESVNNDISSWTKGRSGEALSLLKKRFSHRPVQEKFVCLNCGFETHADEQAALNIARSWLFLRSQEYKKYQTNKTTGNTDKRAFVETWQSFYRKKLKEVWKPAV

SEQ ID NO: 39664 - protein, 978 aa, synthetic construct
  REGION 1..978: note = engineered CasX variant
QEIKRISKIRRRLVKDSNTKKAGKTGPMKTLLVRVMTPDLRERLENLRKKPENIPQPISNTSRANLNKLLTDYTEMKKAILHVYWEEFQKDPVGLMSRVAQPASKKIDQNKLKPEMDEKGNLTTAGFACSQCGQPLFVYKLEQVSEKGKAYTNYFGRCNVAEHEKLILLAQLKPEKDSDEAVTYSLGKFGQRALDFYSIHVTKESTHPVKPLAQIAGNRYASGPVGKALRDACMGTIASFLSKYQDIIIEHQKVVKGNQKRLESLRELAGKENLEYPSVTLPPQPHTKEGVDAYNEVIARVRMWVNLNLWQKLKLSRDDAKPLLRLKGFPSFPLVERQANEVDWWDMVCNVKKLINEKKEDGKVFWQNLAGYKRQEALRPYLSSEEDRKKGKKFARYQLGDLLLHLEKKHGEDWGKVYDEAWERIDKKVEGLSKHIKLEEERRSEDAQSKAALTDWLRAKASFVIEGLKEADKDEFCRCELKLQKWYGDLRGKPFAIEAENSILDISGFSKQYNCAFIWQKDGVKKLNLYLIINYFKGGKLRFKKIKPEAFEANRFYTVINKKSGEIVPMEVNFNFDDPNLIILPLAFGKRVGREFIWNDLLSLETGSLKLANGRVIEKTLYNRRTRQDEPALFVALTFERREVLDSSNIKPMNLIGVDRGENIPAVIALTDPEGCPLSRFKDSLGNPTHILRIGESYKEKQRTIQAKKEVEQRRAGGYSRKYASKAKNLADDMVRNTARDLLYYAVTQDAMLIFENLSRGFGRQGKRTFMAERQYTRMEDWLTAKLAYEGLPSKTYLSKTLAQYTSKTCSNCGFTITSADYDRVLEKLKKTATGWMTTINGKELKVEGQITYYNRYKRQNVVKDLSVELDRLSEESVNNDISSWTKGRSGEALSLLKKRFSHRPVQEKFVCLNCGFETHADEQAALNIARSWLFLRSQEYKKYQTNKTTGNTDKRAFVETWQSFYRKKLKEVWKPAV

SEQ ID NO: 39665 - protein, 979 aa, synthetic construct
  REGION 1..979: note = engineered CasX variant
QEIKRISKIRRRLVKDSNTKKAGKTGPMKTLLVRVMTPDLRERLENLRKKPENIPQPISNTSRANLNKLLTDYTEMKKAILHVYWEEFQKDPVGLMSRVAQPASKKIDQNKLKPEMDEKGNLTTAGFACSQCGQPLFVYKLEQVSEKGKAYTNYFGRCNVAEHEKLILLAQLKPEKDSDEAVTYSLGKFGQRALDFYSIHVTKESTHPVKPLAQIAGNRYASGPVGKALRDACMGTIASFLSKYQDIIIEHQKVVKGNQKRLESLRELAGKENLEYPSVTLPPQPHTKEGVDAYNEVIARVRMWVNLNLWQKLKLSRDDAKPLLRLKGFPSFPLVERQANEVDWWDMVCNVKKLINEKKEDGKVFWQNLAGYKRQEALRPYLSSEEDRKKGKKFARYQLGDLLLHLEKKHGEDWGKVYDEAWERIDKKVEGLSKHIKLEEERRSEDAQSKAALTDWLRAKASFVIEGLKEADKDEFCRCELKLQKWYGDLRGKPFAIEAENSILDISGFSKQYNCAFIWQKDGVKKLNLYLIINYFKGGKLRFKKIKPEAFEANRFYTVINKKSGEIVPMEVNFNFDDPNLIILPLAFGKRQGREFIWNDLLSLETGSLKLANGRVIEKTLYNRRTRQDEPALFVALTFERREVLDSSNIKTPMNLIGVDRGENIPAVIALTDPEGCPLSRFKDSLGNPTHILRIGESYKEKQRTIQAKKEVEQRRAGGYSRKYASKAKNLADDMVRNTARDLLYYAVTQDAMLIFENLSRGFGRQGKRTFMAERQYTRMEDWLTAKLAYEGLPSKTYLSKTLAQYTSKTCSNCGFTITSADYDRVLEKLKKTATGWMTTINGKELKVEGQITYYNRYKRQNVVKDLSVELDRLSEESVNNDISSWTKGRSGEALSLLKKRFSHRPVQEKFVCLNCGFETHADEQAALNIARSWLFLRSQEYKKYQTNKTTGNTDKRAFVETWQSFYRKKLKEVWKPAV

SEQ ID NO: 39666 - protein, 979 aa, synthetic construct
  REGION 1..979: note = engineered CasX variant
QEIKRISKIRRRLVKDSNTKKAGKTGPMKTLLVRVMTPDLRERLENLRKKPENIPQPISNTSRANLNKLLTDYTEMKKAILHVYWEEFQKDPVGLMSRVAQPASKKIDQNKLKPEMDEKGNLTTAGFACSQCGQPLFVYKLEQVSEKGKAYTNYFGRCNVAEHEKLILLAQLKPEKDSDEAVTYSLGKFGQRALDFYSIHVTKESTHPVKPLAQIAGNRYASGPVGKALRDACMGTIASFLSKYQDIIIEHQKVVKGNQKRLESLRELAGKENLEYPSVTLPPQPHTKEGVDAYNEVIARVRMWVNLNLWQKLKLSRDDAKPLLRLKGFPSFPLVERQANEVDWWDMVCNVKKLINEKKEDGKVFWQNLAGYKRQEALRPYLSSEEDRKKGKKFARYQLGDLLLHLEKKHGEDWGKVYDEAWERIDKKVEGLSKHIKLEEERRSEDAQSKAALTDWLRAKASFVIEGLKEADKDEFCRCELKLQKWYGDLRGKPFAIEAENSILDISGFSKQYNCAFIWQKDGVKKLNLYLIINYFKGGKLRFKKIKPEAFEANRFYTVINKKSGEIVPMEVNFNFDDPNLIILPLAFGKRQGREFIWNDLLSLETGSLKLANGRVIEKTLYNRRTRQDEPALFVALTFERREVLDSSNIKPMSNLIGVDRGENIPAVIALTDPEGCPLSRFKDSLGNPTHILRIGESYKEKQRTIQAKKEVEQRRAGGYSRKYASKAKNLADDMVRNTARDLLYYAVTQDAMLIFENLSRGFGRQGKRTFMAERQYTRMEDWLTAKLAYEGLPSKTYLSKTLAQYTSKTCSNCGFTITSADYDRVLEKLKKTATGWMTTINGKELKVEGQITYYNRYKRQNVVKDLSVELDRLSEESVNNDISSWTKGRSGEALSLLKKRFSHRPVQEKFVCLNCGFETHADEQAALNIARSWLFLRSQEYKKYQTNKTTGNTDKRAFVETWQSFYRKKLKEVWKPAV

SEQ ID NO: 39667 - protein, 978 aa, synthetic construct
  REGION 1..978: note = engineered CasX variant
QEIKRISKIRRRLVKDSNTKKAGKTGPMKTLLVRVMTPDLRERLENLRKKPENIPQPISNTSRANLNKLLTDYTEMKKAILHVYWEEFQKDPVGLMSRVAQPASKKIDQNKLKPEMDEKGNLTTAGFACSQCGQPLFVYKLEQVSEKGKAYTNYFGRCNVAEHEKLILLAQLKPEKDSDEAVTYSLGKFGQRALDFYSIHVTKESTHPVKPLAQIAGNRYASGPVGKALRDACMGTIASFLSKYQDIIIEHQKVVKGNQKRLESLRELAGKENLEYPSVTLPPQPHTKEGVDAYNEVIARVRMWVNLNLWQKLKLSRDDAKPLLRLKGFPSFPLVERQANEVDWWDMVCNVKKLINEKKEDGKVFWQNLAGYKRQEALRPYLSSEEDRKKGKKFARYQLGDLLLHLEKKHGEDWGKVYDEAWERIDKKVEGLSKHIKLEEERRSEDAQSKAALTDWLRAKASFVIEGLKEADKDEFCRCELKLQKWYGDLRGKPFAIEAENSILDISGFSKQYNCAFIWQKDGVKKLNLYLIINYFKGGKLRFKKIKPEAFEANRFYTVINKKSGEIVPMEVNFNFDDPNLIILPLAFGKRQGREFIWNDLLSLETGSLKLANGRVIEKTLYNRRTRQDEPALFVALTFERREVLDSSNIKPMNLIGVDRGENIPAVIALTDPEGCPLSRFKDSLGNPTHILRIRESYKEKQRTIQAKKEVEQRRAGGYSRKYASKAKNLADDMVRNTARDLLYYAVTQDAMLIFENLSRGFGRQGKRTFMAERQYTRMEDWLTAKLAYEGLPSKTYLSKTLAQYTSKTCSNCGFTITSADYDRVLEKLKKTATGWMTTINGKELKVEGQITYYNRYKRQNVVKDLSVELDRLSEESVNNDISSWTKGRSGEALSLLKKRFSHRPVQEKFVCLNCGFETHADEQAALNIARSWLFLRSQEYKKYQTNKTTGNTDKRAFVETWQSFYRKKLKEVWKPAV

SEQ ID NO: 39668 - protein, 978 aa, synthetic construct
  REGION 1..978: note = engineered CasX variant
QEIKRISKIRRRLVKDSNTKKAGKTGPMKTLLVRVMTPDLRERLENLRKKPENIPQPISNTSRANLNKLLTDYTEMKKAILHVYWEEFQKDPVGLMSRVAQPASKKIDQNKLKPEMDEKGNLTTAGFACSQCGQPLFVYKLEQVSEKGKAYTNYFGRCNVAEHEKLILLAQLKPEKDSDEAVTYSLGKFGQRALDFYSIHVTKESTHPVKPLAQIAGNRYASGPVGKALRDACMGTIASFLSKYQDIIIEHQKVVKGNQKRLESLRELAGKENLEYPSVTLPPQPHTKEGVDAYNEVIARVRMWVNLNLWQKLKLSRDDAKPLLRLKGFPSFPLVERQANEVDWWDMVCNVKKLINEKKEDGKVFWQNLAGYKRQEALRPYLSSEEDRKKGKKFARYQLGDLLLHLEKKHGEDWGKVYDEAWERIDKKVEGLSKHIKLEEERRSEDAQSKAALTDWLRAKASFVIEGLKEADKDEFCRCELKLQKWYGDLRGKPFAIEAENSILDISGFSKQYNCAFIWQKDGVKKLNLYLIINYFKGGKLRFKKIKPEAFEANRFYTVINKKSGEIVPMEVNFNFDDPNLIILPLAFGKRQGREFIWNDLLSLETGSLKLANGRVIEKTLYNRRTRQDEPALFVALTFERREVLDSSNIKPMNLIGVDRGENIPAVIALTDPEGCPLSRFKDSLGNPTHILRIGESYKEKQRTIQAKKEVEQRRAGGYSRKYASKAKNLADDMVRNTARDLLYYAVTQDAMLIFENLSRGFGRQGKRTFSAERQYTRMEDWLTAKLAYEGLPSKTYLSKTLAQYTSKTCSNCGFTITSADYDRVLEKLKKTATGWMTTINGKELKVEGQITYYNRYKRQNVVKDLSVELDRLSEESVNNDISSWTKGRSGEALSLLKKRFSHRPVQEKFVCLNCGFETHADEQAALNIARSWLFLRSQEYKKYQTNKTTGNTDKRAFVETWQSFYRKKLKEVWKPAV

SEQ ID NO: 39669 - protein, 978 aa, synthetic construct
  REGION 1..978: note = engineered CasX variant
QEIKRISKIRRRLVKDSNTKKAGKTGPMKTLLVRVMTPDLRERLENLRKKPENIPQPISNTSRANLNKLLTDYTEMKKAILHVYWEEFQKDPVGLMSRVAQPASKKIDQNKLKPEMDEKGNLTTAGFACSQCGQPLFVYKLEQVSEKGKAYTNYFGRCNVAEHEKLILLAQLKPEKDSDEAVTYSLGKFGQRALDFYSIHVTKESTHPVKPLAQIAGNRYASGPVGKALRDACMGTIASFLSKYQDIIIEHQKVVKGNQKRLESLRELAGKENLEYPSVTLPPQPHTKEGVDAYNEVIARVRMWVNLNLWQKLKLSRDDAKPLLRLKGFPSFPLVERQANEVDWWDMVCNVKKLINEKKEDGKVFWQNLAGYKRQEALRPYLSSEEDRKKGKKFARYQLGDLLLHLEKKHGEDWGKVYDEAWERIDKKVEGLSKHIKLEEERRSEDAQSKAALTDWLRAKASFVIEGLKEADKDEFCRCELKLQKWYGDLRGKPFAIEAENSILDISGFSKQYNCAFIWQKDGVKKLNLYLIINYFKGGKLRFKKIKPEAFEANRFYTVINKKSGEIVPMEVNFNFDDPNLIILPLAFGKRQGREFIWNDLLSLETGSLKLANGRVIEKTLYNRRTRQDEPALFVALTFERREVLDSSNIKPMNLIGVDRGENIPAVIALTDPEGCPLSRFKDSLGNPTHILRIGESYKEKQRTIQAKKEVEQRRAGGYSRKYASKAKNLADDMVRNTARDLLYYAVTQDAMLIFENLSRGFGRQGKRTFMAERQYTRMEDWLTAKLAYEGLPSKTYLSKTLAQYTSKTCSNCGFTITSADYDRVLEKLKKTATGWMTTINGKELKVEGQITYYNRYKRQNVVKDLSVELDRLSEESVNNDISSWDKGRSGEALSLLKKRFSHRPVQEKFVCLNCGFETHADEQAALNIARSWLFLRSQEYKKYQTNKTTGNTDKRAFVETWQSFYRKKLKEVWKPAV

SEQ ID NO: 39670 - protein, 978 aa, synthetic construct
  REGION 1..978: note = engineered CasX variant
QEIKRISKIRRRLVKDSNTKKAGKTGPMKTLLVRVMTPDLRERLENLRKKPENIPQPISNTSRANLNKLLTDYTEMKKAILHVYWEEFQVDPVGLMSRVAQPASKKIDQNKLKPEMDEKGNLTTAGFACSQCGQPLFVYKLEQVSEKGKAYTNYFGRCNVAEHEKLILLAQLKPEKDSDEAVTYSLGKFGQRALDFYSIHVTKESTHPVKPLAQIAGNRYASGPVGKALRDACMGTIASFLSKYQDIIIEHQKVVKGNQKRLESLRELAGKENLEYPSVTLPPQPHTKEGVDAYNEVIARVRMWVNLNLWQKLKLSRDDAKPLLRLKGFPSFPLVERQANEVDWWDMVCNVKKLINEKKEDGKVFWQNLAGYKRQEALRPYLSSEEDRKKGKKFARYQLGDLLLHLEKKHGEDWGKVYDEAWERIDKKVEGLSKHIKLEEERRSEDAQSKAALTDWLRAKASFVIEGLKEADKDEFCRCELKLQKWYGDLRGKPFAIEAENSILDISGFSKQYNCAFIWQKDGVKKLNLYLIINYFKGGKLRFKKIKPEAFEANRFYTVINKKSGEIVPMEVNFNFDDPNLIILPLAFGKRQGREFIWNDLLSLETGSLKLANGRVIEKTLYNRRTRQDEPALFVALTFERREVLDSSNIKPMNLIGVDRGENIPAVIALTDPEGCPLSRFKDSLGNPTHILRIGESYKEKQRTIQAKKEVEQRRAGGYSRKYASKAKNLADDMVRNTARDLLYYAVTQDAMLIFENLSRGFGRQGKRTFMAERQYTRMEDWLTAKLAYEGLPSKTYLSKTLAQYTSKTCSNCGFTITSADYDRVLEKLKKTATGWMTTINGKELKVEGQITYYNRYKRQNVVKDLSVELDRLSEESVNNDISSWTKGRSGEALSLLKKRFSHRPVQEKFVCLNCGFETHADEQAALNIARSWLFLRSQEYKKYQTNKTTGNTDKRAFVETWQSFYRKKLKEVWKPAV

SEQ ID NO: 39671 - protein, 978 aa, synthetic construct
  REGION 1..978: note = engineered CasX variant
QEIKRLSKIRRRLVKDSNTKKAGKTGPMKTLLVRVMTPDLRERLENLRKKPENIPQPISNTSRANLNKLLTDYTEMKKAILHVYWEEFQKDPVGLMSRVAQPASKKIDQNKLKPEMDEKGNLTTAGFACSQCGQPLFVYKLEQVSEKGKAYTNYFGRCNVAEHEKLILLAQLKPEKDSDEAVTYSLGKFGQRALDFYSIHVTKESTHPVKPLAQIAGNRYASGPVGKALRDACMGTIASFLSKYQDIIIEHQKVVKGNQKRLESLRELAGKENLEYPSVTLPPQPHTKEGVDAYNEVIARVRMWVNLNLWQKLKLSRDDAKPLLRLKGFPSFPLVERQANEVDWWDMVCNVKKLINEKKEDGKVFWQNLAGYKRQEALRPYLSSEEDRKKGKKFARYQLGDLLLHLEKKHGEDWGKVYDEAWERIDKKVEGLSKHIKLEEERRSEDAQSKAALTDWLRAKASFVIEGLKEADKDEFCRCELKLQKWYGDLRGKPFAIEAENSILDISGFSKQYNCAFIWQKDGVKKLNLYLIINYFKGGKLRFKKIKPEAFEANRFYTVINKKSGEIVPMEVNFNFDDPNLIILPLAFGKRQGREFIWNDLLSLETGSLKLANGRVIEKTLYNRRTRQDEPALFVALTFERREVLDSSNIKPMNLIGVDRGENIPAVIALTDPEGCPLSRFKDSLGNPTHILRIGESYKEKQRTIQAKKEVEQRRAGGYSRKYASKAKNLADDMVRNTARDLLYYAVTQDAMLIFENLSRGFGRQGKRTFMAERQYTRMEDWLTAKLAYEGLPSKTYLSKTLAQYTSKTCSNCGFTITSADYDRVLEKLKKTATGWMTTINGKELKVEGQITYYNRYKRQNVVKDLSVELDRLSEESVNNDISSWTKGRSGEALSLLKKRFSHRPVQEKFVCLNCGFETHADEQAALNIARSWLFLRSQEYKKYQTNKTTGNTDKRAFVETWQSFYRKKLKEVWKPAV

SEQ ID NO: 39672 - protein, 978 aa, synthetic construct
  REGION 1..978: note = engineered CasX variant
QEIKRISKIRRRLVKDSNTKKAGKTGPMKTLLVRVMTPDLRERLENLRKKPENIPQPISNTSRANLNKLLTDYTEMKKAILHVYWEEFQKDPVGLMSRVAQPASKKIDQNKLKPEMDEKGNLTTAGFACSQCGQPLFVYKLEQVSEKGKAYTNYVGRCNVAEHEKLILLAQLKPEKDSDEAVTYSLGKFGQRALDFYSIHVTKESTHPVKPLAQIAGNRYASGPVGKALRDACMGTIASFLSKYQDIIIEHQKVVKGNQKRLESLRELAGKENLEYPSVTLPPQPHTKEGVDAYNEVIARVRMWVNLNLWQKLKLSRDDAKPLLRLKGFPSFPLVERQANEVDWWDMVCNVKKLINEKKEDGKVFWQNLAGYKRQEALRPYLSSEEDRKKGKKFARYQLGDLLLHLEKKHGEDWGKVYDEAWERIDKKVEGLSKHIKLEEERRSEDAQSKAALTDWLRAKASFVIEGLKEADKDEFCRCELKLQKWYGDLRGKPFAIEAENSILDISGFSKQYNCAFIWQKDGVKKLNLYLIINYFKGGKLRFKKIKPEAFEANRFYTVINKKSGEIVPMEVNFNFDDPNLIILPLAFGKRQGREFIWNDLLSLETGSLKLANGRVIEKTLYNRRTRQDEPALFVALTFERREVLDSSNIKPMNLIGVDRGENIPAVIALTDPEGCPLSRFKDSLGNPTHILRIGESYKEKQRTIQAKKEVEQRRAGGYSRKYASKAKNLADDMVRNTARDLLYYAVTQDAMLIFENLSRGFGRQGKRTFMAERQYTRMEDWLTAKLAYEGLPSKTYLSKTLAQYTSKTCSNCGFTITSADYDRVLEKLKKTATGWMTTINGKELKVEGQITYYNRYKRQNVVKDLSVELDRLSEESVNNDISSWTKGRSGEALSLLKKRFSHRPVQEKFVCLNCGFETHADEQAALNIARSWLFLRSQEYKKYQTNKTTGNTDKRAFVETWQSFYRKKLKEVWKPAV

SEQ ID NO: 39673 - protein, 978 aa, synthetic construct
  REGION 1..978: note = engineered CasX variant
QEIKRISKIRRRLVKDSNTKKAGKTGPMKTLLVRVMTPDLRERLENLRKKPENIPQPISNTSRANLNKLLTDYTEMKKAILHVYWEEFQKDPVGLMSRVAQPASKKIDQNKLKPEMDEKGNLTTAGFACSQCGQPLFVYKLEQVSEKGKAYTNYFGRCNVAEHEKLILLAQLKPEKDSDEAVTYSLGKFGQRALDFYSIHVTKESTHPVKPLAQIAGNRYASGPVGKALRDACMGTIASFLSKYQDIIIEHQKVVKGNQKRLESLRELAGKENLEYPSVTLPPQPHTKEGVDAYNEVIARVRMWVNLNLWQKLKLSRDDAKPLLRLKGFPSFPLVERQANEVDWWDMVCNVKKLINEKKEDGKVFWQNLAGYKRQEALRPYLSSEEDRKKGKKFARYQLGDLLLHLEKKHGEDWGKVYDEAWERIDKKVEGLSKHIKLEEERRSEDAQSKAALTDWLRAKASFVIEGLKEADKDEFCRCELKLQKWYGDLRGKPFAIEAENSILDISGFSKQYNCAFIWQKDGVKKLNLYLIINYFKGGKLRFKKIKPEAFEANRFYTVINKKSGEIVPMEVNFNFDDPNLIILPLAFGKRQGREFIWNDLLSLETGSLKLANGRVIEKTLYNRRTRQDEPALFVALTFERREVLDSSNIKPMNLIGVDRGENIPAVIALTDPEGCPLSRFKDSLGNPTHILRIGESYKEKQRTIQAKKEVEQRRAGGYSRKYASKAKNLADDMVRNTARDLLYYAVTQDAMLIFENLSRGFGRQGKRTFMAERQYTRMEDWLTAKLAYEGLASKTYLSKTLAQYTSKTCSNCGFTITSADYDRVLEKLKKTATGWMTTINGKELKVEGQITYYNRYKRQNVVKDLSVELDRLSEESVNNDISSWTKGRSGEALSLLKKRFSHRPVQEKFVCLNCGFETHADEQAALNIARSWLFLRSQEYKKYQTNKTTGNTDKRAFVETWQSFYRKKLKEVWKPAV

SEQ ID NO: 39674 - protein, 978 aa, synthetic construct
  REGION 1..978: note = engineered CasX variant
QEIKRISKIRRRLVKDSNTKKAGKTGPMKTLLVRVMTPDLRERLENLRKKPENIPQPISNTSRANLNKLLTDYTEMKKAILHVYWEEFQKDPVGLMSRVAQPASKKIDQNKLKPEMDEKGNLTTAGFACSQCGQPLFVYKLEQVSEKGKAYTNYFGRCNVAEHEKLILLAQLKPEKDSDEAVTYSLGKFGQRALDFYSIHVTKESTHPVKPLAQIAGNRYASGPVGKALRDACMGTIASFLSKYQDIIIEHQKVVKGNQKRLESLRELAGKENLEYPSVTLPPQPHTKEGVDAYNEVIARVRMWVNLNLWQKLKLSRDDAKPLLRLKGFPSFPLVERQANEVDWWDMVCNVKKLINEKKEDGKVFWQNLAGYKRQEALRPYLSSEEDRKKGKKFARYQLGDLLLHLEKKHGEDWGKVYDEAWERIDKKVEGLSKHIKLEEERRSEDAQSKAALTDWLRAKASFVIEGLKEADKDEFCRCELKLQKWYGDLRGKPFAIEAENSILDISGFSKQYNCAFIWQKDGVKKLNLYLIINYFKGGKLRFKKIKPEAFEANRFYTVINKKSGEIVPMEVNFNFDDPNLIILPLAFGKRQGREFIWNDLLSLETGSLKLANGRVIEKTLYNRRTRQDEPALFVALTFERREVLDSSNIKPMNLIGVDRGENIPAVIALTDPEGCPLSRFKDSLGNPTHILRIGESYKEKQRTIQAKKEVEQRRAGGYSRKYASKAKNLADDMVRNTARDLLYYAVTQDAMLIFENLSRGFGRQGKRTFMAERQYTRMEDWLTAKLAYEGLPSKVYLSKTLAQYTSKTCSNCGFTITSADYDRVLEKLKKTATGWMTTINGKELKVEGQITYYNRYKRQNVVKDLSVELDRLSEESVNNDISSWTKGRSGEALSLLKKRFSHRPVQEKFVCLNCGFETHADEQAALNIARSWLFLRSQEYKKYQTNKTTGNTDKRAFVETWQSFYRKKLKEVWKPAV

SEQ ID NO: 39675 - protein, 979 aa, synthetic construct
  REGION 1..979: note = engineered CasX variant
QEIKRISKIRRRLVKDSNTKKAGKTGPMKTLLVRVMTPDLRERLENLRKKPENIPQPISNTSRANLNKLLTDYTEMKKAILHVYWEEFQKDPVGLMSRVAQPASKKIDQNKLKPEMDEKGNLTTAGFACSQCGQPLFVYKLEQVSEKGKAYTNYFGRCNVAEHEKLILLAQLKPEKDSDEAVTYSLGKFGQRALDFYSIHVTKESTHPVKPLAQIAGNRYASGPVGKALRDACMGTIASFLSKYQDIIIEHQKVVKGNQKRLESLRELAGKENLEYPSVTLPPQPHTKEGVDAYNEVIARVRMWVNLNLWQKLKLSRDDAKPLLRLKGFPSFPLVERQANEVDWWDMVCNVKKLINEKKEDGKVFWQNLAGYKRQEALRPYLSSEEDRKKGKKFARYQLGDLLLHLEKKHGEDWGKVYDEAWERIDKKVEGLSKHIKLEEERRSEDAQSKAALTDWLRAKASFVIEGLKEADKDEFCRCELKLQKWYGDLRGKPFAIEAENSILDISGFSKQYNCAFIWQKDGVKKLNLYLIINYFKGGKLRFKKIKPEAFEANRFYTVINKKSGEIVPMEVNFNFDDPNLIILPLAFGKRQGREFIWNDLLSLETGSLKLANGRVIEKTLYNRRTRQDEPALFVALTFERREVLDSSNIKPMNLIGVDRGENIPAVIALTDPEGCPLSRFKDSLGNPTHILRIGESYKEKQRTIQAKKEVEQRRAGGYSRKYASKAKNLADDMVRNTARDLLYYAVTQDAMLIFENLSRGFGRQGKRTFMAERQYTRMEDWLTAKLAYEGPLPSKTYLSKTLAQYTSKTCSNCGFTITSADYDRVLEKLKKTATGWMTTINGKELKVEGQITYYNRYKRQNVVKDLSVELDRLSEESVNNDISSWTKGRSGEALSLLKKRFSHRPVQEKFVCLNCGFETHADEQAALNIARSWLFLRSQEYKKYQTNKTTGNTDKRAFVETWQSFYRKKLKEVWKPAV

SEQ ID NO: 39676 - protein, 979 aa, synthetic construct
  REGION 1..979: note = engineered CasX variant
QEIKRISKIRRRLVKDSNTKKAGKTGPMKTLLVRVMTPDLRERLENLRKKPENIPQPISNTSRANLNKLLTDYTEMKKAILHVYWEEFQKDPVGLMSRVAQPASKKIDQNKLKPEMDEKGNLTTAGFACSQCGQPLFVYKLEQVSEKGKAYTNYFGRCNVAEHEKLILLAQLKPEKDSDEAVTYSLGKFGQRALDFYSIHVTKESTHPVKPLAQIAGNRYASGPVGKALRDACMGTIASFLSKYQDIIIEHQKVVKGNQKRLESLRELAGKENLEYPSVTLPPQPHTKEGVDAYNEVIARVRMWVNLNLWQKLKLSRDDAKPLLRLKGFPSFPLVERQANEVDWWDMVCNVKKLINEKKEDGKVFWQNLAGYKRQEALRPYLSSEEDVRKKGKKFARYQLGDLLLHLEKKHGEDWGKVYDEAWERIDKKVEGLSKHIKLEEERRSEDAQSKAALTDWLRAKASFVIEGLKEADKDEFCRCELKLQKWYGDLRGKPFAIEAENSILDISGFSKQYNCAFIWQKDGVKKLNLYLIINYFKGGKLRFKKIKPEAFEANRFYTVINKKSGEIVPMEVNFNFDDPNLIILPLAFGKRQGREFIWNDLLSLETGSLKLANGRVIEKTLYNRRTRQDEPALFVALTFERREVLDSSNIKPMNLIGVDRGENIPAVIALTDPEGCPLSRFKDSLGNPTHILRIGESYKEKQRTIQAKKEVEQRRAGGYSRKYASKAKNLADDMVRNTARDLLYYAVTQDAMLIFENLSRGFGRQGKRTFMAERQYTRMEDWLTAKLAYEGLPSKTYLSKTLAQYTSKTCSNCGFTITSADYDRVLEKLKKTATGWMTTINGKELKVEGQITYYNRYKRQNVVKDLSVELDRLSEESVNNDISSWTKGRSGEALSLLKKRFSHRPVQEKFVCLNCGFETHADEQAALNIARSWLFLRSQEYKKYQTNKTTGNTDKRAFVETWQSFYRKKLKEVWKPAV

SEQ ID NO: 39677 - protein, 978 aa, synthetic construct
  REGION 1..978: note = engineered CasX variant
QEIKRISKIRRRLVKDSNTKKAGKTGPMKTLLVRVMTPDLRERLENLRKKPENIPQPISNTSRANLNKLLTDYTEMKKAILHVYWEEFQKDPVGLMSRVAQPASKKIDQNKLKPEMDEKGNLTTAGFACSQCGQPLFVYKLEQVSEKGKAYTNYFGRCNVAEHEKLILLAQLKPEKDSDEAVTYSLGKFGQRALDFYSIHVTKESTHPVKPLAQIAGNRYASGPVGKALRDACMGTIASFLSKYQDIIIEHQKVVKGNQKRLESLRELAGKENLEYPSVTLPPQPHTKEGVDAYNEVIARVRMWVNLNLWQKLKLSRDDAKPLLRLKGFPSFPLVERQANEVDWWDMVCNVKKLINEKKEDGKVFWQNLAGYKRQEALRPYLSSEEDRKKGKKFARYQLGDLLLHLEKKHGEDWGKVYDEAWERIDKKVEGLSKHIKLEEERRSEDAQSKAALTDWLRAKASFVIEGLKEADKDEFCRCELKLQKWYGDLRGKPFAIEAENSILDISGFSKQYNCAFIWQKDGVKKLNLYLIINYFKGGKLRFKKIKPEAFEANRFYTVINKKSGEIVPMEVNFNFDDPNLIILPLAFGKRQGREFIWNDLLSLETGSLKLANGRVIEKTLYNRRTRQDEPALFVALTFERREVLDSSNIKPMNLIGVDRGENIPAVIALTDPEGCPLSRFKDSLGNPTHILRIGESYKEKQRTIQAKKEVEQRRAGGYSRKYASKAKNLADDMVRNTARDLLYYAVTQDAMLIFENLSRGFGRQGKRTFMAERQYTRMEDWLTAKLAYEGLPSKTYLSKTLAQYTSKTCSNCGFTITSADYDRMLEKLKKTATGWMTTINGKELKVEGQITYYNRYKRQNVVKDLSVELDRLSEESVNNDISSWTKGRSGEALSLLKKRFSHRPVQEKFVCLNCGFETHADEQAALNIARSWLFLRSQEYKKYQTNKTTGNTDKRAFVETWQSFYRKKLKEVWKPAV

SEQ ID NO: 39678 - protein, 978 aa, synthetic construct
  REGION 1..978: note = engineered CasX variant
QEIKRISKIRRRLVKDSNTKKAGKTGPMKTLLVRVMTPDLRERLENLRKKPENIPQPISNTSRANLNKLLTDYTEMKKAILHVYWEEFQKDPVGLMSRVAQPASKKIDQNKLKPEMDEKGNLTTAGFACSQCGQPLFVYKLEQVSEKGKAYTNYFGRCNVAEHEKLILLAQLKPEKDSDEAVTYSLGKFGQRALDFYSIHVTKESTHPVKPLAQIAGNRYASGPVGKALRDACMGTIASFLSKYQDIIIEHQKVVKGNQKRLESLRELAGKENLEYPSVTLPPQPHTKEGVDAYNEVIARVRMWVNLNLWQKLKLSRDDAKPLLRLKGFPSFPLVERQANEVDWWDMVCNVKKLINEKKEDGKVFWQNLAGYKRQEALRPYLSSEEDRKKGKKFARYQLGDLLLHLEKKHGEDWGKVYDEAWERIDKKVEGLSKHIKLEEERRSEDAQSKAALTDWLRAKASFVIEGLKEADKDEFCRCELKLQKWYGDLRGKPFAIEAENSILDISGFSKQYNCAFIWQKDGVKKLNLYLIINYFKGGKLRFKKIKPEAFEANRFYTVINKKSGEIVPMEVNFNFDDPNLIILPLAFGKRQGREFIWNDLLSLETGSLKLANGRVIEKTLYNRRTRQDEPALFVALTFERREVLDSSNIKPMNLIGVDRGENIPAVIALTDPEGCPLSRFKDSLGNPTHILRIGESYKEKQRTIQAKKEVEQRRAGGYSRKYASKAKNLADDMVRNTARDLLYYAVTQDAMLIFENLSRGFGRQGKRTFMAERQYTRMEDWLTAKLAYEGLPSKTYLSKTLAQYTSKTCSNCGFTITSADYDRVLEKLKKTATGWMTTINGKELKVEGQITYYNRYKRQNVVKDLSVELDRLSEESVNNDISSWTKGRQGEALSLLKKRFSHRPVQEKFVCLNCGFETHADEQAALNIARSWLFLRSQEYKKYQTNKTTGNTDKRAFVETWQSFYRKKLKEVWKPAV

SEQ ID NO: 39679 - protein, 978 aa, synthetic construct
  REGION 1..978: note = engineered CasX variant
QEIKRISKIRRRLVKDSNTKKAGKTGPMKTLLVRVMTPDLRERLENLRKKPENIPQPISNTSRANLNKLLTDYTEMKKAILHVYWEEFQKDPVGLMSRVAQPASKKIDQNKLKPEMDEKGNLTTAGFACSQCGQPLFVYKLEQVSEKGKAYTNYFGRCNVAEHEKLILLAQLKPEKDSDEAVTYSLGKFGQRALDFYSIHVTKESTHPVKPLAQIAGNRYASGPVGKALRDACMGTIASFLSKYQDIIIEHQKVVKGNQKRLESLRELAGKENLEYPSVTLPPQPHTKEGVDAYNEVIARVRMWVNLNLWQKLKLSRDDAKPLLRLKGFPSFPLVERQANEVDWWDMVCNVKKLINEKKEDGKVFWQNLAGYKRQEALRPYLSSEEDRKKGKKFARYQLGDLLLHLEKKHGEDWGKVYDEAWERIDKKVEGLSKHIKLEEERRSEDAQSKAALTDWLRAKASFVIEGLKEADKDEFCRCELKLQKWYGDLRGKPFAIEAENSILDISGFSKQYNCAFIWQKDGVKKLNLYLIINYFKGGKLRFKKIKPEAFEANRFYTVINKKSGEIVPMEVNFNFDDPNLIILPLAFGKRQGREFIWNDLLSLETGSLKLANGRVIEKTLYNRRTRQDEPALFVALTFERREVLDSSNIKPMNLIGVDRGENIPAVIALTDPEGCPLSRFKDSLGNPTHILRIGESYKEKQRTIQAKKEVEQRRAGGYSRKYASKAKNLADDMVRNTARDLLYYAVTQDAMLIFENLSRGFGRQGKRTFMAERQYTRMEDWLTAKLAYEGLPSKTYLSKTLAQYTSKTCSNCGFTITSADYDRVLEKLKKTATGWMTTINGKELKVEGQITYYNRYKRQNVVKDLSVELDRLSEESVNNDISSWTKGRSGEALSLLKKRFSHRPVQEKFVCLNCEFETHADEQAALNIARSWLFLRSQEYKKYQTNKTTGNTDKRAFVETWQSFYRKKLKEVWKPAV

SEQ ID NO: 39680 - protein, 979 aa, synthetic construct
  REGION 1..979: note = engineered CasX variant
QEIKRISKIRRRLVKDSNTKKAGKTGPMKTLLVRVMTPDLRERLENLRKKPENIPQPISNTSRANLNKLLTDYTEMKKAILHVYWEEFQKDPVGLMSRVAQPASKKIDQNKLKPEMDEKGNLTTAGFACSQCGQPLFVYKLEQVSEKGKAYTNYFGRCNVAEHEKLILLAQLKPEKDSDEAVTYSLGKFGQRALDFYSIHVTKESTHPVKPLAQIAGNRYASGPVGKALRDACMGTIASFLSKYQDIIIEHQKVVKGNQKRLESLRELAGKENLEYPSVTLPPQPHTKEGVDAYNEVIARVRMWVNLNLWQKLKLSRDDAKPLLRLKGFPSFPLVERQANEVDWWDMVCNVKKLINEKKEDGKVFWQNLAGYKRQEALRPYLSSEEDRKKGKKFARYQLGDLLLHLEKKHGEDWGKVYDEAWERIDKKVEGLSKHIKLEEERRSEDAQSKAALTDWLRAKASFVIEGLKEADKDEFCRCELKLQKWYGDLRGKPFAIEAENSILDISGFSKQYNCAFIWQKDGVKKLNLYLIINYFKGGKLRFKKIKPEAFEANRFYTVINKKSGEIVPMEVNFNFDDPNLIILPLAFGKRQGREFIWNDLLSLETGSLKLANGRVIEKTLYNRRTRQDEPALFVALTFERREVLDSSNIKPMNLIGVDRGENIPAVIALTDPEGCPLSRFKDSLGNPTHILRIGESYKEKQRTIQAKKEVEQRRAGGYSRKYASKAKNLADDMVRNTARDLLYYAVTQDAMLIFENLSRGFGRQGKRTFMAERQYTRMEDWLTAKLAYEGLPSKTYLSKTLAQYTSKTCSNCGFTITSADYDRVLEKLKKTATGWMTTINGKELKVEGQITYYNRYKRQNVVKDLSVELDRLSEESVNNDISSWTKGRSGEALSLLKKRFSHRPVQEKFVCLNCGFETHADEQAALNIARSWLFLRSQEYKKYQTNKTSTGNTDKRAFVETWQSFYRKKLKEVWKPAV

SEQ ID NO: 39681 - protein, 979 aa, synthetic construct
  REGION 1..979: note = engineered CasX variant
QEIKRISKIRRRLVKDSNTKKAGKTGPMKTLLVRVMTPDLRERLENLRKKPENIPQPISNTSRANLNKLLTDYTEMKKAILHVYWEEFQKDPVGLMSRVAQPASKKIDQNKLKPEMDEKGNLTTAGFACSQCGQPLFVYKLEQVSEKGKAYTNYFGRCNVAEHEKLILLAQLKPEKDSDEAVTYSLGKFGQRALDFYSIHVTKESTHPVKPLAQIAGNRYASGPVGKALRDACMGTIASFLSKYQDIIIEHQKVVKGNQKRLESLRELAGKENLEYPSVTLPPQPHTKEGVDAYNEVIARVRMWVNLNLWQKLKLSRDDAKPLLRLKGFPSFPLVERQANEVDWWDMVCNVKKLINEKKEDGKVFWQNLAGYKRQEALRPYLSSEEDRKKGKKFARYQLGDLLLHLEKKHGEDWGKVYDEAWERIDKKVEGLSKHIKLEEERRSEDAQSKAALTDWLRAKASFVIEGLKEADKDEFCRCELKLQKWYGDLRGKPFAIEAENSILDISGFSKQYNCAFIWQKDGVKKLNLYLIINYFKGGKLRFKKIKPEAFEANRFYTVINKKSGEIVPMEVNFNFDDPNLIILPLAFGKRQGREFIWNDLLSLETGSLKLANGRVIEKTLYNRRTRQDEPALFVALTFERREVLDSSNIKPMNLIGVDRGENIPAVIALTDPEGCPLSRFKDSLGNPTHILRIGESYKEKQRTIQAKKEVEQRRAGGYSRKYASKAKNLADDMVRNTARDLLYYAVTQDAMLIFENLSRGFGRQGKRTFMAERQYTRMEDWLTAKLAYEGLPSKTYLSKTLAQYTSKTCSNCGFTITSADYDRVLEKLKKTATGWMTTINGKELKVEGQITYYNRYKRQNVVKDLSVELDRLSEESVNNDISSWTKGRSGEALSLLKKRFSHRPVQEKFVCLNCGFETHADEQAALNIARSWLFLRSQEYKKYQTNKTTGKNTDKRAFVETWQSFYRKKLKEVWKPAV

SEQ ID NO: 39682 - protein, 978 aa, synthetic construct
  REGION 1..978: note = engineered CasX variant
QEIKRISKIRRRLVKDSNTKKAGKTGPMKTLLVRVMTPDLRERLENLRKKPENIPQPISNTSRANLNKLLTDYTEMKKAILHVYWEEFQKDPVGLMSRVAQPASKKIDQNKLKPEMDEKGNLTTAGFACSQCGQPLFVYKLEQVSEKGKAYTNYFGRCNVAEHEKLILLAQLKPEKDSDEAVTYSLGKFGQRALDFYSIHVTKESTHPVKPLAQIAGNRYASGPVGKALRDACMGTIASFLSKYQDIIIEHQKVVKGNQKRLESLRELAGKENLEYPSVTLPPQPHTKEGVDAYNEVIARVRMWVNLNLWQKLKLSRDDAKPLLRLKKFPSFPLVERQANEVDWWDMVCNVKKLINEKKEDGKVFWQNLAGYKRQEALRPYLSSEEDRKKGKKFARYQLGDLLLHLEKKHGEDWGKVYDEAWERIDKKVEGLSKHIKLEEERRSEDAQSKAALTDWLRAKASFVIEGLKEADKDEFCRCELKLQKWYGDLRGKPFAIEAENSILDISGFSKQYNCAFIWQKDGVKKLNLYLIINYFKGGKLRFKKIKPEAFEANRFYTVINKKSGEIVPMEVNFNFDDPNLIILPLAFGKRQGREFIWNDLLSLETGSLKLANGRVIEKTLYNRRTRQDEPALFVALTFERREVLDSSNIKPMNLIGVDRGENIPAVIALTDPEGCPLSRFKDSLGNPTHILRIGESYKEKQRTIQAKKEVEQRRAGGYSRKYASKAKNLADDMVRNTARDLLYYAVTQDAMLIFENLSRGFGRQGKRTFMAERQYTRMEDWLTAKLAYEGLPSKTYLSKTLAQYTSKTCSNCGFTITSADYDRVLEKLKKTATGWMTTINGKELKVEGQITYYNRYKRQNVVKDLSVELDRLSEESVNNDISSWTKGRSGEALSLLKKRFSHRPVQEKFVCLNCGFETHADEQAALNIARSWLFLRSQEYKKYQTNKTTGNTDKRAFVETWQSFYRKKLKEVWKPAV

SEQ ID NO: 39683 - protein, 978 aa, synthetic construct
  REGION 1..978: note = engineered CasX variant
QEIKRISKIRRRLVKDSNTKKAGKTGPMKTLLVRVMTPDLRERLENLRKKPENIPQPISNTSRANLNKLLTDYTEMKKAILHVYWEEFQKDPVGLMSRVAQPASKKIDQNKLKPEMDEKGNLTTAGFACSQCGQPLFVYKLEQVSEKGKAYTNYFGRCNVAEHEKLILLAQLKPEKDSDEAVTYSLGKFGQRALDFYSIHVTKESTHPVKPLAQIAGNRYASGPVGKALRDACMGTIASFLSKYQDIIIEHQKVVKGNQKRLESLRELAGKENLEYPSVTLPPQPHTKEGVDAYNEVIARVRMWVNLNLWQKLKLSRDDAKPLLRLKGFPSFPLVERQANEVDWWDMVCNVKKLINEKKEDGKVFWQNLAGYKRQEALRPYLSSEEDRKKGKKFARYQLGDLLLHLEKKHGEDWGKVYDEAWERIDKKVEGLSKHIKLEEERRSEDAQSKAALTDWLRAKASFVIEGLKEADKDEFCRCELKLQKWYGDLRGKPFAIEAENSILDISGFSKQYNCAFIWQKDGVKKLNLYLIINYFKGGKLRFKKIKPEAFEANRFYTVINKKSGEIVPMEVNFNFDDPNLIILPLAFGKRQGREFIWNDLLSLETGSLKLANGRVIEKTLYNRRTRQDEPALFVALTFERREVLDSSNIKPMNLIGVDRGENIPAVIALTDPEGCPLSRFKDSLGNPTHILRIGERYKEKQRTIQAKKEVEQRRAGGYSRKYASKAKNLADDMVRNTARDLLYYAVTQDAMLIFENLSRGFGRQGKRTFMAERQYTRMEDWLTAKLAYEGLPSKTYLSKTLAQYTSKTCSNCGFTITSADYDRVLEKLKKTATGWMTTINGKELKVEGQITYYNRYKRQNVVKDLSVELDRLSEESVNNDISSWTKGRSGEALSLLKKRFSHRPVQEKFVCLNCGFETHADEQAALNIARSWLFLRSQEYKKYQTNKTTGNTDKRAFVETWQSFYRKKLKEVWKPAV

SEQ ID NO: 39684 - protein, 978 aa, synthetic construct
  REGION 1..978: note = engineered CasX variant
QEIKRISKIRRRLVKDSNTKKAGKTGPMKTLLVRVMTPDLRERLENLRKKPENIPQPISNTSRANLNKLLTDYTEMKKAILHVYWEEFQKDPVGLMSRVAQPASKKIDQNKLKPEMDEKGNLTTAGFACSQCGQPLFVYKLEQVSEKGKAYTNYFGRCNVAEHEKLILLAQLKPEKDSDEAVTYSLGKFGQRALDFYSIHVTKESTHPVKPLAQIAGNRYASGPVGKALRDACMGTIASFLSKYQDIIIEHQKVVKGNQKRLESLRELAGKENLEYPSVTLPPQPHTKEGVDAYNEVIARVRMWVNLNLWQKLKLSRDDAKPLLRLKGFPSFPLVERQANEVDWWDMVCNVKKLINEKKEDGKVFWQNLAGYKRQEALRPYLSSEEDRKKGKKFARYQLGDLLLHLEKKHGEDWGKVYDEAWERIDKKVEGLSKHIKLEEERRSEDAQSKAALTDWLRAKASFVIEGLKEADKDEFCRCELKLQKWYGDLRGKPFAIEAENSILDISGFSKQYNCAFIWQKDGVKKLNLYLIINYFKGGKLRFKKIKPEAFEANRFYTVINKKSGEIVPMEVNFNFDDPNLIILPLAFGKRQGREFIWNDLLSLETGSLQLANGRVIEKTLYNRRTRQDEPALFVALTFERREVLDSSNIKPMNLIGVDRGENIPAVIALTDPEGCPLSRFKDSLGNPTHILRIGESYKEKQRTIQAKKEVEQRRAGGYSRKYASKAKNLADDMVRNTARDLLYYAVTQDAMLIFENLSRGFGRQGKRTFMAERQYTRMEDWLTAKLAYEGLPSKTYLSKTLAQYTSKTCSNCGFTITSADYDRVLEKLKKTATGWMTTINGKELKVEGQITYYNRYKRQNVVKDLSVELDRLSEESVNNDISSWTKGRSGEALSLLKKRFSHRPVQEKFVCLNCGFETHADEQAALNIARSWLFLRSQEYKKYQTNKTTGNTDKRAFVETWQSFYRKKLKEVWKPAV

SEQ ID NO: 39685 - protein, 978 aa, synthetic construct
  REGION 1..978: note = engineered CasX variant
QEIKRINGIRRRLVKDSNTKKAGKTGPMKTLLVPVMTPDLRERLENLRKKPENIPQPISNTSRANLNKLLTDYTEMKKAILHVYWEEFQKDPVGLMSRVAQPASKKIDQNKLKPEMDEKGNLTTAGFACSQCGQPLFVYKLEQVSEKGKAYTNYFGRCNVAEHEKLILLAQLKPEKDSDEAVTYSLGKFGQRALDFYSIHVTKESTHPVKPLAQIAGNRYASGPVGKALRDACMGTIASFLSKYQDIIIEHQKVVKGNQKRLESLRELAGKENLEYPSVTLPPQPHTKEGVDAYNEVIARVRMWVNLNLWQKLKLSRDDAKPLLRLKGFPSFPLVERQANEVDWWDMVCNVKKLINEKKEDGKVFWQNLAGYKRQEALRPYLSSEEDRKKGKKFARYQLGDLLLHLEKKHGEDWGKVYDEAWERIDKKVEGLSKHIKLEEERRSEDAQSKAALTDWLRAKASFVIEGLKEADKDEFCRCELKLQKWYGDLRGKPFAIEAENSILDISGFSKQYNCAFIWQKDGVKKLNLYLIINYFKGGKLRFKKIKPEAFEANRFYTVINKKSGEIVPMEVNFNFDDPNLIILPLAFGKRQGREFIWNDLLSLETGSLKLANGRVIEKTLYNRRTRQDEPALFVALTFERREVLDSSNIKPMNLIGVDRGENIPAVIALTDPEGCPLSRFKDSLGNPTHILRIGESYKEKQRTIQAKKEVEQRRAGGYSRKYASKAKNLADDMVRNTARDLLYYAVTQDAMLIFENLSRGFGRQGKRTFMAERQYTRMEDWLTAKLAYEGLPSKTYLSKTLAQYTSKTCSNCGFTITSADYDRVLEKLKKTATGWMTTINGKELKVEGQITYYNRYKRQNVVKDLSVELDRLSEESVNNDISSWTKGRSGEALSLLKKRFSHRPVQEKFVCLNCGFETHADEQAALNIARSWLFLRSQEYKKYQTNKTTGNTDKRAFVETWQSFYRKKLKEVWKPAV

SEQ ID NO: 39686 - protein, 978 aa, synthetic construct
  REGION 1..978: note = engineered CasX variant
QEIKRINGIRRRLVKDSNTKKAGKTGPMKTLLVRVMTPDLRERLENLRKKPPNIPQPISNTSRANLNKLLTDYTEMKKAILHVYWEEFQKDPVGLMSRVAQPASKKIDQNKLKPEMDEKGNLTTAGFACSQCGQPLFVYKLEQVSEKGKAYTNYFGRCNVAEHEKLILLAQLKPEKDSDEAVTYSLGKFGQRALDFYSIHVTKESTHPVKPLAQIAGNRYASGPVGKALRDACMGTIASFLSKYQDIIIEHQKVVKGNQKRLESLRELAGKENLEYPSVTLPPQPHTKEGVDAYNEVIARVRMWVNLNLWQKLKLSRDDAKPLLRLKGFPSFPLVERQANEVDWWDMVCNVKKLINEKKEDGKVFWQNLAGYKRQEALRPYLSSEEDRKKGKKFARYQLGDLLLHLEKKHGEDWGKVYDEAWERIDKKVEGLSKHIKLEEERRSEDAQSKAALTDWLRAKASFVIEGLKEADKDEFCRCELKLQKWYGDLRGKPFAIEAENSILDISGFSKQYNCAFIWQKDGVKKLNLYLIINYFKGGKLRFKKIKPEAFEANRFYTVINKKSGEIVPMEVNFNFDDPNLIILPLAFGKRQGREFIWNDLLSLETGSLKLANGRVIEKTLYNRRTRQDEPALFVALTFERREVLDSSNIKPMNLIGVDRGENIPAVIALTDPEGCPLSRFKDSLGNPTHILRIGESYKEKQRTIQAKKEVEQRRAGGYSRKYASKAKNLADDMVRNTARDLLYYAVTQDAMLIFENLSRGFGRQGKRTFMAERQYTRMEDWLTAKLAYEGLPSKTYLSKTLAQYTSKTCSNCGFTITSADYDRVLEKLKKTATGWMTTINGKELKVEGQITYYNRYKRQNVVKDLSVELDRLSEESVNNDISSWTKGRSGEALSLLKKRFSHRPVQEKFVCLNCGFETHADEQAALNIARSWLFLRSQEYKKYQTNKTTGNTDKRAFVETWQSFYRKKLKEVWKPAV

SEQ ID NO: 39687 - protein, 978 aa, synthetic construct
  REGION 1..978: note = engineered CasX variant
QEIKRINGIRRRLVKDSNTKKAGKTGPMKTLLVRVMTPDLRERLENLRKKPENIPQPISNTSQANLNKLLTDYTEMKKAILHVYWEEFQKDPVGLMSRVAQPASKKIDQNKLKPEMDEKGNLTTAGFACSQCGQPLFVYKLEQVSEKGKAYTNYFGRCNVAEHEKLILLAQLKPEKDSDEAVTYSLGKFGQRALDFYSIHVTKESTHPVKPLAQIAGNRYASGPVGKALRDACMGTIASFLSKYQDIIIEHQKVVKGNQKRLESLRELAGKENLEYPSVTLPPQPHTKEGVDAYNEVIARVRMWVNLNLWQKLKLSRDDAKPLLRLKGFPSFPLVERQANEVDWWDMVCNVKKLINEKKEDGKVFWQNLAGYKRQEALRPYLSSEEDRKKGKKFARYQLGDLLLHLEKKHGEDWGKVYDEAWERIDKKVEGLSKHIKLEEERRSEDAQSKAALTDWLRAKASFVIEGLKEADKDEFCRCELKLQKWYGDLRGKPFAIEAENSILDISGFSKQYNCAFIWQKDGVKKLNLYLIINYFKGGKLRFKKIKPEAFEANRFYTVINKKSGEIVPMEVNFNFDDPNLIILPLAFGKRQGREFIWNDLLSLETGSLKLANGRVIEKTLYNRRTRQDEPALFVALTFERREVLDSSNIKPMNLIGVDRGENIPAVIALTDPEGCPLSRFKDSLGNPTHILRIGESYKEKQRTIQAKKEVEQRRAGGYSRKYASKAKNLADDMVRNTARDLLYYAVTQDAMLIFENLSRGFGRQGKRTFMAERQYTRMEDWLTAKLAYEGLPSKTYLSKTLAQYTSKTCSNCGFTITSADYDRVLEKLKKTATGWMTTINGKELKVEGQITYYNRYKRQNVVKDLSVELDRLSEESVNNDISSWTKGRSGEALSLLKKRFSHRPVQEKFVCLNCGFETHADEQAALNIARSWLFLRSQEYKKYQTNKTTGNTDKRAFVETWQSFYRKKLKEVWKPAV

SEQ ID NO: 39688 - protein, 978 aa, synthetic construct
  REGION 1..978: note = engineered CasX variant
QEIKRINGIRRRLVKDSNTKKAGKTGPMKTLLVRVMTPDLRERLENLRKKPENIPQPISNTSRANLNKLLTDYTEMKKAILHVYDEEFQKDPVGLMSRVAQPASKKIDQNKLKPEMDEKGNLTTAGFACSQCGQPLFVYKLEQVSEKGKAYTNYFGRCNVAEHEKLILLAQLKPEKDSDEAVTYSLGKFGQRALDFYSIHVTKESTHPVKPLAQIAGNRYASGPVGKALRDACMGTIASFLSKYQDIIIEHQKVVKGNQKRLESLRELAGKENLEYPSVTLPPQPHTKEGVDAYNEVIARVRMWVNLNLWQKLKLSRDDAKPLLRLKGFPSFPLVERQANEVDWWDMVCNVKKLINEKKEDGKVFWQNLAGYKRQEALRPYLSSEEDRKKGKKFARYQLGDLLLHLEKKHGEDWGKVYDEAWERIDKKVEGLSKHIKLEEERRSEDAQSKAALTDWLRAKASFVIEGLKEADKDEFCRCELKLQKWYGDLRGKPFAIEAENSILDISGFSKQYNCAFIWQKDGVKKLNLYLIINYFKGGKLRFKKIKPEAFEANRFYTVINKKSGEIVPMEVNFNFDDPNLIILPLAFGKRQGREFIWNDLLSLETGSLKLANGRVIEKTLYNRRTRQDEPALFVALTFERREVLDSSNIKPMNLIGVDRGENIPAVIALTDPEGCPLSRFKDSLGNPTHILRIGESYKEKQRTIQAKKEVEQRRAGGYSRKYASKAKNLADDMVRNTARDLLYYAVTQDAMLIFENLSRGFGRQGKRTFMAERQYTRMEDWLTAKLAYEGLPSKTYLSKTLAQYTSKTCSNCGFTITSADYDRVLEKLKKTATGWMTTINGKELKVEGQITYYNRYKRQNVVKDLSVELDRLSEESVNNDISSWTKGRSGEALSLLKKRFSHRPVQEKFVCLNCGFETHADEQAALNIARSWLFLRSQEYKKYQTNKTTGNTDKRAFVETWQSFYRKKLKEVWKPAV

SEQ ID NO: 39689 - protein, 978 aa, synthetic construct
  REGION 1..978: note = engineered CasX variant
QEIKRINGIRRRLVKDSNTKKAGKTGPMKTLLVRVMTPDLRERLENLRKKPENIPQPISNTSRANLNKLLTDYTEMKKAILHVYWEEFQKDPVGLMSRVAQPASKKIDQNKLKPEMDEKGNLTTAGFACSQCGQPLFVYKLEQVSEKGKAYTNYFGRCNVAEHEKLIKLAQLKPEKDSDEAVTYSLGKFGQRALDFYSIHVTKESTHPVKPLAQIAGNRYASGPVGKALRDACMGTIASFLSKYQDIIIEHQKVVKGNQKRLESLRELAGKENLEYPSVTLPPQPHTKEGVDAYNEVIARVRMWVNLNLWQKLKLSRDDAKPLLRLKGFPSFPLVERQANEVDWWDMVCNVKKLINEKKEDGKVFWQNLAGYKRQEALRPYLSSEEDRKKGKKFARYQLGDLLLHLEKKHGEDWGKVYDEAWERIDKKVEGLSKHIKLEEERRSEDAQSKAALTDWLRAKASFVIEGLKEADKDEFCRCELKLQKWYGDLRGKPFAIEAENSILDISGFSKQYNCAFIWQKDGVKKLNLYLIINYFKGGKLRFKKIKPEAFEANRFYTVINKKSGEIVPMEVNFNFDDPNLIILPLAFGKRQGREFIWNDLLSLETGSLKLANGRVIEKTLYNRRTRQDEPALFVALTFERREVLDSSNIKPMNLIGVDRGENIPAVIALTDPEGCPLSRFKDSLGNPTHILRIGESYKEKQRTIQAKKEVEQRRAGGYSRKYASKAKNLADDMVRNTARDLLYYAVTQDAMLIFENLSRGFGRQGKRTFMAERQYTRMEDWLTAKLAYEGLPSKTYLSKTLAQYTSKTCSNCGFTITSADYDRVLEKLKKTATGWMTTINGKELKVEGQITYYNRYKRQNVVKDLSVELDRLSEESVNNDISSWTKGRSGEALSLLKKRFSHRPVQEKFVCLNCGFETHADEQAALNIARSWLFLRSQEYKKYQTNKTTGNTDKRAFVETWQSFYRKKLKEVWKPAV

SEQ ID NO: 39690 - protein, 978 aa, synthetic construct
  REGION 1..978: note = engineered CasX variant
QEIKRINGIRRRLVKDSNTKKAGKTGPMKTLLVRVMTPDLRERLENLRKKPENIPQPISNTSRANLNKLLTDYTEMKKAILHVYWEEFQKDPVGLMSRVAQPASKKIDQNKLKPEMDEKGNLTTAGFACSQCGQPLFVYKLEQVSEKGKAYTNYFGRCNVAEHEKLILLYQLKPEKDSDEAVTYSLGKFGQRALDFYSIHVTKESTHPVKPLAQIAGNRYASGPVGKALRDACMGTIASFLSKYQDIIIEHQKVVKGNQKRLESLRELAGKENLEYPSVTLPPQPHTKEGVDAYNEVIARVRMWVNLNLWQKLKLSRDDAKPLLRLKGFPSFPLVERQANEVDWWDMVCNVKKLINEKKEDGKVFWQNLAGYKRQEALRPYLSSEEDRKKGKKFARYQLGDLLLHLEKKHGEDWGKVYDEAWERIDKKVEGLSKHIKLEEERRSEDAQSKAALTDWLRAKASFVIEGLKEADKDEFCRCELKLQKWYGDLRGKPFAIEAENSILDISGFSKQYNCAFIWQKDGVKKLNLYLIINYFKGGKLRFKKIKPEAFEANRFYTVINKKSGEIVPMEVNFNFDDPNLIILPLAFGKRQGREFIWNDLLSLETGSLKLANGRVIEKTLYNRRTRQDEPALFVALTFERREVLDSSNIKPMNLIGVDRGENIPAVIALTDPEGCPLSRFKDSLGNPTHILRIGESYKEKQRTIQAKKEVEQRRAGGYSRKYASKAKNLADDMVRNTARDLLYYAVTQDAMLIFENLSRGFGRQGKRTFMAERQYTRMEDWLTAKLAYEGLPSKTYLSKTLAQYTSKTCSNCGFTITSADYDRVLEKLKKTATGWMTTINGKELKVEGQITYYNRYKRQNVVKDLSVELDRLSEESVNNDISSWTKGRSGEALSLLKKRFSHRPVQEKFVCLNCGFETHADEQAALNIARSWLFLRSQEYKKYQTNKTTGNTDKRAFVETWQSFYRKKLKEVWKPAV

SEQ ID NO: 39691 - protein, 978 aa, synthetic construct
  REGION 1..978: note = engineered CasX variant
QEIKRINGIRRRLVKDSNTKKAGKTGPMKTLLVRVMTPDLRERLENLRKKPENIPQPISNTSRANLNKLLTDYTEMKKAILHVYWEEFQKDPVGLMSRVAQPASKKIDQNKLKPEMDEKGNLTTAGFACSQCGQPLFVYKLEQVSEKGKAYTNYFGRCNVAEHEKLILLSQLKPEKDSDEAVTYSLGKFGQRALDFYSIHVTKESTHPVKPLAQIAGNRYASGPVGKALRDACMGTIASFLSKYQDIIIEHQKVVKGNQKRLESLRELAGKENLEYPSVTLPPQPHTKEGVDAYNEVIARVRMWVNLNLWQKLKLSRDDAKPLLRLKGFPSFPLVERQANEVDWWDMVCNVKKLINEKKEDGKVFWQNLAGYKRQEALRPYLSSEEDRKKGKKFARYQLGDLLLHLEKKHGEDWGKVYDEAWERIDKKVEGLSKHIKLEEERRSEDAQSKAALTDWLRAKASFVIEGLKEADKDEFCRCELKLQKWYGDLRGKPFAIEAENSILDISGFSKQYNCAFIWQKDGVKKLNLYLIINYFKGGKLRFKKIKPEAFEANRFYTVINKKSGEIVPMEVNFNFDDPNLIILPLAFGKRQGREFIWNDLLSLETGSLKLANGRVIEKTLYNRRTRQDEPALFVALTFERREVLDSSNIKPMNLIGVDRGENIPAVIALTDPEGCPLSRFKDSLGNPTHILRIGESYKEKQRTIQAKKEVEQRRAGGYSRKYASKAKNLADDMVRNTARDLLYYAVTQDAMLIFENLSRGFGRQGKRTFMAERQYTRMEDWLTAKLAYEGLPSKTYLSKTLAQYTSKTCSNCGFTITSADYDRVLEKLKKTATGWMTTINGKELKVEGQITYYNRYKRQNVVKDLSVELDRLSEESVNNDISSWTKGRSGEALSLLKKRFSHRPVQEKFVCLNCGFETHADEQAALNIARSWLFLRSQEYKKYQTNKTTGNTDKRAFVETWQSFYRKKLKEVWKPAV

SEQ ID NO: 39692 - protein, 977 aa, synthetic construct
  REGION 1..977: note = engineered CasX variant
QEIKRINGIRRRLVKDSNTKKAGKTGPMKTLLVRVMTPDLRERLENLRKKPENIPQPISNTSRANLNKLLTDYTEMKKAILHVYWEEFQKDPVGLMSRVAQPASKKIDQNKLKPEMDEKGNLTTAGFACSQCGQPLFVYKLEQVSEKGKAYTNYFGRCNVAEHEKLILLAQLKPEKDSDEAVTYSLGKFGQRALDFYSIHVTKESTHPVKPLAQIAGNRYASPVGKALRDACMGTIASFLSKYQDIIIEHQKVVKGNQKRLESLRELAGKENLEYPSVTLPPQPHTKEGVDAYNEVIARVRMWVNLNLWQKLKLSRDDAKPLLRLKGFPSFPLVERQANEVDWWDMVCNVKKLINEKKEDGKVFWQNLAGYKRQEALRPYLSSEEDRKKGKKFARYQLGDLLLHLEKKHGEDWGKVYDEAWERIDKKVEGLSKHIKLEEERRSEDAQSKAALTDWLRAKASFVIEGLKEADKDEFCRCELKLQKWYGDLRGKPFAIEAENSILDISGFSKQYNCAFIWQKDGVKKLNLYLIINYFKGGKLRFKKIKPEAFEANRFYTVINKKSGEIVPMEVNFNFDDPNLIILPLAFGKRQGREFIWNDLLSLETGSLKLANGRVIEKTLYNRRTRQDEPALFVALTFERREVLDSSNIKPMNLIGVDRGENIPAVIALTDPEGCPLSRFKDSLGNPTHILRIGESYKEKQRTIQAKKEVEQRRAGGYSRKYASKAKNLADDMVRNTARDLLYYAVTQDAMLIFENLSRGFGRQGKRTFMAERQYTRMEDWLTAKLAYEGLPSKTYLSKTLAQYTSKTCSNCGFTITSADYDRVLEKLKKTATGWMTTINGKELKVEGQITYYNRYKRQNVVKDLSVELDRLSEESVNNDISSWTKGRSGEALSLLKKRFSHRPVQEKFVCLNCGFETHADEQAALNIARSWLFLRSQEYKKYQTNKTTGNTDKRAFVETWQSFYRKKLKEVWKPAV

SEQ ID NO: 39693 - protein, 978 aa, synthetic construct
  REGION 1..978: note = engineered CasX variant
QEIKRINGIRRRLVKDSNTKKAGKTGPMKTLLVRVMTPDLRERLENLRKKPENIPQPISNTSRANLNKLLTDYTEMKKAILHVYWEEFQKDPVGLMSRVAQPASKKIDQNKLKPEMDEKGNLTTAGFACSQCGQPLFVYKLEQVSEKGKAYTNYFGRCNVAEHEKLILLAQLKPEKDSDEAVTYSLGKFGQRALDFYSIHVTKESTHPVKPLAQIAGNRYASGPVGKALRDACMGTIASFLSKYQDIIIEHQKVVKGNQKRLESLRELAGKENLEYPSVTLPPQPHTSEGVDAYNEVIARVRMWVNLNLWQKLKLSRDDAKPLLRLKGFPSFPLVERQANEVDWWDMVCNVKKLINEKKEDGKVFWQNLAGYKRQEALRPYLSSEEDRKKGKKFARYQLGDLLLHLEKKHGEDWGKVYDEAWERIDKKVEGLSKHIKLEEERRSEDAQSKAALTDWLRAKASFVIEGLKEADKDEFCRCELKLQKWYGDLRGKPFAIEAENSILDISGFSKQYNCAFIWQKDGVKKLNLYLIINYFKGGKLRFKKIKPEAFEANRFYTVINKKSGEIVPMEVNFNFDDPNLIILPLAFGKRQGREFIWNDLLSLETGSLKLANGRVIEKTLYNRRTRQDEPALFVALTFERREVLDSSNIKPMNLIGVDRGENIPAVIALTDPEGCPLSRFKDSLGNPTHILRIGESYKEKQRTIQAKKEVEQRRAGGYSRKYASKAKNLADDMVRNTARDLLYYAVTQDAMLIFENLSRGFGRQGKRTFMAERQYTRMEDWLTAKLAYEGLPSKTYLSKTLAQYTSKTCSNCGFTITSADYDRVLEKLKKTATGWMTTINGKELKVEGQITYYNRYKRQNVVKDLSVELDRLSEESVNNDISSWTKGRSGEALSLLKKRFSHRPVQEKFVCLNCGFETHADEQAALNIARSWLFLRSQEYKKYQTNKTTGNTDKRAFVETWQSFYRKKLKEVWKPAV

SEQ ID NO: 39694 - protein, 978 aa, synthetic construct
  REGION 1..978: note = engineered CasX variant
QEIKRINGIRRRLVKDSNTKKAGKTGPMKTLLVRVMTPDLRERLENLRKKPENIPQPISNTSRANLNKLLTDYTEMKKAILHVYWEEFQKDPVGLMSRVAQPASKKIDQNKLKPEMDEKGNLTTAGFACSQCGQPLFVYKLEQVSEKGKAYTNYFGRCNVAEHEKLILLAQLKPEKDSDEAVTYSLGKFGQRALDFYSIHVTKESTHPVKPLAQIAGNRYASGPVGKALRDACMGTIASFLSKYQDIIIEHQKVVKGNQKRLESLRELAGKENLEYPSVTLPPQPHTKEGLDAYNEVIARVRMWVNLNLWQKLKLSRDDAKPLLRLKGFPSFPLVERQANEVDWWDMVCNVKKLINEKKEDGKVFWQNLAGYKRQEALRPYLSSEEDRKKGKKFARYQLGDLLLHLEKKHGEDWGKVYDEAWERIDKKVEGLSKHIKLEEERRSEDAQSKAALTDWLRAKASFVIEGLKEADKDEFCRCELKLQKWYGDLRGKPFAIEAENSILDISGFSKQYNCAFIWQKDGVKKLNLYLIINYFKGGKLRFKKIKPEAFEANRFYTVINKKSGEIVPMEVNFNFDDPNLIILPLAFGKRQGREFIWNDLLSLETGSLKLANGRVIEKTLYNRRTRQDEPALFVALTFERREVLDSSNIKPMNLIGVDRGENIPAVIALTDPEGCPLSRFKDSLGNPTHILRIGESYKEKQRTIQAKKEVEQRRAGGYSRKYASKAKNLADDMVRNTARDLLYYAVTQDAMLIFENLSRGFGRQGKRTFMAERQYTRMEDWLTAKLAYEGLPSKTYLSKTLAQYTSKTCSNCGFTITSADYDRVLEKLKKTATGWMTTINGKELKVEGQITYYNRYKRQNVVKDLSVELDRLSEESVNNDISSWTKGRSGEALSLLKKRFSHRPVQEKFVCLNCGFETHADEQAALNIARSWLFLRSQEYKKYQTNKTTGNTDKRAFVETWQSFYRKKLKEVWKPAV

SEQ ID NO: 39695 - protein, 978 aa, synthetic construct
  REGION 1..978: note = engineered CasX variant
QEIKRINGIRRRLVKDSNTKKAGKTGPMKTLLVRVMTPDLRERLENLRKKPENIPQPISNTSRANLNKLLTDYTEMKKAILHVYWEEFQKDPVGLMSRVAQPASKKIDQNKLKPEMDEKGNLTTAGFACSQCGQPLFVYKLEQVSEKGKAYTNYFGRCNVAEHEKLILLAQLKPEKDSDEAVTYSLGKFGQRALDFYSIHVTKESTHPVKPLAQIAGNRYASGPVGKALRDACMGTIASFLSKYQDIIIEHQKVVKGNQKRLESLRELAGKENLEYPSVTLPPQPHTKEGVDAYNEVIARVRTWVNLNLWQKLKLSRDDAKPLLRLKGFPSFPLVERQANEVDWWDMVCNVKKLINEKKEDGKVFWQNLAGYKRQEALRPYLSSEEDRKKGKKFARYQLGDLLLHLEKKHGEDWGKVYDEAWERIDKKVEGLSKHIKLEEERRSEDAQSKAALTDWLRAKASFVIEGLKEADKDEFCRCELKLQKWYGDLRGKPFAIEAENSILDISGFSKQYNCAFIWQKDGVKKLNLYLIINYFKGGKLRFKKIKPEAFEANRFYTVINKKSGEIVPMEVNFNFDDPNLIILPLAFGKRQGREFIWNDLLSLETGSLKLANGRVIEKTLYNRRTRQDEPALFVALTFERREVLDSSNIKPMNLIGVDRGENIPAVIALTDPEGCPLSRFKDSLGNPTHILRIGESYKEKQRTIQAKKEVEQRRAGGYSRKYASKAKNLADDMVRNTARDLLYYAVTQDAMLIFENLSRGFGRQGKRTFMAERQYTRMEDWLTAKLAYEGLPSKTYLSKTLAQYTSKTCSNCGFTITSADYDRVLEKLKKTATGWMTTINGKELKVEGQITYYNRYKRQNVVKDLSVELDRLSEESVNNDISSWTKGRSGEALSLLKKRFSHRPVQEKFVCLNCGFETHADEQAALNIARSWLFLRSQEYKKYQTNKTTGNTDKRAFVETWQSFYRKKLKEVWKPAV

SEQ ID NO: 39696 - protein, 978 aa, synthetic construct
  REGION 1..978: note = engineered CasX variant
QEIKRINGIRRRLVKDSNTKKAGKTGPMKTLLVRVMTPDLRERLENLRKKPENIPQPISNTSRANLNKLLTDYTEMKKAILHVYWEEFQKDPVGLMSRVAQPASKKIDQNKLKPEMDEKGNLTTAGFACSQCGQPLFVYKLEQVSEKGKAYTNYFGRCNVAEHEKLILLAQLKPEKDSDEAVTYSLGKFGQRALDFYSIHVTKESTHPVKPLAQIAGNRYASGPVGKALRDACMGTIASFLSKYQDIIIEHQKVVKGNQKRLESLRELAGKENLEYPSVTLPPQPHTKEGVDAYNEVIARVRWWVNLNLWQKLKLSRDDAKPLLRLKGFPSFPLVERQANEVDWWDMVCNVKKLINEKKEDGKVFWQNLAGYKRQEALRPYLSSEEDRKKGKKFARYQLGDLLLHLEKKHGEDWGKVYDEAWERIDKKVEGLSKHIKLEEERRSEDAQSKAALTDWLRAKASFVIEGLKEADKDEFCRCELKLQKWYGDLRGKPFAIEAENSILDISGFSKQYNCAFIWQKDGVKKLNLYLIINYFKGGKLRFKKIKPEAFEANRFYTVINKKSGEIVPMEVNFNFDDPNLIILPLAFGKRQGREFIWNDLLSLETGSLKLANGRVIEKTLYNRRTRQDEPALFVALTFERREVLDSSNIKPMNLIGVDRGENIPAVIALTDPEGCPLSRFKDSLGNPTHILRIGESYKEKQRTIQAKKEVEQRRAGGYSRKYASKAKNLADDMVRNTARDLLYYAVTQDAMLIFENLSRGFGRQGKRTFMAERQYTRMEDWLTAKLAYEGLPSKTYLSKTLAQYTSKTCSNCGFTITSADYDRVLEKLKKTATGWMTTINGKELKVEGQITYYNRYKRQNVVKDLSVELDRLSEESVNNDISSWTKGRSGEALSLLKKRFSHRPVQEKFVCLNCGFETHADEQAALNIARSWLFLRSQEYKKYQTNKTTGNTDKRAFVETWQSFYRKKLKEVWKPAV

SEQ ID NO: 39697 - protein, 979 aa, synthetic construct
  REGION 1..979: note = engineered CasX variant
QEIKRINGIRRRLVKDSNTKKAGKTGPMKTLLVRVMTPDLRERLENLRKKPENIPQPISNTSRANLNKLLTDYTEMKKAILHVYWEEFQKDPVGLMSRVAQPASKKIDQNKLKPEMDEKGNLTTAGFACSQCGQPLFVYKLEQVSEKGKAYTNYFGRCNVAEHEKLILLAQLKPEKDSDEAVTYSLGKFGQRALDFYSIHVTKESTHPVKPLAQIAGNRYASGPVGKALRDACMGTIASFLSKYQDIIIEHQKVVKGNQKRLESLRELAGKENLEYPSVTLPPQPHTKEGVDAYNEVIARVRMWVNLNLWQKLKLSRDDAKPLLRLKGFPSFPLVERQQANEVDWWDMVCNVKKLINEKKEDGKVFWQNLAGYKRQEALRPYLSSEEDRKKGKKFARYQLGDLLLHLEKKHGEDWGKVYDEAWERIDKKVEGLSKHIKLEEERRSEDAQSKAALTDWLRAKASFVIEGLKEADKDEFCRCELKLQKWYGDLRGKPFAIEAENSILDISGFSKQYNCAFIWQKDGVKKLNLYLIINYFKGGKLRFKKIKPEAFEANRFYTVINKKSGEIVPMEVNFNFDDPNLIILPLAFGKRQGREFIWNDLLSLETGSLKLANGRVIEKTLYNRRTRQDEPALFVALTFERREVLDSSNIKPMNLIGVDRGENIPAVIALTDPEGCPLSRFKDSLGNPTHILRIGESYKEKQRTIQAKKEVEQRRAGGYSRKYASKAKNLADDMVRNTARDLLYYAVTQDAMLIFENLSRGFGRQGKRTFMAERQYTRMEDWLTAKLAYEGLPSKTYLSKTLAQYTSKTCSNCGFTITSADYDRVLEKLKKTATGWMTTINGKELKVEGQITYYNRYKRQNVVKDLSVELDRLSEESVNNDISSWTKGRSGEALSLLKKRFSHRPVQEKFVCLNCGFETHADEQAALNIARSWLFLRSQEYKKYQTNKTTGNTDKRAFVETWQSFYRKKLKEVWKPAV

SEQ ID NO: 39698 - protein, 979 aa, synthetic construct
  REGION 1..979: note = engineered CasX variant
QEIKRINGIRRRLVKDSNTKKAGKTGPMKTLLVRVMTPDLRERLENLRKKPENIPQPISNTSRANLNKLLTDYTEMKKAILHVYWEEFQKDPVGLMSRVAQPASKKIDQNKLKPEMDEKGNLTTAGFACSQCGQPLFVYKLEQVSEKGKAYTNYFGRCNVAEHEKLILLAQLKPEKDSDEAVTYSLGKFGQRALDFYSIHVTKESTHPVKPLAQIAGNRYASGPVGKALRDACMGTIASFLSKYQDIIIEHQKVVKGNQKRLESLRELAGKENLEYPSVTLPPQPHTKEGVDAYNEVIARVRMWVNLNLWQKLKLSRDDAKPLLRLKGFPSFPLVERQANAEVDWWDMVCNVKKLINEKKEDGKVFWQNLAGYKRQEALRPYLSSEEDRKKGKKFARYQLGDLLLHLEKKHGEDWGKVYDEAWERIDKKVEGLSKHIKLEEERRSEDAQSKAALTDWLRAKASFVIEGLKEADKDEFCRCELKLQKWYGDLRGKPFAIEAENSILDISGFSKQYNCAFIWQKDGVKKLNLYLIINYFKGGKLRFKKIKPEAFEANRFYTVINKKSGEIVPMEVNFNFDDPNLIILPLAFGKRQGREFIWNDLLSLETGSLKLANGRVIEKTLYNRRTRQDEPALFVALTFERREVLDSSNIKPMNLIGVDRGENIPAVIALTDPEGCPLSRFKDSLGNPTHILRIGESYKEKQRTIQAKKEVEQRRAGGYSRKYASKAKNLADDMVRNTARDLLYYAVTQDAMLIFENLSRGFGRQGKRTFMAERQYTRMEDWLTAKLAYEGLPSKTYLSKTLAQYTSKTCSNCGFTITSADYDRVLEKLKKTATGWMTTINGKELKVEGQITYYNRYKRQNVVKDLSVELDRLSEESVNNDISSWTKGRSGEALSLLKKRFSHRPVQEKFVCLNCGFETHADEQAALNIARSWLFLRSQEYKKYQTNKTTGNTDKRAFVETWQSFYRKKLKEVWKPAV

SEQ ID NO: 39699 - protein, 978 aa, synthetic construct
  REGION 1..978: note = engineered CasX variant
QEIKRINGIRRRLVKDSNTKKAGKTGPMKTLLVRVMTPDLRERLENLRKKPENIPQPISNTSRANLNKLLTDYTEMKKAILHVYWEEFQKDPVGLMSRVAQPASKKIDQNKLKPEMDEKGNLTTAGFACSQCGQPLFVYKLEQVSEKGKAYTNYFGRCNVAEHEKLILLAQLKPEKDSDEAVTYSLGKFGQRALDFYSIHVTKESTHPVKPLAQIAGNRYASGPVGKALRDACMGTIASFLSKYQDIIIEHQKVVKGNQKRLESLRELAGKENLEYPSVTLPPQPHTKEGVDAYNEVIARVRMWVNLNLWQKLKLSRDDAKPLLRLKGFPSFPLVERQANEVDWWDMVCNVKKLINEKKEDGKVFWQNLAGYKRQEALRPYLSSEEDRKKGKKFARTQLGDLLLHLEKKHGEDWGKVYDEAWERIDKKVEGLSKHIKLEEERRSEDAQSKAALTDWLRAKASFVIEGLKEADKDEFCRCELKLQKWYGDLRGKPFAIEAENSILDISGFSKQYNCAFIWQKDGVKKLNLYLIINYFKGGKLRFKKIKPEAFEANRFYTVINKKSGEIVPMEVNFNFDDPNLIILPLAFGKRQGREFIWNDLLSLETGSLKLANGRVIEKTLYNRRTRQDEPALFVALTFERREVLDSSNIKPMNLIGVDRGENIPAVIALTDPEGCPLSRFKDSLGNPTHILRIGESYKEKQRTIQAKKEVEQRRAGGYSRKYASKAKNLADDMVRNTARDLLYYAVTQDAMLIFENLSRGFGRQGKRTFMAERQYTRMEDWLTAKLAYEGLPSKTYLSKTLAQYTSKTCSNCGFTITSADYDRVLEKLKKTATGWMTTINGKELKVEGQITYYNRYKRQNVVKDLSVELDRLSEESVNNDISSWTKGRSGEALSLLKKRFSHRPVQEKFVCLNCGFETHADEQAALNIARSWLFLRSQEYKKYQTNKTTGNTDKRAFVETWQSFYRKKLKEVWKPAV

SEQ ID NO: 39700 - protein, 979 aa, synthetic construct
  REGION 1..979: note = engineered CasX variant
QEIKRINGIRRRLVKDSNTKKAGKTGPMKTLLVRVMTPDLRERLENLRKKPENIPQPISNTSRANLNKLLTDYTEMKKAILHVYWEEFQKDPVGLMSRVAQPASKKIDQNKLKPEMDEKGNLTTAGFACSQCGQPLFVYKLEQVSEKGKAYTNYFGRCNVAEHEKLILLAQLKPEKDSDEAVTYSLGKFGQRALDFYSIHVTKESTHPVKPLAQIAGNRYASGPVGKALRDACMGTIASFLSKYQDIIIEHQKVVKGNQKRLESLRELAGKENLEYPSVTLPPQPHTKEGVDAYNEVIARVRMWVNLNLWQKLKLSRDDAKPLLRLKGFPSFPLVERQANEVDWWDMVCNVKKLINEKKEDGKVFWQNLAGYKRQEALRPYLSSEEDRKKGKKFARYQLGDLLLHLEKKHEGEDWGKVYDEAWERIDKKVEGLSKHIKLEEERRSEDAQSKAALTDWLRAKASFVIEGLKEADKDEFCRCELKLQKWYGDLRGKPFAIEAENSILDISGFSKQYNCAFIWQKDGVKKLNLYLIINYFKGGKLRFKKIKPEAFEANRFYTVINKKSGEIVPMEVNFNFDDPNLIILPLAFGKRQGREFIWNDLLSLETGSLKLANGRVIEKTLYNRRTRQDEPALFVALTFERREVLDSSNIKPMNLIGVDRGENIPAVIALTDPEGCPLSRFKDSLGNPTHILRIGESYKEKQRTIQAKKEVEQRRAGGYSRKYASKAKNLADDMVRNTARDLLYYAVTQDAMLIFENLSRGFGRQGKRTFMAERQYTRMEDWLTAKLAYEGLPSKTYLSKTLAQYTSKTCSNCGFTITSADYDRVLEKLKKTATGWMTTINGKELKVEGQITYYNRYKRQNVVKDLSVELDRLSEESVNNDISSWTKGRSGEALSLLKKRFSHRPVQEKFVCLNCGFETHADEQAALNIARSWLFLRSQEYKKYQTNKTTGNTDKRAFVETWQSFYRKKLKEVWKPAV

SEQ ID NO: 39701 - protein, 978 aa, synthetic construct
  REGION 1..978: note = engineered CasX variant
QEIKRINGIRRRLVKDSNTKKAGKTGPMKTLLVRVMTPDLRERLENLRKKPENIPQPISNTSRANLNKLLTDYTEMKKAILHVYWEEFQKDPVGLMSRVAQPASKKIDQNKLKPEMDEKGNLTTAGFACSQCGQPLFVYKLEQVSEKGKAYTNYFGRCNVAEHEKLILLAQLKPEKDSDEAVTYSLGKFGQRALDFYSIHVTKESTHPVKPLAQIAGNRYASGPVGKALRDACMGTIASFLSKYQDIIIEHQKVVKGNQKRLESLRELAGKENLEYPSVTLPPQPHTKEGVDAYNEVIARVRMWVNLNLWQKLKLSRDDAKPLLRLKGFPSFPLVERQANEVDWWDMVCNVKKLINEKKEDGKVFWQNLAGYKRQEALRPYLSSEEDRKKGKKFARYQLGDLLLHLEKKHGEDWGKVYDEAWERIDKKVEGLSKHIKLEEERRSEDAQSKAALTDWLRAKASFVIEGLKEADKDEFCRCDLKLQKWYGDLRGKPFAIEAENSILDISGFSKQYNCAFIWQKDGVKKLNLYLIINYFKGGKLRFKKIKPEAFEANRFYTVINKKSGEIVPMEVNFNFDDPNLIILPLAFGKRQGREFIWNDLLSLETGSLKLANGRVIEKTLYNRRTRQDEPALFVALTFERREVLDSSNIKPMNLIGVDRGENIPAVIALTDPEGCPLSRFKDSLGNPTHILRIGESYKEKQRTIQAKKEVEQRRAGGYSRKYASKAKNLADDMVRNTARDLLYYAVTQDAMLIFENLSRGFGRQGKRTFMAERQYTRMEDWLTAKLAYEGLPSKTYLSKTLAQYTSKTCSNCGFTITSADYDRVLEKLKKTATGWMTTINGKELKVEGQITYYNRYKRQNVVKDLSVELDRLSEESVNNDISSWTKGRSGEALSLLKKRFSHRPVQEKFVCLNCGFETHADEQAALNIARSWLFLRSQEYKKYQTNKTTGNTDKRAFVETWQSFYRKKLKEVWKPAV

SEQ ID NO: 39702 - protein, 978 aa, synthetic construct
  REGION 1..978: note = engineered CasX variant
QEIKRINGIRRRLVKDSNTKKAGKTGPMKTLLVRVMTPDLRERLENLRKKPENIPQPISNTSRANLNKLLTDYTEMKKAILHVYWEEFQKDPVGLMSRVAQPASKKIDQNKLKPEMDEKGNLTTAGFACSQCGQPLFVYKLEQVSEKGKAYTNYFGRCNVAEHEKLILLAQLKPEKDSDEAVTYSLGKFGQRALDFYSIHVTKESTHPVKPLAQIAGNRYASGPVGKALRDACMGTIASFLSKYQDIIIEHQKVVKGNQKRLESLRELAGKENLEYPSVTLPPQPHTKEGVDAYNEVIARVRMWVNLNLWQKLKLSRDDAKPLLRLKGFPSFPLVERQANEVDWWDMVCNVKKLINEKKEDGKVFWQNLAGYKRQEALRPYLSSEEDRKKGKKFARYQLGDLLLHLEKKHGEDWGKVYDEAWERIDKKVEGLSKHIKLEEERRSEDAQSKAALTDWLRAKASFVIEGLKEADKDEFCRCELKLQKWYGDLRGKPFAIEAENSILDISGFSKQYNCAFIWQKDGVKKLNLYLIINYFKGGKLRFKKIKPEAFEANRFYTVINKKSGEIVPMEVNFNFDDPNLIILPLAFGKRFGREFIWNDLLSLETGSLKLANGRVIEKTLYNRRTRQDEPALFVALTFERREVLDSSNIKPMNLIGVDRGENIPAVIALTDPEGCPLSRFKDSLGNPTHILRIGESYKEKQRTIQAKKEVEQRRAGGYSRKYASKAKNLADDMVRNTARDLLYYAVTQDAMLIFENLSRGFGRQGKRTFMAERQYTRMEDWLTAKLAYEGLPSKTYLSKTLAQYTSKTCSNCGFTITSADYDRVLEKLKKTATGWMTTINGKELKVEGQITYYNRYKRQNVVKDLSVELDRLSEESVNNDISSWTKGRSGEALSLLKKRFSHRPVQEKFVCLNCGFETHADEQAALNIARSWLFLRSQEYKKYQTNKTTGNTDKRAFVETWQSFYRKKLKEVWKPAV

SEQ ID NO: 39703 - protein, 978 aa, synthetic construct
  REGION 1..978: note = engineered CasX variant
QEIKRINGIRRRLVKDSNTKKAGKTGPMKTLLVRVMTPDLRERLENLRKKPENIPQPISNTSRANLNKLLTDYTEMKKAILHVYWEEFQKDPVGLMSRVAQPASKKIDQNKLKPEMDEKGNLTTAGFACSQCGQPLFVYKLEQVSEKGKAYTNYFGRCNVAEHEKLILLAQLKPEKDSDEAVTYSLGKFGQRALDFYSIHVTKESTHPVKPLAQIAGNRYASGPVGKALRDACMGTIASFLSKYQDIIIEHQKVVKGNQKRLESLRELAGKENLEYPSVTLPPQPHTKEGVDAYNEVIARVRMWVNLNLWQKLKLSRDDAKPLLRLKGFPSFPLVERQANEVDWWDMVCNVKKLINEKKEDGKVFWQNLAGYKRQEALRPYLSSEEDRKKGKKFARYQLGDLLLHLEKKHGEDWGKVYDEAWERIDKKVEGLSKHIKLEEERRSEDAQSKAALTDWLRAKASFVIEGLKEADKDEFCRCELKLQKWYGDLRGKPFAIEAENSILDISGFSKQYNCAFIWQKDGVKKLNLYLIINYFKGGKLRFKKIKPEAFEANRFYTVINKKSGEIVPMEVNFNFDDPNLIILPLAFGKRVGREFIWNDLLSLETGSLKLANGRVIEKTLYNRRTRQDEPALFVALTFERREVLDSSNIKPMNLIGVDRGENIPAVIALTDPEGCPLSRFKDSLGNPTHILRIGESYKEKQRTIQAKKEVEQRRAGGYSRKYASKAKNLADDMVRNTARDLLYYAVTQDAMLIFENLSRGFGRQGKRTFMAERQYTRMEDWLTAKLAYEGLPSKTYLSKTLAQYTSKTCSNCGFTITSADYDRVLEKLKKTATGWMTTINGKELKVEGQITYYNRYKRQNVVKDLSVELDRLSEESVNNDISSWTKGRSGEALSLLKKRFSHRPVQEKFVCLNCGFETHADEQAALNIARSWLFLRSQEYKKYQTNKTTGNTDKRAFVETWQSFYRKKLKEVWKPAV

SEQ ID NO: 39704 - protein, 979 aa, synthetic construct
  REGION 1..979: note = engineered CasX variant
QEIKRINGIRRRLVKDSNTKKAGKTGPMKTLLVRVMTPDLRERLENLRKKPENIPQPISNTSRANLNKLLTDYTEMKKAILHVYWEEFQKDPVGLMSRVAQPASKKIDQNKLKPEMDEKGNLTTAGFACSQCGQPLFVYKLEQVSEKGKAYTNYFGRCNVAEHEKLILLAQLKPEKDSDEAVTYSLGKFGQRALDFYSIHVTKESTHPVKPLAQIAGNRYASGPVGKALRDACMGTIASFLSKYQDIIIEHQKVVKGNQKRLESLRELAGKENLEYPSVTLPPQPHTKEGVDAYNEVIARVRMWVNLNLWQKLKLSRDDAKPLLRLKGFPSFPLVERQANEVDWWDMVCNVKKLINEKKEDGKVFWQNLAGYKRQEALRPYLSSEEDRKKGKKFARYQLGDLLLHLEKKHGEDWGKVYDEAWERIDKKVEGLSKHIKLEEERRSEDAQSKAALTDWLRAKASFVIEGLKEADKDEFCRCELKLQKWYGDLRGKPFAIEAENSILDISGFSKQYNCAFIWQKDGVKKLNLYLIINYFKGGKLRFKKIKPEAFEANRFYTVINKKSGEIVPMEVNFNFDDPNLIILPLAFGKRQGREFIWNDLLSLETGSLKLANGRVIEKTLYNRRTRQDEPALFVALTFERREVLDSSNIKTPMNLIGVDRGENIPAVIALTDPEGCPLSRFKDSLGNPTHILRIGESYKEKQRTIQAKKEVEQRRAGGYSRKYASKAKNLADDMVRNTARDLLYYAVTQDAMLIFENLSRGFGRQGKRTFMAERQYTRMEDWLTAKLAYEGLPSKTYLSKTLAQYTSKTCSNCGFTITSADYDRVLEKLKKTATGWMTTINGKELKVEGQITYYNRYKRQNVVKDLSVELDRLSEESVNNDISSWTKGRSGEALSLLKKRFSHRPVQEKFVCLNCGFETHADEQAALNIARSWLFLRSQEYKKYQTNKTTGNTDKRAFVETWQSFYRKKLKEVWKPAV

SEQ ID NO: 39705 - protein, 979 aa, synthetic construct
  REGION 1..979: note = engineered CasX variant
QEIKRINGIRRRLVKDSNTKKAGKTGPMKTLLVRVMTPDLRERLENLRKKPENIPQPISNTSRANLNKLLTDYTEMKKAILHVYWEEFQKDPVGLMSRVAQPASKKIDQNKLKPEMDEKGNLTTAGFACSQCGQPLFVYKLEQVSEKGKAYTNYFGRCNVAEHEKLILLAQLKPEKDSDEAVTYSLGKFGQRALDFYSIHVTKESTHPVKPLAQIAGNRYASGPVGKALRDACMGTIASFLSKYQDIIIEHQKVVKGNQKRLESLRELAGKENLEYPSVTLPPQPHTKEGVDAYNEVIARVRMWVNLNLWQKLKLSRDDAKPLLRLKGFPSFPLVERQANEVDWWDMVCNVKKLINEKKEDGKVFWQNLAGYKRQEALRPYLSSEEDRKKGKKFARYQLGDLLLHLEKKHGEDWGKVYDEAWERIDKKVEGLSKHIKLEEERRSEDAQSKAALTDWLRAKASFVIEGLKEADKDEFCRCELKLQKWYGDLRGKPFAIEAENSILDISGFSKQYNCAFIWQKDGVKKLNLYLIINYFKGGKLRFKKIKPEAFEANRFYTVINKKSGEIVPMEVNFNFDDPNLIILPLAFGKRQGREFIWNDLLSLETGSLKLANGRVIEKTLYNRRTRQDEPALFVALTFERREVLDSSNIKPMSNLIGVDRGENIPAVIALTDPEGCPLSRFKDSLGNPTHILRIGESYKEKQRTIQAKKEVEQRRAGGYSRKYASKAKNLADDMVRNTARDLLYYAVTQDAMLIFENLSRGFGRQGKRTFMAERQYTRMEDWLTAKLAYEGLPSKTYLSKTLAQYTSKTCSNCGFTITSADYDRVLEKLKKTATGWMTTINGKELKVEGQITYYNRYKRQNVVKDLSVELDRLSEESVNNDISSWTKGRSGEALSLLKKRFSHRPVQEKFVCLNCGFETHADEQAALNIARSWLFLRSQEYKKYQTNKTTGNTDKRAFVETWQSFYRKKLKEVWKPAV

SEQ ID NO: 39706 - protein, 978 aa, synthetic construct
  REGION 1..978: note = engineered CasX variant
QEIKRINGIRRRLVKDSNTKKAGKTGPMKTLLVRVMTPDLRERLENLRKKPENIPQPISNTSRANLNKLLTDYTEMKKAILHVYWEEFQKDPVGLMSRVAQPASKKIDQNKLKPEMDEKGNLTTAGFACSQCGQPLFVYKLEQVSEKGKAYTNYFGRCNVAEHEKLILLAQLKPEKDSDEAVTYSLGKFGQRALDFYSIHVTKESTHPVKPLAQIAGNRYASGPVGKALRDACMGTIASFLSKYQDIIIEHQKVVKGNQKRLESLRELAGKENLEYPSVTLPPQPHTKEGVDAYNEVIARVRMWVNLNLWQKLKLSRDDAKPLLRLKGFPSFPLVERQANEVDWWDMVCNVKKLINEKKEDGKVFWQNLAGYKRQEALRPYLSSEEDRKKGKKFARYQLGDLLLHLEKKHGEDWGKVYDEAWERIDKKVEGLSKHIKLEEERRSEDAQSKAALTDWLRAKASFVIEGLKEADKDEFCRCELKLQKWYGDLRGKPFAIEAENSILDISGFSKQYNCAFIWQKDGVKKLNLYLIINYFKGGKLRFKKIKPEAFEANRFYTVINKKSGEIVPMEVNFNFDDPNLIILPLAFGKRQGREFIWNDLLSLETGSLKLANGRVIEKTLYNRRTRQDEPALFVALTFERREVLDSSNIKPMNLIGVDRGENIPAVIALTDPEGCPLSRFKDSLGNPTHILRIRESYKEKQRTIQAKKEVEQRRAGGYSRKYASKAKNLADDMVRNTARDLLYYAVTQDAMLIFENLSRGFGRQGKRTFMAERQYTRMEDWLTAKLAYEGLPSKTYLSKTLAQYTSKTCSNCGFTITSADYDRVLEKLKKTATGWMTTINGKELKVEGQITYYNRYKRQNVVKDLSVELDRLSEESVNNDISSWTKGRSGEALSLLKKRFSHRPVQEKFVCLNCGFETHADEQAALNIARSWLFLRSQEYKKYQTNKTTGNTDKRAFVETWQSFYRKKLKEVWKPAV

SEQ ID NO: 39707 - protein, 978 aa, synthetic construct
  REGION 1..978: note = engineered CasX variant
QEIKRINGIRRRLVKDSNTKKAGKTGPMKTLLVRVMTPDLRERLENLRKKPENIPQPISNTSRANLNKLLTDYTEMKKAILHVYWEEFQKDPVGLMSRVAQPASKKIDQNKLKPEMDEKGNLTTAGFACSQCGQPLFVYKLEQVSEKGKAYTNYFGRCNVAEHEKLILLAQLKPEKDSDEAVTYSLGKFGQRALDFYSIHVTKESTHPVKPLAQIAGNRYASGPVGKALRDACMGTIASFLSKYQDIIIEHQKVVKGNQKRLESLRELAGKENLEYPSVTLPPQPHTKEGVDAYNEVIARVRMWVNLNLWQKLKLSRDDAKPLLRLKGFPSFPLVERQANEVDWWDMVCNVKKLINEKKEDGKVFWQNLAGYKRQEALRPYLSSEEDRKKGKKFARYQLGDLLLHLEKKHGEDWGKVYDEAWERIDKKVEGLSKHIKLEEERRSEDAQSKAALTDWLRAKASFVIEGLKEADKDEFCRCELKLQKWYGDLRGKPFAIEAENSILDISGFSKQYNCAFIWQKDGVKKLNLYLIINYFKGGKLRFKKIKPEAFEANRFYTVINKKSGEIVPMEVNFNFDDPNLIILPLAFGKRQGREFIWNDLLSLETGSLKLANGRVIEKTLYNRRTRQDEPALFVALTFERREVLDSSNIKPMNLIGVDRGENIPAVIALTDPEGCPLSRFKDSLGNPTHILRIGESYKEKQRTIQAKKEVEQRRAGGYSRKYASKAKNLADDMVRNTARDLLYYAVTQDAMLIFENLSRGFGRQGKRTFSAERQYTRMEDWLTAKLAYEGLPSKTYLSKTLAQYTSKTCSNCGFTITSADYDRVLEKLKKTATGWMTTINGKELKVEGQITYYNRYKRQNVVKDLSVELDRLSEESVNNDISSWTKGRSGEALSLLKKRFSHRPVQEKFVCLNCGFETHADEQAALNIARSWLFLRSQEYKKYQTNKTTGNTDKRAFVETWQSFYRKKLKEVWKPAV

SEQ ID NO: 39708 - protein, 978 aa, synthetic construct
  REGION 1..978: note = engineered CasX variant
QEIKRINGIRRRLVKDSNTKKAGKTGPMKTLLVRVMTPDLRERLENLRKKPENIPQPISNTSRANLNKLLTDYTEMKKAILHVYWEEFQKDPVGLMSRVAQPASKKIDQNKLKPEMDEKGNLTTAGFACSQCGQPLFVYKLEQVSEKGKAYTNYFGRCNVAEHEKLILLAQLKPEKDSDEAVTYSLGKFGQRALDFYSIHVTKESTHPVKPLAQIAGNRYASGPVGKALRDACMGTIASFLSKYQDIIIEHQKVVKGNQKRLESLRELAGKENLEYPSVTLPPQPHTKEGVDAYNEVIARVRMWVNLNLWQKLKLSRDDAKPLLRLKGFPSFPLVERQANEVDWWDMVCNVKKLINEKKEDGKVFWQNLAGYKRQEALRPYLSSEEDRKKGKKFARYQLGDLLLHLEKKHGEDWGKVYDEAWERIDKKVEGLSKHIKLEEERRSEDAQSKAALTDWLRAKASFVIEGLKEADKDEFCRCELKLQKWYGDLRGKPFAIEAENSILDISGFSKQYNCAFIWQKDGVKKLNLYLIINYFKGGKLRFKKIKPEAFEANRFYTVINKKSGEIVPMEVNFNFDDPNLIILPLAFGKRQGREFIWNDLLSLETGSLKLANGRVIEKTLYNRRTRQDEPALFVALTFERREVLDSSNIKPMNLIGVDRGENIPAVIALTDPEGCPLSRFKDSLGNPTHILRIGESYKEKQRTIQAKKEVEQRRAGGYSRKYASKAKNLADDMVRNTARDLLYYAVTQDAMLIFENLSRGFGRQGKRTFMAERQYTRMEDWLTAKLAYEGLPSKTYLSKTLAQYTSKTCSNCGFTITSADYDRVLEKLKKTATGWMTTINGKELKVEGQITYYNRYKRQNVVKDLSVELDRLSEESVNNDISSWDKGRSGEALSLLKKRFSHRPVQEKFVCLNCGFETHADEQAALNIARSWLFLRSQEYKKYQTNKTTGNTDKRAFVETWQSFYRKKLKEVWKPAV

SEQ ID NO: 39709 - protein, 978 aa, synthetic construct
  REGION 1..978: note = engineered CasX variant
QEIKRINGIRRRLVKDSNTKKAGKTGPMKTLLVRVMTPDLRERLENLRKKPENIPQPISNTSRANLNKLLTDYTEMKKAILHVYWEEFQVDPVGLMSRVAQPASKKIDQNKLKPEMDEKGNLTTAGFACSQCGQPLFVYKLEQVSEKGKAYTNYFGRCNVAEHEKLILLAQLKPEKDSDEAVTYSLGKFGQRALDFYSIHVTKESTHPVKPLAQIAGNRYASGPVGKALRDACMGTIASFLSKYQDIIIEHQKVVKGNQKRLESLRELAGKENLEYPSVTLPPQPHTKEGVDAYNEVIARVRMWVNLNLWQKLKLSRDDAKPLLRLKGFPSFPLVERQANEVDWWDMVCNVKKLINEKKEDGKVFWQNLAGYKRQEALRPYLSSEEDRKKGKKFARYQLGDLLLHLEKKHGEDWGKVYDEAWERIDKKVEGLSKHIKLEEERRSEDAQSKAALTDWLRAKASFVIEGLKEADKDEFCRCELKLQKWYGDLRGKPFAIEAENSILDISGFSKQYNCAFIWQKDGVKKLNLYLIINYFKGGKLRFKKIKPEAFEANRFYTVINKKSGEIVPMEVNFNFDDPNLIILPLAFGKRQGREFIWNDLLSLETGSLKLANGRVIEKTLYNRRTRQDEPALFVALTFERREVLDSSNIKPMNLIGVDRGENIPAVIALTDPEGCPLSRFKDSLGNPTHILRIGESYKEKQRTIQAKKEVEQRRAGGYSRKYASKAKNLADDMVRNTARDLLYYAVTQDAMLIFENLSRGFGRQGKRTFMAERQYTRMEDWLTAKLAYEGLPSKTYLSKTLAQYTSKTCSNCGFTITSADYDRVLEKLKKTATGWMTTINGKELKVEGQITYYNRYKRQNVVKDLSVELDRLSEESVNNDISSWTKGRSGEALSLLKKRFSHRPVQEKFVCLNCGFETHADEQAALNIARSWLFLRSQEYKKYQTNKTTGNTDKRAFVETWQSFYRKKLKEVWKPAV

SEQ ID NO: 39710 - protein, 978 aa, synthetic construct
  REGION 1..978: note = engineered CasX variant
QEIKRLNGIRRRLVKDSNTKKAGKTGPMKTLLVRVMTPDLRERLENLRKKPENIPQPISNTSRANLNKLLTDYTEMKKAILHVYWEEFQKDPVGLMSRVAQPASKKIDQNKLKPEMDEKGNLTTAGFACSQCGQPLFVYKLEQVSEKGKAYTNYFGRCNVAEHEKLILLAQLKPEKDSDEAVTYSLGKFGQRALDFYSIHVTKESTHPVKPLAQIAGNRYASGPVGKALRDACMGTIASFLSKYQDIIIEHQKVVKGNQKRLESLRELAGKENLEYPSVTLPPQPHTKEGVDAYNEVIARVRMWVNLNLWQKLKLSRDDAKPLLRLKGFPSFPLVERQANEVDWWDMVCNVKKLINEKKEDGKVFWQNLAGYKRQEALRPYLSSEEDRKKGKKFARYQLGDLLLHLEKKHGEDWGKVYDEAWERIDKKVEGLSKHIKLEEERRSEDAQSKAALTDWLRAKASFVIEGLKEADKDEFCRCELKLQKWYGDLRGKPFAIEAENSILDISGFSKQYNCAFIWQKDGVKKLNLYLIINYFKGGKLRFKKIKPEAFEANRFYTVINKKSGEIVPMEVNFNFDDPNLIILPLAFGKRQGREFIWNDLLSLETGSLKLANGRVIEKTLYNRRTRQDEPALFVALTFERREVLDSSNIKPMNLIGVDRGENIPAVIALTDPEGCPLSRFKDSLGNPTHILRIGESYKEKQRTIQAKKEVEQRRAGGYSRKYASKAKNLADDMVRNTARDLLYYAVTQDAMLIFENLSRGFGRQGKRTFMAERQYTRMEDWLTAKLAYEGLPSKTYLSKTLAQYTSKTCSNCGFTITSADYDRVLEKLKKTATGWMTTINGKELKVEGQITYYNRYKRQNVVKDLSVELDRLSEESVNNDISSWTKGRSGEALSLLKKRFSHRPVQEKFVCLNCGFETHADEQAALNIARSWLFLRSQEYKKYQTNKTTGNTDKRAFVETWQSFYRKKLKEVWKPAV

SEQ ID NO: 39711 - protein, 978 aa, synthetic construct
  REGION 1..978: note = engineered CasX variant
QEIKRINGIRRRLVKDSNTKKAGKTGPMKTLLVRVMTPDLRERLENLRKKPENIPQPISNTSRANLNKLLTDYTEMKKAILHVYWEEFQKDPVGLMSRVAQPASKKIDQNKLKPEMDEKGNLTTAGFACSQCGQPLFVYKLEQVSEKGKAYTNYVGRCNVAEHEKLILLAQLKPEKDSDEAVTYSLGKFGQRALDFYSIHVTKESTHPVKPLAQIAGNRYASGPVGKALRDACMGTIASFLSKYQDIIIEHQKVVKGNQKRLESLRELAGKENLEYPSVTLPPQPHTKEGVDAYNEVIARVRMWVNLNLWQKLKLSRDDAKPLLRLKGFPSFPLVERQANEVDWWDMVCNVKKLINEKKEDGKVFWQNLAGYKRQEALRPYLSSEEDRKKGKKFARYQLGDLLLHLEKKHGEDWGKVYDEAWERIDKKVEGLSKHIKLEEERRSEDAQSKAALTDWLRAKASFVIEGLKEADKDEFCRCELKLQKWYGDLRGKPFAIEAENSILDISGFSKQYNCAFIWQKDGVKKLNLYLIINYFKGGKLRFKKIKPEAFEANRFYTVINKKSGEIVPMEVNFNFDDPNLIILPLAFGKRQGREFIWNDLLSLETGSLKLANGRVIEKTLYNRRTRQDEPALFVALTFERREVLDSSNIKPMNLIGVDRGENIPAVIALTDPEGCPLSRFKDSLGNPTHILRIGESYKEKQRTIQAKKEVEQRRAGGYSRKYASKAKNLADDMVRNTARDLLYYAVTQDAMLIFENLSRGFGRQGKRTFMAERQYTRMEDWLTAKLAYEGLPSKTYLSKTLAQYTSKTCSNCGFTITSADYDRVLEKLKKTATGWMTTINGKELKVEGQITYYNRYKRQNVVKDLSVELDRLSEESVNNDISSWTKGRSGEALSLLKKRFSHRPVQEKFVCLNCGFETHADEQAALNIARSWLFLRSQEYKKYQTNKTTGNTDKRAFVETWQSFYRKKLKEVWKPAV

SEQ ID NO: 39712 - protein, 978 aa, synthetic construct
  REGION 1..978: note = engineered CasX variant
QEIKRINGIRRRLVKDSNTKKAGKTGPMKTLLVRVMTPDLRERLENLRKKPENIPQPISNTSRANLNKLLTDYTEMKKAILHVYWEEFQKDPVGLMSRVAQPASKKIDQNKLKPEMDEKGNLTTAGFACSQCGQPLFVYKLEQVSEKGKAYTNYFGRCNVAEHEKLILLAQLKPEKDSDEAVTYSLGKFGQRALDFYSIHVTKESTHPVKPLAQIAGNRYASGPVGKALRDACMGTIASFLSKYQDIIIEHQKVVKGNQKRLESLRELAGKENLEYPSVTLPPQPHTKEGVDAYNEVIARVRMWVNLNLWQKLKLSRDDAKPLLRLKGFPSFPLVERQANEVDWWDMVCNVKKLINEKKEDGKVFWQNLAGYKRQEALRPYLSSEEDRKKGKKFARYQLGDLLLHLEKKHGEDWGKVYDEAWERIDKKVEGLSKHIKLEEERRSEDAQSKAALTDWLRAKASFVIEGLKEADKDEFCRCELKLQKWYGDLRGKPFAIEAENSILDISGFSKQYNCAFIWQKDGVKKLNLYLIINYFKGGKLRFKKIKPEAFEANRFYTVINKKSGEIVPMEVNFNFDDPNLIILPLAFGKRQGREFIWNDLLSLETGSLKLANGRVIEKTLYNRRTRQDEPALFVALTFERREVLDSSNIKPMNLIGVDRGENIPAVIALTDPEGCPLSRFKDSLGNPTHILRIGESYKEKQRTIQAKKEVEQRRAGGYSRKYASKAKNLADDMVRNTARDLLYYAVTQDAMLIFENLSRGFGRQGKRTFMAERQYTRMEDWLTAKLAYEGLASKTYLSKTLAQYTSKTCSNCGFTITSADYDRVLEKLKKTATGWMTTINGKELKVEGQITYYNRYKRQNVVKDLSVELDRLSEESVNNDISSWTKGRSGEALSLLKKRFSHRPVQEKFVCLNCGFETHADEQAALNIARSWLFLRSQEYKKYQTNKTTGNTDKRAFVETWQSFYRKKLKEVWKPAV

SEQ ID NO: 39713 - protein, 978 aa, synthetic construct
  REGION 1..978: note = engineered CasX variant
QEIKRINGIRRRLVKDSNTKKAGKTGPMKTLLVRVMTPDLRERLENLRKKPENIPQPISNTSRANLNKLLTDYTEMKKAILHVYWEEFQKDPVGLMSRVAQPASKKIDQNKLKPEMDEKGNLTTAGFACSQCGQPLFVYKLEQVSEKGKAYTNYFGRCNVAEHEKLILLAQLKPEKDSDEAVTYSLGKFGQRALDFYSIHVTKESTHPVKPLAQIAGNRYASGPVGKALRDACMGTIASFLSKYQDIIIEHQKVVKGNQKRLESLRELAGKENLEYPSVTLPPQPHTKEGVDAYNEVIARVRMWVNLNLWQKLKLSRDDAKPLLRLKGFPSFPLVERQANEVDWWDMVCNVKKLINEKKEDGKVFWQNLAGYKRQEALRPYLSSEEDRKKGKKFARYQLGDLLLHLEKKHGEDWGKVYDEAWERIDKKVEGLSKHIKLEEERRSEDAQSKAALTDWLRAKASFVIEGLKEADKDEFCRCELKLQKWYGDLRGKPFAIEAENSILDISGFSKQYNCAFIWQKDGVKKLNLYLIINYFKGGKLRFKKIKPEAFEANRFYTVINKKSGEIVPMEVNFNFDDPNLIILPLAFGKRQGREFIWNDLLSLETGSLKLANGRVIEKTLYNRRTRQDEPALFVALTFERREVLDSSNIKPMNLIGVDRGENIPAVIALTDPEGCPLSRFKDSLGNPTHILRIGESYKEKQRTIQAKKEVEQRRAGGYSRKYASKAKNLADDMVRNTARDLLYYAVTQDAMLIFENLSRGFGRQGKRTFMAERQYTRMEDWLTAKLAYEGLPSKVYLSKTLAQYTSKTCSNCGFTITSADYDRVLEKLKKTATGWMTTINGKELKVEGQITYYNRYKRQNVVKDLSVELDRLSEESVNNDISSWTKGRSGEALSLLKKRFSHRPVQEKFVCLNCGFETHADEQAALNIARSWLFLRSQEYKKYQTNKTTGNTDKRAFVETWQSFYRKKLKEVWKPAV

SEQ ID NO: 39714 - protein, 979 aa, synthetic construct
  REGION 1..979: note = engineered CasX variant
QEIKRINGIRRRLVKDSNTKKAGKTGPMKTLLVRVMTPDLRERLENLRKKPENIPQPISNTSRANLNKLLTDYTEMKKAILHVYWEEFQKDPVGLMSRVAQPASKKIDQNKLKPEMDEKGNLTTAGFACSQCGQPLFVYKLEQVSEKGKAYTNYFGRCNVAEHEKLILLAQLKPEKDSDEAVTYSLGKFGQRALDFYSIHVTKESTHPVKPLAQIAGNRYASGPVGKALRDACMGTIASFLSKYQDIIIEHQKVVKGNQKRLESLRELAGKENLEYPSVTLPPQPHTKEGVDAYNEVIARVRMWVNLNLWQKLKLSRDDAKPLLRLKGFPSFPLVERQANEVDWWDMVCNVKKLINEKKEDGKVFWQNLAGYKRQEALRPYLSSEEDRKKGKKFARYQLGDLLLHLEKKHGEDWGKVYDEAWERIDKKVEGLSKHIKLEEERRSEDAQSKAALTDWLRAKASFVIEGLKEADKDEFCRCELKLQKWYGDLRGKPFAIEAENSILDISGFSKQYNCAFIWQKDGVKKLNLYLIINYFKGGKLRFKKIKPEAFEANRFYTVINKKSGEIVPMEVNFNFDDPNLIILPLAFGKRQGREFIWNDLLSLETGSLKLANGRVIEKTLYNRRTRQDEPALFVALTFERREVLDSSNIKPMNLIGVDRGENIPAVIALTDPEGCPLSRFKDSLGNPTHILRIGESYKEKQRTIQAKKEVEQRRAGGYSRKYASKAKNLADDMVRNTARDLLYYAVTQDAMLIFENLSRGFGRQGKRTFMAERQYTRMEDWLTAKLAYEGPLPSKTYLSKTLAQYTSKTCSNCGFTITSADYDRVLEKLKKTATGWMTTINGKELKVEGQITYYNRYKRQNVVKDLSVELDRLSEESVNNDISSWTKGRSGEALSLLKKRFSHRPVQEKFVCLNCGFETHADEQAALNIARSWLFLRSQEYKKYQTNKTTGNTDKRAFVETWQSFYRKKLKEVWKPAV

SEQ ID NO: 39715 - protein, 979 aa, synthetic construct
  REGION 1..979: note = engineered CasX variant
QEIKRINGIRRRLVKDSNTKKAGKTGPMKTLLVRVMTPDLRERLENLRKKPENIPQPISNTSRANLNKLLTDYTEMKKAILHVYWEEFQKDPVGLMSRVAQPASKKIDQNKLKPEMDEKGNLTTAGFACSQCGQPLFVYKLEQVSEKGKAYTNYFGRCNVAEHEKLILLAQLKPEKDSDEAVTYSLGKFGQRALDFYSIHVTKESTHPVKPLAQIAGNRYASGPVGKALRDACMGTIASFLSKYQDIIIEHQKVVKGNQKRLESLRELAGKENLEYPSVTLPPQPHTKEGVDAYNEVIARVRMWVNLNLWQKLKLSRDDAKPLLRLKGFPSFPLVERQANEVDWWDMVCNVKKLINEKKEDGKVFWQNLAGYKRQEALRPYLSSEEDVRKKGKKFARYQLGDLLLHLEKKHGEDWGKVYDEAWERIDKKVEGLSKHIKLEEERRSEDAQSKAALTDWLRAKASFVIEGLKEADKDEFCRCELKLQKWYGDLRGKPFAIEAENSILDISGFSKQYNCAFIWQKDGVKKLNLYLIINYFKGGKLRFKKIKPEAFEANRFYTVINKKSGEIVPMEVNFNFDDPNLIILPLAFGKRQGREFIWNDLLSLETGSLKLANGRVIEKTLYNRRTRQDEPALFVALTFERREVLDSSNIKPMNLIGVDRGENIPAVIALTDPEGCPLSRFKDSLGNPTHILRIGESYKEKQRTIQAKKEVEQRRAGGYSRKYASKAKNLADDMVRNTARDLLYYAVTQDAMLIFENLSRGFGRQGKRTFMAERQYTRMEDWLTAKLAYEGLPSKTYLSKTLAQYTSKTCSNCGFTITSADYDRVLEKLKKTATGWMTTINGKELKVEGQITYYNRYKRQNVVKDLSVELDRLSEESVNNDISSWTKGRSGEALSLLKKRFSHRPVQEKFVCLNCGFETHADEQAALNIARSWLFLRSQEYKKYQTNKTTGNTDKRAFVETWQSFYRKKLKEVWKPAV

SEQ ID NO: 39716 - protein, 978 aa, synthetic construct
  REGION 1..978: note = engineered CasX variant
QEIKRINGIRRRLVKDSNTKKAGKTGPMKTLLVRVMTPDLRERLENLRKKPENIPQPISNTSRANLNKLLTDYTEMKKAILHVYWEEFQKDPVGLMSRVAQPASKKIDQNKLKPEMDEKGNLTTAGFACSQCGQPLFVYKLEQVSEKGKAYTNYFGRCNVAEHEKLILLAQLKPEKDSDEAVTYSLGKFGQRALDFYSIHVTKESTHPVKPLAQIAGNRYASGPVGKALRDACMGTIASFLSKYQDIIIEHQKVVKGNQKRLESLRELAGKENLEYPSVTLPPQPHTKEGVDAYNEVIARVRMWVNLNLWQKLKLSRDDAKPLLRLKGFPSFPLVERQANEVDWWDMVCNVKKLINEKKEDGKVFWQNLAGYKRQEALRPYLSSEEDRKKGKKFARYQLGDLLLHLEKKHGEDWGKVYDEAWERIDKKVEGLSKHIKLEEERRSEDAQSKAALTDWLRAKASFVIEGLKEADKDEFCRCELKLQKWYGDLRGKPFAIEAENSILDISGFSKQYNCAFIWQKDGVKKLNLYLIINYFKGGKLRFKKIKPEAFEANRFYTVINKKSGEIVPMEVNFNFDDPNLIILPLAFGKRQGREFIWNDLLSLETGSLKLANGRVIEKTLYNRRTRQDEPALFVALTFERREVLDSSNIKPMNLIGVDRGENIPAVIALTDPEGCPLSRFKDSLGNPTHILRIGESYKEKQRTIQAKKEVEQRRAGGYSRKYASKAKNLADDMVRNTARDLLYYAVTQDAMLIFENLSRGFGRQGKRTFMAERQYTRMEDWLTAKLAYEGLPSKTYLSKTLAQYTSKTCSNCGFTITSADYDRMLEKLKKTATGWMTTINGKELKVEGQITYYNRYKRQNVVKDLSVELDRLSEESVNNDISSWTKGRSGEALSLLKKRFSHRPVQEKFVCLNCGFETHADEQAALNIARSWLFLRSQEYKKYQTNKTTGNTDKRAFVETWQSFYRKKLKEVWKPAV

SEQ ID NO: 39717 - protein, 978 aa, synthetic construct
  REGION 1..978: note = engineered CasX variant
QEIKRINGIRRRLVKDSNTKKAGKTGPMKTLLVRVMTPDLRERLENLRKKPENIPQPISNTSRANLNKLLTDYTEMKKAILHVYWEEFQKDPVGLMSRVAQPASKKIDQNKLKPEMDEKGNLTTAGFACSQCGQPLFVYKLEQVSEKGKAYTNYFGRCNVAEHEKLILLAQLKPEKDSDEAVTYSLGKFGQRALDFYSIHVTKESTHPVKPLAQIAGNRYASGPVGKALRDACMGTIASFLSKYQDIIIEHQKVVKGNQKRLESLRELAGKENLEYPSVTLPPQPHTKEGVDAYNEVIARVRMWVNLNLWQKLKLSRDDAKPLLRLKGFPSFPLVERQANEVDWWDMVCNVKKLINEKKEDGKVFWQNLAGYKRQEALRPYLSSEEDRKKGKKFARYQLGDLLLHLEKKHGEDWGKVYDEAWERIDKKVEGLSKHIKLEEERRSEDAQSKAALTDWLRAKASFVIEGLKEADKDEFCRCELKLQKWYGDLRGKPFAIEAENSILDISGFSKQYNCAFIWQKDGVKKLNLYLIINYFKGGKLRFKKIKPEAFEANRFYTVINKKSGEIVPMEVNFNFDDPNLIILPLAFGKRQGREFIWNDLLSLETGSLKLANGRVIEKTLYNRRTRQDEPALFVALTFERREVLDSSNIKPMNLIGVDRGENIPAVIALTDPEGCPLSRFKDSLGNPTHILRIGESYKEKQRTIQAKKEVEQRRAGGYSRKYASKAKNLADDMVRNTARDLLYYAVTQDAMLIFENLSRGFGRQGKRTFMAERQYTRMEDWLTAKLAYEGLPSKTYLSKTLAQYTSKTCSNCGFTITSADYDRVLEKLKKTATGWMTTINGKELKVEGQITYYNRYKRQNVVKDLSVELDRLSEESVNNDISSWTKGRQGEALSLLKKRFSHRPVQEKFVCLNCGFETHADEQAALNIARSWLFLRSQEYKKYQTNKTTGNTDKRAFVETWQSFYRKKLKEVWKPAV

SEQ ID NO: 39718 - protein, 978 aa, synthetic construct
  REGION 1..978: note = engineered CasX variant
QEIKRINGIRRRLVKDSNTKKAGKTGPMKTLLVRVMTPDLRERLENLRKKPENIPQPISNTSRANLNKLLTDYTEMKKAILHVYWEEFQKDPVGLMSRVAQPASKKIDQNKLKPEMDEKGNLTTAGFACSQCGQPLFVYKLEQVSEKGKAYTNYFGRCNVAEHEKLILLAQLKPEKDSDEAVTYSLGKFGQRALDFYSIHVTKESTHPVKPLAQIAGNRYASGPVGKALRDACMGTIASFLSKYQDIIIEHQKVVKGNQKRLESLRELAGKENLEYPSVTLPPQPHTKEGVDAYNEVIARVRMWVNLNLWQKLKLSRDDAKPLLRLKGFPSFPLVERQANEVDWWDMVCNVKKLINEKKEDGKVFWQNLAGYKRQEALRPYLSSEEDRKKGKKFARYQLGDLLLHLEKKHGEDWGKVYDEAWERIDKKVEGLSKHIKLEEERRSEDAQSKAALTDWLRAKASFVIEGLKEADKDEFCRCELKLQKWYGDLRGKPFAIEAENSILDISGFSKQYNCAFIWQKDGVKKLNLYLIINYFKGGKLRFKKIKPEAFEANRFYTVINKKSGEIVPMEVNFNFDDPNLIILPLAFGKRQGREFIWNDLLSLETGSLKLANGRVIEKTLYNRRTRQDEPALFVALTFERREVLDSSNIKPMNLIGVDRGENIPAVIALTDPEGCPLSRFKDSLGNPTHILRIGESYKEKQRTIQAKKEVEQRRAGGYSRKYASKAKNLADDMVRNTARDLLYYAVTQDAMLIFENLSRGFGRQGKRTFMAERQYTRMEDWLTAKLAYEGLPSKTYLSKTLAQYTSKTCSNCGFTITSADYDRVLEKLKKTATGWMTTINGKELKVEGQITYYNRYKRQNVVKDLSVELDRLSEESVNNDISSWTKGRSGEALSLLKKRFSHRPVQEKFVCLNCEFETHADEQAALNIARSWLFLRSQEYKKYQTNKTTGNTDKRAFVETWQSFYRKKLKEVWKPAV

SEQ ID NO: 39719 - protein, 979 aa, synthetic construct
  REGION 1..979: note = engineered CasX variant
QEIKRINGIRRRLVKDSNTKKAGKTGPMKTLLVRVMTPDLRERLENLRKKPENIPQPISNTSRANLNKLLTDYTEMKKAILHVYWEEFQKDPVGLMSRVAQPASKKIDQNKLKPEMDEKGNLTTAGFACSQCGQPLFVYKLEQVSEKGKAYTNYFGRCNVAEHEKLILLAQLKPEKDSDEAVTYSLGKFGQRALDFYSIHVTKESTHPVKPLAQIAGNRYASGPVGKALRDACMGTIASFLSKYQDIIIEHQKVVKGNQKRLESLRELAGKENLEYPSVTLPPQPHTKEGVDAYNEVIARVRMWVNLNLWQKLKLSRDDAKPLLRLKGFPSFPLVERQANEVDWWDMVCNVKKLINEKKEDGKVFWQNLAGYKRQEALRPYLSSEEDRKKGKKFARYQLGDLLLHLEKKHGEDWGKVYDEAWERIDKKVEGLSKHIKLEEERRSEDAQSKAALTDWLRAKASFVIEGLKEADKDEFCRCELKLQKWYGDLRGKPFAIEAENSILDISGFSKQYNCAFIWQKDGVKKLNLYLIINYFKGGKLRFKKIKPEAFEANRFYTVINKKSGEIVPMEVNFNFDDPNLIILPLAFGKRQGREFIWNDLLSLETGSLKLANGRVIEKTLYNRRTRQDEPALFVALTFERREVLDSSNIKPMNLIGVDRGENIPAVIALTDPEGCPLSRFKDSLGNPTHILRIGESYKEKQRTIQAKKEVEQRRAGGYSRKYASKAKNLADDMVRNTARDLLYYAVTQDAMLIFENLSRGFGRQGKRTFMAERQYTRMEDWLTAKLAYEGLPSKTYLSKTLAQYTSKTCSNCGFTITSADYDRVLEKLKKTATGWMTTINGKELKVEGQITYYNRYKRQNVVKDLSVELDRLSEESVNNDISSWTKGRSGEALSLLKKRFSHRPVQEKFVCLNCGFETHADEQAALNIARSWLFLRSQEYKKYQTNKTSTGNTDKRAFVETWQSFYRKKLKEVWKPAV

SEQ ID NO: 39720 - protein, 979 aa, synthetic construct
  REGION 1..979: note = engineered CasX variant
QEIKRINGIRRRLVKDSNTKKAGKTGPMKTLLVRVMTPDLRERLENLRKKPENIPQPISNTSRANLNKLLTDYTEMKKAILHVYWEEFQKDPVGLMSRVAQPASKKIDQNKLKPEMDEKGNLTTAGFACSQCGQPLFVYKLEQVSEKGKAYTNYFGRCNVAEHEKLILLAQLKPEKDSDEAVTYSLGKFGQRALDFYSIHVTKESTHPVKPLAQIAGNRYASGPVGKALRDACMGTIASFLSKYQDIIIEHQKVVKGNQKRLESLRELAGKENLEYPSVTLPPQPHTKEGVDAYNEVIARVRMWVNLNLWQKLKLSRDDAKPLLRLKGFPSFPLVERQANEVDWWDMVCNVKKLINEKKEDGKVFWQNLAGYKRQEALRPYLSSEEDRKKGKKFARYQLGDLLLHLEKKHGEDWGKVYDEAWERIDKKVEGLSKHIKLEEERRSEDAQSKAALTDWLRAKASFVIEGLKEADKDEFCRCELKLQKWYGDLRGKPFAIEAENSILDISGFSKQYNCAFIWQKDGVKKLNLYLIINYFKGGKLRFKKIKPEAFEANRFYTVINKKSGEIVPMEVNFNFDDPNLIILPLAFGKRQGREFIWNDLLSLETGSLKLANGRVIEKTLYNRRTRQDEPALFVALTFERREVLDSSNIKPMNLIGVDRGENIPAVIALTDPEGCPLSRFKDSLGNPTHILRIGESYKEKQRTIQAKKEVEQRRAGGYSRKYASKAKNLADDMVRNTARDLLYYAVTQDAMLIFENLSRGFGRQGKRTFMAERQYTRMEDWLTAKLAYEGLPSKTYLSKTLAQYTSKTCSNCGFTITSADYDRVLEKLKKTATGWMTTINGKELKVEGQITYYNRYKRQNVVKDLSVELDRLSEESVNNDISSWTKGRSGEALSLLKKRFSHRPVQEKFVCLNCGFETHADEQAALNIARSWLFLRSQEYKKYQTNKTTGKNTDKRAFVETWQSFYRKKLKEVWKPAV

SEQ ID NO: 39721 - protein, 978 aa, synthetic construct
  REGION 1..978: note = engineered CasX variant
QEIKRINGIRRRLVKDSNTKKAGKTGPMKTLLVRVMTPDLRERLENLRKKPENIPQPISNTSRANLNKLLTDYTEMKKAILHVYWEEFQKDPVGLMSRVAQPASKKIDQNKLKPEMDEKGNLTTAGFACSQCGQPLFVYKLEQVSEKGKAYTNYFGRCNVAEHEKLILLAQLKPEKDSDEAVTYSLGKFGQRALDFYSIHVTKESTHPVKPLAQIAGNRYASGPVGKALRDACMGTIASFLSKYQDIIIEHQKVVKGNQKRLESLRELAGKENLEYPSVTLPPQPHTKEGVDAYNEVIARVRMWVNLNLWQKLKLSRDDAKPLLRLKKFPSFPLVERQANEVDWWDMVCNVKKLINEKKEDGKVFWQNLAGYKRQEALRPYLSSEEDRKKGKKFARYQLGDLLLHLEKKHGEDWGKVYDEAWERIDKKVEGLSKHIKLEEERRSEDAQSKAALTDWLRAKASFVIEGLKEADKDEFCRCELKLQKWYGDLRGKPFAIEAENSILDISGFSKQYNCAFIWQKDGVKKLNLYLIINYFKGGKLRFKKIKPEAFEANRFYTVINKKSGEIVPMEVNFNFDDPNLIILPLAFGKRQGREFIWNDLLSLETGSLKLANGRVIEKTLYNRRTRQDEPALFVALTFERREVLDSSNIKPMNLIGVDRGENIPAVIALTDPEGCPLSRFKDSLGNPTHILRIGESYKEKQRTIQAKKEVEQRRAGGYSRKYASKAKNLADDMVRNTARDLLYYAVTQDAMLIFENLSRGFGRQGKRTFMAERQYTRMEDWLTAKLAYEGLPSKTYLSKTLAQYTSKTCSNCGFTITSADYDRVLEKLKKTATGWMTTINGKELKVEGQITYYNRYKRQNVVKDLSVELDRLSEESVNNDISSWTKGRSGEALSLLKKRFSHRPVQEKFVCLNCGFETHADEQAALNIARSWLFLRSQEYKKYQTNKTTGNTDKRAFVETWQSFYRKKLKEVWKPAV

SEQ ID NO: 39722 - protein, 978 aa, synthetic construct
  REGION 1..978: note = engineered CasX variant
QEIKRINGIRRRLVKDSNTKKAGKTGPMKTLLVRVMTPDLRERLENLRKKPENIPQPISNTSRANLNKLLTDYTEMKKAILHVYWEEFQKDPVGLMSRVAQPASKKIDQNKLKPEMDEKGNLTTAGFACSQCGQPLFVYKLEQVSEKGKAYTNYFGRCNVAEHEKLILLAQLKPEKDSDEAVTYSLGKFGQRALDFYSIHVTKESTHPVKPLAQIAGNRYASGPVGKALRDACMGTIASFLSKYQDIIIEHQKVVKGNQKRLESLRELAGKENLEYPSVTLPPQPHTKEGVDAYNEVIARVRMWVNLNLWQKLKLSRDDAKPLLRLKGFPSFPLVERQANEVDWWDMVCNVKKLINEKKEDGKVFWQNLAGYKRQEALRPYLSSEEDRKKGKKFARYQLGDLLLHLEKKHGEDWGKVYDEAWERIDKKVEGLSKHIKLEEERRSEDAQSKAALTDWLRAKASFVIEGLKEADKDEFCRCELKLQKWYGDLRGKPFAIEAENSILDISGFSKQYNCAFIWQKDGVKKLNLYLIINYFKGGKLRFKKIKPEAFEANRFYTVINKKSGEIVPMEVNFNFDDPNLIILPLAFGKRQGREFIWNDLLSLETGSLKLANGRVIEKTLYNRRTRQDEPALFVALTFERREVLDSSNIKPMNLIGVDRGENIPAVIALTDPEGCPLSRFKDSLGNPTHILRIGERYKEKQRTIQAKKEVEQRRAGGYSRKYASKAKNLADDMVRNTARDLLYYAVTQDAMLIFENLSRGFGRQGKRTFMAERQYTRMEDWLTAKLAYEGLPSKTYLSKTLAQYTSKTCSNCGFTITSADYDRVLEKLKKTATGWMTTINGKELKVEGQITYYNRYKRQNVVKDLSVELDRLSEESVNNDISSWTKGRSGEALSLLKKRFSHRPVQEKFVCLNCGFETHADEQAALNIARSWLFLRSQEYKKYQTNKTTGNTDKRAFVETWQSFYRKKLKEVWKPAV

SEQ ID NO: 39723 - protein, 978 aa, synthetic construct
  REGION 1..978: note = engineered CasX variant
QEIKRINGIRRRLVKDSNTKKAGKTGPMKTLLVRVMTPDLRERLENLRKKPENIPQPISNTSRANLNKLLTDYTEMKKAILHVYWEEFQKDPVGLMSRVAQPASKKIDQNKLKPEMDEKGNLTTAGFACSQCGQPLFVYKLEQVSEKGKAYTNYFGRCNVAEHEKLILLAQLKPEKDSDEAVTYSLGKFGQRALDFYSIHVTKESTHPVKPLAQIAGNRYASGPVGKALRDACMGTIASFLSKYQDIIIEHQKVVKGNQKRLESLRELAGKENLEYPSVTLPPQPHTKEGVDAYNEVIARVRMWVNLNLWQKLKLSRDDAKPLLRLKGFPSFPLVERQANEVDWWDMVCNVKKLINEKKEDGKVFWQNLAGYKRQEALRPYLSSEEDRKKGKKFARYQLGDLLLHLEKKHGEDWGKVYDEAWERIDKKVEGLSKHIKLEEERRSEDAQSKAALTDWLRAKASFVIEGLKEADKDEFCRCELKLQKWYGDLRGKPFAIEAENSILDISGFSKQYNCAFIWQKDGVKKLNLYLIINYFKGGKLRFKKIKPEAFEANRFYTVINKKSGEIVPMEVNFNFDDPNLIILPLAFGKRQGREFIWNDLLSLETGSLQLANGRVIEKTLYNRRTRQDEPALFVALTFERREVLDSSNIKPMNLIGVDRGENIPAVIALTDPEGCPLSRFKDSLGNPTHILRIGESYKEKQRTIQAKKEVEQRRAGGYSRKYASKAKNLADDMVRNTARDLLYYAVTQDAMLIFENLSRGFGRQGKRTFMAERQYTRMEDWLTAKLAYEGLPSKTYLSKTLAQYTSKTCSNCGFTITSADYDRVLEKLKKTATGWMTTINGKELKVEGQITYYNRYKRQNVVKDLSVELDRLSEESVNNDISSWTKGRSGEALSLLKKRFSHRPVQEKFVCLNCGFETHADEQAALNIARSWLFLRSQEYKKYQTNKTTGNTDKRAFVETWQSFYRKKLKEVWKPAV

SEQ ID NO: 39724 - protein, 978 aa, synthetic construct
  REGION 1..978: note = engineered CasX variant
QEIKRINKIRRRLVKDSNTKKAGKTGPMKTLLVPVMTPDLRERLENLRKKPPNIPQPISNTSRANLNKLLTDYTEMKKAILHVYWEEFQKDPVGLMSRVAQPASKKIDQNKLKPEMDEKGNLTTAGFACSQCGQPLFVYKLEQVSEKGKAYTNYFGRCNVAEHEKLILLAQLKPEKDSDEAVTYSLGKFGQRALDFYSIHVTKESTHPVKPLAQIAGNRYASGPVGKALRDACMGTIASFLSKYQDIIIEHQKVVKGNQKRLESLRELAGKENLEYPSVTLPPQPHTKEGVDAYNEVIARVRMWVNLNLWQKLKLSRDDAKPLLRLKGFPSFPLVERQANEVDWWDMVCNVKKLINEKKEDGKVFWQNLAGYKRQEALRPYLSSEEDRKKGKKFARYQLGDLLLHLEKKHGEDWGKVYDEAWERIDKKVEGLSKHIKLEEERRSEDAQSKAALTDWLRAKASFVIEGLKEADKDEFCRCELKLQKWYGDLRGKPFAIEAENSILDISGFSKQYNCAFIWQKDGVKKLNLYLIINYFKGGKLRFKKIKPEAFEANRFYTVINKKSGEIVPMEVNFNFDDPNLIILPLAFGKRQGREFIWNDLLSLETGSLKLANGRVIEKTLYNRRTRQDEPALFVALTFERREVLDSSNIKPMNLIGVDRGENIPAVIALTDPEGCPLSRFKDSLGNPTHILRIGESYKEKQRTIQAKKEVEQRRAGGYSRKYASKAKNLADDMVRNTARDLLYYAVTQDAMLIFENLSRGFGRQGKRTFMAERQYTRMEDWLTAKLAYEGLPSKTYLSKTLAQYTSKTCSNCGFTITSADYDRVLEKLKKTATGWMTTINGKELKVEGQITYYNRYKRQNVVKDLSVELDRLSEESVNNDISSWTKGRSGEALSLLKKRFSHRPVQEKFVCLNCGFETHADEQAALNIARSWLFLRSQEYKKYQTNKTTGNTDKRAFVETWQSFYRKKLKEVWKPAV

SEQ ID NO: 39725 - protein, 978 aa, synthetic construct
  REGION 1..978: note = engineered CasX variant
QEIKRINKIRRRLVKDSNTKKAGKTGPMKTLLVPVMTPDLRERLENLRKKPENIPQPISNTSQANLNKLLTDYTEMKKAILHVYWEEFQKDPVGLMSRVAQPASKKIDQNKLKPEMDEKGNLTTAGFACSQCGQPLFVYKLEQVSEKGKAYTNYFGRCNVAEHEKLILLAQLKPEKDSDEAVTYSLGKFGQRALDFYSIHVTKESTHPVKPLAQIAGNRYASGPVGKALRDACMGTIASFLSKYQDIIIEHQKVVKGNQKRLESLRELAGKENLEYPSVTLPPQPHTKEGVDAYNEVIARVRMWVNLNLWQKLKLSRDDAKPLLRLKGFPSFPLVERQANEVDWWDMVCNVKKLINEKKEDGKVFWQNLAGYKRQEALRPYLSSEEDRKKGKKFARYQLGDLLLHLEKKHGEDWGKVYDEAWERIDKKVEGLSKHIKLEEERRSEDAQSKAALTDWLRAKASFVIEGLKEADKDEFCRCELKLQKWYGDLRGKPFAIEAENSILDISGFSKQYNCAFIWQKDGVKKLNLYLIINYFKGGKLRFKKIKPEAFEANRFYTVINKKSGEIVPMEVNFNFDDPNLIILPLAFGKRQGREFIWNDLLSLETGSLKLANGRVIEKTLYNRRTRQDEPALFVALTFERREVLDSSNIKPMNLIGVDRGENIPAVIALTDPEGCPLSRFKDSLGNPTHILRIGESYKEKQRTIQAKKEVEQRRAGGYSRKYASKAKNLADDMVRNTARDLLYYAVTQDAMLIFENLSRGFGRQGKRTFMAERQYTRMEDWLTAKLAYEGLPSKTYLSKTLAQYTSKTCSNCGFTITSADYDRVLEKLKKTATGWMTTINGKELKVEGQITYYNRYKRQNVVKDLSVELDRLSEESVNNDISSWTKGRSGEALSLLKKRFSHRPVQEKFVCLNCGFETHADEQAALNIARSWLFLRSQEYKKYQTNKTTGNTDKRAFVETWQSFYRKKLKEVWKPAV

SEQ ID NO: 39726 - protein, 978 aa, synthetic construct
  REGION 1..978: note = engineered CasX variant
QEIKRINKIRRRLVKDSNTKKAGKTGPMKTLLVPVMTPDLRERLENLRKKPENIPQPISNTSRANLNKLLTDYTEMKKAILHVYDEEFQKDPVGLMSRVAQPASKKIDQNKLKPEMDEKGNLTTAGFACSQCGQPLFVYKLEQVSEKGKAYTNYFGRCNVAEHEKLILLAQLKPEKDSDEAVTYSLGKFGQRALDFYSIHVTKESTHPVKPLAQIAGNRYASGPVGKALRDACMGTIASFLSKYQDIIIEHQKVVKGNQKRLESLRELAGKENLEYPSVTLPPQPHTKEGVDAYNEVIARVRMWVNLNLWQKLKLSRDDAKPLLRLKGFPSFPLVERQANEVDWWDMVCNVKKLINEKKEDGKVFWQNLAGYKRQEALRPYLSSEEDRKKGKKFARYQLGDLLLHLEKKHGEDWGKVYDEAWERIDKKVEGLSKHIKLEEERRSEDAQSKAALTDWLRAKASFVIEGLKEADKDEFCRCELKLQKWYGDLRGKPFAIEAENSILDISGFSKQYNCAFIWQKDGVKKLNLYLIINYFKGGKLRFKKIKPEAFEANRFYTVINKKSGEIVPMEVNFNFDDPNLIILPLAFGKRQGREFIWNDLLSLETGSLKLANGRVIEKTLYNRRTRQDEPALFVALTFERREVLDSSNIKPMNLIGVDRGENIPAVIALTDPEGCPLSRFKDSLGNPTHILRIGESYKEKQRTIQAKKEVEQRRAGGYSRKYASKAKNLADDMVRNTARDLLYYAVTQDAMLIFENLSRGFGRQGKRTFMAERQYTRMEDWLTAKLAYEGLPSKTYLSKTLAQYTSKTCSNCGFTITSADYDRVLEKLKKTATGWMTTINGKELKVEGQITYYNRYKRQNVVKDLSVELDRLSEESVNNDISSWTKGRSGEALSLLKKRFSHRPVQEKFVCLNCGFETHADEQAALNIARSWLFLRSQEYKKYQTNKTTGNTDKRAFVETWQSFYRKKLKEVWKPAV

SEQ ID NO: 39727 - protein, 978 aa, synthetic construct
  REGION 1..978: note = engineered CasX variant
QEIKRINKIRRRLVKDSNTKKAGKTGPMKTLLVPVMTPDLRERLENLRKKPENIPQPISNTSRANLNKLLTDYTEMKKAILHVYWEEFQKDPVGLMSRVAQPASKKIDQNKLKPEMDEKGNLTTAGFACSQCGQPLFVYKLEQVSEKGKAYTNYFGRCNVAEHEKLIKLAQLKPEKDSDEAVTYSLGKFGQRALDFYSIHVTKESTHPVKPLAQIAGNRYASGPVGKALRDACMGTIASFLSKYQDIIIEHQKVVKGNQKRLESLRELAGKENLEYPSVTLPPQPHTKEGVDAYNEVIARVRMWVNLNLWQKLKLSRDDAKPLLRLKGFPSFPLVERQANEVDWWDMVCNVKKLINEKKEDGKVFWQNLAGYKRQEALRPYLSSEEDRKKGKKFARYQLGDLLLHLEKKHGEDWGKVYDEAWERIDKKVEGLSKHIKLEEERRSEDAQSKAALTDWLRAKASFVIEGLKEADKDEFCRCELKLQKWYGDLRGKPFAIEAENSILDISGFSKQYNCAFIWQKDGVKKLNLYLIINYFKGGKLRFKKIKPEAFEANRFYTVINKKSGEIVPMEVNFNFDDPNLIILPLAFGKRQGREFIWNDLLSLETGSLKLANGRVIEKTLYNRRTRQDEPALFVALTFERREVLDSSNIKPMNLIGVDRGENIPAVIALTDPEGCPLSRFKDSLGNPTHILRIGESYKEKQRTIQAKKEVEQRRAGGYSRKYASKAKNLADDMVRNTARDLLYYAVTQDAMLIFENLSRGFGRQGKRTFMAERQYTRMEDWLTAKLAYEGLPSKTYLSKTLAQYTSKTCSNCGFTITSADYDRVLEKLKKTATGWMTTINGKELKVEGQITYYNRYKRQNVVKDLSVELDRLSEESVNNDISSWTKGRSGEALSLLKKRFSHRPVQEKFVCLNCGFETHADEQAALNIARSWLFLRSQEYKKYQTNKTTGNTDKRAFVETWQSFYRKKLKEVWKPAV

SEQ ID NO: 39728 - protein, 978 aa, synthetic construct
  REGION 1..978: note = engineered CasX variant
QEIKRINKIRRRLVKDSNTKKAGKTGPMKTLLVPVMTPDLRERLENLRKKPENIPQPISNTSRANLNKLLTDYTEMKKAILHVYWEEFQKDPVGLMSRVAQPASKKIDQNKLKPEMDEKGNLTTAGFACSQCGQPLFVYKLEQVSEKGKAYTNYFGRCNVAEHEKLILLYQLKPEKDSDEAVTYSLGKFGQRALDFYSIHVTKESTHPVKPLAQIAGNRYASGPVGKALRDACMGTIASFLSKYQDIIIEHQKVVKGNQKRLESLRELAGKENLEYPSVTLPPQPHTKEGVDAYNEVIARVRMWVNLNLWQKLKLSRDDAKPLLRLKGFPSFPLVERQANEVDWWDMVCNVKKLINEKKEDGKVFWQNLAGYKRQEALRPYLSSEEDRKKGKKFARYQLGDLLLHLEKKHGEDWGKVYDEAWERIDKKVEGLSKHIKLEEERRSEDAQSKAALTDWLRAKASFVIEGLKEADKDEFCRCELKLQKWYGDLRGKPFAIEAENSILDISGFSKQYNCAFIWQKDGVKKLNLYLIINYFKGGKLRFKKIKPEAFEANRFYTVINKKSGEIVPMEVNFNFDDPNLIILPLAFGKRQGREFIWNDLLSLETGSLKLANGRVIEKTLYNRRTRQDEPALFVALTFERREVLDSSNIKPMNLIGVDRGENIPAVIALTDPEGCPLSRFKDSLGNPTHILRIGESYKEKQRTIQAKKEVEQRRAGGYSRKYASKAKNLADDMVRNTARDLLYYAVTQDAMLIFENLSRGFGRQGKRTFMAERQYTRMEDWLTAKLAYEGLPSKTYLSKTLAQYTSKTCSNCGFTITSADYDRVLEKLKKTATGWMTTINGKELKVEGQITYYNRYKRQNVVKDLSVELDRLSEESVNNDISSWTKGRSGEALSLLKKRFSHRPVQEKFVCLNCGFETHADEQAALNIARSWLFLRSQEYKKYQTNKTTGNTDKRAFVETWQSFYRKKLKEVWKPAV

SEQ ID NO: 39729 - protein, 978 aa, synthetic construct
  REGION 1..978: note = engineered CasX variant
QEIKRINKIRRRLVKDSNTKKAGKTGPMKTLLVPVMTPDLRERLENLRKKPENIPQPISNTSRANLNKLLTDYTEMKKAILHVYWEEFQKDPVGLMSRVAQPASKKIDQNKLKPEMDEKGNLTTAGFACSQCGQPLFVYKLEQVSEKGKAYTNYFGRCNVAEHEKLILLSQLKPEKDSDEAVTYSLGKFGQRALDFYSIHVTKESTHPVKPLAQIAGNRYASGPVGKALRDACMGTIASFLSKYQDIIIEHQKVVKGNQKRLESLRELAGKENLEYPSVTLPPQPHTKEGVDAYNEVIARVRMWVNLNLWQKLKLSRDDAKPLLRLKGFPSFPLVERQANEVDWWDMVCNVKKLINEKKEDGKVFWQNLAGYKRQEALRPYLSSEEDRKKGKKFARYQLGDLLLHLEKKHGEDWGKVYDEAWERIDKKVEGLSKHIKLEEERRSEDAQSKAALTDWLRAKASFVIEGLKEADKDEFCRCELKLQKWYGDLRGKPFAIEAENSILDISGFSKQYNCAFIWQKDGVKKLNLYLIINYFKGGKLRFKKIKPEAFEANRFYTVINKKSGEIVPMEVNFNFDDPNLIILPLAFGKRQGREFIWNDLLSLETGSLKLANGRVIEKTLYNRRTRQDEPALFVALTFERREVLDSSNIKPMNLIGVDRGENIPAVIALTDPEGCPLSRFKDSLGNPTHILRIGESYKEKQRTIQAKKEVEQRRAGGYSRKYASKAKNLADDMVRNTARDLLYYAVTQDAMLIFENLSRGFGRQGKRTFMAERQYTRMEDWLTAKLAYEGLPSKTYLSKTLAQYTSKTCSNCGFTITSADYDRVLEKLKKTATGWMTTINGKELKVEGQITYYNRYKRQNVVKDLSVELDRLSEESVNNDISSWTKGRSGEALSLLKKRFSHRPVQEKFVCLNCGFETHADEQAALNIARSWLFLRSQEYKKYQTNKTTGNTDKRAFVETWQSFYRKKLKEVWKPAV

SEQ ID NO: 39730 - protein, 977 aa, synthetic construct
  REGION 1..977: note = engineered CasX variant
QEIKRINKIRRRLVKDSNTKKAGKTGPMKTLLVPVMTPDLRERLENLRKKPENIPQPISNTSRANLNKLLTDYTEMKKAILHVYWEEFQKDPVGLMSRVAQPASKKIDQNKLKPEMDEKGNLTTAGFACSQCGQPLFVYKLEQVSEKGKAYTNYFGRCNVAEHEKLILLAQLKPEKDSDEAVTYSLGKFGQRALDFYSIHVTKESTHPVKPLAQIAGNRYASPVGKALRDACMGTIASFLSKYQDIIIEHQKVVKGNQKRLESLRELAGKENLEYPSVTLPPQPHTKEGVDAYNEVIARVRMWVNLNLWQKLKLSRDDAKPLLRLKGFPSFPLVERQANEVDWWDMVCNVKKLINEKKEDGKVFWQNLAGYKRQEALRPYLSSEEDRKKGKKFARYQLGDLLLHLEKKHGEDWGKVYDEAWERIDKKVEGLSKHIKLEEERRSEDAQSKAALTDWLRAKASFVIEGLKEADKDEFCRCELKLQKWYGDLRGKPFAIEAENSILDISGFSKQYNCAFIWQKDGVKKLNLYLIINYFKGGKLRFKKIKPEAFEANRFYTVINKKSGEIVPMEVNFNFDDPNLIILPLAFGKRQGREFIWNDLLSLETGSLKLANGRVIEKTLYNRRTRQDEPALFVALTFERREVLDSSNIKPMNLIGVDRGENIPAVIALTDPEGCPLSRFKDSLGNPTHILRIGESYKEKQRTIQAKKEVEQRRAGGYSRKYASKAKNLADDMVRNTARDLLYYAVTQDAMLIFENLSRGFGRQGKRTFMAERQYTRMEDWLTAKLAYEGLPSKTYLSKTLAQYTSKTCSNCGFTITSADYDRVLEKLKKTATGWMTTINGKELKVEGQITYYNRYKRQNVVKDLSVELDRLSEESVNNDISSWTKGRSGEALSLLKKRFSHRPVQEKFVCLNCGFETHADEQAALNIARSWLFLRSQEYKKYQTNKTTGNTDKRAFVETWQSFYRKKLKEVWKPAV

SEQ ID NO: 39731 - protein, 978 aa, synthetic construct
  REGION 1..978: note = engineered CasX variant
QEIKRINKIRRRLVKDSNTKKAGKTGPMKTLLVPVMTPDLRERLENLRKKPENIPQPISNTSRANLNKLLTDYTEMKKAILHVYWEEFQKDPVGLMSRVAQPASKKIDQNKLKPEMDEKGNLTTAGFACSQCGQPLFVYKLEQVSEKGKAYTNYFGRCNVAEHEKLILLAQLKPEKDSDEAVTYSLGKFGQRALDFYSIHVTKESTHPVKPLAQIAGNRYASGPVGKALRDACMGTIASFLSKYQDIIIEHQKVVKGNQKRLESLRELAGKENLEYPSVTLPPQPHTSEGVDAYNEVIARVRMWVNLNLWQKLKLSRDDAKPLLRLKGFPSFPLVERQANEVDWWDMVCNVKKLINEKKEDGKVFWQNLAGYKRQEALRPYLSSEEDRKKGKKFARYQLGDLLLHLEKKHGEDWGKVYDEAWERIDKKVEGLSKHIKLEEERRSEDAQSKAALTDWLRAKASFVIEGLKEADKDEFCRCELKLQKWYGDLRGKPFAIEAENSILDISGFSKQYNCAFIWQKDGVKKLNLYLIINYFKGGKLRFKKIKPEAFEANRFYTVINKKSGEIVPMEVNFNFDDPNLIILPLAFGKRQGREFIWNDLLSLETGSLKLANGRVIEKTLYNRRTRQDEPALFVALTFERREVLDSSNIKPMNLIGVDRGENIPAVIALTDPEGCPLSRFKDSLGNPTHILRIGESYKEKQRTIQAKKEVEQRRAGGYSRKYASKAKNLADDMVRNTARDLLYYAVTQDAMLIFENLSRGFGRQGKRTFMAERQYTRMEDWLTAKLAYEGLPSKTYLSKTLAQYTSKTCSNCGFTITSADYDRVLEKLKKTATGWMTTINGKELKVEGQITYYNRYKRQNVVKDLSVELDRLSEESVNNDISSWTKGRSGEALSLLKKRFSHRPVQEKFVCLNCGFETHADEQAALNIARSWLFLRSQEYKKYQTNKTTGNTDKRAFVETWQSFYRKKLKEVWKPAV

SEQ ID NO: 39732 - protein, 978 aa, synthetic construct
  REGION 1..978: note = engineered CasX variant
QEIKRINKIRRRLVKDSNTKKAGKTGPMKTLLVPVMTPDLRERLENLRKKPENIPQPISNTSRANLNKLLTDYTEMKKAILHVYWEEFQKDPVGLMSRVAQPASKKIDQNKLKPEMDEKGNLTTAGFACSQCGQPLFVYKLEQVSEKGKAYTNYFGRCNVAEHEKLILLAQLKPEKDSDEAVTYSLGKFGQRALDFYSIHVTKESTHPVKPLAQIAGNRYASGPVGKALRDACMGTIASFLSKYQDIIIEHQKVVKGNQKRLESLRELAGKENLEYPSVTLPPQPHTKEGLDAYNEVIARVRMWVNLNLWQKLKLSRDDAKPLLRLKGFPSFPLVERQANEVDWWDMVCNVKKLINEKKEDGKVFWQNLAGYKRQEALRPYLSSEEDRKKGKKFARYQLGDLLLHLEKKHGEDWGKVYDEAWERIDKKVEGLSKHIKLEEERRSEDAQSKAALTDWLRAKASFVIEGLKEADKDEFCRCELKLQKWYGDLRGKPFAIEAENSILDISGFSKQYNCAFIWQKDGVKKLNLYLIINYFKGGKLRFKKIKPEAFEANRFYTVINKKSGEIVPMEVNFNFDDPNLIILPLAFGKRQGREFIWNDLLSLETGSLKLANGRVIEKTLYNRRTRQDEPALFVALTFERREVLDSSNIKPMNLIGVDRGENIPAVIALTDPEGCPLSRFKDSLGNPTHILRIGESYKEKQRTIQAKKEVEQRRAGGYSRKYASKAKNLADDMVRNTARDLLYYAVTQDAMLIFENLSRGFGRQGKRTFMAERQYTRMEDWLTAKLAYEGLPSKTYLSKTLAQYTSKTCSNCGFTITSADYDRVLEKLKKTATGWMTTINGKELKVEGQITYYNRYKRQNVVKDLSVELDRLSEESVNNDISSWTKGRSGEALSLLKKRFSHRPVQEKFVCLNCGFETHADEQAALNIARSWLFLRSQEYKKYQTNKTTGNTDKRAFVETWQSFYRKKLKEVWKPAV

SEQ ID NO: 39733 - protein, 978 aa, synthetic construct
  REGION 1..978: note = engineered CasX variant
QEIKRINKIRRRLVKDSNTKKAGKTGPMKTLLVPVMTPDLRERLENLRKKPENIPQPISNTSRANLNKLLTDYTEMKKAILHVYWEEFQKDPVGLMSRVAQPASKKIDQNKLKPEMDEKGNLTTAGFACSQCGQPLFVYKLEQVSEKGKAYTNYFGRCNVAEHEKLILLAQLKPEKDSDEAVTYSLGKFGQRALDFYSIHVTKESTHPVKPLAQIAGNRYASGPVGKALRDACMGTIASFLSKYQDIIIEHQKVVKGNQKRLESLRELAGKENLEYPSVTLPPQPHTKEGVDAYNEVIARVRTWVNLNLWQKLKLSRDDAKPLLRLKGFPSFPLVERQANEVDWWDMVCNVKKLINEKKEDGKVFWQNLAGYKRQEALRPYLSSEEDRKKGKKFARYQLGDLLLHLEKKHGEDWGKVYDEAWERIDKKVEGLSKHIKLEEERRSEDAQSKAALTDWLRAKASFVIEGLKEADKDEFCRCELKLQKWYGDLRGKPFAIEAENSILDISGFSKQYNCAFIWQKDGVKKLNLYLIINYFKGGKLRFKKIKPEAFEANRFYTVINKKSGEIVPMEVNFNFDDPNLIILPLAFGKRQGREFIWNDLLSLETGSLKLANGRVIEKTLYNRRTRQDEPALFVALTFERREVLDSSNIKPMNLIGVDRGENIPAVIALTDPEGCPLSRFKDSLGNPTHILRIGESYKEKQRTIQAKKEVEQRRAGGYSRKYASKAKNLADDMVRNTARDLLYYAVTQDAMLIFENLSRGFGRQGKRTFMAERQYTRMEDWLTAKLAYEGLPSKTYLSKTLAQYTSKTCSNCGFTITSADYDRVLEKLKKTATGWMTTINGKELKVEGQITYYNRYKRQNVVKDLSVELDRLSEESVNNDISSWTKGRSGEALSLLKKRFSHRPVQEKFVCLNCGFETHADEQAALNIARSWLFLRSQEYKKYQTNKTTGNTDKRAFVETWQSFYRKKLKEVWKPAV

SEQ ID NO: 39734 - protein, 978 aa, synthetic construct
  REGION 1..978: note = engineered CasX variant
QEIKRINKIRRRLVKDSNTKKAGKTGPMKTLLVPVMTPDLRERLENLRKKPENIPQPISNTSRANLNKLLTDYTEMKKAILHVYWEEFQKDPVGLMSRVAQPASKKIDQNKLKPEMDEKGNLTTAGFACSQCGQPLFVYKLEQVSEKGKAYTNYFGRCNVAEHEKLILLAQLKPEKDSDEAVTYSLGKFGQRALDFYSIHVTKESTHPVKPLAQIAGNRYASGPVGKALRDACMGTIASFLSKYQDIIIEHQKVVKGNQKRLESLRELAGKENLEYPSVTLPPQPHTKEGVDAYNEVIARVRWWVNLNLWQKLKLSRDDAKPLLRLKGFPSFPLVERQANEVDWWDMVCNVKKLINEKKEDGKVFWQNLAGYKRQEALRPYLSSEEDRKKGKKFARYQLGDLLLHLEKKHGEDWGKVYDEAWERIDKKVEGLSKHIKLEEERRSEDAQSKAALTDWLRAKASFVIEGLKEADKDEFCRCELKLQKWYGDLRGKPFAIEAENSILDISGFSKQYNCAFIWQKDGVKKLNLYLIINYFKGGKLRFKKIKPEAFEANRFYTVINKKSGEIVPMEVNFNFDDPNLIILPLAFGKRQGREFIWNDLLSLETGSLKLANGRVIEKTLYNRRTRQDEPALFVALTFERREVLDSSNIKPMNLIGVDRGENIPAVIALTDPEGCPLSRFKDSLGNPTHILRIGESYKEKQRTIQAKKEVEQRRAGGYSRKYASKAKNLADDMVRNTARDLLYYAVTQDAMLIFENLSRGFGRQGKRTFMAERQYTRMEDWLTAKLAYEGLPSKTYLSKTLAQYTSKTCSNCGFTITSADYDRVLEKLKKTATGWMTTINGKELKVEGQITYYNRYKRQNVVKDLSVELDRLSEESVNNDISSWTKGRSGEALSLLKKRFSHRPVQEKFVCLNCGFETHADEQAALNIARSWLFLRSQEYKKYQTNKTTGNTDKRAFVETWQSFYRKKLKEVWKPAV

SEQ ID NO: 39735 - protein, 979 aa, synthetic construct
  REGION 1..979: note = engineered CasX variant
QEIKRINKIRRRLVKDSNTKKAGKTGPMKTLLVPVMTPDLRERLENLRKKPENIPQPISNTSRANLNKLLTDYTEMKKAILHVYWEEFQKDPVGLMSRVAQPASKKIDQNKLKPEMDEKGNLTTAGFACSQCGQPLFVYKLEQVSEKGKAYTNYFGRCNVAEHEKLILLAQLKPEKDSDEAVTYSLGKFGQRALDFYSIHVTKESTHPVKPLAQIAGNRYASGPVGKALRDACMGTIASFLSKYQDIIIEHQKVVKGNQKRLESLRELAGKENLEYPSVTLPPQPHTKEGVDAYNEVIARVRMWVNLNLWQKLKLSRDDAKPLLRLKGFPSFPLVERQQANEVDWWDMVCNVKKLINEKKEDGKVFWQNLAGYKRQEALRPYLSSEEDRKKGKKFARYQLGDLLLHLEKKHGEDWGKVYDEAWERIDKKVEGLSKHIKLEEERRSEDAQSKAALTDWLRAKASFVIEGLKEADKDEFCRCELKLQKWYGDLRGKPFAIEAENSILDISGFSKQYNCAFIWQKDGVKKLNLYLIINYFKGGKLRFKKIKPEAFEANRFYTVINKKSGEIVPMEVNFNFDDPNLIILPLAFGKRQGREFIWNDLLSLETGSLKLANGRVIEKTLYNRRTRQDEPALFVALTFERREVLDSSNIKPMNLIGVDRGENIPAVIALTDPEGCPLSRFKDSLGNPTHILRIGESYKEKQRTIQAKKEVEQRRAGGYSRKYASKAKNLADDMVRNTARDLLYYAVTQDAMLIFENLSRGFGRQGKRTFMAERQYTRMEDWLTAKLAYEGLPSKTYLSKTLAQYTSKTCSNCGFTITSADYDRVLEKLKKTATGWMTTINGKELKVEGQITYYNRYKRQNVVKDLSVELDRLSEESVNNDISSWTKGRSGEALSLLKKRFSHRPVQEKFVCLNCGFETHADEQAALNIARSWLFLRSQEYKKYQTNKTTGNTDKRAFVETWQSFYRKKLKEVWKPAV

SEQ ID NO: 39736 - protein, 979 aa, synthetic construct
  REGION 1..979: note = engineered CasX variant
QEIKRINKIRRRLVKDSNTKKAGKTGPMKTLLVPVMTPDLRERLENLRKKPENIPQPISNTSRANLNKLLTDYTEMKKAILHVYWEEFQKDPVGLMSRVAQPASKKIDQNKLKPEMDEKGNLTTAGFACSQCGQPLFVYKLEQVSEKGKAYTNYFGRCNVAEHEKLILLAQLKPEKDSDEAVTYSLGKFGQRALDFYSIHVTKESTHPVKPLAQIAGNRYASGPVGKALRDACMGTIASFLSKYQDIIIEHQKVVKGNQKRLESLRELAGKENLEYPSVTLPPQPHTKEGVDAYNEVIARVRMWVNLNLWQKLKLSRDDAKPLLRLKGFPSFPLVERQANAEVDWWDMVCNVKKLINEKKEDGKVFWQNLAGYKRQEALRPYLSSEEDRKKGKKFARYQLGDLLLHLEKKHGEDWGKVYDEAWERIDKKVEGLSKHIKLEEERRSEDAQSKAALTDWLRAKASFVIEGLKEADKDEFCRCELKLQKWYGDLRGKPFAIEAENSILDISGFSKQYNCAFIWQKDGVKKLNLYLIINYFKGGKLRFKKIKPEAFEANRFYTVINKKSGEIVPMEVNFNFDDPNLIILPLAFGKRQGREFIWNDLLSLETGSLKLANGRVIEKTLYNRRTRQDEPALFVALTFERREVLDSSNIKPMNLIGVDRGENIPAVIALTDPEGCPLSRFKDSLGNPTHILRIGESYKEKQRTIQAKKEVEQRRAGGYSRKYASKAKNLADDMVRNTARDLLYYAVTQDAMLIFENLSRGFGRQGKRTFMAERQYTRMEDWLTAKLAYEGLPSKTYLSKTLAQYTSKTCSNCGFTITSADYDRVLEKLKKTATGWMTTINGKELKVEGQITYYNRYKRQNVVKDLSVELDRLSEESVNNDISSWTKGRSGEALSLLKKRFSHRPVQEKFVCLNCGFETHADEQAALNIARSWLFLRSQEYKKYQTNKTTGNTDKRAFVETWQSFYRKKLKEVWKPAV

SEQ ID NO: 39737 - protein, 978 aa, synthetic construct
  REGION 1..978: note = engineered CasX variant
QEIKRINKIRRRLVKDSNTKKAGKTGPMKTLLVPVMTPDLRERLENLRKKPENIPQPISNTSRANLNKLLTDYTEMKKAILHVYWEEFQKDPVGLMSRVAQPASKKIDQNKLKPEMDEKGNLTTAGFACSQCGQPLFVYKLEQVSEKGKAYTNYFGRCNVAEHEKLILLAQLKPEKDSDEAVTYSLGKFGQRALDFYSIHVTKESTHPVKPLAQIAGNRYASGPVGKALRDACMGTIASFLSKYQDIIIEHQKVVKGNQKRLESLRELAGKENLEYPSVTLPPQPHTKEGVDAYNEVIARVRMWVNLNLWQKLKLSRDDAKPLLRLKGFPSFPLVERQANEVDWWDMVCNVKKLINEKKEDGKVFWQNLAGYKRQEALRPYLSSEEDRKKGKKFARTQLGDLLLHLEKKHGEDWGKVYDEAWERIDKKVEGLSKHIKLEEERRSEDAQSKAALTDWLRAKASFVIEGLKEADKDEFCRCELKLQKWYGDLRGKPFAIEAENSILDISGFSKQYNCAFIWQKDGVKKLNLYLIINYFKGGKLRFKKIKPEAFEANRFYTVINKKSGEIVPMEVNFNFDDPNLIILPLAFGKRQGREFIWNDLLSLETGSLKLANGRVIEKTLYNRRTRQDEPALFVALTFERREVLDSSNIKPMNLIGVDRGENIPAVIALTDPEGCPLSRFKDSLGNPTHILRIGESYKEKQRTIQAKKEVEQRRAGGYSRKYASKAKNLADDMVRNTARDLLYYAVTQDAMLIFENLSRGFGRQGKRTFMAERQYTRMEDWLTAKLAYEGLPSKTYLSKTLAQYTSKTCSNCGFTITSADYDRVLEKLKKTATGWMTTINGKELKVEGQITYYNRYKRQNVVKDLSVELDRLSEESVNNDISSWTKGRSGEALSLLKKRFSHRPVQEKFVCLNCGFETHADEQAALNIARSWLFLRSQEYKKYQTNKTTGNTDKRAFVETWQSFYRKKLKEVWKPAV

SEQ ID NO: 39738 - protein, 979 aa, synthetic construct
  REGION 1..979: note = engineered CasX variant
QEIKRINKIRRRLVKDSNTKKAGKTGPMKTLLVPVMTPDLRERLENLRKKPENIPQPISNTSRANLNKLLTDYTEMKKAILHVYWEEFQKDPVGLMSRVAQPASKKIDQNKLKPEMDEKGNLTTAGFACSQCGQPLFVYKLEQVSEKGKAYTNYFGRCNVAEHEKLILLAQLKPEKDSDEAVTYSLGKFGQRALDFYSIHVTKESTHPVKPLAQIAGNRYASGPVGKALRDACMGTIASFLSKYQDIIIEHQKVVKGNQKRLESLRELAGKENLEYPSVTLPPQPHTKEGVDAYNEVIARVRMWVNLNLWQKLKLSRDDAKPLLRLKGFPSFPLVERQANEVDWWDMVCNVKKLINEKKEDGKVFWQNLAGYKRQEALRPYLSSEEDRKKGKKFARYQLGDLLLHLEKKHEGEDWGKVYDEAWERIDKKVEGLSKHIKLEEERRSEDAQSKAALTDWLRAKASFVIEGLKEADKDEFCRCELKLQKWYGDLRGKPFAIEAENSILDISGFSKQYNCAFIWQKDGVKKLNLYLIINYFKGGKLRFKKIKPEAFEANRFYTVINKKSGEIVPMEVNFNFDDPNLIILPLAFGKRQGREFIWNDLLSLETGSLKLANGRVIEKTLYNRRTRQDEPALFVALTFERREVLDSSNIKPMNLIGVDRGENIPAVIALTDPEGCPLSRFKDSLGNPTHILRIGESYKEKQRTIQAKKEVEQRRAGGYSRKYASKAKNLADDMVRNTARDLLYYAVTQDAMLIFENLSRGFGRQGKRTFMAERQYTRMEDWLTAKLAYEGLPSKTYLSKTLAQYTSKTCSNCGFTITSADYDRVLEKLKKTATGWMTTINGKELKVEGQITYYNRYKRQNVVKDLSVELDRLSEESVNNDISSWTKGRSGEALSLLKKRFSHRPVQEKFVCLNCGFETHADEQAALNIARSWLFLRSQEYKKYQTNKTTGNTDKRAFVETWQSFYRKKLKEVWKPAV

SEQ ID NO: 39739 - protein, 978 aa, synthetic construct
  REGION 1..978: note = engineered CasX variant
QEIKRINKIRRRLVKDSNTKKAGKTGPMKTLLVPVMTPDLRERLENLRKKPENIPQPISNTSRANLNKLLTDYTEMKKAILHVYWEEFQKDPVGLMSRVAQPASKKIDQNKLKPEMDEKGNLTTAGFACSQCGQPLFVYKLEQVSEKGKAYTNYFGRCNVAEHEKLILLAQLKPEKDSDEAVTYSLGKFGQRALDFYSIHVTKESTHPVKPLAQIAGNRYASGPVGKALRDACMGTIASFLSKYQDIIIEHQKVVKGNQKRLESLRELAGKENLEYPSVTLPPQPHTKEGVDAYNEVIARVRMWVNLNLWQKLKLSRDDAKPLLRLKGFPSFPLVERQANEVDWWDMVCNVKKLINEKKEDGKVFWQNLAGYKRQEALRPYLSSEEDRKKGKKFARYQLGDLLLHLEKKHGEDWGKVYDEAWERIDKKVEGLSKHIKLEEERRSEDAQSKAALTDWLRAKASFVIEGLKEADKDEFCRCDLKLQKWYGDLRGKPFAIEAENSILDISGFSKQYNCAFIWQKDGVKKLNLYLIINYFKGGKLRFKKIKPEAFEANRFYTVINKKSGEIVPMEVNFNFDDPNLIILPLAFGKRQGREFIWNDLLSLETGSLKLANGRVIEKTLYNRRTRQDEPALFVALTFERREVLDSSNIKPMNLIGVDRGENIPAVIALTDPEGCPLSRFKDSLGNPTHILRIGESYKEKQRTIQAKKEVEQRRAGGYSRKYASKAKNLADDMVRNTARDLLYYAVTQDAMLIFENLSRGFGRQGKRTFMAERQYTRMEDWLTAKLAYEGLPSKTYLSKTLAQYTSKTCSNCGFTITSADYDRVLEKLKKTATGWMTTINGKELKVEGQITYYNRYKRQNVVKDLSVELDRLSEESVNNDISSWTKGRSGEALSLLKKRFSHRPVQEKFVCLNCGFETHADEQAALNIARSWLFLRSQEYKKYQTNKTTGNTDKRAFVETWQSFYRKKLKEVWKPAV

SEQ ID NO: 39740 - protein, 978 aa, synthetic construct
  REGION 1..978: note = engineered CasX variant
QEIKRINKIRRRLVKDSNTKKAGKTGPMKTLLVPVMTPDLRERLENLRKKPENIPQPISNTSRANLNKLLTDYTEMKKAILHVYWEEFQKDPVGLMSRVAQPASKKIDQNKLKPEMDEKGNLTTAGFACSQCGQPLFVYKLEQVSEKGKAYTNYFGRCNVAEHEKLILLAQLKPEKDSDEAVTYSLGKFGQRALDFYSIHVTKESTHPVKPLAQIAGNRYASGPVGKALRDACMGTIASFLSKYQDIIIEHQKVVKGNQKRLESLRELAGKENLEYPSVTLPPQPHTKEGVDAYNEVIARVRMWVNLNLWQKLKLSRDDAKPLLRLKGFPSFPLVERQANEVDWWDMVCNVKKLINEKKEDGKVFWQNLAGYKRQEALRPYLSSEEDRKKGKKFARYQLGDLLLHLEKKHGEDWGKVYDEAWERIDKKVEGLSKHIKLEEERRSEDAQSKAALTDWLRAKASFVIEGLKEADKDEFCRCELKLQKWYGDLRGKPFAIEAENSILDISGFSKQYNCAFIWQKDGVKKLNLYLIINYFKGGKLRFKKIKPEAFEANRFYTVINKKSGEIVPMEVNFNFDDPNLIILPLAFGKRFGREFIWNDLLSLETGSLKLANGRVIEKTLYNRRTRQDEPALFVALTFERREVLDSSNIKPMNLIGVDRGENIPAVIALTDPEGCPLSRFKDSLGNPTHILRIGESYKEKQRTIQAKKEVEQRRAGGYSRKYASKAKNLADDMVRNTARDLLYYAVTQDAMLIFENLSRGFGRQGKRTFMAERQYTRMEDWLTAKLAYEGLPSKTYLSKTLAQYTSKTCSNCGFTITSADYDRVLEKLKKTATGWMTTINGKELKVEGQITYYNRYKRQNVVKDLSVELDRLSEESVNNDISSWTKGRSGEALSLLKKRFSHRPVQEKFVCLNCGFETHADEQAALNIARSWLFLRSQEYKKYQTNKTTGNTDKRAFVETWQSFYRKKLKEVWKPAV

SEQ ID NO: 39741 - protein, 978 aa, synthetic construct
  REGION 1..978: note = engineered CasX variant
QEIKRINKIRRRLVKDSNTKKAGKTGPMKTLLVPVMTPDLRERLENLRKKPENIPQPISNTSRANLNKLLTDYTEMKKAILHVYWEEFQKDPVGLMSRVAQPASKKIDQNKLKPEMDEKGNLTTAGFACSQCGQPLFVYKLEQVSEKGKAYTNYFGRCNVAEHEKLILLAQLKPEKDSDEAVTYSLGKFGQRALDFYSIHVTKESTHPVKPLAQIAGNRYASGPVGKALRDACMGTIASFLSKYQDIIIEHQKVVKGNQKRLESLRELAGKENLEYPSVTLPPQPHTKEGVDAYNEVIARVRMWVNLNLWQKLKLSRDDAKPLLRLKGFPSFPLVERQANEVDWWDMVCNVKKLINEKKEDGKVFWQNLAGYKRQEALRPYLSSEEDRKKGKKFARYQLGDLLLHLEKKHGEDWGKVYDEAWERIDKKVEGLSKHIKLEEERRSEDAQSKAALTDWLRAKASFVIEGLKEADKDEFCRCELKLQKWYGDLRGKPFAIEAENSILDISGFSKQYNCAFIWQKDGVKKLNLYLIINYFKGGKLRFKKIKPEAFEANRFYTVINKKSGEIVPMEVNFNFDDPNLIILPLAFGKRVGREFIWNDLLSLETGSLKLANGRVIEKTLYNRRTRQDEPALFVALTFERREVLDSSNIKPMNLIGVDRGENIPAVIALTDPEGCPLSRFKDSLGNPTHILRIGESYKEKQRTIQAKKEVEQRRAGGYSRKYASKAKNLADDMVRNTARDLLYYAVTQDAMLIFENLSRGFGRQGKRTFMAERQYTRMEDWLTAKLAYEGLPSKTYLSKTLAQYTSKTCSNCGFTITSADYDRVLEKLKKTATGWMTTINGKELKVEGQITYYNRYKRQNVVKDLSVELDRLSEESVNNDISSWTKGRSGEALSLLKKRFSHRPVQEKFVCLNCGFETHADEQAALNIARSWLFLRSQEYKKYQTNKTTGNTDKRAFVETWQSFYRKKLKEVWKPAV

SEQ ID NO: 39742 - protein, 979 aa, synthetic construct
  REGION 1..979: note = engineered CasX variant
QEIKRINKIRRRLVKDSNTKKAGKTGPMKTLLVPVMTPDLRERLENLRKKPENIPQPISNTSRANLNKLLTDYTEMKKAILHVYWEEFQKDPVGLMSRVAQPASKKIDQNKLKPEMDEKGNLTTAGFACSQCGQPLFVYKLEQVSEKGKAYTNYFGRCNVAEHEKLILLAQLKPEKDSDEAVTYSLGKFGQRALDFYSIHVTKESTHPVKPLAQIAGNRYASGPVGKALRDACMGTIASFLSKYQDIIIEHQKVVKGNQKRLESLRELAGKENLEYPSVTLPPQPHTKEGVDAYNEVIARVRMWVNLNLWQKLKLSRDDAKPLLRLKGFPSFPLVERQANEVDWWDMVCNVKKLINEKKEDGKVFWQNLAGYKRQEALRPYLSSEEDRKKGKKFARYQLGDLLLHLEKKHGEDWGKVYDEAWERIDKKVEGLSKHIKLEEERRSEDAQSKAALTDWLRAKASFVIEGLKEADKDEFCRCELKLQKWYGDLRGKPFAIEAENSILDISGFSKQYNCAFIWQKDGVKKLNLYLIINYFKGGKLRFKKIKPEAFEANRFYTVINKKSGEIVPMEVNFNFDDPNLIILPLAFGKRQGREFIWNDLLSLETGSLKLANGRVIEKTLYNRRTRQDEPALFVALTFERREVLDSSNIKTPMNLIGVDRGENIPAVIALTDPEGCPLSRFKDSLGNPTHILRIGESYKEKQRTIQAKKEVEQRRAGGYSRKYASKAKNLADDMVRNTARDLLYYAVTQDAMLIFENLSRGFGRQGKRTFMAERQYTRMEDWLTAKLAYEGLPSKTYLSKTLAQYTSKTCSNCGFTITSADYDRVLEKLKKTATGWMTTINGKELKVEGQITYYNRYKRQNVVKDLSVELDRLSEESVNNDISSWTKGRSGEALSLLKKRFSHRPVQEKFVCLNCGFETHADEQAALNIARSWLFLRSQEYKKYQTNKTTGNTDKRAFVETWQSFYRKKLKEVWKPAV

SEQ ID NO: 39743 - protein, 979 aa, synthetic construct
  REGION 1..979: note = engineered CasX variant
QEIKRINKIRRRLVKDSNTKKAGKTGPMKTLLVPVMTPDLRERLENLRKKPENIPQPISNTSRANLNKLLTDYTEMKKAILHVYWEEFQKDPVGLMSRVAQPASKKIDQNKLKPEMDEKGNLTTAGFACSQCGQPLFVYKLEQVSEKGKAYTNYFGRCNVAEHEKLILLAQLKPEKDSDEAVTYSLGKFGQRALDFYSIHVTKESTHPVKPLAQIAGNRYASGPVGKALRDACMGTIASFLSKYQDIIIEHQKVVKGNQKRLESLRELAGKENLEYPSVTLPPQPHTKEGVDAYNEVIARVRMWVNLNLWQKLKLSRDDAKPLLRLKGFPSFPLVERQANEVDWWDMVCNVKKLINEKKEDGKVFWQNLAGYKRQEALRPYLSSEEDRKKGKKFARYQLGDLLLHLEKKHGEDWGKVYDEAWERIDKKVEGLSKHIKLEEERRSEDAQSKAALTDWLRAKASFVIEGLKEADKDEFCRCELKLQKWYGDLRGKPFAIEAENSILDISGFSKQYNCAFIWQKDGVKKLNLYLIINYFKGGKLRFKKIKPEAFEANRFYTVINKKSGEIVPMEVNFNFDDPNLIILPLAFGKRQGREFIWNDLLSLETGSLKLANGRVIEKTLYNRRTRQDEPALFVALTFERREVLDSSNIKPMSNLIGVDRGENIPAVIALTDPEGCPLSRFKDSLGNPTHILRIGESYKEKQRTIQAKKEVEQRRAGGYSRKYASKAKNLADDMVRNTARDLLYYAVTQDAMLIFENLSRGFGRQGKRTFMAERQYTRMEDWLTAKLAYEGLPSKTYLSKTLAQYTSKTCSNCGFTITSADYDRVLEKLKKTATGWMTTINGKELKVEGQITYYNRYKRQNVVKDLSVELDRLSEESVNNDISSWTKGRSGEALSLLKKRFSHRPVQEKFVCLNCGFETHADEQAALNIARSWLFLRSQEYKKYQTNKTTGNTDKRAFVETWQSFYRKKLKEVWKPAV

SEQ ID NO: 39744 - protein, 978 aa, synthetic construct
  REGION 1..978: note = engineered CasX variant
QEIKRINKIRRRLVKDSNTKKAGKTGPMKTLLVPVMTPDLRERLENLRKKPENIPQPISNTSRANLNKLLTDYTEMKKAILHVYWEEFQKDPVGLMSRVAQPASKKIDQNKLKPEMDEKGNLTTAGFACSQCGQPLFVYKLEQVSEKGKAYTNYFGRCNVAEHEKLILLAQLKPEKDSDEAVTYSLGKFGQRALDFYSIHVTKESTHPVKPLAQIAGNRYASGPVGKALRDACMGTIASFLSKYQDIIIEHQKVVKGNQKRLESLRELAGKENLEYPSVTLPPQPHTKEGVDAYNEVIARVRMWVNLNLWQKLKLSRDDAKPLLRLKGFPSFPLVERQANEVDWWDMVCNVKKLINEKKEDGKVFWQNLAGYKRQEALRPYLSSEEDRKKGKKFARYQLGDLLLHLEKKHGEDWGKVYDEAWERIDKKVEGLSKHIKLEEERRSEDAQSKAALTDWLRAKASFVIEGLKEADKDEFCRCELKLQKWYGDLRGKPFAIEAENSILDISGFSKQYNCAFIWQKDGVKKLNLYLIINYFKGGKLRFKKIKPEAFEANRFYTVINKKSGEIVPMEVNFNFDDPNLIILPLAFGKRQGREFIWNDLLSLETGSLKLANGRVIEKTLYNRRTRQDEPALFVALTFERREVLDSSNIKPMNLIGVDRGENIPAVIALTDPEGCPLSRFKDSLGNPTHILRIRESYKEKQRTIQAKKEVEQRRAGGYSRKYASKAKNLADDMVRNTARDLLYYAVTQDAMLIFENLSRGFGRQGKRTFMAERQYTRMEDWLTAKLAYEGLPSKTYLSKTLAQYTSKTCSNCGFTITSADYDRVLEKLKKTATGWMTTINGKELKVEGQITYYNRYKRQNVVKDLSVELDRLSEESVNNDISSWTKGRSGEALSLLKKRFSHRPVQEKFVCLNCGFETHADEQAALNIARSWLFLRSQEYKKYQTNKTTGNTDKRAFVETWQSFYRKKLKEVWKPAV

SEQ ID NO: 39745 - protein, 978 aa, synthetic construct
  REGION 1..978: note = engineered CasX variant
QEIKRINKIRRRLVKDSNTKKAGKTGPMKTLLVPVMTPDLRERLENLRKKPENIPQPISNTSRANLNKLLTDYTEMKKAILHVYWEEFQKDPVGLMSRVAQPASKKIDQNKLKPEMDEKGNLTTAGFACSQCGQPLFVYKLEQVSEKGKAYTNYFGRCNVAEHEKLILLAQLKPEKDSDEAVTYSLGKFGQRALDFYSIHVTKESTHPVKPLAQIAGNRYASGPVGKALRDACMGTIASFLSKYQDIIIEHQKVVKGNQKRLESLRELAGKENLEYPSVTLPPQPHTKEGVDAYNEVIARVRMWVNLNLWQKLKLSRDDAKPLLRLKGFPSFPLVERQANEVDWWDMVCNVKKLINEKKEDGKVFWQNLAGYKRQEALRPYLSSEEDRKKGKKFARYQLGDLLLHLEKKHGEDWGKVYDEAWERIDKKVEGLSKHIKLEEERRSEDAQSKAALTDWLRAKASFVIEGLKEADKDEFCRCELKLQKWYGDLRGKPFAIEAENSILDISGFSKQYNCAFIWQKDGVKKLNLYLIINYFKGGKLRFKKIKPEAFEANRFYTVINKKSGEIVPMEVNFNFDDPNLIILPLAFGKRQGREFIWNDLLSLETGSLKLANGRVIEKTLYNRRTRQDEPALFVALTFERREVLDSSNIKPMNLIGVDRGENIPAVIALTDPEGCPLSRFKDSLGNPTHILRIGESYKEKQRTIQAKKEVEQRRAGGYSRKYASKAKNLADDMVRNTARDLLYYAVTQDAMLIFENLSRGFGRQGKRTFSAERQYTRMEDWLTAKLAYEGLPSKTYLSKTLAQYTSKTCSNCGFTITSADYDRVLEKLKKTATGWMTTINGKELKVEGQITYYNRYKRQNVVKDLSVELDRLSEESVNNDISSWTKGRSGEALSLLKKRFSHRPVQEKFVCLNCGFETHADEQAALNIARSWLFLRSQEYKKYQTNKTTGNTDKRAFVETWQSFYRKKLKEVWKPAV

SEQ ID NO: 39746 - protein, 978 aa, synthetic construct
  REGION 1..978: note = engineered CasX variant
QEIKRINKIRRRLVKDSNTKKAGKTGPMKTLLVPVMTPDLRERLENLRKKPENIPQPISNTSRANLNKLLTDYTEMKKAILHVYWEEFQKDPVGLMSRVAQPASKKIDQNKLKPEMDEKGNLTTAGFACSQCGQPLFVYKLEQVSEKGKAYTNYFGRCNVAEHEKLILLAQLKPEKDSDEAVTYSLGKFGQRALDFYSIHVTKESTHPVKPLAQIAGNRYASGPVGKALRDACMGTIASFLSKYQDIIIEHQKVVKGNQKRLESLRELAGKENLEYPSVTLPPQPHTKEGVDAYNEVIARVRMWVNLNLWQKLKLSRDDAKPLLRLKGFPSFPLVERQANEVDWWDMVCNVKKLINEKKEDGKVFWQNLAGYKRQEALRPYLSSEEDRKKGKKFARYQLGDLLLHLEKKHGEDWGKVYDEAWERIDKKVEGLSKHIKLEEERRSEDAQSKAALTDWLRAKASFVIEGLKEADKDEFCRCELKLQKWYGDLRGKPFAIEAENSILDISGFSKQYNCAFIWQKDGVKKLNLYLIINYFKGGKLRFKKIKPEAFEANRFYTVINKKSGEIVPMEVNFNFDDPNLIILPLAFGKRQGREFIWNDLLSLETGSLKLANGRVIEKTLYNRRTRQDEPALFVALTFERREVLDSSNIKPMNLIGVDRGENIPAVIALTDPEGCPLSRFKDSLGNPTHILRIGESYKEKQRTIQAKKEVEQRRAGGYSRKYASKAKNLADDMVRNTARDLLYYAVTQDAMLIFENLSRGFGRQGKRTFMAERQYTRMEDWLTAKLAYEGLPSKTYLSKTLAQYTSKTCSNCGFTITSADYDRVLEKLKKTATGWMTTINGKELKVEGQITYYNRYKRQNVVKDLSVELDRLSEESVNNDISSWDKGRSGEALSLLKKRFSHRPVQEKFVCLNCGFETHADEQAALNIARSWLFLRSQEYKKYQTNKTTGNTDKRAFVETWQSFYRKKLKEVWKPAV

SEQ ID NO: 39747 - protein, 978 aa, synthetic construct
  REGION 1..978: note = engineered CasX variant
QEIKRINKIRRRLVKDSNTKKAGKTGPMKTLLVPVMTPDLRERLENLRKKPENIPQPISNTSRANLNKLLTDYTEMKKAILHVYWEEFQVDPVGLMSRVAQPASKKIDQNKLKPEMDEKGNLTTAGFACSQCGQPLFVYKLEQVSEKGKAYTNYFGRCNVAEHEKLILLAQLKPEKDSDEAVTYSLGKFGQRALDFYSIHVTKESTHPVKPLAQIAGNRYASGPVGKALRDACMGTIASFLSKYQDIIIEHQKVVKGNQKRLESLRELAGKENLEYPSVTLPPQPHTKEGVDAYNEVIARVRMWVNLNLWQKLKLSRDDAKPLLRLKGFPSFPLVERQANEVDWWDMVCNVKKLINEKKEDGKVFWQNLAGYKRQEALRPYLSSEEDRKKGKKFARYQLGDLLLHLEKKHGEDWGKVYDEAWERIDKKVEGLSKHIKLEEERRSEDAQSKAALTDWLRAKASFVIEGLKEADKDEFCRCELKLQKWYGDLRGKPFAIEAENSILDISGFSKQYNCAFIWQKDGVKKLNLYLIINYFKGGKLRFKKIKPEAFEANRFYTVINKKSGEIVPMEVNFNFDDPNLIILPLAFGKRQGREFIWNDLLSLETGSLKLANGRVIEKTLYNRRTRQDEPALFVALTFERREVLDSSNIKPMNLIGVDRGENIPAVIALTDPEGCPLSRFKDSLGNPTHILRIGESYKEKQRTIQAKKEVEQRRAGGYSRKYASKAKNLADDMVRNTARDLLYYAVTQDAMLIFENLSRGFGRQGKRTFMAERQYTRMEDWLTAKLAYEGLPSKTYLSKTLAQYTSKTCSNCGFTITSADYDRVLEKLKKTATGWMTTINGKELKVEGQITYYNRYKRQNVVKDLSVELDRLSEESVNNDISSWTKGRSGEALSLLKKRFSHRPVQEKFVCLNCGFETHADEQAALNIARSWLFLRSQEYKKYQTNKTTGNTDKRAFVETWQSFYRKKLKEVWKPAV

SEQ ID NO: 39748 - protein, 978 aa, synthetic construct
  REGION 1..978: note = engineered CasX variant
QEIKRLNKIRRRLVKDSNTKKAGKTGPMKTLLVPVMTPDLRERLENLRKKPENIPQPISNTSRANLNKLLTDYTEMKKAILHVYWEEFQKDPVGLMSRVAQPASKKIDQNKLKPEMDEKGNLTTAGFACSQCGQPLFVYKLEQVSEKGKAYTNYFGRCNVAEHEKLILLAQLKPEKDSDEAVTYSLGKFGQRALDFYSIHVTKESTHPVKPLAQIAGNRYASGPVGKALRDACMGTIASFLSKYQDIIIEHQKVVKGNQKRLESLRELAGKENLEYPSVTLPPQPHTKEGVDAYNEVIARVRMWVNLNLWQKLKLSRDDAKPLLRLKGFPSFPLVERQANEVDWWDMVCNVKKLINEKKEDGKVFWQNLAGYKRQEALRPYLSSEEDRKKGKKFARYQLGDLLLHLEKKHGEDWGKVYDEAWERIDKKVEGLSKHIKLEEERRSEDAQSKAALTDWLRAKASFVIEGLKEADKDEFCRCELKLQKWYGDLRGKPFAIEAENSILDISGFSKQYNCAFIWQKDGVKKLNLYLIINYFKGGKLRFKKIKPEAFEANRFYTVINKKSGEIVPMEVNFNFDDPNLIILPLAFGKRQGREFIWNDLLSLETGSLKLANGRVIEKTLYNRRTRQDEPALFVALTFERREVLDSSNIKPMNLIGVDRGENIPAVIALTDPEGCPLSRFKDSLGNPTHILRIGESYKEKQRTIQAKKEVEQRRAGGYSRKYASKAKNLADDMVRNTARDLLYYAVTQDAMLIFENLSRGFGRQGKRTFMAERQYTRMEDWLTAKLAYEGLPSKTYLSKTLAQYTSKTCSNCGFTITSADYDRVLEKLKKTATGWMTTINGKELKVEGQITYYNRYKRQNVVKDLSVELDRLSEESVNNDISSWTKGRSGEALSLLKKRFSHRPVQEKFVCLNCGFETHADEQAALNIARSWLFLRSQEYKKYQTNKTTGNTDKRAFVETWQSFYRKKLKEVWKPAV

SEQ ID NO: 39749 - protein, 978 aa, synthetic construct
  REGION 1..978: note = engineered CasX variant
QEIKRINKIRRRLVKDSNTKKAGKTGPMKTLLVPVMTPDLRERLENLRKKPENIPQPISNTSRANLNKLLTDYTEMKKAILHVYWEEFQKDPVGLMSRVAQPASKKIDQNKLKPEMDEKGNLTTAGFACSQCGQPLFVYKLEQVSEKGKAYTNYVGRCNVAEHEKLILLAQLKPEKDSDEAVTYSLGKFGQRALDFYSIHVTKESTHPVKPLAQIAGNRYASGPVGKALRDACMGTIASFLSKYQDIIIEHQKVVKGNQKRLESLRELAGKENLEYPSVTLPPQPHTKEGVDAYNEVIARVRMWVNLNLWQKLKLSRDDAKPLLRLKGFPSFPLVERQANEVDWWDMVCNVKKLINEKKEDGKVFWQNLAGYKRQEALRPYLSSEEDRKKGKKFARYQLGDLLLHLEKKHGEDWGKVYDEAWERIDKKVEGLSKHIKLEEERRSEDAQSKAALTDWLRAKASFVIEGLKEADKDEFCRCELKLQKWYGDLRGKPFAIEAENSILDISGFSKQYNCAFIWQKDGVKKLNLYLIINYFKGGKLRFKKIKPEAFEANRFYTVINKKSGEIVPMEVNFNFDDPNLIILPLAFGKRQGREFIWNDLLSLETGSLKLANGRVIEKTLYNRRTRQDEPALFVALTFERREVLDSSNIKPMNLIGVDRGENIPAVIALTDPEGCPLSRFKDSLGNPTHILRIGESYKEKQRTIQAKKEVEQRRAGGYSRKYASKAKNLADDMVRNTARDLLYYAVTQDAMLIFENLSRGFGRQGKRTFMAERQYTRMEDWLTAKLAYEGLPSKTYLSKTLAQYTSKTCSNCGFTITSADYDRVLEKLKKTATGWMTTINGKELKVEGQITYYNRYKRQNVVKDLSVELDRLSEESVNNDISSWTKGRSGEALSLLKKRFSHRPVQEKFVCLNCGFETHADEQAALNIARSWLFLRSQEYKKYQTNKTTGNTDKRAFVETWQSFYRKKLKEVWKPAV

SEQ ID NO: 39750 - protein, 978 aa, synthetic construct
  REGION 1..978: note = engineered CasX variant
QEIKRINKIRRRLVKDSNTKKAGKTGPMKTLLVPVMTPDLRERLENLRKKPENIPQPISNTSRANLNKLLTDYTEMKKAILHVYWEEFQKDPVGLMSRVAQPASKKIDQNKLKPEMDEKGNLTTAGFACSQCGQPLFVYKLEQVSEKGKAYTNYFGRCNVAEHEKLILLAQLKPEKDSDEAVTYSLGKFGQRALDFYSIHVTKESTHPVKPLAQIAGNRYASGPVGKALRDACMGTIASFLSKYQDIIIEHQKVVKGNQKRLESLRELAGKENLEYPSVTLPPQPHTKEGVDAYNEVIARVRMWVNLNLWQKLKLSRDDAKPLLRLKGFPSFPLVERQANEVDWWDMVCNVKKLINEKKEDGKVFWQNLAGYKRQEALRPYLSSEEDRKKGKKFARYQLGDLLLHLEKKHGEDWGKVYDEAWERIDKKVEGLSKHIKLEEERRSEDAQSKAALTDWLRAKASFVIEGLKEADKDEFCRCELKLQKWYGDLRGKPFAIEAENSILDISGFSKQYNCAFIWQKDGVKKLNLYLIINYFKGGKLRFKKIKPEAFEANRFYTVINKKSGEIVPMEVNFNFDDPNLIILPLAFGKRQGREFIWNDLLSLETGSLKLANGRVIEKTLYNRRTRQDEPALFVALTFERREVLDSSNIKPMNLIGVDRGENIPAVIALTDPEGCPLSRFKDSLGNPTHILRIGESYKEKQRTIQAKKEVEQRRAGGYSRKYASKAKNLADDMVRNTARDLLYYAVTQDAMLIFENLSRGFGRQGKRTFMAERQYTRMEDWLTAKLAYEGLASKTYLSKTLAQYTSKTCSNCGFTITSADYDRVLEKLKKTATGWMTTINGKELKVEGQITYYNRYKRQNVVKDLSVELDRLSEESVNNDISSWTKGRSGEALSLLKKRFSHRPVQEKFVCLNCGFETHADEQAALNIARSWLFLRSQEYKKYQTNKTTGNTDKRAFVETWQSFYRKKLKEVWKPAV

SEQ ID NO: 39751 - protein, 978 aa, synthetic construct
  REGION 1..978: note = engineered CasX variant
QEIKRINKIRRRLVKDSNTKKAGKTGPMKTLLVPVMTPDLRERLENLRKKPENIPQPISNTSRANLNKLLTDYTEMKKAILHVYWEEFQKDPVGLMSRVAQPASKKIDQNKLKPEMDEKGNLTTAGFACSQCGQPLFVYKLEQVSEKGKAYTNYFGRCNVAEHEKLILLAQLKPEKDSDEAVTYSLGKFGQRALDFYSIHVTKESTHPVKPLAQIAGNRYASGPVGKALRDACMGTIASFLSKYQDIIIEHQKVVKGNQKRLESLRELAGKENLEYPSVTLPPQPHTKEGVDAYNEVIARVRMWVNLNLWQKLKLSRDDAKPLLRLKGFPSFPLVERQANEVDWWDMVCNVKKLINEKKEDGKVFWQNLAGYKRQEALRPYLSSEEDRKKGKKFARYQLGDLLLHLEKKHGEDWGKVYDEAWERIDKKVEGLSKHIKLEEERRSEDAQSKAALTDWLRAKASFVIEGLKEADKDEFCRCELKLQKWYGDLRGKPFAIEAENSILDISGFSKQYNCAFIWQKDGVKKLNLYLIINYFKGGKLRFKKIKPEAFEANRFYTVINKKSGEIVPMEVNFNFDDPNLIILPLAFGKRQGREFIWNDLLSLETGSLKLANGRVIEKTLYNRRTRQDEPALFVALTFERREVLDSSNIKPMNLIGVDRGENIPAVIALTDPEGCPLSRFKDSLGNPTHILRIGESYKEKQRTIQAKKEVEQRRAGGYSRKYASKAKNLADDMVRNTARDLLYYAVTQDAMLIFENLSRGFGRQGKRTFMAERQYTRMEDWLTAKLAYEGLPSKVYLSKTLAQYTSKTCSNCGFTITSADYDRVLEKLKKTATGWMTTINGKELKVEGQITYYNRYKRQNVVKDLSVELDRLSEESVNNDISSWTKGRSGEALSLLKKRFSHRPVQEKFVCLNCGFETHADEQAALNIARSWLFLRSQEYKKYQTNKTTGNTDKRAFVETWQSFYRKKLKEVWKPAV

SEQ ID NO: 39752 - protein, 979 aa, synthetic construct
  REGION 1..979: note = engineered CasX variant
QEIKRINKIRRRLVKDSNTKKAGKTGPMKTLLVPVMTPDLRERLENLRKKPENIPQPISNTSRANLNKLLTDYTEMKKAILHVYWEEFQKDPVGLMSRVAQPASKKIDQNKLKPEMDEKGNLTTAGFACSQCGQPLFVYKLEQVSEKGKAYTNYFGRCNVAEHEKLILLAQLKPEKDSDEAVTYSLGKFGQRALDFYSIHVTKESTHPVKPLAQIAGNRYASGPVGKALRDACMGTIASFLSKYQDIIIEHQKVVKGNQKRLESLRELAGKENLEYPSVTLPPQPHTKEGVDAYNEVIARVRMWVNLNLWQKLKLSRDDAKPLLRLKGFPSFPLVERQANEVDWWDMVCNVKKLINEKKEDGKVFWQNLAGYKRQEALRPYLSSEEDRKKGKKFARYQLGDLLLHLEKKHGEDWGKVYDEAWERIDKKVEGLSKHIKLEEERRSEDAQSKAALTDWLRAKASFVIEGLKEADKDEFCRCELKLQKWYGDLRGKPFAIEAENSILDISGFSKQYNCAFIWQKDGVKKLNLYLIINYFKGGKLRFKKIKPEAFEANRFYTVINKKSGEIVPMEVNFNFDDPNLIILPLAFGKRQGREFIWNDLLSLETGSLKLANGRVIEKTLYNRRTRQDEPALFVALTFERREVLDSSNIKPMNLIGVDRGENIPAVIALTDPEGCPLSRFKDSLGNPTHILRIGESYKEKQRTIQAKKEVEQRRAGGYSRKYASKAKNLADDMVRNTARDLLYYAVTQDAMLIFENLSRGFGRQGKRTFMAERQYTRMEDWLTAKLAYEGPLPSKTYLSKTLAQYTSKTCSNCGFTITSADYDRVLEKLKKTATGWMTTINGKELKVEGQITYYNRYKRQNVVKDLSVELDRLSEESVNNDISSWTKGRSGEALSLLKKRFSHRPVQEKFVCLNCGFETHADEQAALNIARSWLFLRSQEYKKYQTNKTTGNTDKRAFVETWQSFYRKKLKEVWKPAV

SEQ ID NO: 39753 - protein, 979 aa, synthetic construct
  REGION 1..979: note = engineered CasX variant
QEIKRINKIRRRLVKDSNTKKAGKTGPMKTLLVPVMTPDLRERLENLRKKPENIPQPISNTSRANLNKLLTDYTEMKKAILHVYWEEFQKDPVGLMSRVAQPASKKIDQNKLKPEMDEKGNLTTAGFACSQCGQPLFVYKLEQVSEKGKAYTNYFGRCNVAEHEKLILLAQLKPEKDSDEAVTYSLGKFGQRALDFYSIHVTKESTHPVKPLAQIAGNRYASGPVGKALRDACMGTIASFLSKYQDIIIEHQKVVKGNQKRLESLRELAGKENLEYPSVTLPPQPHTKEGVDAYNEVIARVRMWVNLNLWQKLKLSRDDAKPLLRLKGFPSFPLVERQANEVDWWDMVCNVKKLINEKKEDGKVFWQNLAGYKRQEALRPYLSSEEDVRKKGKKFARYQLGDLLLHLEKKHGEDWGKVYDEAWERIDKKVEGLSKHIKLEEERRSEDAQSKAALTDWLRAKASFVIEGLKEADKDEFCRCELKLQKWYGDLRGKPFAIEAENSILDISGFSKQYNCAFIWQKDGVKKLNLYLIINYFKGGKLRFKKIKPEAFEANRFYTVINKKSGEIVPMEVNFNFDDPNLIILPLAFGKRQGREFIWNDLLSLETGSLKLANGRVIEKTLYNRRTRQDEPALFVALTFERREVLDSSNIKPMNLIGVDRGENIPAVIALTDPEGCPLSRFKDSLGNPTHILRIGESYKEKQRTIQAKKEVEQRRAGGYSRKYASKAKNLADDMVRNTARDLLYYAVTQDAMLIFENLSRGFGRQGKRTFMAERQYTRMEDWLTAKLAYEGLPSKTYLSKTLAQYTSKTCSNCGFTITSADYDRVLEKLKKTATGWMTTINGKELKVEGQITYYNRYKRQNVVKDLSVELDRLSEESVNNDISSWTKGRSGEALSLLKKRFSHRPVQEKFVCLNCGFETHADEQAALNIARSWLFLRSQEYKKYQTNKTTGNTDKRAFVETWQSFYRKKLKEVWKPAV

SEQ ID NO: 39754 - protein, 978 aa, synthetic construct
  REGION 1..978: note = engineered CasX variant
QEIKRINKIRRRLVKDSNTKKAGKTGPMKTLLVPVMTPDLRERLENLRKKPENIPQPISNTSRANLNKLLTDYTEMKKAILHVYWEEFQKDPVGLMSRVAQPASKKIDQNKLKPEMDEKGNLTTAGFACSQCGQPLFVYKLEQVSEKGKAYTNYFGRCNVAEHEKLILLAQLKPEKDSDEAVTYSLGKFGQRALDFYSIHVTKESTHPVKPLAQIAGNRYASGPVGKALRDACMGTIASFLSKYQDIIIEHQKVVKGNQKRLESLRELAGKENLEYPSVTLPPQPHTKEGVDAYNEVIARVRMWVNLNLWQKLKLSRDDAKPLLRLKGFPSFPLVERQANEVDWWDMVCNVKKLINEKKEDGKVFWQNLAGYKRQEALRPYLSSEEDRKKGKKFARYQLGDLLLHLEKKHGEDWGKVYDEAWERIDKKVEGLSKHIKLEEERRSEDAQSKAALTDWLRAKASFVIEGLKEADKDEFCRCELKLQKWYGDLRGKPFAIEAENSILDISGFSKQYNCAFIWQKDGVKKLNLYLIINYFKGGKLRFKKIKPEAFEANRFYTVINKKSGEIVPMEVNFNFDDPNLIILPLAFGKRQGREFIWNDLLSLETGSLKLANGRVIEKTLYNRRTRQDEPALFVALTFERREVLDSSNIKPMNLIGVDRGENIPAVIALTDPEGCPLSRFKDSLGNPTHILRIGESYKEKQRTIQAKKEVEQRRAGGYSRKYASKAKNLADDMVRNTARDLLYYAVTQDAMLIFENLSRGFGRQGKRTFMAERQYTRMEDWLTAKLAYEGLPSKTYLSKTLAQYTSKTCSNCGFTITSADYDRMLEKLKKTATGWMTTINGKELKVEGQITYYNRYKRQNVVKDLSVELDRLSEESVNNDISSWTKGRSGEALSLLKKRFSHRPVQEKFVCLNCGFETHADEQAALNIARSWLFLRSQEYKKYQTNKTTGNTDKRAFVETWQSFYRKKLKEVWKPAV

SEQ ID NO: 39755 - protein, 978 aa, synthetic construct
  REGION 1..978: note = engineered CasX variant
QEIKRINKIRRRLVKDSNTKKAGKTGPMKTLLVPVMTPDLRERLENLRKKPENIPQPISNTSRANLNKLLTDYTEMKKAILHVYWEEFQKDPVGLMSRVAQPASKKIDQNKLKPEMDEKGNLTTAGFACSQCGQPLFVYKLEQVSEKGKAYTNYFGRCNVAEHEKLILLAQLKPEKDSDEAVTYSLGKFGQRALDFYSIHVTKESTHPVKPLAQIAGNRYASGPVGKALRDACMGTIASFLSKYQDIIIEHQKVVKGNQKRLESLRELAGKENLEYPSVTLPPQPHTKEGVDAYNEVIARVRMWVNLNLWQKLKLSRDDAKPLLRLKGFPSFPLVERQANEVDWWDMVCNVKKLINEKKEDGKVFWQNLAGYKRQEALRPYLSSEEDRKKGKKFARYQLGDLLLHLEKKHGEDWGKVYDEAWERIDKKVEGLSKHIKLEEERRSEDAQSKAALTDWLRAKASFVIEGLKEADKDEFCRCELKLQKWYGDLRGKPFAIEAENSILDISGFSKQYNCAFIWQKDGVKKLNLYLIINYFKGGKLRFKKIKPEAFEANRFYTVINKKSGEIVPMEVNFNFDDPNLIILPLAFGKRQGREFIWNDLLSLETGSLKLANGRVIEKTLYNRRTRQDEPALFVALTFERREVLDSSNIKPMNLIGVDRGENIPAVIALTDPEGCPLSRFKDSLGNPTHILRIGESYKEKQRTIQAKKEVEQRRAGGYSRKYASKAKNLADDMVRNTARDLLYYAVTQDAMLIFENLSRGFGRQGKRTFMAERQYTRMEDWLTAKLAYEGLPSKTYLSKTLAQYTSKTCSNCGFTITSADYDRVLEKLKKTATGWMTTINGKELKVEGQITYYNRYKRQNVVKDLSVELDRLSEESVNNDISSWTKGRQGEALSLLKKRFSHRPVQEKFVCLNCGFETHADEQAALNIARSWLFLRSQEYKKYQTNKTTGNTDKRAFVETWQSFYRKKLKEVWKPAV

SEQ ID NO: 39756 - protein, 978 aa, synthetic construct
  REGION 1..978: note = engineered CasX variant
QEIKRINKIRRRLVKDSNTKKAGKTGPMKTLLVPVMTPDLRERLENLRKKPENIPQPISNTSRANLNKLLTDYTEMKKAILHVYWEEFQKDPVGLMSRVAQPASKKIDQNKLKPEMDEKGNLTTAGFACSQCGQPLFVYKLEQVSEKGKAYTNYFGRCNVAEHEKLILLAQLKPEKDSDEAVTYSLGKFGQRALDFYSIHVTKESTHPVKPLAQIAGNRYASGPVGKALRDACMGTIASFLSKYQDIIIEHQKVVKGNQKRLESLRELAGKENLEYPSVTLPPQPHTKEGVDAYNEVIARVRMWVNLNLWQKLKLSRDDAKPLLRLKGFPSFPLVERQANEVDWWDMVCNVKKLINEKKEDGKVFWQNLAGYKRQEALRPYLSSEEDRKKGKKFARYQLGDLLLHLEKKHGEDWGKVYDEAWERIDKKVEGLSKHIKLEEERRSEDAQSKAALTDWLRAKASFVIEGLKEADKDEFCRCELKLQKWYGDLRGKPFAIEAENSILDISGFSKQYNCAFIWQKDGVKKLNLYLIINYFKGGKLRFKKIKPEAFEANRFYTVINKKSGEIVPMEVNFNFDDPNLIILPLAFGKRQGREFIWNDLLSLETGSLKLANGRVIEKTLYNRRTRQDEPALFVALTFERREVLDSSNIKPMNLIGVDRGENIPAVIALTDPEGCPLSRFKDSLGNPTHILRIGESYKEKQRTIQAKKEVEQRRAGGYSRKYASKAKNLADDMVRNTARDLLYYAVTQDAMLIFENLSRGFGRQGKRTFMAERQYTRMEDWLTAKLAYEGLPSKTYLSKTLAQYTSKTCSNCGFTITSADYDRVLEKLKKTATGWMTTINGKELKVEGQITYYNRYKRQNVVKDLSVELDRLSEESVNNDISSWTKGRSGEALSLLKKRFSHRPVQEKFVCLNCEFETHADEQAALNIARSWLFLRSQEYKKYQTNKTTGNTDKRAFVETWQSFYRKKLKEVWKPAV

SEQ ID NO: 39757 - protein, 979 aa, synthetic construct
  REGION 1..979: note = engineered CasX variant
QEIKRINKIRRRLVKDSNTKKAGKTGPMKTLLVPVMTPDLRERLENLRKKPENIPQPISNTSRANLNKLLTDYTEMKKAILHVYWEEFQKDPVGLMSRVAQPASKKIDQNKLKPEMDEKGNLTTAGFACSQCGQPLFVYKLEQVSEKGKAYTNYFGRCNVAEHEKLILLAQLKPEKDSDEAVTYSLGKFGQRALDFYSIHVTKESTHPVKPLAQIAGNRYASGPVGKALRDACMGTIASFLSKYQDIIIEHQKVVKGNQKRLESLRELAGKENLEYPSVTLPPQPHTKEGVDAYNEVIARVRMWVNLNLWQKLKLSRDDAKPLLRLKGFPSFPLVERQANEVDWWDMVCNVKKLINEKKEDGKVFWQNLAGYKRQEALRPYLSSEEDRKKGKKFARYQLGDLLLHLEKKHGEDWGKVYDEAWERIDKKVEGLSKHIKLEEERRSEDAQSKAALTDWLRAKASFVIEGLKEADKDEFCRCELKLQKWYGDLRGKPFAIEAENSILDISGFSKQYNCAFIWQKDGVKKLNLYLIINYFKGGKLRFKKIKPEAFEANRFYTVINKKSGEIVPMEVNFNFDDPNLIILPLAFGKRQGREFIWNDLLSLETGSLKLANGRVIEKTLYNRRTRQDEPALFVALTFERREVLDSSNIKPMNLIGVDRGENIPAVIALTDPEGCPLSRFKDSLGNPTHILRIGESYKEKQRTIQAKKEVEQRRAGGYSRKYASKAKNLADDMVRNTARDLLYYAVTQDAMLIFENLSRGFGRQGKRTFMAERQYTRMEDWLTAKLAYEGLPSKTYLSKTLAQYTSKTCSNCGFTITSADYDRVLEKLKKTATGWMTTINGKELKVEGQITYYNRYKRQNVVKDLSVELDRLSEESVNNDISSWTKGRSGEALSLLKKRFSHRPVQEKFVCLNCGFETHADEQAALNIARSWLFLRSQEYKKYQTNKTSTGNTDKRAFVETWQSFYRKKLKEVWKPAV

SEQ ID NO: 39758 - protein, 979 aa, synthetic construct
  REGION 1..979: note = engineered CasX variant
QEIKRINKIRRRLVKDSNTKKAGKTGPMKTLLVPVMTPDLRERLENLRKKPENIPQPISNTSRANLNKLLTDYTEMKKAILHVYWEEFQKDPVGLMSRVAQPASKKIDQNKLKPEMDEKGNLTTAGFACSQCGQPLFVYKLEQVSEKGKAYTNYFGRCNVAEHEKLILLAQLKPEKDSDEAVTYSLGKFGQRALDFYSIHVTKESTHPVKPLAQIAGNRYASGPVGKALRDACMGTIASFLSKYQDIIIEHQKVVKGNQKRLESLRELAGKENLEYPSVTLPPQPHTKEGVDAYNEVIARVRMWVNLNLWQKLKLSRDDAKPLLRLKGFPSFPLVERQANEVDWWDMVCNVKKLINEKKEDGKVFWQNLAGYKRQEALRPYLSSEEDRKKGKKFARYQLGDLLLHLEKKHGEDWGKVYDEAWERIDKKVEGLSKHIKLEEERRSEDAQSKAALTDWLRAKASFVIEGLKEADKDEFCRCELKLQKWYGDLRGKPFAIEAENSILDISGFSKQYNCAFIWQKDGVKKLNLYLIINYFKGGKLRFKKIKPEAFEANRFYTVINKKSGEIVPMEVNFNFDDPNLIILPLAFGKRQGREFIWNDLLSLETGSLKLANGRVIEKTLYNRRTRQDEPALFVALTFERREVLDSSNIKPMNLIGVDRGENIPAVIALTDPEGCPLSRFKDSLGNPTHILRIGESYKEKQRTIQAKKEVEQRRAGGYSRKYASKAKNLADDMVRNTARDLLYYAVTQDAMLIFENLSRGFGRQGKRTFMAERQYTRMEDWLTAKLAYEGLPSKTYLSKTLAQYTSKTCSNCGFTITSADYDRVLEKLKKTATGWMTTINGKELKVEGQITYYNRYKRQNVVKDLSVELDRLSEESVNNDISSWTKGRSGEALSLLKKRFSHRPVQEKFVCLNCGFETHADEQAALNIARSWLFLRSQEYKKYQTNKTTGKNTDKRAFVETWQSFYRKKLKEVWKPAV

SEQ ID NO: 39759 - protein, 978 aa, synthetic construct
  REGION 1..978: note = engineered CasX variant
QEIKRINKIRRRLVKDSNTKKAGKTGPMKTLLVPVMTPDLRERLENLRKKPENIPQPISNTSRANLNKLLTDYTEMKKAILHVYWEEFQKDPVGLMSRVAQPASKKIDQNKLKPEMDEKGNLTTAGFACSQCGQPLFVYKLEQVSEKGKAYTNYFGRCNVAEHEKLILLAQLKPEKDSDEAVTYSLGKFGQRALDFYSIHVTKESTHPVKPLAQIAGNRYASGPVGKALRDACMGTIASFLSKYQDIIIEHQKVVKGNQKRLESLRELAGKENLEYPSVTLPPQPHTKEGVDAYNEVIARVRMWVNLNLWQKLKLSRDDAKPLLRLKKFPSFPLVERQANEVDWWDMVCNVKKLINEKKEDGKVFWQNLAGYKRQEALRPYLSSEEDRKKGKKFARYQLGDLLLHLEKKHGEDWGKVYDEAWERIDKKVEGLSKHIKLEEERRSEDAQSKAALTDWLRAKASFVIEGLKEADKDEFCRCELKLQKWYGDLRGKPFAIEAENSILDISGFSKQYNCAFIWQKDGVKKLNLYLIINYFKGGKLRFKKIKPEAFEANRFYTVINKKSGEIVPMEVNFNFDDPNLIILPLAFGKRQGREFIWNDLLSLETGSLKLANGRVIEKTLYNRRTRQDEPALFVALTFERREVLDSSNIKPMNLIGVDRGENIPAVIALTDPEGCPLSRFKDSLGNPTHILRIGESYKEKQRTIQAKKEVEQRRAGGYSRKYASKAKNLADDMVRNTARDLLYYAVTQDAMLIFENLSRGFGRQGKRTFMAERQYTRMEDWLTAKLAYEGLPSKTYLSKTLAQYTSKTCSNCGFTITSADYDRVLEKLKKTATGWMTTINGKELKVEGQITYYNRYKRQNVVKDLSVELDRLSEESVNNDISSWTKGRSGEALSLLKKRFSHRPVQEKFVCLNCGFETHADEQAALNIARSWLFLRSQEYKKYQTNKTTGNTDKRAFVETWQSFYRKKLKEVWKPAV

SEQ ID NO: 39760 - protein, 978 aa, synthetic construct
  REGION 1..978: note = engineered CasX variant
QEIKRINKIRRRLVKDSNTKKAGKTGPMKTLLVPVMTPDLRERLENLRKKPENIPQPISNTSRANLNKLLTDYTEMKKAILHVYWEEFQKDPVGLMSRVAQPASKKIDQNKLKPEMDEKGNLTTAGFACSQCGQPLFVYKLEQVSEKGKAYTNYFGRCNVAEHEKLILLAQLKPEKDSDEAVTYSLGKFGQRALDFYSIHVTKESTHPVKPLAQIAGNRYASGPVGKALRDACMGTIASFLSKYQDIIIEHQKVVKGNQKRLESLRELAGKENLEYPSVTLPPQPHTKEGVDAYNEVIARVRMWVNLNLWQKLKLSRDDAKPLLRLKGFPSFPLVERQANEVDWWDMVCNVKKLINEKKEDGKVFWQNLAGYKRQEALRPYLSSEEDRKKGKKFARYQLGDLLLHLEKKHGEDWGKVYDEAWERIDKKVEGLSKHIKLEEERRSEDAQSKAALTDWLRAKASFVIEGLKEADKDEFCRCELKLQKWYGDLRGKPFAIEAENSILDISGFSKQYNCAFIWQKDGVKKLNLYLIINYFKGGKLRFKKIKPEAFEANRFYTVINKKSGEIVPMEVNFNFDDPNLIILPLAFGKRQGREFIWNDLLSLETGSLKLANGRVIEKTLYNRRTRQDEPALFVALTFERREVLDSSNIKPMNLIGVDRGENIPAVIALTDPEGCPLSRFKDSLGNPTHILRIGERYKEKQRTIQAKKEVEQRRAGGYSRKYASKAKNLADDMVRNTARDLLYYAVTQDAMLIFENLSRGFGRQGKRTFMAERQYTRMEDWLTAKLAYEGLPSKTYLSKTLAQYTSKTCSNCGFTITSADYDRVLEKLKKTATGWMTTINGKELKVEGQITYYNRYKRQNVVKDLSVELDRLSEESVNNDISSWTKGRSGEALSLLKKRFSHRPVQEKFVCLNCGFETHADEQAALNIARSWLFLRSQEYKKYQTNKTTGNTDKRAFVETWQSFYRKKLKEVWKPAV

SEQ ID NO: 39761 - protein, 978 aa, synthetic construct
  REGION 1..978: note = engineered CasX variant
QEIKRINKIRRRLVKDSNTKKAGKTGPMKTLLVPVMTPDLRERLENLRKKPENIPQPISNTSRANLNKLLTDYTEMKKAILHVYWEEFQKDPVGLMSRVAQPASKKIDQNKLKPEMDEKGNLTTAGFACSQCGQPLFVYKLEQVSEKGKAYTNYFGRCNVAEHEKLILLAQLKPEKDSDEAVTYSLGKFGQRALDFYSIHVTKESTHPVKPLAQIAGNRYASGPVGKALRDACMGTIASFLSKYQDIIIEHQKVVKGNQKRLESLRELAGKENLEYPSVTLPPQPHTKEGVDAYNEVIARVRMWVNLNLWQKLKLSRDDAKPLLRLKGFPSFPLVERQANEVDWWDMVCNVKKLINEKKEDGKVFWQNLAGYKRQEALRPYLSSEEDRKKGKKFARYQLGDLLLHLEKKHGEDWGKVYDEAWERIDKKVEGLSKHIKLEEERRSEDAQSKAALTDWLRAKASFVIEGLKEADKDEFCRCELKLQKWYGDLRGKPFAIEAENSILDISGFSKQYNCAFIWQKDGVKKLNLYLIINYFKGGKLRFKKIKPEAFEANRFYTVINKKSGEIVPMEVNFNFDDPNLIILPLAFGKRQGREFIWNDLLSLETGSLQLANGRVIEKTLYNRRTRQDEPALFVALTFERREVLDSSNIKPMNLIGVDRGENIPAVIALTDPEGCPLSRFKDSLGNPTHILRIGESYKEKQRTIQAKKEVEQRRAGGYSRKYASKAKNLADDMVRNTARDLLYYAVTQDAMLIFENLSRGFGRQGKRTFMAERQYTRMEDWLTAKLAYEGLPSKTYLSKTLAQYTSKTCSNCGFTITSADYDRVLEKLKKTATGWMTTINGKELKVEGQITYYNRYKRQNVVKDLSVELDRLSEESVNNDISSWTKGRSGEALSLLKKRFSHRPVQEKFVCLNCGFETHADEQAALNIARSWLFLRSQEYKKYQTNKTTGNTDKRAFVETWQSFYRKKLKEVWKPAV

SEQ ID NO: 39762 - protein, 978 aa, synthetic construct
  REGION 1..978: note = engineered CasX variant
QEIKRINKIRRRLVKDSNTKKAGKTGPMKTLLVRVMTPDLRERLENLRKKPPNIPQPISNTSQANLNKLLTDYTEMKKAILHVYWEEFQKDPVGLMSRVAQPASKKIDQNKLKPEMDEKGNLTTAGFACSQCGQPLFVYKLEQVSEKGKAYTNYFGRCNVAEHEKLILLAQLKPEKDSDEAVTYSLGKFGQRALDFYSIHVTKESTHPVKPLAQIAGNRYASGPVGKALRDACMGTIASFLSKYQDIIIEHQKVVKGNQKRLESLRELAGKENLEYPSVTLPPQPHTKEGVDAYNEVIARVRMWVNLNLWQKLKLSRDDAKPLLRLKGFPSFPLVERQANEVDWWDMVCNVKKLINEKKEDGKVFWQNLAGYKRQEALRPYLSSEEDRKKGKKFARYQLGDLLLHLEKKHGEDWGKVYDEAWERIDKKVEGLSKHIKLEEERRSEDAQSKAALTDWLRAKASFVIEGLKEADKDEFCRCELKLQKWYGDLRGKPFAIEAENSILDISGFSKQYNCAFIWQKDGVKKLNLYLIINYFKGGKLRFKKIKPEAFEANRFYTVINKKSGEIVPMEVNFNFDDPNLIILPLAFGKRQGREFIWNDLLSLETGSLKLANGRVIEKTLYNRRTRQDEPALFVALTFERREVLDSSNIKPMNLIGVDRGENIPAVIALTDPEGCPLSRFKDSLGNPTHILRIGESYKEKQRTIQAKKEVEQRRAGGYSRKYASKAKNLADDMVRNTARDLLYYAVTQDAMLIFENLSRGFGRQGKRTFMAERQYTRMEDWLTAKLAYEGLPSKTYLSKTLAQYTSKTCSNCGFTITSADYDRVLEKLKKTATGWMTTINGKELKVEGQITYYNRYKRQNVVKDLSVELDRLSEESVNNDISSWTKGRSGEALSLLKKRFSHRPVQEKFVCLNCGFETHADEQAALNIARSWLFLRSQEYKKYQTNKTTGNTDKRAFVETWQSFYRKKLKEVWKPAV

SEQ ID NO: 39763 - protein, 978 aa, synthetic construct
  REGION 1..978: note = engineered CasX variant
QEIKRINKIRRRLVKDSNTKKAGKTGPMKTLLVRVMTPDLRERLENLRKKPPNIPQPISNTSRANLNKLLTDYTEMKKAILHVYDEEFQKDPVGLMSRVAQPASKKIDQNKLKPEMDEKGNLTTAGFACSQCGQPLFVYKLEQVSEKGKAYTNYFGRCNVAEHEKLILLAQLKPEKDSDEAVTYSLGKFGQRALDFYSIHVTKESTHPVKPLAQIAGNRYASGPVGKALRDACMGTIASFLSKYQDIIIEHQKVVKGNQKRLESLRELAGKENLEYPSVTLPPQPHTKEGVDAYNEVIARVRMWVNLNLWQKLKLSRDDAKPLLRLKGFPSFPLVERQANEVDWWDMVCNVKKLINEKKEDGKVFWQNLAGYKRQEALRPYLSSEEDRKKGKKFARYQLGDLLLHLEKKHGEDWGKVYDEAWERIDKKVEGLSKHIKLEEERRSEDAQSKAALTDWLRAKASFVIEGLKEADKDEFCRCELKLQKWYGDLRGKPFAIEAENSILDISGFSKQYNCAFIWQKDGVKKLNLYLIINYFKGGKLRFKKIKPEAFEANRFYTVINKKSGEIVPMEVNFNFDDPNLIILPLAFGKRQGREFIWNDLLSLETGSLKLANGRVIEKTLYNRRTRQDEPALFVALTFERREVLDSSNIKPMNLIGVDRGENIPAVIALTDPEGCPLSRFKDSLGNPTHILRIGESYKEKQRTIQAKKEVEQRRAGGYSRKYASKAKNLADDMVRNTARDLLYYAVTQDAMLIFENLSRGFGRQGKRTFMAERQYTRMEDWLTAKLAYEGLPSKTYLSKTLAQYTSKTCSNCGFTITSADYDRVLEKLKKTATGWMTTINGKELKVEGQITYYNRYKRQNVVKDLSVELDRLSEESVNNDISSWTKGRSGEALSLLKKRFSHRPVQEKFVCLNCGFETHADEQAALNIARSWLFLRSQEYKKYQTNKTTGNTDKRAFVETWQSFYRKKLKEVWKPAV

SEQ ID NO: 39764 - protein, 978 aa, synthetic construct
  REGION 1..978: note = engineered CasX variant
QEIKRINKIRRRLVKDSNTKKAGKTGPMKTLLVRVMTPDLRERLENLRKKPPNIPQPISNTSRANLNKLLTDYTEMKKAILHVYWEEFQKDPVGLMSRVAQPASKKIDQNKLKPEMDEKGNLTTAGFACSQCGQPLFVYKLEQVSEKGKAYTNYFGRCNVAEHEKLIKLAQLKPEKDSDEAVTYSLGKFGQRALDFYSIHVTKESTHPVKPLAQIAGNRYASGPVGKALRDACMGTIASFLSKYQDIIIEHQKVVKGNQKRLESLRELAGKENLEYPSVTLPPQPHTKEGVDAYNEVIARVRMWVNLNLWQKLKLSRDDAKPLLRLKGFPSFPLVERQANEVDWWDMVCNVKKLINEKKEDGKVFWQNLAGYKRQEALRPYLSSEEDRKKGKKFARYQLGDLLLHLEKKHGEDWGKVYDEAWERIDKKVEGLSKHIKLEEERRSEDAQSKAALTDWLRAKASFVIEGLKEADKDEFCRCELKLQKWYGDLRGKPFAIEAENSILDISGFSKQYNCAFIWQKDGVKKLNLYLIINYFKGGKLRFKKIKPEAFEANRFYTVINKKSGEIVPMEVNFNFDDPNLIILPLAFGKRQGREFIWNDLLSLETGSLKLANGRVIEKTLYNRRTRQDEPALFVALTFERREVLDSSNIKPMNLIGVDRGENIPAVIALTDPEGCPLSRFKDSLGNPTHILRIGESYKEKQRTIQAKKEVEQRRAGGYSRKYASKAKNLADDMVRNTARDLLYYAVTQDAMLIFENLSRGFGRQGKRTFMAERQYTRMEDWLTAKLAYEGLPSKTYLSKTLAQYTSKTCSNCGFTITSADYDRVLEKLKKTATGWMTTINGKELKVEGQITYYNRYKRQNVVKDLSVELDRLSEESVNNDISSWTKGRSGEALSLLKKRFSHRPVQEKFVCLNCGFETHADEQAALNIARSWLFLRSQEYKKYQTNKTTGNTDKRAFVETWQSFYRKKLKEVWKPAV

SEQ ID NO: 39765 - protein, 978 aa, synthetic construct
  REGION 1..978: note = engineered CasX variant
QEIKRINKIRRRLVKDSNTKKAGKTGPMKTLLVRVMTPDLRERLENLRKKPPNIPQPISNTSRANLNKLLTDYTEMKKAILHVYWEEFQKDPVGLMSRVAQPASKKIDQNKLKPEMDEKGNLTTAGFACSQCGQPLFVYKLEQVSEKGKAYTNYFGRCNVAEHEKLILLYQLKPEKDSDEAVTYSLGKFGQRALDFYSIHVTKESTHPVKPLAQIAGNRYASGPVGKALRDACMGTIASFLSKYQDIIIEHQKVVKGNQKRLESLRELAGKENLEYPSVTLPPQPHTKEGVDAYNEVIARVRMWVNLNLWQKLKLSRDDAKPLLRLKGFPSFPLVERQANEVDWWDMVCNVKKLINEKKEDGKVFWQNLAGYKRQEALRPYLSSEEDRKKGKKFARYQLGDLLLHLEKKHGEDWGKVYDEAWERIDKKVEGLSKHIKLEEERRSEDAQSKAALTDWLRAKASFVIEGLKEADKDEFCRCELKLQKWYGDLRGKPFAIEAENSILDISGFSKQYNCAFIWQKDGVKKLNLYLIINYFKGGKLRFKKIKPEAFEANRFYTVINKKSGEIVPMEVNFNFDDPNLIILPLAFGKRQGREFIWNDLLSLETGSLKLANGRVIEKTLYNRRTRQDEPALFVALTFERREVLDSSNIKPMNLIGVDRGENIPAVIALTDPEGCPLSRFKDSLGNPTHILRIGESYKEKQRTIQAKKEVEQRRAGGYSRKYASKAKNLADDMVRNTARDLLYYAVTQDAMLIFENLSRGFGRQGKRTFMAERQYTRMEDWLTAKLAYEGLPSKTYLSKTLAQYTSKTCSNCGFTITSADYDRVLEKLKKTATGWMTTINGKELKVEGQITYYNRYKRQNVVKDLSVELDRLSEESVNNDISSWTKGRSGEALSLLKKRFSHRPVQEKFVCLNCGFETHADEQAALNIARSWLFLRSQEYKKYQTNKTTGNTDKRAFVETWQSFYRKKLKEVWKPAV

SEQ ID NO: 39766 - protein, 978 aa, synthetic construct
  REGION 1..978: note = engineered CasX variant
QEIKRINKIRRRLVKDSNTKKAGKTGPMKTLLVRVMTPDLRERLENLRKKPPNIPQPISNTSRANLNKLLTDYTEMKKAILHVYWEEFQKDPVGLMSRVAQPASKKIDQNKLKPEMDEKGNLTTAGFACSQCGQPLFVYKLEQVSEKGKAYTNYFGRCNVAEHEKLILLSQLKPEKDSDEAVTYSLGKFGQRALDFYSIHVTKESTHPVKPLAQIAGNRYASGPVGKALRDACMGTIASFLSKYQDIIIEHQKVVKGNQKRLESLRELAGKENLEYPSVTLPPQPHTKEGVDAYNEVIARVRMWVNLNLWQKLKLSRDDAKPLLRLKGFPSFPLVERQANEVDWWDMVCNVKKLINEKKEDGKVFWQNLAGYKRQEALRPYLSSEEDRKKGKKFARYQLGDLLLHLEKKHGEDWGKVYDEAWERIDKKVEGLSKHIKLEEERRSEDAQSKAALTDWLRAKASFVIEGLKEADKDEFCRCELKLQKWYGDLRGKPFAIEAENSILDISGFSKQYNCAFIWQKDGVKKLNLYLIINYFKGGKLRFKKIKPEAFEANRFYTVINKKSGEIVPMEVNFNFDDPNLIILPLAFGKRQGREFIWNDLLSLETGSLKLANGRVIEKTLYNRRTRQDEPALFVALTFERREVLDSSNIKPMNLIGVDRGENIPAVIALTDPEGCPLSRFKDSLGNPTHILRIGESYKEKQRTIQAKKEVEQRRAGGYSRKYASKAKNLADDMVRNTARDLLYYAVTQDAMLIFENLSRGFGRQGKRTFMAERQYTRMEDWLTAKLAYEGLPSKTYLSKTLAQYTSKTCSNCGFTITSADYDRVLEKLKKTATGWMTTINGKELKVEGQITYYNRYKRQNVVKDLSVELDRLSEESVNNDISSWTKGRSGEALSLLKKRFSHRPVQEKFVCLNCGFETHADEQAALNIARSWLFLRSQEYKKYQTNKTTGNTDKRAFVETWQSFYRKKLKEVWKPAV

SEQ ID NO: 39767 - protein, 977 aa, synthetic construct
  REGION 1..977: note = engineered CasX variant
QEIKRINKIRRRLVKDSNTKKAGKTGPMKTLLVRVMTPDLRERLENLRKKPPNIPQPISNTSRANLNKLLTDYTEMKKAILHVYWEEFQKDPVGLMSRVAQPASKKIDQNKLKPEMDEKGNLTTAGFACSQCGQPLFVYKLEQVSEKGKAYTNYFGRCNVAEHEKLILLAQLKPEKDSDEAVTYSLGKFGQRALDFYSIHVTKESTHPVKPLAQIAGNRYASPVGKALRDACMGTIASFLSKYQDIIIEHQKVVKGNQKRLESLRELAGKENLEYPSVTLPPQPHTKEGVDAYNEVIARVRMWVNLNLWQKLKLSRDDAKPLLRLKGFPSFPLVERQANEVDWWDMVCNVKKLINEKKEDGKVFWQNLAGYKRQEALRPYLSSEEDRKKGKKFARYQLGDLLLHLEKKHGEDWGKVYDEAWERIDKKVEGLSKHIKLEEERRSEDAQSKAALTDWLRAKASFVIEGLKEADKDEFCRCELKLQKWYGDLRGKPFAIEAENSILDISGFSKQYNCAFIWQKDGVKKLNLYLIINYFKGGKLRFKKIKPEAFEANRFYTVINKKSGEIVPMEVNFNFDDPNLIILPLAFGKRQGREFIWNDLLSLETGSLKLANGRVIEKTLYNRRTRQDEPALFVALTFERREVLDSSNIKPMNLIGVDRGENIPAVIALTDPEGCPLSRFKDSLGNPTHILRIGESYKEKQRTIQAKKEVEQRRAGGYSRKYASKAKNLADDMVRNTARDLLYYAVTQDAMLIFENLSRGFGRQGKRTFMAERQYTRMEDWLTAKLAYEGLPSKTYLSKTLAQYTSKTCSNCGFTITSADYDRVLEKLKKTATGWMTTINGKELKVEGQITYYNRYKRQNVVKDLSVELDRLSEESVNNDISSWTKGRSGEALSLLKKRFSHRPVQEKFVCLNCGFETHADEQAALNIARSWLFLRSQEYKKYQTNKTTGNTDKRAFVETWQSFYRKKLKEVWKPAV

SEQ ID NO: 39768 - protein, 978 aa, synthetic construct
  REGION 1..978: note = engineered CasX variant
QEIKRINKIRRRLVKDSNTKKAGKTGPMKTLLVRVMTPDLRERLENLRKKPPNIPQPISNTSRANLNKLLTDYTEMKKAILHVYWEEFQKDPVGLMSRVAQPASKKIDQNKLKPEMDEKGNLTTAGFACSQCGQPLFVYKLEQVSEKGKAYTNYFGRCNVAEHEKLILLAQLKPEKDSDEAVTYSLGKFGQRALDFYSIHVTKESTHPVKPLAQIAGNRYASGPVGKALRDACMGTIASFLSKYQDIIIEHQKVVKGNQKRLESLRELAGKENLEYPSVTLPPQPHTSEGVDAYNEVIARVRMWVNLNLWQKLKLSRDDAKPLLRLKGFPSFPLVERQANEVDWWDMVCNVKKLINEKKEDGKVFWQNLAGYKRQEALRPYLSSEEDRKKGKKFARYQLGDLLLHLEKKHGEDWGKVYDEAWERIDKKVEGLSKHIKLEEERRSEDAQSKAALTDWLRAKASFVIEGLKEADKDEFCRCELKLQKWYGDLRGKPFAIEAENSILDISGFSKQYNCAFIWQKDGVKKLNLYLIINYFKGGKLRFKKIKPEAFEANRFYTVINKKSGEIVPMEVNFNFDDPNLIILPLAFGKRQGREFIWNDLLSLETGSLKLANGRVIEKTLYNRRTRQDEPALFVALTFERREVLDSSNIKPMNLIGVDRGENIPAVIALTDPEGCPLSRFKDSLGNPTHILRIGESYKEKQRTIQAKKEVEQRRAGGYSRKYASKAKNLADDMVRNTARDLLYYAVTQDAMLIFENLSRGFGRQGKRTFMAERQYTRMEDWLTAKLAYEGLPSKTYLSKTLAQYTSKTCSNCGFTITSADYDRVLEKLKKTATGWMTTINGKELKVEGQITYYNRYKRQNVVKDLSVELDRLSEESVNNDISSWTKGRSGEALSLLKKRFSHRPVQEKFVCLNCGFETHADEQAALNIARSWLFLRSQEYKKYQTNKTTGNTDKRAFVETWQSFYRKKLKEVWKPAV

SEQ ID NO: 39769 - protein, 978 aa, synthetic construct
  REGION 1..978: note = engineered CasX variant
QEIKRINKIRRRLVKDSNTKKAGKTGPMKTLLVRVMTPDLRERLENLRKKPPNIPQPISNTSRANLNKLLTDYTEMKKAILHVYWEEFQKDPVGLMSRVAQPASKKIDQNKLKPEMDEKGNLTTAGFACSQCGQPLFVYKLEQVSEKGKAYTNYFGRCNVAEHEKLILLAQLKPEKDSDEAVTYSLGKFGQRALDFYSIHVTKESTHPVKPLAQIAGNRYASGPVGKALRDACMGTIASFLSKYQDIIIEHQKVVKGNQKRLESLRELAGKENLEYPSVTLPPQPHTKEGLDAYNEVIARVRMWVNLNLWQKLKLSRDDAKPLLRLKGFPSFPLVERQANEVDWWDMVCNVKKLINEKKEDGKVFWQNLAGYKRQEALRPYLSSEEDRKKGKKFARYQLGDLLLHLEKKHGEDWGKVYDEAWERIDKKVEGLSKHIKLEEERRSEDAQSKAALTDWLRAKASFVIEGLKEADKDEFCRCELKLQKWYGDLRGKPFAIEAENSILDISGFSKQYNCAFIWQKDGVKKLNLYLIINYFKGGKLRFKKIKPEAFEANRFYTVINKKSGEIVPMEVNFNFDDPNLIILPLAFGKRQGREFIWNDLLSLETGSLKLANGRVIEKTLYNRRTRQDEPALFVALTFERREVLDSSNIKPMNLIGVDRGENIPAVIALTDPEGCPLSRFKDSLGNPTHILRIGESYKEKQRTIQAKKEVEQRRAGGYSRKYASKAKNLADDMVRNTARDLLYYAVTQDAMLIFENLSRGFGRQGKRTFMAERQYTRMEDWLTAKLAYEGLPSKTYLSKTLAQYTSKTCSNCGFTITSADYDRVLEKLKKTATGWMTTINGKELKVEGQITYYNRYKRQNVVKDLSVELDRLSEESVNNDISSWTKGRSGEALSLLKKRFSHRPVQEKFVCLNCGFETHADEQAALNIARSWLFLRSQEYKKYQTNKTTGNTDKRAFVETWQSFYRKKLKEVWKPAV

SEQ ID NO: 39770 - protein, 978 aa, synthetic construct
  REGION 1..978: note = engineered CasX variant
QEIKRINKIRRRLVKDSNTKKAGKTGPMKTLLVRVMTPDLRERLENLRKKPPNIPQPISNTSRANLNKLLTDYTEMKKAILHVYWEEFQKDPVGLMSRVAQPASKKIDQNKLKPEMDEKGNLTTAGFACSQCGQPLFVYKLEQVSEKGKAYTNYFGRCNVAEHEKLILLAQLKPEKDSDEAVTYSLGKFGQRALDFYSIHVTKESTHPVKPLAQIAGNRYASGPVGKALRDACMGTIASFLSKYQDIIIEHQKVVKGNQKRLESLRELAGKENLEYPSVTLPPQPHTKEGVDAYNEVIARVRTWVNLNLWQKLKLSRDDAKPLLRLKGFPSFPLVERQANEVDWWDMVCNVKKLINEKKEDGKVFWQNLAGYKRQEALRPYLSSEEDRKKGKKFARYQLGDLLLHLEKKHGEDWGKVYDEAWERIDKKVEGLSKHIKLEEERRSEDAQSKAALTDWLRAKASFVIEGLKEADKDEFCRCELKLQKWYGDLRGKPFAIEAENSILDISGFSKQYNCAFIWQKDGVKKLNLYLIINYFKGGKLRFKKIKPEAFEANRFYTVINKKSGEIVPMEVNFNFDDPNLIILPLAFGKRQGREFIWNDLLSLETGSLKLANGRVIEKTLYNRRTRQDEPALFVALTFERREVLDSSNIKPMNLIGVDRGENIPAVIALTDPEGCPLSRFKDSLGNPTHILRIGESYKEKQRTIQAKKEVEQRRAGGYSRKYASKAKNLADDMVRNTARDLLYYAVTQDAMLIFENLSRGFGRQGKRTFMAERQYTRMEDWLTAKLAYEGLPSKTYLSKTLAQYTSKTCSNCGFTITSADYDRVLEKLKKTATGWMTTINGKELKVEGQITYYNRYKRQNVVKDLSVELDRLSEESVNNDISSWTKGRSGEALSLLKKRFSHRPVQEKFVCLNCGFETHADEQAALNIARSWLFLRSQEYKKYQTNKTTGNTDKRAFVETWQSFYRKKLKEVWKPAV

SEQ ID NO: 39771 - protein, 978 aa, synthetic construct
  REGION 1..978: note = engineered CasX variant
QEIKRINKIRRRLVKDSNTKKAGKTGPMKTLLVRVMTPDLRERLENLRKKPPNIPQPISNTSRANLNKLLTDYTEMKKAILHVYWEEFQKDPVGLMSRVAQPASKKIDQNKLKPEMDEKGNLTTAGFACSQCGQPLFVYKLEQVSEKGKAYTNYFGRCNVAEHEKLILLAQLKPEKDSDEAVTYSLGKFGQRALDFYSIHVTKESTHPVKPLAQIAGNRYASGPVGKALRDACMGTIASFLSKYQDIIIEHQKVVKGNQKRLESLRELAGKENLEYPSVTLPPQPHTKEGVDAYNEVIARVRWWVNLNLWQKLKLSRDDAKPLLRLKGFPSFPLVERQANEVDWWDMVCNVKKLINEKKEDGKVFWQNLAGYKRQEALRPYLSSEEDRKKGKKFARYQLGDLLLHLEKKHGEDWGKVYDEAWERIDKKVEGLSKHIKLEEERRSEDAQSKAALTDWLRAKASFVIEGLKEADKDEFCRCELKLQKWYGDLRGKPFAIEAENSILDISGFSKQYNCAFIWQKDGVKKLNLYLIINYFKGGKLRFKKIKPEAFEANRFYTVINKKSGEIVPMEVNFNFDDPNLIILPLAFGKRQGREFIWNDLLSLETGSLKLANGRVIEKTLYNRRTRQDEPALFVALTFERREVLDSSNIKPMNLIGVDRGENIPAVIALTDPEGCPLSRFKDSLGNPTHILRIGESYKEKQRTIQAKKEVEQRRAGGYSRKYASKAKNLADDMVRNTARDLLYYAVTQDAMLIFENLSRGFGRQGKRTFMAERQYTRMEDWLTAKLAYEGLPSKTYLSKTLAQYTSKTCSNCGFTITSADYDRVLEKLKKTATGWMTTINGKELKVEGQITYYNRYKRQNVVKDLSVELDRLSEESVNNDISSWTKGRSGEALSLLKKRFSHRPVQEKFVCLNCGFETHADEQAALNIARSWLFLRSQEYKKYQTNKTTGNTDKRAFVETWQSFYRKKLKEVWKPAV

SEQ ID NO: 39772 - protein, 979 aa, synthetic construct
  REGION 1..979: note = engineered CasX variant
QEIKRINKIRRRLVKDSNTKKAGKTGPMKTLLVRVMTPDLRERLENLRKKPPNIPQPISNTSRANLNKLLTDYTEMKKAILHVYWEEFQKDPVGLMSRVAQPASKKIDQNKLKPEMDEKGNLTTAGFACSQCGQPLFVYKLEQVSEKGKAYTNYFGRCNVAEHEKLILLAQLKPEKDSDEAVTYSLGKFGQRALDFYSIHVTKESTHPVKPLAQIAGNRYASGPVGKALRDACMGTIASFLSKYQDIIIEHQKVVKGNQKRLESLRELAGKENLEYPSVTLPPQPHTKEGVDAYNEVIARVRMWVNLNLWQKLKLSRDDAKPLLRLKGFPSFPLVERQQANEVDWWDMVCNVKKLINEKKEDGKVFWQNLAGYKRQEALRPYLSSEEDRKKGKKFARYQLGDLLLHLEKKHGEDWGKVYDEAWERIDKKVEGLSKHIKLEEERRSEDAQSKAALTDWLRAKASFVIEGLKEADKDEFCRCELKLQKWYGDLRGKPFAIEAENSILDISGFSKQYNCAFIWQKDGVKKLNLYLIINYFKGGKLRFKKIKPEAFEANRFYTVINKKSGEIVPMEVNFNFDDPNLIILPLAFGKRQGREFIWNDLLSLETGSLKLANGRVIEKTLYNRRTRQDEPALFVALTFERREVLDSSNIKPMNLIGVDRGENIPAVIALTDPEGCPLSRFKDSLGNPTHILRIGESYKEKQRTIQAKKEVEQRRAGGYSRKYASKAKNLADDMVRNTARDLLYYAVTQDAMLIFENLSRGFGRQGKRTFMAERQYTRMEDWLTAKLAYEGLPSKTYLSKTLAQYTSKTCSNCGFTITSADYDRVLEKLKKTATGWMTTINGKELKVEGQITYYNRYKRQNVVKDLSVELDRLSEESVNNDISSWTKGRSGEALSLLKKRFSHRPVQEKFVCLNCGFETHADEQAALNIARSWLFLRSQEYKKYQTNKTTGNTDKRAFVETWQSFYRKKLKEVWKPAV

SEQ ID NO: 39773 - protein, 979 aa, synthetic construct
  REGION 1..979: note = engineered CasX variant
QEIKRINKIRRRLVKDSNTKKAGKTGPMKTLLVRVMTPDLRERLENLRKKPPNIPQPISNTSRANLNKLLTDYTEMKKAILHVYWEEFQKDPVGLMSRVAQPASKKIDQNKLKPEMDEKGNLTTAGFACSQCGQPLFVYKLEQVSEKGKAYTNYFGRCNVAEHEKLILLAQLKPEKDSDEAVTYSLGKFGQRALDFYSIHVTKESTHPVKPLAQIAGNRYASGPVGKALRDACMGTIASFLSKYQDIIIEHQKVVKGNQKRLESLRELAGKENLEYPSVTLPPQPHTKEGVDAYNEVIARVRMWVNLNLWQKLKLSRDDAKPLLRLKGFPSFPLVERQANAEVDWWDMVCNVKKLINEKKEDGKVFWQNLAGYKRQEALRPYLSSEEDRKKGKKFARYQLGDLLLHLEKKHGEDWGKVYDEAWERIDKKVEGLSKHIKLEEERRSEDAQSKAALTDWLRAKASFVIEGLKEADKDEFCRCELKLQKWYGDLRGKPFAIEAENSILDISGFSKQYNCAFIWQKDGVKKLNLYLIINYFKGGKLRFKKIKPEAFEANRFYTVINKKSGEIVPMEVNFNFDDPNLIILPLAFGKRQGREFIWNDLLSLETGSLKLANGRVIEKTLYNRRTRQDEPALFVALTFERREVLDSSNIKPMNLIGVDRGENIPAVIALTDPEGCPLSRFKDSLGNPTHILRIGESYKEKQRTIQAKKEVEQRRAGGYSRKYASKAKNLADDMVRNTARDLLYYAVTQDAMLIFENLSRGFGRQGKRTFMAERQYTRMEDWLTAKLAYEGLPSKTYLSKTLAQYTSKTCSNCGFTITSADYDRVLEKLKKTATGWMTTINGKELKVEGQITYYNRYKRQNVVKDLSVELDRLSEESVNNDISSWTKGRSGEALSLLKKRFSHRPVQEKFVCLNCGFETHADEQAALNIARSWLFLRSQEYKKYQTNKTTGNTDKRAFVETWQSFYRKKLKEVWKPAV

SEQ ID NO: 39774 - protein, 978 aa, synthetic construct
  REGION 1..978: note = engineered CasX variant
QEIKRINKIRRRLVKDSNTKKAGKTGPMKTLLVRVMTPDLRERLENLRKKPPNIPQPISNTSRANLNKLLTDYTEMKKAILHVYWEEFQKDPVGLMSRVAQPASKKIDQNKLKPEMDEKGNLTTAGFACSQCGQPLFVYKLEQVSEKGKAYTNYFGRCNVAEHEKLILLAQLKPEKDSDEAVTYSLGKFGQRALDFYSIHVTKESTHPVKPLAQIAGNRYASGPVGKALRDACMGTIASFLSKYQDIIIEHQKVVKGNQKRLESLRELAGKENLEYPSVTLPPQPHTKEGVDAYNEVIARVRMWVNLNLWQKLKLSRDDAKPLLRLKGFPSFPLVERQANEVDWWDMVCNVKKLINEKKEDGKVFWQNLAGYKRQEALRPYLSSEEDRKKGKKFARTQLGDLLLHLEKKHGEDWGKVYDEAWERIDKKVEGLSKHIKLEEERRSEDAQSKAALTDWLRAKASFVIEGLKEADKDEFCRCELKLQKWYGDLRGKPFAIEAENSILDISGFSKQYNCAFIWQKDGVKKLNLYLIINYFKGGKLRFKKIKPEAFEANRFYTVINKKSGEIVPMEVNFNFDDPNLIILPLAFGKRQGREFIWNDLLSLETGSLKLANGRVIEKTLYNRRTRQDEPALFVALTFERREVLDSSNIKPMNLIGVDRGENIPAVIALTDPEGCPLSRFKDSLGNPTHILRIGESYKEKQRTIQAKKEVEQRRAGGYSRKYASKAKNLADDMVRNTARDLLYYAVTQDAMLIFENLSRGFGRQGKRTFMAERQYTRMEDWLTAKLAYEGLPSKTYLSKTLAQYTSKTCSNCGFTITSADYDRVLEKLKKTATGWMTTINGKELKVEGQITYYNRYKRQNVVKDLSVELDRLSEESVNNDISSWTKGRSGEALSLLKKRFSHRPVQEKFVCLNCGFETHADEQAALNIARSWLFLRSQEYKKYQTNKTTGNTDKRAFVETWQSFYRKKLKEVWKPAV

SEQ ID NO: 39775 - protein, 979 aa, synthetic construct
  REGION 1..979: note = engineered CasX variant
QEIKRINKIRRRLVKDSNTKKAGKTGPMKTLLVRVMTPDLRERLENLRKKPPNIPQPISNTSRANLNKLLTDYTEMKKAILHVYWEEFQKDPVGLMSRVAQPASKKIDQNKLKPEMDEKGNLTTAGFACSQCGQPLFVYKLEQVSEKGKAYTNYFGRCNVAEHEKLILLAQLKPEKDSDEAVTYSLGKFGQRALDFYSIHVTKESTHPVKPLAQIAGNRYASGPVGKALRDACMGTIASFLSKYQDIIIEHQKVVKGNQKRLESLRELAGKENLEYPSVTLPPQPHTKEGVDAYNEVIARVRMWVNLNLWQKLKLSRDDAKPLLRLKGFPSFPLVERQANEVDWWDMVCNVKKLINEKKEDGKVFWQNLAGYKRQEALRPYLSSEEDRKKGKKFARYQLGDLLLHLEKKHEGEDWGKVYDEAWERIDKKVEGLSKHIKLEEERRSEDAQSKAALTDWLRAKASFVIEGLKEADKDEFCRCELKLQKWYGDLRGKPFAIEAENSILDISGFSKQYNCAFIWQKDGVKKLNLYLIINYFKGGKLRFKKIKPEAFEANRFYTVINKKSGEIVPMEVNFNFDDPNLIILPLAFGKRQGREFIWNDLLSLETGSLKLANGRVIEKTLYNRRTRQDEPALFVALTFERREVLDSSNIKPMNLIGVDRGENIPAVIALTDPEGCPLSRFKDSLGNPTHILRIGESYKEKQRTIQAKKEVEQRRAGGYSRKYASKAKNLADDMVRNTARDLLYYAVTQDAMLIFENLSRGFGRQGKRTFMAERQYTRMEDWLTAKLAYEGLPSKTYLSKTLAQYTSKTCSNCGFTITSADYDRVLEKLKKTATGWMTTINGKELKVEGQITYYNRYKRQNVVKDLSVELDRLSEESVNNDISSWTKGRSGEALSLLKKRFSHRPVQEKFVCLNCGFETHADEQAALNIARSWLFLRSQEYKKYQTNKTTGNTDKRAFVETWQSFYRKKLKEVWKPAV

SEQ ID NO: 39776 - protein, 978 aa, synthetic construct
  REGION 1..978: note = engineered CasX variant
QEIKRINKIRRRLVKDSNTKKAGKTGPMKTLLVRVMTPDLRERLENLRKKPPNIPQPISNTSRANLNKLLTDYTEMKKAILHVYWEEFQKDPVGLMSRVAQPASKKIDQNKLKPEMDEKGNLTTAGFACSQCGQPLFVYKLEQVSEKGKAYTNYFGRCNVAEHEKLILLAQLKPEKDSDEAVTYSLGKFGQRALDFYSIHVTKESTHPVKPLAQIAGNRYASGPVGKALRDACMGTIASFLSKYQDIIIEHQKVVKGNQKRLESLRELAGKENLEYPSVTLPPQPHTKEGVDAYNEVIARVRMWVNLNLWQKLKLSRDDAKPLLRLKGFPSFPLVERQANEVDWWDMVCNVKKLINEKKEDGKVFWQNLAGYKRQEALRPYLSSEEDRKKGKKFARYQLGDLLLHLEKKHGEDWGKVYDEAWERIDKKVEGLSKHIKLEEERRSEDAQSKAALTDWLRAKASFVIEGLKEADKDEFCRCDLKLQKWYGDLRGKPFAIEAENSILDISGFSKQYNCAFIWQKDGVKKLNLYLIINYFKGGKLRFKKIKPEAFEANRFYTVINKKSGEIVPMEVNFNFDDPNLIILPLAFGKRQGREFIWNDLLSLETGSLKLANGRVIEKTLYNRRTRQDEPALFVALTFERREVLDSSNIKPMNLIGVDRGENIPAVIALTDPEGCPLSRFKDSLGNPTHILRIGESYKEKQRTIQAKKEVEQRRAGGYSRKYASKAKNLADDMVRNTARDLLYYAVTQDAMLIFENLSRGFGRQGKRTFMAERQYTRMEDWLTAKLAYEGLPSKTYLSKTLAQYTSKTCSNCGFTITSADYDRVLEKLKKTATGWMTTINGKELKVEGQITYYNRYKRQNVVKDLSVELDRLSEESVNNDISSWTKGRSGEALSLLKKRFSHRPVQEKFVCLNCGFETHADEQAALNIARSWLFLRSQEYKKYQTNKTTGNTDKRAFVETWQSFYRKKLKEVWKPAV

SEQ ID NO: 39777 - protein, 978 aa, synthetic construct
  REGION 1..978: note = engineered CasX variant
QEIKRINKIRRRLVKDSNTKKAGKTGPMKTLLVRVMTPDLRERLENLRKKPPNIPQPISNTSRANLNKLLTDYTEMKKAILHVYWEEFQKDPVGLMSRVAQPASKKIDQNKLKPEMDEKGNLTTAGFACSQCGQPLFVYKLEQVSEKGKAYTNYFGRCNVAEHEKLILLAQLKPEKDSDEAVTYSLGKFGQRALDFYSIHVTKESTHPVKPLAQIAGNRYASGPVGKALRDACMGTIASFLSKYQDIIIEHQKVVKGNQKRLESLRELAGKENLEYPSVTLPPQPHTKEGVDAYNEVIARVRMWVNLNLWQKLKLSRDDAKPLLRLKGFPSFPLVERQANEVDWWDMVCNVKKLINEKKEDGKVFWQNLAGYKRQEALRPYLSSEEDRKKGKKFARYQLGDLLLHLEKKHGEDWGKVYDEAWERIDKKVEGLSKHIKLEEERRSEDAQSKAALTDWLRAKASFVIEGLKEADKDEFCRCELKLQKWYGDLRGKPFAIEAENSILDISGFSKQYNCAFIWQKDGVKKLNLYLIINYFKGGKLRFKKIKPEAFEANRFYTVINKKSGEIVPMEVNFNFDDPNLIILPLAFGKRFGREFIWNDLLSLETGSLKLANGRVIEKTLYNRRTRQDEPALFVALTFERREVLDSSNIKPMNLIGVDRGENIPAVIALTDPEGCPLSRFKDSLGNPTHILRIGESYKEKQRTIQAKKEVEQRRAGGYSRKYASKAKNLADDMVRNTARDLLYYAVTQDAMLIFENLSRGFGRQGKRTFMAERQYTRMEDWLTAKLAYEGLPSKTYLSKTLAQYTSKTCSNCGFTITSADYDRVLEKLKKTATGWMTTINGKELKVEGQITYYNRYKRQNVVKDLSVELDRLSEESVNNDISSWTKGRSGEALSLLKKRFSHRPVQEKFVCLNCGFETHADEQAALNIARSWLFLRSQEYKKYQTNKTTGNTDKRAFVETWQSFYRKKLKEVWKPAV

SEQ ID NO: 39778 - protein, 978 aa, synthetic construct
  REGION 1..978: note = engineered CasX variant
QEIKRINKIRRRLVKDSNTKKAGKTGPMKTLLVRVMTPDLRERLENLRKKPPNIPQPISNTSRANLNKLLTDYTEMKKAILHVYWEEFQKDPVGLMSRVAQPASKKIDQNKLKPEMDEKGNLTTAGFACSQCGQPLFVYKLEQVSEKGKAYTNYFGRCNVAEHEKLILLAQLKPEKDSDEAVTYSLGKFGQRALDFYSIHVTKESTHPVKPLAQIAGNRYASGPVGKALRDACMGTIASFLSKYQDIIIEHQKVVKGNQKRLESLRELAGKENLEYPSVTLPPQPHTKEGVDAYNEVIARVRMWVNLNLWQKLKLSRDDAKPLLRLKGFPSFPLVERQANEVDWWDMVCNVKKLINEKKEDGKVFWQNLAGYKRQEALRPYLSSEEDRKKGKKFARYQLGDLLLHLEKKHGEDWGKVYDEAWERIDKKVEGLSKHIKLEEERRSEDAQSKAALTDWLRAKASFVIEGLKEADKDEFCRCELKLQKWYGDLRGKPFAIEAENSILDISGFSKQYNCAFIWQKDGVKKLNLYLIINYFKGGKLRFKKIKPEAFEANRFYTVINKKSGEIVPMEVNFNFDDPNLIILPLAFGKRVGREFIWNDLLSLETGSLKLANGRVIEKTLYNRRTRQDEPALFVALTFERREVLDSSNIKPMNLIGVDRGENIPAVIALTDPEGCPLSRFKDSLGNPTHILRIGESYKEKQRTIQAKKEVEQRRAGGYSRKYASKAKNLADDMVRNTARDLLYYAVTQDAMLIFENLSRGFGRQGKRTFMAERQYTRMEDWLTAKLAYEGLPSKTYLSKTLAQYTSKTCSNCGFTITSADYDRVLEKLKKTATGWMTTINGKELKVEGQITYYNRYKRQNVVKDLSVELDRLSEESVNNDISSWTKGRSGEALSLLKKRFSHRPVQEKFVCLNCGFETHADEQAALNIARSWLFLRSQEYKKYQTNKTTGNTDKRAFVETWQSFYRKKLKEVWKPAV

SEQ ID NO: 39779 - protein, 979 aa, synthetic construct
  REGION 1..979: note = engineered CasX variant
QEIKRINKIRRRLVKDSNTKKAGKTGPMKTLLVRVMTPDLRERLENLRKKPPNIPQPISNTSRANLNKLLTDYTEMKKAILHVYWEEFQKDPVGLMSRVAQPASKKIDQNKLKPEMDEKGNLTTAGFACSQCGQPLFVYKLEQVSEKGKAYTNYFGRCNVAEHEKLILLAQLKPEKDSDEAVTYSLGKFGQRALDFYSIHVTKESTHPVKPLAQIAGNRYASGPVGKALRDACMGTIASFLSKYQDIIIEHQKVVKGNQKRLESLRELAGKENLEYPSVTLPPQPHTKEGVDAYNEVIARVRMWVNLNLWQKLKLSRDDAKPLLRLKGFPSFPLVERQANEVDWWDMVCNVKKLINEKKEDGKVFWQNLAGYKRQEALRPYLSSEEDRKKGKKFARYQLGDLLLHLEKKHGEDWGKVYDEAWERIDKKVEGLSKHIKLEEERRSEDAQSKAALTDWLRAKASFVIEGLKEADKDEFCRCELKLQKWYGDLRGKPFAIEAENSILDISGFSKQYNCAFIWQKDGVKKLNLYLIINYFKGGKLRFKKIKPEAFEANRFYTVINKKSGEIVPMEVNFNFDDPNLIILPLAFGKRQGREFIWNDLLSLETGSLKLANGRVIEKTLYNRRTRQDEPALFVALTFERREVLDSSNIKTPMNLIGVDRGENIPAVIALTDPEGCPLSRFKDSLGNPTHILRIGESYKEKQRTIQAKKEVEQRRAGGYSRKYASKAKNLADDMVRNTARDLLYYAVTQDAMLIFENLSRGFGRQGKRTFMAERQYTRMEDWLTAKLAYEGLPSKTYLSKTLAQYTSKTCSNCGFTITSADYDRVLEKLKKTATGWMTTINGKELKVEGQITYYNRYKRQNVVKDLSVELDRLSEESVNNDISSWTKGRSGEALSLLKKRFSHRPVQEKFVCLNCGFETHADEQAALNIARSWLFLRSQEYKKYQTNKTTGNTDKRAFVETWQSFYRKKLKEVWKPAV

SEQ ID NO: 39780 - protein, 979 aa, synthetic construct
  REGION 1..979: note = engineered CasX variant
QEIKRINKIRRRLVKDSNTKKAGKTGPMKTLLVRVMTPDLRERLENLRKKPPNIPQPISNTSRANLNKLLTDYTEMKKAILHVYWEEFQKDPVGLMSRVAQPASKKIDQNKLKPEMDEKGNLTTAGFACSQCGQPLFVYKLEQVSEKGKAYTNYFGRCNVAEHEKLILLAQLKPEKDSDEAVTYSLGKFGQRALDFYSIHVTKESTHPVKPLAQIAGNRYASGPVGKALRDACMGTIASFLSKYQDIIIEHQKVVKGNQKRLESLRELAGKENLEYPSVTLPPQPHTKEGVDAYNEVIARVRMWVNLNLWQKLKLSRDDAKPLLRLKGFPSFPLVERQANEVDWWDMVCNVKKLINEKKEDGKVFWQNLAGYKRQEALRPYLSSEEDRKKGKKFARYQLGDLLLHLEKKHGEDWGKVYDEAWERIDKKVEGLSKHIKLEEERRSEDAQSKAALTDWLRAKASFVIEGLKEADKDEFCRCELKLQKWYGDLRGKPFAIEAENSILDISGFSKQYNCAFIWQKDGVKKLNLYLIINYFKGGKLRFKKIKPEAFEANRFYTVINKKSGEIVPMEVNFNFDDPNLIILPLAFGKRQGREFIWNDLLSLETGSLKLANGRVIEKTLYNRRTRQDEPALFVALTFERREVLDSSNIKPMSNLIGVDRGENIPAVIALTDPEGCPLSRFKDSLGNPTHILRIGESYKEKQRTIQAKKEVEQRRAGGYSRKYASKAKNLADDMVRNTARDLLYYAVTQDAMLIFENLSRGFGRQGKRTFMAERQYTRMEDWLTAKLAYEGLPSKTYLSKTLAQYTSKTCSNCGFTITSADYDRVLEKLKKTATGWMTTINGKELKVEGQITYYNRYKRQNVVKDLSVELDRLSEESVNNDISSWTKGRSGEALSLLKKRFSHRPVQEKFVCLNCGFETHADEQAALNIARSWLFLRSQEYKKYQTNKTTGNTDKRAFVETWQSFYRKKLKEVWKPAV

SEQ ID NO: 39781 - protein, 978 aa, synthetic construct
  REGION 1..978: note = engineered CasX variant
QEIKRINKIRRRLVKDSNTKKAGKTGPMKTLLVRVMTPDLRERLENLRKKPPNIPQPISNTSRANLNKLLTDYTEMKKAILHVYWEEFQKDPVGLMSRVAQPASKKIDQNKLKPEMDEKGNLTTAGFACSQCGQPLFVYKLEQVSEKGKAYTNYFGRCNVAEHEKLILLAQLKPEKDSDEAVTYSLGKFGQRALDFYSIHVTKESTHPVKPLAQIAGNRYASGPVGKALRDACMGTIASFLSKYQDIIIEHQKVVKGNQKRLESLRELAGKENLEYPSVTLPPQPHTKEGVDAYNEVIARVRMWVNLNLWQKLKLSRDDAKPLLRLKGFPSFPLVERQANEVDWWDMVCNVKKLINEKKEDGKVFWQNLAGYKRQEALRPYLSSEEDRKKGKKFARYQLGDLLLHLEKKHGEDWGKVYDEAWERIDKKVEGLSKHIKLEEERRSEDAQSKAALTDWLRAKASFVIEGLKEADKDEFCRCELKLQKWYGDLRGKPFAIEAENSILDISGFSKQYNCAFIWQKDGVKKLNLYLIINYFKGGKLRFKKIKPEAFEANRFYTVINKKSGEIVPMEVNFNFDDPNLIILPLAFGKRQGREFIWNDLLSLETGSLKLANGRVIEKTLYNRRTRQDEPALFVALTFERREVLDSSNIKPMNLIGVDRGENIPAVIALTDPEGCPLSRFKDSLGNPTHILRIRESYKEKQRTIQAKKEVEQRRAGGYSRKYASKAKNLADDMVRNTARDLLYYAVTQDAMLIFENLSRGFGRQGKRTFMAERQYTRMEDWLTAKLAYEGLPSKTYLSKTLAQYTSKTCSNCGFTITSADYDRVLEKLKKTATGWMTTINGKELKVEGQITYYNRYKRQNVVKDLSVELDRLSEESVNNDISSWTKGRSGEALSLLKKRFSHRPVQEKFVCLNCGFETHADEQAALNIARSWLFLRSQEYKKYQTNKTTGNTDKRAFVETWQSFYRKKLKEVWKPAV

SEQ ID NO: 39782 - protein, 978 aa, synthetic construct
  REGION 1..978: note = engineered CasX variant
QEIKRINKIRRRLVKDSNTKKAGKTGPMKTLLVRVMTPDLRERLENLRKKPPNIPQPISNTSRANLNKLLTDYTEMKKAILHVYWEEFQKDPVGLMSRVAQPASKKIDQNKLKPEMDEKGNLTTAGFACSQCGQPLFVYKLEQVSEKGKAYTNYFGRCNVAEHEKLILLAQLKPEKDSDEAVTYSLGKFGQRALDFYSIHVTKESTHPVKPLAQIAGNRYASGPVGKALRDACMGTIASFLSKYQDIIIEHQKVVKGNQKRLESLRELAGKENLEYPSVTLPPQPHTKEGVDAYNEVIARVRMWVNLNLWQKLKLSRDDAKPLLRLKGFPSFPLVERQANEVDWWDMVCNVKKLINEKKEDGKVFWQNLAGYKRQEALRPYLSSEEDRKKGKKFARYQLGDLLLHLEKKHGEDWGKVYDEAWERIDKKVEGLSKHIKLEEERRSEDAQSKAALTDWLRAKASFVIEGLKEADKDEFCRCELKLQKWYGDLRGKPFAIEAENSILDISGFSKQYNCAFIWQKDGVKKLNLYLIINYFKGGKLRFKKIKPEAFEANRFYTVINKKSGEIVPMEVNFNFDDPNLIILPLAFGKRQGREFIWNDLLSLETGSLKLANGRVIEKTLYNRRTRQDEPALFVALTFERREVLDSSNIKPMNLIGVDRGENIPAVIALTDPEGCPLSRFKDSLGNPTHILRIGESYKEKQRTIQAKKEVEQRRAGGYSRKYASKAKNLADDMVRNTARDLLYYAVTQDAMLIFENLSRGFGRQGKRTFSAERQYTRMEDWLTAKLAYEGLPSKTYLSKTLAQYTSKTCSNCGFTITSADYDRVLEKLKKTATGWMTTINGKELKVEGQITYYNRYKRQNVVKDLSVELDRLSEESVNNDISSWTKGRSGEALSLLKKRFSHRPVQEKFVCLNCGFETHADEQAALNIARSWLFLRSQEYKKYQTNKTTGNTDKRAFVETWQSFYRKKLKEVWKPAV

SEQ ID NO: 39783 - protein, 978 aa, synthetic construct
  REGION 1..978: note = engineered CasX variant
QEIKRINKIRRRLVKDSNTKKAGKTGPMKTLLVRVMTPDLRERLENLRKKPPNIPQPISNTSRANLNKLLTDYTEMKKAILHVYWEEFQKDPVGLMSRVAQPASKKIDQNKLKPEMDEKGNLTTAGFACSQCGQPLFVYKLEQVSEKGKAYTNYFGRCNVAEHEKLILLAQLKPEKDSDEAVTYSLGKFGQRALDFYSIHVTKESTHPVKPLAQIAGNRYASGPVGKALRDACMGTIASFLSKYQDIIIEHQKVVKGNQKRLESLRELAGKENLEYPSVTLPPQPHTKEGVDAYNEVIARVRMWVNLNLWQKLKLSRDDAKPLLRLKGFPSFPLVERQANEVDWWDMVCNVKKLINEKKEDGKVFWQNLAGYKRQEALRPYLSSEEDRKKGKKFARYQLGDLLLHLEKKHGEDWGKVYDEAWERIDKKVEGLSKHIKLEEERRSEDAQSKAALTDWLRAKASFVIEGLKEADKDEFCRCELKLQKWYGDLRGKPFAIEAENSILDISGFSKQYNCAFIWQKDGVKKLNLYLIINYFKGGKLRFKKIKPEAFEANRFYTVINKKSGEIVPMEVNFNFDDPNLIILPLAFGKRQGREFIWNDLLSLETGSLKLANGRVIEKTLYNRRTRQDEPALFVALTFERREVLDSSNIKPMNLIGVDRGENIPAVIALTDPEGCPLSRFKDSLGNPTHILRIGESYKEKQRTIQAKKEVEQRRAGGYSRKYASKAKNLADDMVRNTARDLLYYAVTQDAMLIFENLSRGFGRQGKRTFMAERQYTRMEDWLTAKLAYEGLPSKTYLSKTLAQYTSKTCSNCGFTITSADYDRVLEKLKKTATGWMTTINGKELKVEGQITYYNRYKRQNVVKDLSVELDRLSEESVNNDISSWDKGRSGEALSLLKKRFSHRPVQEKFVCLNCGFETHADEQAALNIARSWLFLRSQEYKKYQTNKTTGNTDKRAFVETWQSFYRKKLKEVWKPAV

SEQ ID NO: 39784 - protein, 978 aa, synthetic construct
  REGION 1..978: note = engineered CasX variant
QEIKRINKIRRRLVKDSNTKKAGKTGPMKTLLVRVMTPDLRERLENLRKKPPNIPQPISNTSRANLNKLLTDYTEMKKAILHVYWEEFQVDPVGLMSRVAQPASKKIDQNKLKPEMDEKGNLTTAGFACSQCGQPLFVYKLEQVSEKGKAYTNYFGRCNVAEHEKLILLAQLKPEKDSDEAVTYSLGKFGQRALDFYSIHVTKESTHPVKPLAQIAGNRYASGPVGKALRDACMGTIASFLSKYQDIIIEHQKVVKGNQKRLESLRELAGKENLEYPSVTLPPQPHTKEGVDAYNEVIARVRMWVNLNLWQKLKLSRDDAKPLLRLKGFPSFPLVERQANEVDWWDMVCNVKKLINEKKEDGKVFWQNLAGYKRQEALRPYLSSEEDRKKGKKFARYQLGDLLLHLEKKHGEDWGKVYDEAWERIDKKVEGLSKHIKLEEERRSEDAQSKAALTDWLRAKASFVIEGLKEADKDEFCRCELKLQKWYGDLRGKPFAIEAENSILDISGFSKQYNCAFIWQKDGVKKLNLYLIINYFKGGKLRFKKIKPEAFEANRFYTVINKKSGEIVPMEVNFNFDDPNLIILPLAFGKRQGREFIWNDLLSLETGSLKLANGRVIEKTLYNRRTRQDEPALFVALTFERREVLDSSNIKPMNLIGVDRGENIPAVIALTDPEGCPLSRFKDSLGNPTHILRIGESYKEKQRTIQAKKEVEQRRAGGYSRKYASKAKNLADDMVRNTARDLLYYAVTQDAMLIFENLSRGFGRQGKRTFMAERQYTRMEDWLTAKLAYEGLPSKTYLSKTLAQYTSKTCSNCGFTITSADYDRVLEKLKKTATGWMTTINGKELKVEGQITYYNRYKRQNVVKDLSVELDRLSEESVNNDISSWTKGRSGEALSLLKKRFSHRPVQEKFVCLNCGFETHADEQAALNIARSWLFLRSQEYKKYQTNKTTGNTDKRAFVETWQSFYRKKLKEVWKPAV

SEQ ID NO: 39785 - protein, 978 aa, synthetic construct
  REGION 1..978: note = engineered CasX variant
QEIKRLNKIRRRLVKDSNTKKAGKTGPMKTLLVRVMTPDLRERLENLRKKPPNIPQPISNTSRANLNKLLTDYTEMKKAILHVYWEEFQKDPVGLMSRVAQPASKKIDQNKLKPEMDEKGNLTTAGFACSQCGQPLFVYKLEQVSEKGKAYTNYFGRCNVAEHEKLILLAQLKPEKDSDEAVTYSLGKFGQRALDFYSIHVTKESTHPVKPLAQIAGNRYASGPVGKALRDACMGTIASFLSKYQDIIIEHQKVVKGNQKRLESLRELAGKENLEYPSVTLPPQPHTKEGVDAYNEVIARVRMWVNLNLWQKLKLSRDDAKPLLRLKGFPSFPLVERQANEVDWWDMVCNVKKLINEKKEDGKVFWQNLAGYKRQEALRPYLSSEEDRKKGKKFARYQLGDLLLHLEKKHGEDWGKVYDEAWERIDKKVEGLSKHIKLEEERRSEDAQSKAALTDWLRAKASFVIEGLKEADKDEFCRCELKLQKWYGDLRGKPFAIEAENSILDISGFSKQYNCAFIWQKDGVKKLNLYLIINYFKGGKLRFKKIKPEAFEANRFYTVINKKSGEIVPMEVNFNFDDPNLIILPLAFGKRQGREFIWNDLLSLETGSLKLANGRVIEKTLYNRRTRQDEPALFVALTFERREVLDSSNIKPMNLIGVDRGENIPAVIALTDPEGCPLSRFKDSLGNPTHILRIGESYKEKQRTIQAKKEVEQRRAGGYSRKYASKAKNLADDMVRNTARDLLYYAVTQDAMLIFENLSRGFGRQGKRTFMAERQYTRMEDWLTAKLAYEGLPSKTYLSKTLAQYTSKTCSNCGFTITSADYDRVLEKLKKTATGWMTTINGKELKVEGQITYYNRYKRQNVVKDLSVELDRLSEESVNNDISSWTKGRSGEALSLLKKRFSHRPVQEKFVCLNCGFETHADEQAALNIARSWLFLRSQEYKKYQTNKTTGNTDKRAFVETWQSFYRKKLKEVWKPAV

SEQ ID NO: 39786 - protein, 978 aa, synthetic construct
  REGION 1..978: note = engineered CasX variant
QEIKRINKIRRRLVKDSNTKKAGKTGPMKTLLVRVMTPDLRERLENLRKKPPNIPQPISNTSRANLNKLLTDYTEMKKAILHVYWEEFQKDPVGLMSRVAQPASKKIDQNKLKPEMDEKGNLTTAGFACSQCGQPLFVYKLEQVSEKGKAYTNYVGRCNVAEHEKLILLAQLKPEKDSDEAVTYSLGKFGQRALDFYSIHVTKESTHPVKPLAQIAGNRYASGPVGKALRDACMGTIASFLSKYQDIIIEHQKVVKGNQKRLESLRELAGKENLEYPSVTLPPQPHTKEGVDAYNEVIARVRMWVNLNLWQKLKLSRDDAKPLLRLKGFPSFPLVERQANEVDWWDMVCNVKKLINEKKEDGKVFWQNLAGYKRQEALRPYLSSEEDRKKGKKFARYQLGDLLLHLEKKHGEDWGKVYDEAWERIDKKVEGLSKHIKLEEERRSEDAQSKAALTDWLRAKASFVIEGLKEADKDEFCRCELKLQKWYGDLRGKPFAIEAENSILDISGFSKQYNCAFIWQKDGVKKLNLYLIINYFKGGKLRFKKIKPEAFEANRFYTVINKKSGEIVPMEVNFNFDDPNLIILPLAFGKRQGREFIWNDLLSLETGSLKLANGRVIEKTLYNRRTRQDEPALFVALTFERREVLDSSNIKPMNLIGVDRGENIPAVIALTDPEGCPLSRFKDSLGNPTHILRIGESYKEKQRTIQAKKEVEQRRAGGYSRKYASKAKNLADDMVRNTARDLLYYAVTQDAMLIFENLSRGFGRQGKRTFMAERQYTRMEDWLTAKLAYEGLPSKTYLSKTLAQYTSKTCSNCGFTITSADYDRVLEKLKKTATGWMTTINGKELKVEGQITYYNRYKRQNVVKDLSVELDRLSEESVNNDISSWTKGRSGEALSLLKKRFSHRPVQEKFVCLNCGFETHADEQAALNIARSWLFLRSQEYKKYQTNKTTGNTDKRAFVETWQSFYRKKLKEVWKPAV

SEQ ID NO: 39787 - protein, 978 aa, synthetic construct
  REGION 1..978: note = engineered CasX variant
QEIKRINKIRRRLVKDSNTKKAGKTGPMKTLLVRVMTPDLRERLENLRKKPPNIPQPISNTSRANLNKLLTDYTEMKKAILHVYWEEFQKDPVGLMSRVAQPASKKIDQNKLKPEMDEKGNLTTAGFACSQCGQPLFVYKLEQVSEKGKAYTNYFGRCNVAEHEKLILLAQLKPEKDSDEAVTYSLGKFGQRALDFYSIHVTKESTHPVKPLAQIAGNRYASGPVGKALRDACMGTIASFLSKYQDIIIEHQKVVKGNQKRLESLRELAGKENLEYPSVTLPPQPHTKEGVDAYNEVIARVRMWVNLNLWQKLKLSRDDAKPLLRLKGFPSFPLVERQANEVDWWDMVCNVKKLINEKKEDGKVFWQNLAGYKRQEALRPYLSSEEDRKKGKKFARYQLGDLLLHLEKKHGEDWGKVYDEAWERIDKKVEGLSKHIKLEEERRSEDAQSKAALTDWLRAKASFVIEGLKEADKDEFCRCELKLQKWYGDLRGKPFAIEAENSILDISGFSKQYNCAFIWQKDGVKKLNLYLIINYFKGGKLRFKKIKPEAFEANRFYTVINKKSGEIVPMEVNFNFDDPNLIILPLAFGKRQGREFIWNDLLSLETGSLKLANGRVIEKTLYNRRTRQDEPALFVALTFERREVLDSSNIKPMNLIGVDRGENIPAVIALTDPEGCPLSRFKDSLGNPTHILRIGESYKEKQRTIQAKKEVEQRRAGGYSRKYASKAKNLADDMVRNTARDLLYYAVTQDAMLIFENLSRGFGRQGKRTFMAERQYTRMEDWLTAKLAYEGLASKTYLSKTLAQYTSKTCSNCGFTITSADYDRVLEKLKKTATGWMTTINGKELKVEGQITYYNRYKRQNVVKDLSVELDRLSEESVNNDISSWTKGRSGEALSLLKKRFSHRPVQEKFVCLNCGFETHADEQAALNIARSWLFLRSQEYKKYQTNKTTGNTDKRAFVETWQSFYRKKLKEVWKPAV

SEQ ID NO: 39788 - protein, 978 aa, synthetic construct
  REGION 1..978: note = engineered CasX variant
QEIKRINKIRRRLVKDSNTKKAGKTGPMKTLLVRVMTPDLRERLENLRKKPPNIPQPISNTSRANLNKLLTDYTEMKKAILHVYWEEFQKDPVGLMSRVAQPASKKIDQNKLKPEMDEKGNLTTAGFACSQCGQPLFVYKLEQVSEKGKAYTNYFGRCNVAEHEKLILLAQLKPEKDSDEAVTYSLGKFGQRALDFYSIHVTKESTHPVKPLAQIAGNRYASGPVGKALRDACMGTIASFLSKYQDIIIEHQKVVKGNQKRLESLRELAGKENLEYPSVTLPPQPHTKEGVDAYNEVIARVRMWVNLNLWQKLKLSRDDAKPLLRLKGFPSFPLVERQANEVDWWDMVCNVKKLINEKKEDGKVFWQNLAGYKRQEALRPYLSSEEDRKKGKKFARYQLGDLLLHLEKKHGEDWGKVYDEAWERIDKKVEGLSKHIKLEEERRSEDAQSKAALTDWLRAKASFVIEGLKEADKDEFCRCELKLQKWYGDLRGKPFAIEAENSILDISGFSKQYNCAFIWQKDGVKKLNLYLIINYFKGGKLRFKKIKPEAFEANRFYTVINKKSGEIVPMEVNFNFDDPNLIILPLAFGKRQGREFIWNDLLSLETGSLKLANGRVIEKTLYNRRTRQDEPALFVALTFERREVLDSSNIKPMNLIGVDRGENIPAVIALTDPEGCPLSRFKDSLGNPTHILRIGESYKEKQRTIQAKKEVEQRRAGGYSRKYASKAKNLADDMVRNTARDLLYYAVTQDAMLIFENLSRGFGRQGKRTFMAERQYTRMEDWLTAKLAYEGLPSKVYLSKTLAQYTSKTCSNCGFTITSADYDRVLEKLKKTATGWMTTINGKELKVEGQITYYNRYKRQNVVKDLSVELDRLSEESVNNDISSWTKGRSGEALSLLKKRFSHRPVQEKFVCLNCGFETHADEQAALNIARSWLFLRSQEYKKYQTNKTTGNTDKRAFVETWQSFYRKKLKEVWKPAV

SEQ ID NO: 39789 - protein, 979 aa, synthetic construct
  REGION 1..979: note = engineered CasX variant
QEIKRINKIRRRLVKDSNTKKAGKTGPMKTLLVRVMTPDLRERLENLRKKPPNIPQPISNTSRANLNKLLTDYTEMKKAILHVYWEEFQKDPVGLMSRVAQPASKKIDQNKLKPEMDEKGNLTTAGFACSQCGQPLFVYKLEQVSEKGKAYTNYFGRCNVAEHEKLILLAQLKPEKDSDEAVTYSLGKFGQRALDFYSIHVTKESTHPVKPLAQIAGNRYASGPVGKALRDACMGTIASFLSKYQDIIIEHQKVVKGNQKRLESLRELAGKENLEYPSVTLPPQPHTKEGVDAYNEVIARVRMWVNLNLWQKLKLSRDDAKPLLRLKGFPSFPLVERQANEVDWWDMVCNVKKLINEKKEDGKVFWQNLAGYKRQEALRPYLSSEEDRKKGKKFARYQLGDLLLHLEKKHGEDWGKVYDEAWERIDKKVEGLSKHIKLEEERRSEDAQSKAALTDWLRAKASFVIEGLKEADKDEFCRCELKLQKWYGDLRGKPFAIEAENSILDISGFSKQYNCAFIWQKDGVKKLNLYLIINYFKGGKLRFKKIKPEAFEANRFYTVINKKSGEIVPMEVNFNFDDPNLIILPLAFGKRQGREFIWNDLLSLETGSLKLANGRVIEKTLYNRRTRQDEPALFVALTFERREVLDSSNIKPMNLIGVDRGENIPAVIALTDPEGCPLSRFKDSLGNPTHILRIGESYKEKQRTIQAKKEVEQRRAGGYSRKYASKAKNLADDMVRNTARDLLYYAVTQDAMLIFENLSRGFGRQGKRTFMAERQYTRMEDWLTAKLAYEGPLPSKTYLSKTLAQYTSKTCSNCGFTITSADYDRVLEKLKKTATGWMTTINGKELKVEGQITYYNRYKRQNVVKDLSVELDRLSEESVNNDISSWTKGRSGEALSLLKKRFSHRPVQEKFVCLNCGFETHADEQAALNIARSWLFLRSQEYKKYQTNKTTGNTDKRAFVETWQSFYRKKLKEVWKPAV

SEQ ID NO: 39790 - protein, 979 aa, synthetic construct
  REGION 1..979: note = engineered CasX variant
QEIKRINKIRRRLVKDSNTKKAGKTGPMKTLLVRVMTPDLRERLENLRKKPPNIPQPISNTSRANLNKLLTDYTEMKKAILHVYWEEFQKDPVGLMSRVAQPASKKIDQNKLKPEMDEKGNLTTAGFACSQCGQPLFVYKLEQVSEKGKAYTNYFGRCNVAEHEKLILLAQLKPEKDSDEAVTYSLGKFGQRALDFYSIHVTKESTHPVKPLAQIAGNRYASGPVGKALRDACMGTIASFLSKYQDIIIEHQKVVKGNQKRLESLRELAGKENLEYPSVTLPPQPHTKEGVDAYNEVIARVRMWVNLNLWQKLKLSRDDAKPLLRLKGFPSFPLVERQANEVDWWDMVCNVKKLINEKKEDGKVFWQNLAGYKRQEALRPYLSSEEDVRKKGKKFARYQLGDLLLHLEKKHGEDWGKVYDEAWERIDKKVEGLSKHIKLEEERRSEDAQSKAALTDWLRAKASFVIEGLKEADKDEFCRCELKLQKWYGDLRGKPFAIEAENSILDISGFSKQYNCAFIWQKDGVKKLNLYLIINYFKGGKLRFKKIKPEAFEANRFYTVINKKSGEIVPMEVNFNFDDPNLIILPLAFGKRQGREFIWNDLLSLETGSLKLANGRVIEKTLYNRRTRQDEPALFVALTFERREVLDSSNIKPMNLIGVDRGENIPAVIALTDPEGCPLSRFKDSLGNPTHILRIGESYKEKQRTIQAKKEVEQRRAGGYSRKYASKAKNLADDMVRNTARDLLYYAVTQDAMLIFENLSRGFGRQGKRTFMAERQYTRMEDWLTAKLAYEGLPSKTYLSKTLAQYTSKTCSNCGFTITSADYDRVLEKLKKTATGWMTTINGKELKVEGQITYYNRYKRQNVVKDLSVELDRLSEESVNNDISSWTKGRSGEALSLLKKRFSHRPVQEKFVCLNCGFETHADEQAALNIARSWLFLRSQEYKKYQTNKTTGNTDKRAFVETWQSFYRKKLKEVWKPAV

SEQ ID NO: 39791 - protein, 978 aa, synthetic construct
  REGION 1..978: note = engineered CasX variant
QEIKRINKIRRRLVKDSNTKKAGKTGPMKTLLVRVMTPDLRERLENLRKKPPNIPQPISNTSRANLNKLLTDYTEMKKAILHVYWEEFQKDPVGLMSRVAQPASKKIDQNKLKPEMDEKGNLTTAGFACSQCGQPLFVYKLEQVSEKGKAYTNYFGRCNVAEHEKLILLAQLKPEKDSDEAVTYSLGKFGQRALDFYSIHVTKESTHPVKPLAQIAGNRYASGPVGKALRDACMGTIASFLSKYQDIIIEHQKVVKGNQKRLESLRELAGKENLEYPSVTLPPQPHTKEGVDAYNEVIARVRMWVNLNLWQKLKLSRDDAKPLLRLKGFPSFPLVERQANEVDWWDMVCNVKKLINEKKEDGKVFWQNLAGYKRQEALRPYLSSEEDRKKGKKFARYQLGDLLLHLEKKHGEDWGKVYDEAWERIDKKVEGLSKHIKLEEERRSEDAQSKAALTDWLRAKASFVIEGLKEADKDEFCRCELKLQKWYGDLRGKPFAIEAENSILDISGFSKQYNCAFIWQKDGVKKLNLYLIINYFKGGKLRFKKIKPEAFEANRFYTVINKKSGEIVPMEVNFNFDDPNLIILPLAFGKRQGREFIWNDLLSLETGSLKLANGRVIEKTLYNRRTRQDEPALFVALTFERREVLDSSNIKPMNLIGVDRGENIPAVIALTDPEGCPLSRFKDSLGNPTHILRIGESYKEKQRTIQAKKEVEQRRAGGYSRKYASKAKNLADDMVRNTARDLLYYAVTQDAMLIFENLSRGFGRQGKRTFMAERQYTRMEDWLTAKLAYEGLPSKTYLSKTLAQYTSKTCSNCGFTITSADYDRMLEKLKKTATGWMTTINGKELKVEGQITYYNRYKRQNVVKDLSVELDRLSEESVNNDISSWTKGRSGEALSLLKKRFSHRPVQEKFVCLNCGFETHADEQAALNIARSWLFLRSQEYKKYQTNKTTGNTDKRAFVETWQSFYRKKLKEVWKPAV

SEQ ID NO: 39792 - protein, 978 aa, synthetic construct
  REGION 1..978: note = engineered CasX variant
QEIKRINKIRRRLVKDSNTKKAGKTGPMKTLLVRVMTPDLRERLENLRKKPPNIPQPISNTSRANLNKLLTDYTEMKKAILHVYWEEFQKDPVGLMSRVAQPASKKIDQNKLKPEMDEKGNLTTAGFACSQCGQPLFVYKLEQVSEKGKAYTNYFGRCNVAEHEKLILLAQLKPEKDSDEAVTYSLGKFGQRALDFYSIHVTKESTHPVKPLAQIAGNRYASGPVGKALRDACMGTIASFLSKYQDIIIEHQKVVKGNQKRLESLRELAGKENLEYPSVTLPPQPHTKEGVDAYNEVIARVRMWVNLNLWQKLKLSRDDAKPLLRLKGFPSFPLVERQANEVDWWDMVCNVKKLINEKKEDGKVFWQNLAGYKRQEALRPYLSSEEDRKKGKKFARYQLGDLLLHLEKKHGEDWGKVYDEAWERIDKKVEGLSKHIKLEEERRSEDAQSKAALTDWLRAKASFVIEGLKEADKDEFCRCELKLQKWYGDLRGKPFAIEAENSILDISGFSKQYNCAFIWQKDGVKKLNLYLIINYFKGGKLRFKKIKPEAFEANRFYTVINKKSGEIVPMEVNFNFDDPNLIILPLAFGKRQGREFIWNDLLSLETGSLKLANGRVIEKTLYNRRTRQDEPALFVALTFERREVLDSSNIKPMNLIGVDRGENIPAVIALTDPEGCPLSRFKDSLGNPTHILRIGESYKEKQRTIQAKKEVEQRRAGGYSRKYASKAKNLADDMVRNTARDLLYYAVTQDAMLIFENLSRGFGRQGKRTFMAERQYTRMEDWLTAKLAYEGLPSKTYLSKTLAQYTSKTCSNCGFTITSADYDRVLEKLKKTATGWMTTINGKELKVEGQITYYNRYKRQNVVKDLSVELDRLSEESVNNDISSWTKGRQGEALSLLKKRFSHRPVQEKFVCLNCGFETHADEQAALNIARSWLFLRSQEYKKYQTNKTTGNTDKRAFVETWQSFYRKKLKEVWKPAV

SEQ ID NO: 39793 - protein, 978 aa, synthetic construct
  REGION 1..978: note = engineered CasX variant
QEIKRINKIRRRLVKDSNTKKAGKTGPMKTLLVRVMTPDLRERLENLRKKPPNIPQPISNTSRANLNKLLTDYTEMKKAILHVYWEEFQKDPVGLMSRVAQPASKKIDQNKLKPEMDEKGNLTTAGFACSQCGQPLFVYKLEQVSEKGKAYTNYFGRCNVAEHEKLILLAQLKPEKDSDEAVTYSLGKFGQRALDFYSIHVTKESTHPVKPLAQIAGNRYASGPVGKALRDACMGTIASFLSKYQDIIIEHQKVVKGNQKRLESLRELAGKENLEYPSVTLPPQPHTKEGVDAYNEVIARVRMWVNLNLWQKLKLSRDDAKPLLRLKGFPSFPLVERQANEVDWWDMVCNVKKLINEKKEDGKVFWQNLAGYKRQEALRPYLSSEEDRKKGKKFARYQLGDLLLHLEKKHGEDWGKVYDEAWERIDKKVEGLSKHIKLEEERRSEDAQSKAALTDWLRAKASFVIEGLKEADKDEFCRCELKLQKWYGDLRGKPFAIEAENSILDISGFSKQYNCAFIWQKDGVKKLNLYLIINYFKGGKLRFKKIKPEAFEANRFYTVINKKSGEIVPMEVNFNFDDPNLIILPLAFGKRQGREFIWNDLLSLETGSLKLANGRVIEKTLYNRRTRQDEPALFVALTFERREVLDSSNIKPMNLIGVDRGENIPAVIALTDPEGCPLSRFKDSLGNPTHILRIGESYKEKQRTIQAKKEVEQRRAGGYSRKYASKAKNLADDMVRNTARDLLYYAVTQDAMLIFENLSRGFGRQGKRTFMAERQYTRMEDWLTAKLAYEGLPSKTYLSKTLAQYTSKTCSNCGFTITSADYDRVLEKLKKTATGWMTTINGKELKVEGQITYYNRYKRQNVVKDLSVELDRLSEESVNNDISSWTKGRSGEALSLLKKRFSHRPVQEKFVCLNCEFETHADEQAALNIARSWLFLRSQEYKKYQTNKTTGNTDKRAFVETWQSFYRKKLKEVWKPAV

SEQ ID NO: 39794 - protein, 979 aa, synthetic construct
  REGION 1..979: note = engineered CasX variant
QEIKRINKIRRRLVKDSNTKKAGKTGPMKTLLVRVMTPDLRERLENLRKKPPNIPQPISNTSRANLNKLLTDYTEMKKAILHVYWEEFQKDPVGLMSRVAQPASKKIDQNKLKPEMDEKGNLTTAGFACSQCGQPLFVYKLEQVSEKGKAYTNYFGRCNVAEHEKLILLAQLKPEKDSDEAVTYSLGKFGQRALDFYSIHVTKESTHPVKPLAQIAGNRYASGPVGKALRDACMGTIASFLSKYQDIIIEHQKVVKGNQKRLESLRELAGKENLEYPSVTLPPQPHTKEGVDAYNEVIARVRMWVNLNLWQKLKLSRDDAKPLLRLKGFPSFPLVERQANEVDWWDMVCNVKKLINEKKEDGKVFWQNLAGYKRQEALRPYLSSEEDRKKGKKFARYQLGDLLLHLEKKHGEDWGKVYDEAWERIDKKVEGLSKHIKLEEERRSEDAQSKAALTDWLRAKASFVIEGLKEADKDEFCRCELKLQKWYGDLRGKPFAIEAENSILDISGFSKQYNCAFIWQKDGVKKLNLYLIINYFKGGKLRFKKIKPEAFEANRFYTVINKKSGEIVPMEVNFNFDDPNLIILPLAFGKRQGREFIWNDLLSLETGSLKLANGRVIEKTLYNRRTRQDEPALFVALTFERREVLDSSNIKPMNLIGVDRGENIPAVIALTDPEGCPLSRFKDSLGNPTHILRIGESYKEKQRTIQAKKEVEQRRAGGYSRKYASKAKNLADDMVRNTARDLLYYAVTQDAMLIFENLSRGFGRQGKRTFMAERQYTRMEDWLTAKLAYEGLPSKTYLSKTLAQYTSKTCSNCGFTITSADYDRVLEKLKKTATGWMTTINGKELKVEGQITYYNRYKRQNVVKDLSVELDRLSEESVNNDISSWTKGRSGEALSLLKKRFSHRPVQEKFVCLNCGFETHADEQAALNIARSWLFLRSQEYKKYQTNKTSTGNTDKRAFVETWQSFYRKKLKEVWKPAV

SEQ ID NO: 39795 - protein, 979 aa, synthetic construct
  REGION 1..979: note = engineered CasX variant
QEIKRINKIRRRLVKDSNTKKAGKTGPMKTLLVRVMTPDLRERLENLRKKPPNIPQPISNTSRANLNKLLTDYTEMKKAILHVYWEEFQKDPVGLMSRVAQPASKKIDQNKLKPEMDEKGNLTTAGFACSQCGQPLFVYKLEQVSEKGKAYTNYFGRCNVAEHEKLILLAQLKPEKDSDEAVTYSLGKFGQRALDFYSIHVTKESTHPVKPLAQIAGNRYASGPVGKALRDACMGTIASFLSKYQDIIIEHQKVVKGNQKRLESLRELAGKENLEYPSVTLPPQPHTKEGVDAYNEVIARVRMWVNLNLWQKLKLSRDDAKPLLRLKGFPSFPLVERQANEVDWWDMVCNVKKLINEKKEDGKVFWQNLAGYKRQEALRPYLSSEEDRKKGKKFARYQLGDLLLHLEKKHGEDWGKVYDEAWERIDKKVEGLSKHIKLEEERRSEDAQSKAALTDWLRAKASFVIEGLKEADKDEFCRCELKLQKWYGDLRGKPFAIEAENSILDISGFSKQYNCAFIWQKDGVKKLNLYLIINYFKGGKLRFKKIKPEAFEANRFYTVINKKSGEIVPMEVNFNFDDPNLIILPLAFGKRQGREFIWNDLLSLETGSLKLANGRVIEKTLYNRRTRQDEPALFVALTFERREVLDSSNIKPMNLIGVDRGENIPAVIALTDPEGCPLSRFKDSLGNPTHILRIGESYKEKQRTIQAKKEVEQRRAGGYSRKYASKAKNLADDMVRNTARDLLYYAVTQDAMLIFENLSRGFGRQGKRTFMAERQYTRMEDWLTAKLAYEGLPSKTYLSKTLAQYTSKTCSNCGFTITSADYDRVLEKLKKTATGWMTTINGKELKVEGQITYYNRYKRQNVVKDLSVELDRLSEESVNNDISSWTKGRSGEALSLLKKRFSHRPVQEKFVCLNCGFETHADEQAALNIARSWLFLRSQEYKKYQTNKTTGKNTDKRAFVETWQSFYRKKLKEVWKPAV

SEQ ID NO: 39796 - protein, 978 aa, synthetic construct
  REGION 1..978: note = engineered CasX variant
QEIKRINKIRRRLVKDSNTKKAGKTGPMKTLLVRVMTPDLRERLENLRKKPPNIPQPISNTSRANLNKLLTDYTEMKKAILHVYWEEFQKDPVGLMSRVAQPASKKIDQNKLKPEMDEKGNLTTAGFACSQCGQPLFVYKLEQVSEKGKAYTNYFGRCNVAEHEKLILLAQLKPEKDSDEAVTYSLGKFGQRALDFYSIHVTKESTHPVKPLAQIAGNRYASGPVGKALRDACMGTIASFLSKYQDIIIEHQKVVKGNQKRLESLRELAGKENLEYPSVTLPPQPHTKEGVDAYNEVIARVRMWVNLNLWQKLKLSRDDAKPLLRLKKFPSFPLVERQANEVDWWDMVCNVKKLINEKKEDGKVFWQNLAGYKRQEALRPYLSSEEDRKKGKKFARYQLGDLLLHLEKKHGEDWGKVYDEAWERIDKKVEGLSKHIKLEEERRSEDAQSKAALTDWLRAKASFVIEGLKEADKDEFCRCELKLQKWYGDLRGKPFAIEAENSILDISGFSKQYNCAFIWQKDGVKKLNLYLIINYFKGGKLRFKKIKPEAFEANRFYTVINKKSGEIVPMEVNFNFDDPNLIILPLAFGKRQGREFIWNDLLSLETGSLKLANGRVIEKTLYNRRTRQDEPALFVALTFERREVLDSSNIKPMNLIGVDRGENIPAVIALTDPEGCPLSRFKDSLGNPTHILRIGESYKEKQRTIQAKKEVEQRRAGGYSRKYASKAKNLADDMVRNTARDLLYYAVTQDAMLIFENLSRGFGRQGKRTFMAERQYTRMEDWLTAKLAYEGLPSKTYLSKTLAQYTSKTCSNCGFTITSADYDRVLEKLKKTATGWMTTINGKELKVEGQITYYNRYKRQNVVKDLSVELDRLSEESVNNDISSWTKGRSGEALSLLKKRFSHRPVQEKFVCLNCGFETHADEQAALNIARSWLFLRSQEYKKYQTNKTTGNTDKRAFVETWQSFYRKKLKEVWKPAV

SEQ ID NO: 39797 - protein, 978 aa, synthetic construct
  REGION 1..978: note = engineered CasX variant
QEIKRINKIRRRLVKDSNTKKAGKTGPMKTLLVRVMTPDLRERLENLRKKPPNIPQPISNTSRANLNKLLTDYTEMKKAILHVYWEEFQKDPVGLMSRVAQPASKKIDQNKLKPEMDEKGNLTTAGFACSQCGQPLFVYKLEQVSEKGKAYTNYFGRCNVAEHEKLILLAQLKPEKDSDEAVTYSLGKFGQRALDFYSIHVTKESTHPVKPLAQIAGNRYASGPVGKALRDACMGTIASFLSKYQDIIIEHQKVVKGNQKRLESLRELAGKENLEYPSVTLPPQPHTKEGVDAYNEVIARVRMWVNLNLWQKLKLSRDDAKPLLRLKGFPSFPLVERQANEVDWWDMVCNVKKLINEKKEDGKVFWQNLAGYKRQEALRPYLSSEEDRKKGKKFARYQLGDLLLHLEKKHGEDWGKVYDEAWERIDKKVEGLSKHIKLEEERRSEDAQSKAALTDWLRAKASFVIEGLKEADKDEFCRCELKLQKWYGDLRGKPFAIEAENSILDISGFSKQYNCAFIWQKDGVKKLNLYLIINYFKGGKLRFKKIKPEAFEANRFYTVINKKSGEIVPMEVNFNFDDPNLIILPLAFGKRQGREFIWNDLLSLETGSLKLANGRVIEKTLYNRRTRQDEPALFVALTFERREVLDSSNIKPMNLIGVDRGENIPAVIALTDPEGCPLSRFKDSLGNPTHILRIGERYKEKQRTIQAKKEVEQRRAGGYSRKYASKAKNLADDMVRNTARDLLYYAVTQDAMLIFENLSRGFGRQGKRTFMAERQYTRMEDWLTAKLAYEGLPSKTYLSKTLAQYTSKTCSNCGFTITSADYDRVLEKLKKTATGWMTTINGKELKVEGQITYYNRYKRQNVVKDLSVELDRLSEESVNNDISSWTKGRSGEALSLLKKRFSHRPVQEKFVCLNCGFETHADEQAALNIARSWLFLRSQEYKKYQTNKTTGNTDKRAFVETWQSFYRKKLKEVWKPAV

SEQ ID NO: 39798 - protein, 978 aa, synthetic construct
  REGION 1..978: note = engineered CasX variant
QEIKRINKIRRRLVKDSNTKKAGKTGPMKTLLVRVMTPDLRERLENLRKKPPNIPQPISNTSRANLNKLLTDYTEMKKAILHVYWEEFQKDPVGLMSRVAQPASKKIDQNKLKPEMDEKGNLTTAGFACSQCGQPLFVYKLEQVSEKGKAYTNYFGRCNVAEHEKLILLAQLKPEKDSDEAVTYSLGKFGQRALDFYSIHVTKESTHPVKPLAQIAGNRYASGPVGKALRDACMGTIASFLSKYQDIIIEHQKVVKGNQKRLESLRELAGKENLEYPSVTLPPQPHTKEGVDAYNEVIARVRMWVNLNLWQKLKLSRDDAKPLLRLKGFPSFPLVERQANEVDWWDMVCNVKKLINEKKEDGKVFWQNLAGYKRQEALRPYLSSEEDRKKGKKFARYQLGDLLLHLEKKHGEDWGKVYDEAWERIDKKVEGLSKHIKLEEERRSEDAQSKAALTDWLRAKASFVIEGLKEADKDEFCRCELKLQKWYGDLRGKPFAIEAENSILDISGFSKQYNCAFIWQKDGVKKLNLYLIINYFKGGKLRFKKIKPEAFEANRFYTVINKKSGEIVPMEVNFNFDDPNLIILPLAFGKRQGREFIWNDLLSLETGSLQLANGRVIEKTLYNRRTRQDEPALFVALTFERREVLDSSNIKPMNLIGVDRGENIPAVIALTDPEGCPLSRFKDSLGNPTHILRIGESYKEKQRTIQAKKEVEQRRAGGYSRKYASKAKNLADDMVRNTARDLLYYAVTQDAMLIFENLSRGFGRQGKRTFMAERQYTRMEDWLTAKLAYEGLPSKTYLSKTLAQYTSKTCSNCGFTITSADYDRVLEKLKKTATGWMTTINGKELKVEGQITYYNRYKRQNVVKDLSVELDRLSEESVNNDISSWTKGRSGEALSLLKKRFSHRPVQEKFVCLNCGFETHADEQAALNIARSWLFLRSQEYKKYQTNKTTGNTDKRAFVETWQSFYRKKLKEVWKPAV

SEQ ID NO: 39799 - protein, 978 aa, synthetic construct
  REGION 1..978: note = engineered CasX variant
QEIKRINKIRRRLVKDSNTKKAGKTGPMKTLLVRVMTPDLRERLENLRKKPENIPQPISNTSQANLNKLLTDYTEMKKAILHVYDEEFQKDPVGLMSRVAQPASKKIDQNKLKPEMDEKGNLTTAGFACSQCGQPLFVYKLEQVSEKGKAYTNYFGRCNVAEHEKLILLAQLKPEKDSDEAVTYSLGKFGQRALDFYSIHVTKESTHPVKPLAQIAGNRYASGPVGKALRDACMGTIASFLSKYQDIIIEHQKVVKGNQKRLESLRELAGKENLEYPSVTLPPQPHTKEGVDAYNEVIARVRMWVNLNLWQKLKLSRDDAKPLLRLKGFPSFPLVERQANEVDWWDMVCNVKKLINEKKEDGKVFWQNLAGYKRQEALRPYLSSEEDRKKGKKFARYQLGDLLLHLEKKHGEDWGKVYDEAWERIDKKVEGLSKHIKLEEERRSEDAQSKAALTDWLRAKASFVIEGLKEADKDEFCRCELKLQKWYGDLRGKPFAIEAENSILDISGFSKQYNCAFIWQKDGVKKLNLYLIINYFKGGKLRFKKIKPEAFEANRFYTVINKKSGEIVPMEVNFNFDDPNLIILPLAFGKRQGREFIWNDLLSLETGSLKLANGRVIEKTLYNRRTRQDEPALFVALTFERREVLDSSNIKPMNLIGVDRGENIPAVIALTDPEGCPLSRFKDSLGNPTHILRIGESYKEKQRTIQAKKEVEQRRAGGYSRKYASKAKNLADDMVRNTARDLLYYAVTQDAMLIFENLSRGFGRQGKRTFMAERQYTRMEDWLTAKLAYEGLPSKTYLSKTLAQYTSKTCSNCGFTITSADYDRVLEKLKKTATGWMTTINGKELKVEGQITYYNRYKRQNVVKDLSVELDRLSEESVNNDISSWTKGRSGEALSLLKKRFSHRPVQEKFVCLNCGFETHADEQAALNIARSWLFLRSQEYKKYQTNKTTGNTDKRAFVETWQSFYRKKLKEVWKPAV

SEQ ID NO: 39800 - protein, 978 aa, synthetic construct
  REGION 1..978: note = engineered CasX variant
QEIKRINKIRRRLVKDSNTKKAGKTGPMKTLLVRVMTPDLRERLENLRKKPENIPQPISNTSQANLNKLLTDYTEMKKAILHVYWEEFQKDPVGLMSRVAQPASKKIDQNKLKPEMDEKGNLTTAGFACSQCGQPLFVYKLEQVSEKGKAYTNYFGRCNVAEHEKLIKLAQLKPEKDSDEAVTYSLGKFGQRALDFYSIHVTKESTHPVKPLAQIAGNRYASGPVGKALRDACMGTIASFLSKYQDIIIEHQKVVKGNQKRLESLRELAGKENLEYPSVTLPPQPHTKEGVDAYNEVIARVRMWVNLNLWQKLKLSRDDAKPLLRLKGFPSFPLVERQANEVDWWDMVCNVKKLINEKKEDGKVFWQNLAGYKRQEALRPYLSSEEDRKKGKKFARYQLGDLLLHLEKKHGEDWGKVYDEAWERIDKKVEGLSKHIKLEEERRSEDAQSKAALTDWLRAKASFVIEGLKEADKDEFCRCELKLQKWYGDLRGKPFAIEAENSILDISGFSKQYNCAFIWQKDGVKKLNLYLIINYFKGGKLRFKKIKPEAFEANRFYTVINKKSGEIVPMEVNFNFDDPNLIILPLAFGKRQGREFIWNDLLSLETGSLKLANGRVIEKTLYNRRTRQDEPALFVALTFERREVLDSSNIKPMNLIGVDRGENIPAVIALTDPEGCPLSRFKDSLGNPTHILRIGESYKEKQRTIQAKKEVEQRRAGGYSRKYASKAKNLADDMVRNTARDLLYYAVTQDAMLIFENLSRGFGRQGKRTFMAERQYTRMEDWLTAKLAYEGLPSKTYLSKTLAQYTSKTCSNCGFTITSADYDRVLEKLKKTATGWMTTINGKELKVEGQITYYNRYKRQNVVKDLSVELDRLSEESVNNDISSWTKGRSGEALSLLKKRFSHRPVQEKFVCLNCGFETHADEQAALNIARSWLFLRSQEYKKYQTNKTTGNTDKRAFVETWQSFYRKKLKEVWKPAV

SEQ ID NO: 39801 - protein, 978 aa, synthetic construct
  REGION 1..978: note = engineered CasX variant
QEIKRINKIRRRLVKDSNTKKAGKTGPMKTLLVRVMTPDLRERLENLRKKPENIPQPISNTSQANLNKLLTDYTEMKKAILHVYWEEFQKDPVGLMSRVAQPASKKIDQNKLKPEMDEKGNLTTAGFACSQCGQPLFVYKLEQVSEKGKAYTNYFGRCNVAEHEKLILLYQLKPEKDSDEAVTYSLGKFGQRALDFYSIHVTKESTHPVKPLAQIAGNRYASGPVGKALRDACMGTIASFLSKYQDIIIEHQKVVKGNQKRLESLRELAGKENLEYPSVTLPPQPHTKEGVDAYNEVIARVRMWVNLNLWQKLKLSRDDAKPLLRLKGFPSFPLVERQANEVDWWDMVCNVKKLINEKKEDGKVFWQNLAGYKRQEALRPYLSSEEDRKKGKKFARYQLGDLLLHLEKKHGEDWGKVYDEAWERIDKKVEGLSKHIKLEEERRSEDAQSKAALTDWLRAKASFVIEGLKEADKDEFCRCELKLQKWYGDLRGKPFAIEAENSILDISGFSKQYNCAFIWQKDGVKKLNLYLIINYFKGGKLRFKKIKPEAFEANRFYTVINKKSGEIVPMEVNFNFDDPNLIILPLAFGKRQGREFIWNDLLSLETGSLKLANGRVIEKTLYNRRTRQDEPALFVALTFERREVLDSSNIKPMNLIGVDRGENIPAVIALTDPEGCPLSRFKDSLGNPTHILRIGESYKEKQRTIQAKKEVEQRRAGGYSRKYASKAKNLADDMVRNTARDLLYYAVTQDAMLIFENLSRGFGRQGKRTFMAERQYTRMEDWLTAKLAYEGLPSKTYLSKTLAQYTSKTCSNCGFTITSADYDRVLEKLKKTATGWMTTINGKELKVEGQITYYNRYKRQNVVKDLSVELDRLSEESVNNDISSWTKGRSGEALSLLKKRFSHRPVQEKFVCLNCGFETHADEQAALNIARSWLFLRSQEYKKYQTNKTTGNTDKRAFVETWQSFYRKKLKEVWKPAV

SEQ ID NO: 39802 - protein, 978 aa, synthetic construct
  REGION 1..978: note = engineered CasX variant
QEIKRINKIRRRLVKDSNTKKAGKTGPMKTLLVRVMTPDLRERLENLRKKPENIPQPISNTSQANLNKLLTDYTEMKKAILHVYWEEFQKDPVGLMSRVAQPASKKIDQNKLKPEMDEKGNLTTAGFACSQCGQPLFVYKLEQVSEKGKAYTNYFGRCNVAEHEKLILLSQLKPEKDSDEAVTYSLGKFGQRALDFYSIHVTKESTHPVKPLAQIAGNRYASGPVGKALRDACMGTIASFLSKYQDIIIEHQKVVKGNQKRLESLRELAGKENLEYPSVTLPPQPHTKEGVDAYNEVIARVRMWVNLNLWQKLKLSRDDAKPLLRLKGFPSFPLVERQANEVDWWDMVCNVKKLINEKKEDGKVFWQNLAGYKRQEALRPYLSSEEDRKKGKKFARYQLGDLLLHLEKKHGEDWGKVYDEAWERIDKKVEGLSKHIKLEEERRSEDAQSKAALTDWLRAKASFVIEGLKEADKDEFCRCELKLQKWYGDLRGKPFAIEAENSILDISGFSKQYNCAFIWQKDGVKKLNLYLIINYFKGGKLRFKKIKPEAFEANRFYTVINKKSGEIVPMEVNFNFDDPNLIILPLAFGKRQGREFIWNDLLSLETGSLKLANGRVIEKTLYNRRTRQDEPALFVALTFERREVLDSSNIKPMNLIGVDRGENIPAVIALTDPEGCPLSRFKDSLGNPTHILRIGESYKEKQRTIQAKKEVEQRRAGGYSRKYASKAKNLADDMVRNTARDLLYYAVTQDAMLIFENLSRGFGRQGKRTFMAERQYTRMEDWLTAKLAYEGLPSKTYLSKTLAQYTSKTCSNCGFTITSADYDRVLEKLKKTATGWMTTINGKELKVEGQITYYNRYKRQNVVKDLSVELDRLSEESVNNDISSWTKGRSGEALSLLKKRFSHRPVQEKFVCLNCGFETHADEQAALNIARSWLFLRSQEYKKYQTNKTTGNTDKRAFVETWQSFYRKKLKEVWKPAV

SEQ ID NO: 39803 - protein, 977 aa, synthetic construct
  REGION 1..977: note = engineered CasX variant
QEIKRINKIRRRLVKDSNTKKAGKTGPMKTLLVRVMTPDLRERLENLRKKPENIPQPISNTSQANLNKLLTDYTEMKKAILHVYWEEFQKDPVGLMSRVAQPASKKIDQNKLKPEMDEKGNLTTAGFACSQCGQPLFVYKLEQVSEKGKAYTNYFGRCNVAEHEKLILLAQLKPEKDSDEAVTYSLGKFGQRALDFYSIHVTKESTHPVKPLAQIAGNRYASPVGKALRDACMGTIASFLSKYQDIIIEHQKVVKGNQKRLESLRELAGKENLEYPSVTLPPQPHTKEGVDAYNEVIARVRMWVNLNLWQKLKLSRDDAKPLLRLKGFPSFPLVERQANEVDWWDMVCNVKKLINEKKEDGKVFWQNLAGYKRQEALRPYLSSEEDRKKGKKFARYQLGDLLLHLEKKHGEDWGKVYDEAWERIDKKVEGLSKHIKLEEERRSEDAQSKAALTDWLRAKASFVIEGLKEADKDEFCRCELKLQKWYGDLRGKPFAIEAENSILDISGFSKQYNCAFIWQKDGVKKLNLYLIINYFKGGKLRFKKIKPEAFEANRFYTVINKKSGEIVPMEVNFNFDDPNLIILPLAFGKRQGREFIWNDLLSLETGSLKLANGRVIEKTLYNRRTRQDEPALFVALTFERREVLDSSNIKPMNLIGVDRGENIPAVIALTDPEGCPLSRFKDSLGNPTHILRIGESYKEKQRTIQAKKEVEQRRAGGYSRKYASKAKNLADDMVRNTARDLLYYAVTQDAMLIFENLSRGFGRQGKRTFMAERQYTRMEDWLTAKLAYEGLPSKTYLSKTLAQYTSKTCSNCGFTITSADYDRVLEKLKKTATGWMTTINGKELKVEGQITYYNRYKRQNVVKDLSVELDRLSEESVNNDISSWTKGRSGEALSLLKKRFSHRPVQEKFVCLNCGFETHADEQAALNIARSWLFLRSQEYKKYQTNKTTGNTDKRAFVETWQSFYRKKLKEVWKPAV

SEQ ID NO: 39804 - protein, 978 aa, synthetic construct
  REGION 1..978: note = engineered CasX variant
QEIKRINKIRRRLVKDSNTKKAGKTGPMKTLLVRVMTPDLRERLENLRKKPENIPQPISNTSQANLNKLLTDYTEMKKAILHVYWEEFQKDPVGLMSRVAQPASKKIDQNKLKPEMDEKGNLTTAGFACSQCGQPLFVYKLEQVSEKGKAYTNYFGRCNVAEHEKLILLAQLKPEKDSDEAVTYSLGKFGQRALDFYSIHVTKESTHPVKPLAQIAGNRYASGPVGKALRDACMGTIASFLSKYQDIIIEHQKVVKGNQKRLESLRELAGKENLEYPSVTLPPQPHTSEGVDAYNEVIARVRMWVNLNLWQKLKLSRDDAKPLLRLKGFPSFPLVERQANEVDWWDMVCNVKKLINEKKEDGKVFWQNLAGYKRQEALRPYLSSEEDRKKGKKFARYQLGDLLLHLEKKHGEDWGKVYDEAWERIDKKVEGLSKHIKLEEERRSEDAQSKAALTDWLRAKASFVIEGLKEADKDEFCRCELKLQKWYGDLRGKPFAIEAENSILDISGFSKQYNCAFIWQKDGVKKLNLYLIINYFKGGKLRFKKIKPEAFEANRFYTVINKKSGEIVPMEVNFNFDDPNLIILPLAFGKRQGREFIWNDLLSLETGSLKLANGRVIEKTLYNRRTRQDEPALFVALTFERREVLDSSNIKPMNLIGVDRGENIPAVIALTDPEGCPLSRFKDSLGNPTHILRIGESYKEKQRTIQAKKEVEQRRAGGYSRKYASKAKNLADDMVRNTARDLLYYAVTQDAMLIFENLSRGFGRQGKRTFMAERQYTRMEDWLTAKLAYEGLPSKTYLSKTLAQYTSKTCSNCGFTITSADYDRVLEKLKKTATGWMTTINGKELKVEGQITYYNRYKRQNVVKDLSVELDRLSEESVNNDISSWTKGRSGEALSLLKKRFSHRPVQEKFVCLNCGFETHADEQAALNIARSWLFLRSQEYKKYQTNKTTGNTDKRAFVETWQSFYRKKLKEVWKPAV

SEQ ID NO: 39805 - protein, 978 aa, synthetic construct
  REGION 1..978: note = engineered CasX variant
QEIKRINKIRRRLVKDSNTKKAGKTGPMKTLLVRVMTPDLRERLENLRKKPENIPQPISNTSQANLNKLLTDYTEMKKAILHVYWEEFQKDPVGLMSRVAQPASKKIDQNKLKPEMDEKGNLTTAGFACSQCGQPLFVYKLEQVSEKGKAYTNYFGRCNVAEHEKLILLAQLKPEKDSDEAVTYSLGKFGQRALDFYSIHVTKESTHPVKPLAQIAGNRYASGPVGKALRDACMGTIASFLSKYQDIIIEHQKVVKGNQKRLESLRELAGKENLEYPSVTLPPQPHTKEGLDAYNEVIARVRMWVNLNLWQKLKLSRDDAKPLLRLKGFPSFPLVERQANEVDWWDMVCNVKKLINEKKEDGKVFWQNLAGYKRQEALRPYLSSEEDRKKGKKFARYQLGDLLLHLEKKHGEDWGKVYDEAWERIDKKVEGLSKHIKLEEERRSEDAQSKAALTDWLRAKASFVIEGLKEADKDEFCRCELKLQKWYGDLRGKPFAIEAENSILDISGFSKQYNCAFIWQKDGVKKLNLYLIINYFKGGKLRFKKIKPEAFEANRFYTVINKKSGEIVPMEVNFNFDDPNLIILPLAFGKRQGREFIWNDLLSLETGSLKLANGRVIEKTLYNRRTRQDEPALFVALTFERREVLDSSNIKPMNLIGVDRGENIPAVIALTDPEGCPLSRFKDSLGNPTHILRIGESYKEKQRTIQAKKEVEQRRAGGYSRKYASKAKNLADDMVRNTARDLLYYAVTQDAMLIFENLSRGFGRQGKRTFMAERQYTRMEDWLTAKLAYEGLPSKTYLSKTLAQYTSKTCSNCGFTITSADYDRVLEKLKKTATGWMTTINGKELKVEGQITYYNRYKRQNVVKDLSVELDRLSEESVNNDISSWTKGRSGEALSLLKKRFSHRPVQEKFVCLNCGFETHADEQAALNIARSWLFLRSQEYKKYQTNKTTGNTDKRAFVETWQSFYRKKLKEVWKPAV

SEQ ID NO: 39806 - protein, 978 aa, synthetic construct
  REGION 1..978: note = engineered CasX variant
QEIKRINKIRRRLVKDSNTKKAGKTGPMKTLLVRVMTPDLRERLENLRKKPENIPQPISNTSQANLNKLLTDYTEMKKAILHVYWEEFQKDPVGLMSRVAQPASKKIDQNKLKPEMDEKGNLTTAGFACSQCGQPLFVYKLEQVSEKGKAYTNYFGRCNVAEHEKLILLAQLKPEKDSDEAVTYSLGKFGQRALDFYSIHVTKESTHPVKPLAQIAGNRYASGPVGKALRDACMGTIASFLSKYQDIIIEHQKVVKGNQKRLESLRELAGKENLEYPSVTLPPQPHTKEGVDAYNEVIARVRTWVNLNLWQKLKLSRDDAKPLLRLKGFPSFPLVERQANEVDWWDMVCNVKKLINEKKEDGKVFWQNLAGYKRQEALRPYLSSEEDRKKGKKFARYQLGDLLLHLEKKHGEDWGKVYDEAWERIDKKVEGLSKHIKLEEERRSEDAQSKAALTDWLRAKASFVIEGLKEADKDEFCRCELKLQKWYGDLRGKPFAIEAENSILDISGFSKQYNCAFIWQKDGVKKLNLYLIINYFKGGKLRFKKIKPEAFEANRFYTVINKKSGEIVPMEVNFNFDDPNLIILPLAFGKRQGREFIWNDLLSLETGSLKLANGRVIEKTLYNRRTRQDEPALFVALTFERREVLDSSNIKPMNLIGVDRGENIPAVIALTDPEGCPLSRFKDSLGNPTHILRIGESYKEKQRTIQAKKEVEQRRAGGYSRKYASKAKNLADDMVRNTARDLLYYAVTQDAMLIFENLSRGFGRQGKRTFMAERQYTRMEDWLTAKLAYEGLPSKTYLSKTLAQYTSKTCSNCGFTITSADYDRVLEKLKKTATGWMTTINGKELKVEGQITYYNRYKRQNVVKDLSVELDRLSEESVNNDISSWTKGRSGEALSLLKKRFSHRPVQEKFVCLNCGFETHADEQAALNIARSWLFLRSQEYKKYQTNKTTGNTDKRAFVETWQSFYRKKLKEVWKPAV

SEQ ID NO: 39807 - protein, 978 aa, synthetic construct
  REGION 1..978: note = engineered CasX variant
QEIKRINKIRRRLVKDSNTKKAGKTGPMKTLLVRVMTPDLRERLENLRKKPENIPQPISNTSQANLNKLLTDYTEMKKAILHVYWEEFQKDPVGLMSRVAQPASKKIDQNKLKPEMDEKGNLTTAGFACSQCGQPLFVYKLEQVSEKGKAYTNYFGRCNVAEHEKLILLAQLKPEKDSDEAVTYSLGKFGQRALDFYSIHVTKESTHPVKPLAQIAGNRYASGPVGKALRDACMGTIASFLSKYQDIIIEHQKVVKGNQKRLESLRELAGKENLEYPSVTLPPQPHTKEGVDAYNEVIARVRWWVNLNLWQKLKLSRDDAKPLLRLKGFPSFPLVERQANEVDWWDMVCNVKKLINEKKEDGKVFWQNLAGYKRQEALRPYLSSEEDRKKGKKFARYQLGDLLLHLEKKHGEDWGKVYDEAWERIDKKVEGLSKHIKLEEERRSEDAQSKAALTDWLRAKASFVIEGLKEADKDEFCRCELKLQKWYGDLRGKPFAIEAENSILDISGFSKQYNCAFIWQKDGVKKLNLYLIINYFKGGKLRFKKIKPEAFEANRFYTVINKKSGEIVPMEVNFNFDDPNLIILPLAFGKRQGREFIWNDLLSLETGSLKLANGRVIEKTLYNRRTRQDEPALFVALTFERREVLDSSNIKPMNLIGVDRGENIPAVIALTDPEGCPLSRFKDSLGNPTHILRIGESYKEKQRTIQAKKEVEQRRAGGYSRKYASKAKNLADDMVRNTARDLLYYAVTQDAMLIFENLSRGFGRQGKRTFMAERQYTRMEDWLTAKLAYEGLPSKTYLSKTLAQYTSKTCSNCGFTITSADYDRVLEKLKKTATGWMTTINGKELKVEGQITYYNRYKRQNVVKDLSVELDRLSEESVNNDISSWTKGRSGEALSLLKKRFSHRPVQEKFVCLNCGFETHADEQAALNIARSWLFLRSQEYKKYQTNKTTGNTDKRAFVETWQSFYRKKLKEVWKPAV

SEQ ID NO: 39808 - protein, 979 aa, synthetic construct
  REGION 1..979: note = engineered CasX variant
QEIKRINKIRRRLVKDSNTKKAGKTGPMKTLLVRVMTPDLRERLENLRKKPENIPQPISNTSQANLNKLLTDYTEMKKAILHVYWEEFQKDPVGLMSRVAQPASKKIDQNKLKPEMDEKGNLTTAGFACSQCGQPLFVYKLEQVSEKGKAYTNYFGRCNVAEHEKLILLAQLKPEKDSDEAVTYSLGKFGQRALDFYSIHVTKESTHPVKPLAQIAGNRYASGPVGKALRDACMGTIASFLSKYQDIIIEHQKVVKGNQKRLESLRELAGKENLEYPSVTLPPQPHTKEGVDAYNEVIARVRMWVNLNLWQKLKLSRDDAKPLLRLKGFPSFPLVERQQANEVDWWDMVCNVKKLINEKKEDGKVFWQNLAGYKRQEALRPYLSSEEDRKKGKKFARYQLGDLLLHLEKKHGEDWGKVYDEAWERIDKKVEGLSKHIKLEEERRSEDAQSKAALTDWLRAKASFVIEGLKEADKDEFCRCELKLQKWYGDLRGKPFAIEAENSILDISGFSKQYNCAFIWQKDGVKKLNLYLIINYFKGGKLRFKKIKPEAFEANRFYTVINKKSGEIVPMEVNFNFDDPNLIILPLAFGKRQGREFIWNDLLSLETGSLKLANGRVIEKTLYNRRTRQDEPALFVALTFERREVLDSSNIKPMNLIGVDRGENIPAVIALTDPEGCPLSRFKDSLGNPTHILRIGESYKEKQRTIQAKKEVEQRRAGGYSRKYASKAKNLADDMVRNTARDLLYYAVTQDAMLIFENLSRGFGRQGKRTFMAERQYTRMEDWLTAKLAYEGLPSKTYLSKTLAQYTSKTCSNCGFTITSADYDRVLEKLKKTATGWMTTINGKELKVEGQITYYNRYKRQNVVKDLSVELDRLSEESVNNDISSWTKGRSGEALSLLKKRFSHRPVQEKFVCLNCGFETHADEQAALNIARSWLFLRSQEYKKYQTNKTTGNTDKRAFVETWQSFYRKKLKEVWKPAV

SEQ ID NO: 39809 - protein, 979 aa, synthetic construct
  REGION 1..979: note = engineered CasX variant
QEIKRINKIRRRLVKDSNTKKAGKTGPMKTLLVRVMTPDLRERLENLRKKPENIPQPISNTSQANLNKLLTDYTEMKKAILHVYWEEFQKDPVGLMSRVAQPASKKIDQNKLKPEMDEKGNLTTAGFACSQCGQPLFVYKLEQVSEKGKAYTNYFGRCNVAEHEKLILLAQLKPEKDSDEAVTYSLGKFGQRALDFYSIHVTKESTHPVKPLAQIAGNRYASGPVGKALRDACMGTIASFLSKYQDIIIEHQKVVKGNQKRLESLRELAGKENLEYPSVTLPPQPHTKEGVDAYNEVIARVRMWVNLNLWQKLKLSRDDAKPLLRLKGFPSFPLVERQANAEVDWWDMVCNVKKLINEKKEDGKVFWQNLAGYKRQEALRPYLSSEEDRKKGKKFARYQLGDLLLHLEKKHGEDWGKVYDEAWERIDKKVEGLSKHIKLEEERRSEDAQSKAALTDWLRAKASFVIEGLKEADKDEFCRCELKLQKWYGDLRGKPFAIEAENSILDISGFSKQYNCAFIWQKDGVKKLNLYLIINYFKGGKLRFKKIKPEAFEANRFYTVINKKSGEIVPMEVNFNFDDPNLIILPLAFGKRQGREFIWNDLLSLETGSLKLANGRVIEKTLYNRRTRQDEPALFVALTFERREVLDSSNIKPMNLIGVDRGENIPAVIALTDPEGCPLSRFKDSLGNPTHILRIGESYKEKQRTIQAKKEVEQRRAGGYSRKYASKAKNLADDMVRNTARDLLYYAVTQDAMLIFENLSRGFGRQGKRTFMAERQYTRMEDWLTAKLAYEGLPSKTYLSKTLAQYTSKTCSNCGFTITSADYDRVLEKLKKTATGWMTTINGKELKVEGQITYYNRYKRQNVVKDLSVELDRLSEESVNNDISSWTKGRSGEALSLLKKRFSHRPVQEKFVCLNCGFETHADEQAALNIARSWLFLRSQEYKKYQTNKTTGNTDKRAFVETWQSFYRKKLKEVWKPAV

SEQ ID NO: 39810 - protein, 978 aa, synthetic construct
  REGION 1..978: note = engineered CasX variant
QEIKRINKIRRRLVKDSNTKKAGKTGPMKTLLVRVMTPDLRERLENLRKKPENIPQPISNTSQANLNKLLTDYTEMKKAILHVYWEEFQKDPVGLMSRVAQPASKKIDQNKLKPEMDEKGNLTTAGFACSQCGQPLFVYKLEQVSEKGKAYTNYFGRCNVAEHEKLILLAQLKPEKDSDEAVTYSLGKFGQRALDFYSIHVTKESTHPVKPLAQIAGNRYASGPVGKALRDACMGTIASFLSKYQDIIIEHQKVVKGNQKRLESLRELAGKENLEYPSVTLPPQPHTKEGVDAYNEVIARVRMWVNLNLWQKLKLSRDDAKPLLRLKGFPSFPLVERQANEVDWWDMVCNVKKLINEKKEDGKVFWQNLAGYKRQEALRPYLSSEEDRKKGKKFARTQLGDLLLHLEKKHGEDWGKVYDEAWERIDKKVEGLSKHIKLEEERRSEDAQSKAALTDWLRAKASFVIEGLKEADKDEFCRCELKLQKWYGDLRGKPFAIEAENSILDISGFSKQYNCAFIWQKDGVKKLNLYLIINYFKGGKLRFKKIKPEAFEANRFYTVINKKSGEIVPMEVNFNFDDPNLIILPLAFGKRQGREFIWNDLLSLETGSLKLANGRVIEKTLYNRRTRQDEPALFVALTFERREVLDSSNIKPMNLIGVDRGENIPAVIALTDPEGCPLSRFKDSLGNPTHILRIGESYKEKQRTIQAKKEVEQRRAGGYSRKYASKAKNLADDMVRNTARDLLYYAVTQDAMLIFENLSRGFGRQGKRTFMAERQYTRMEDWLTAKLAYEGLPSKTYLSKTLAQYTSKTCSNCGFTITSADYDRVLEKLKKTATGWMTTINGKELKVEGQITYYNRYKRQNVVKDLSVELDRLSEESVNNDISSWTKGRSGEALSLLKKRFSHRPVQEKFVCLNCGFETHADEQAALNIARSWLFLRSQEYKKYQTNKTTGNTDKRAFVETWQSFYRKKLKEVWKPAV

SEQ ID NO: 39811 - protein, 979 aa, synthetic construct
  REGION 1..979: note = engineered CasX variant
QEIKRINKIRRRLVKDSNTKKAGKTGPMKTLLVRVMTPDLRERLENLRKKPENIPQPISNTSQANLNKLLTDYTEMKKAILHVYWEEFQKDPVGLMSRVAQPASKKIDQNKLKPEMDEKGNLTTAGFACSQCGQPLFVYKLEQVSEKGKAYTNYFGRCNVAEHEKLILLAQLKPEKDSDEAVTYSLGKFGQRALDFYSIHVTKESTHPVKPLAQIAGNRYASGPVGKALRDACMGTIASFLSKYQDIIIEHQKVVKGNQKRLESLRELAGKENLEYPSVTLPPQPHTKEGVDAYNEVIARVRMWVNLNLWQKLKLSRDDAKPLLRLKGFPSFPLVERQANEVDWWDMVCNVKKLINEKKEDGKVFWQNLAGYKRQEALRPYLSSEEDRKKGKKFARYQLGDLLLHLEKKHEGEDWGKVYDEAWERIDKKVEGLSKHIKLEEERRSEDAQSKAALTDWLRAKASFVIEGLKEADKDEFCRCELKLQKWYGDLRGKPFAIEAENSILDISGFSKQYNCAFIWQKDGVKKLNLYLIINYFKGGKLRFKKIKPEAFEANRFYTVINKKSGEIVPMEVNFNFDDPNLIILPLAFGKRQGREFIWNDLLSLETGSLKLANGRVIEKTLYNRRTRQDEPALFVALTFERREVLDSSNIKPMNLIGVDRGENIPAVIALTDPEGCPLSRFKDSLGNPTHILRIGESYKEKQRTIQAKKEVEQRRAGGYSRKYASKAKNLADDMVRNTARDLLYYAVTQDAMLIFENLSRGFGRQGKRTFMAERQYTRMEDWLTAKLAYEGLPSKTYLSKTLAQYTSKTCSNCGFTITSADYDRVLEKLKKTATGWMTTINGKELKVEGQITYYNRYKRQNVVKDLSVELDRLSEESVNNDISSWTKGRSGEALSLLKKRFSHRPVQEKFVCLNCGFETHADEQAALNIARSWLFLRSQEYKKYQTNKTTGNTDKRAFVETWQSFYRKKLKEVWKPAV

SEQ ID NO: 39812 - protein, 978 aa, synthetic construct
  REGION 1..978: note = engineered CasX variant
QEIKRINKIRRRLVKDSNTKKAGKTGPMKTLLVRVMTPDLRERLENLRKKPENIPQPISNTSQANLNKLLTDYTEMKKAILHVYWEEFQKDPVGLMSRVAQPASKKIDQNKLKPEMDEKGNLTTAGFACSQCGQPLFVYKLEQVSEKGKAYTNYFGRCNVAEHEKLILLAQLKPEKDSDEAVTYSLGKFGQRALDFYSIHVTKESTHPVKPLAQIAGNRYASGPVGKALRDACMGTIASFLSKYQDIIIEHQKVVKGNQKRLESLRELAGKENLEYPSVTLPPQPHTKEGVDAYNEVIARVRMWVNLNLWQKLKLSRDDAKPLLRLKGFPSFPLVERQANEVDWWDMVCNVKKLINEKKEDGKVFWQNLAGYKRQEALRPYLSSEEDRKKGKKFARYQLGDLLLHLEKKHGEDWGKVYDEAWERIDKKVEGLSKHIKLEEERRSEDAQSKAALTDWLRAKASFVIEGLKEADKDEFCRCDLKLQKWYGDLRGKPFAIEAENSILDISGFSKQYNCAFIWQKDGVKKLNLYLIINYFKGGKLRFKKIKPEAFEANRFYTVINKKSGEIVPMEVNFNFDDPNLIILPLAFGKRQGREFIWNDLLSLETGSLKLANGRVIEKTLYNRRTRQDEPALFVALTFERREVLDSSNIKPMNLIGVDRGENIPAVIALTDPEGCPLSRFKDSLGNPTHILRIGESYKEKQRTIQAKKEVEQRRAGGYSRKYASKAKNLADDMVRNTARDLLYYAVTQDAMLIFENLSRGFGRQGKRTFMAERQYTRMEDWLTAKLAYEGLPSKTYLSKTLAQYTSKTCSNCGFTITSADYDRVLEKLKKTATGWMTTINGKELKVEGQITYYNRYKRQNVVKDLSVELDRLSEESVNNDISSWTKGRSGEALSLLKKRFSHRPVQEKFVCLNCGFETHADEQAALNIARSWLFLRSQEYKKYQTNKTTGNTDKRAFVETWQSFYRKKLKEVWKPAV

SEQ ID NO: 39813 - protein, 978 aa, synthetic construct
  REGION 1..978: note = engineered CasX variant
QEIKRINKIRRRLVKDSNTKKAGKTGPMKTLLVRVMTPDLRERLENLRKKPENIPQPISNTSQANLNKLLTDYTEMKKAILHVYWEEFQKDPVGLMSRVAQPASKKIDQNKLKPEMDEKGNLTTAGFACSQCGQPLFVYKLEQVSEKGKAYTNYFGRCNVAEHEKLILLAQLKPEKDSDEAVTYSLGKFGQRALDFYSIHVTKESTHPVKPLAQIAGNRYASGPVGKALRDACMGTIASFLSKYQDIIIEHQKVVKGNQKRLESLRELAGKENLEYPSVTLPPQPHTKEGVDAYNEVIARVRMWVNLNLWQKLKLSRDDAKPLLRLKGFPSFPLVERQANEVDWWDMVCNVKKLINEKKEDGKVFWQNLAGYKRQEALRPYLSSEEDRKKGKKFARYQLGDLLLHLEKKHGEDWGKVYDEAWERIDKKVEGLSKHIKLEEERRSEDAQSKAALTDWLRAKASFVIEGLKEADKDEFCRCELKLQKWYGDLRGKPFAIEAENSILDISGFSKQYNCAFIWQKDGVKKLNLYLIINYFKGGKLRFKKIKPEAFEANRFYTVINKKSGEIVPMEVNFNFDDPNLIILPLAFGKRFGREFIWNDLLSLETGSLKLANGRVIEKTLYNRRTRQDEPALFVALTFERREVLDSSNIKPMNLIGVDRGENIPAVIALTDPEGCPLSRFKDSLGNPTHILRIGESYKEKQRTIQAKKEVEQRRAGGYSRKYASKAKNLADDMVRNTARDLLYYAVTQDAMLIFENLSRGFGRQGKRTFMAERQYTRMEDWLTAKLAYEGLPSKTYLSKTLAQYTSKTCSNCGFTITSADYDRVLEKLKKTATGWMTTINGKELKVEGQITYYNRYKRQNVVKDLSVELDRLSEESVNNDISSWTKGRSGEALSLLKKRFSHRPVQEKFVCLNCGFETHADEQAALNIARSWLFLRSQEYKKYQTNKTTGNTDKRAFVETWQSFYRKKLKEVWKPAV

SEQ ID NO: 39814 - protein, 978 aa, synthetic construct
  REGION 1..978: note = engineered CasX variant
QEIKRINKIRRRLVKDSNTKKAGKTGPMKTLLVRVMTPDLRERLENLRKKPENIPQPISNTSQANLNKLLTDYTEMKKAILHVYWEEFQKDPVGLMSRVAQPASKKIDQNKLKPEMDEKGNLTTAGFACSQCGQPLFVYKLEQVSEKGKAYTNYFGRCNVAEHEKLILLAQLKPEKDSDEAVTYSLGKFGQRALDFYSIHVTKESTHPVKPLAQIAGNRYASGPVGKALRDACMGTIASFLSKYQDIIIEHQKVVKGNQKRLESLRELAGKENLEYPSVTLPPQPHTKEGVDAYNEVIARVRMWVNLNLWQKLKLSRDDAKPLLRLKGFPSFPLVERQANEVDWWDMVCNVKKLINEKKEDGKVFWQNLAGYKRQEALRPYLSSEEDRKKGKKFARYQLGDLLLHLEKKHGEDWGKVYDEAWERIDKKVEGLSKHIKLEEERRSEDAQSKAALTDWLRAKASFVIEGLKEADKDEFCRCELKLQKWYGDLRGKPFAIEAENSILDISGFSKQYNCAFIWQKDGVKKLNLYLIINYFKGGKLRFKKIKPEAFEANRFYTVINKKSGEIVPMEVNFNFDDPNLIILPLAFGKRVGREFIWNDLLSLETGSLKLANGRVIEKTLYNRRTRQDEPALFVALTFERREVLDSSNIKPMNLIGVDRGENIPAVIALTDPEGCPLSRFKDSLGNPTHILRIGESYKEKQRTIQAKKEVEQRRAGGYSRKYASKAKNLADDMVRNTARDLLYYAVTQDAMLIFENLSRGFGRQGKRTFMAERQYTRMEDWLTAKLAYEGLPSKTYLSKTLAQYTSKTCSNCGFTITSADYDRVLEKLKKTATGWMTTINGKELKVEGQITYYNRYKRQNVVKDLSVELDRLSEESVNNDISSWTKGRSGEALSLLKKRFSHRPVQEKFVCLNCGFETHADEQAALNIARSWLFLRSQEYKKYQTNKTTGNTDKRAFVETWQSFYRKKLKEVWKPAV

SEQ ID NO: 39815 - protein, 979 aa, synthetic construct
  REGION 1..979: note = engineered CasX variant
QEIKRINKIRRRLVKDSNTKKAGKTGPMKTLLVRVMTPDLRERLENLRKKPENIPQPISNTSQANLNKLLTDYTEMKKAILHVYWEEFQKDPVGLMSRVAQPASKKIDQNKLKPEMDEKGNLTTAGFACSQCGQPLFVYKLEQVSEKGKAYTNYFGRCNVAEHEKLILLAQLKPEKDSDEAVTYSLGKFGQRALDFYSIHVTKESTHPVKPLAQIAGNRYASGPVGKALRDACMGTIASFLSKYQDIIIEHQKVVKGNQKRLESLRELAGKENLEYPSVTLPPQPHTKEGVDAYNEVIARVRMWVNLNLWQKLKLSRDDAKPLLRLKGFPSFPLVERQANEVDWWDMVCNVKKLINEKKEDGKVFWQNLAGYKRQEALRPYLSSEEDRKKGKKFARYQLGDLLLHLEKKHGEDWGKVYDEAWERIDKKVEGLSKHIKLEEERRSEDAQSKAALTDWLRAKASFVIEGLKEADKDEFCRCELKLQKWYGDLRGKPFAIEAENSILDISGFSKQYNCAFIWQKDGVKKLNLYLIINYFKGGKLRFKKIKPEAFEANRFYTVINKKSGEIVPMEVNFNFDDPNLIILPLAFGKRQGREFIWNDLLSLETGSLKLANGRVIEKTLYNRRTRQDEPALFVALTFERREVLDSSNIKTPMNLIGVDRGENIPAVIALTDPEGCPLSRFKDSLGNPTHILRIGESYKEKQRTIQAKKEVEQRRAGGYSRKYASKAKNLADDMVRNTARDLLYYAVTQDAMLIFENLSRGFGRQGKRTFMAERQYTRMEDWLTAKLAYEGLPSKTYLSKTLAQYTSKTCSNCGFTITSADYDRVLEKLKKTATGWMTTINGKELKVEGQITYYNRYKRQNVVKDLSVELDRLSEESVNNDISSWTKGRSGEALSLLKKRFSHRPVQEKFVCLNCGFETHADEQAALNIARSWLFLRSQEYKKYQTNKTTGNTDKRAFVETWQSFYRKKLKEVWKPAV

SEQ ID NO: 39816 - protein, 979 aa, synthetic construct
  REGION 1..979: note = engineered CasX variant
QEIKRINKIRRRLVKDSNTKKAGKTGPMKTLLVRVMTPDLRERLENLRKKPENIPQPISNTSQANLNKLLTDYTEMKKAILHVYWEEFQKDPVGLMSRVAQPASKKIDQNKLKPEMDEKGNLTTAGFACSQCGQPLFVYKLEQVSEKGKAYTNYFGRCNVAEHEKLILLAQLKPEKDSDEAVTYSLGKFGQRALDFYSIHVTKESTHPVKPLAQIAGNRYASGPVGKALRDACMGTIASFLSKYQDIIIEHQKVVKGNQKRLESLRELAGKENLEYPSVTLPPQPHTKEGVDAYNEVIARVRMWVNLNLWQKLKLSRDDAKPLLRLKGFPSFPLVERQANEVDWWDMVCNVKKLINEKKEDGKVFWQNLAGYKRQEALRPYLSSEEDRKKGKKFARYQLGDLLLHLEKKHGEDWGKVYDEAWERIDKKVEGLSKHIKLEEERRSEDAQSKAALTDWLRAKASFVIEGLKEADKDEFCRCELKLQKWYGDLRGKPFAIEAENSILDISGFSKQYNCAFIWQKDGVKKLNLYLIINYFKGGKLRFKKIKPEAFEANRFYTVINKKSGEIVPMEVNFNFDDPNLIILPLAFGKRQGREFIWNDLLSLETGSLKLANGRVIEKTLYNRRTRQDEPALFVALTFERREVLDSSNIKPMSNLIGVDRGENIPAVIALTDPEGCPLSRFKDSLGNPTHILRIGESYKEKQRTIQAKKEVEQRRAGGYSRKYASKAKNLADDMVRNTARDLLYYAVTQDAMLIFENLSRGFGRQGKRTFMAERQYTRMEDWLTAKLAYEGLPSKTYLSKTLAQYTSKTCSNCGFTITSADYDRVLEKLKKTATGWMTTINGKELKVEGQITYYNRYKRQNVVKDLSVELDRLSEESVNNDISSWTKGRSGEALSLLKKRFSHRPVQEKFVCLNCGFETHADEQAALNIARSWLFLRSQEYKKYQTNKTTGNTDKRAFVETWQSFYRKKLKEVWKPAV

SEQ ID NO: 39817 - protein, 978 aa, synthetic construct
  REGION 1..978: note = engineered CasX variant
QEIKRINKIRRRLVKDSNTKKAGKTGPMKTLLVRVMTPDLRERLENLRKKPENIPQPISNTSQANLNKLLTDYTEMKKAILHVYWEEFQKDPVGLMSRVAQPASKKIDQNKLKPEMDEKGNLTTAGFACSQCGQPLFVYKLEQVSEKGKAYTNYFGRCNVAEHEKLILLAQLKPEKDSDEAVTYSLGKFGQRALDFYSIHVTKESTHPVKPLAQIAGNRYASGPVGKALRDACMGTIASFLSKYQDIIIEHQKVVKGNQKRLESLRELAGKENLEYPSVTLPPQPHTKEGVDAYNEVIARVRMWVNLNLWQKLKLSRDDAKPLLRLKGFPSFPLVERQANEVDWWDMVCNVKKLINEKKEDGKVFWQNLAGYKRQEALRPYLSSEEDRKKGKKFARYQLGDLLLHLEKKHGEDWGKVYDEAWERIDKKVEGLSKHIKLEEERRSEDAQSKAALTDWLRAKASFVIEGLKEADKDEFCRCELKLQKWYGDLRGKPFAIEAENSILDISGFSKQYNCAFIWQKDGVKKLNLYLIINYFKGGKLRFKKIKPEAFEANRFYTVINKKSGEIVPMEVNFNFDDPNLIILPLAFGKRQGREFIWNDLLSLETGSLKLANGRVIEKTLYNRRTRQDEPALFVALTFERREVLDSSNIKPMNLIGVDRGENIPAVIALTDPEGCPLSRFKDSLGNPTHILRIRESYKEKQRTIQAKKEVEQRRAGGYSRKYASKAKNLADDMVRNTARDLLYYAVTQDAMLIFENLSRGFGRQGKRTFMAERQYTRMEDWLTAKLAYEGLPSKTYLSKTLAQYTSKTCSNCGFTITSADYDRVLEKLKKTATGWMTTINGKELKVEGQITYYNRYKRQNVVKDLSVELDRLSEESVNNDISSWTKGRSGEALSLLKKRFSHRPVQEKFVCLNCGFETHADEQAALNIARSWLFLRSQEYKKYQTNKTTGNTDKRAFVETWQSFYRKKLKEVWKPAV

SEQ ID NO: 39818 - protein, 978 aa, synthetic construct
  REGION 1..978: note = engineered CasX variant
QEIKRINKIRRRLVKDSNTKKAGKTGPMKTLLVRVMTPDLRERLENLRKKPENIPQPISNTSQANLNKLLTDYTEMKKAILHVYWEEFQKDPVGLMSRVAQPASKKIDQNKLKPEMDEKGNLTTAGFACSQCGQPLFVYKLEQVSEKGKAYTNYFGRCNVAEHEKLILLAQLKPEKDSDEAVTYSLGKFGQRALDFYSIHVTKESTHPVKPLAQIAGNRYASGPVGKALRDACMGTIASFLSKYQDIIIEHQKVVKGNQKRLESLRELAGKENLEYPSVTLPPQPHTKEGVDAYNEVIARVRMWVNLNLWQKLKLSRDDAKPLLRLKGFPSFPLVERQANEVDWWDMVCNVKKLINEKKEDGKVFWQNLAGYKRQEALRPYLSSEEDRKKGKKFARYQLGDLLLHLEKKHGEDWGKVYDEAWERIDKKVEGLSKHIKLEEERRSEDAQSKAALTDWLRAKASFVIEGLKEADKDEFCRCELKLQKWYGDLRGKPFAIEAENSILDISGFSKQYNCAFIWQKDGVKKLNLYLIINYFKGGKLRFKKIKPEAFEANRFYTVINKKSGEIVPMEVNFNFDDPNLIILPLAFGKRQGREFIWNDLLSLETGSLKLANGRVIEKTLYNRRTRQDEPALFVALTFERREVLDSSNIKPMNLIGVDRGENIPAVIALTDPEGCPLSRFKDSLGNPTHILRIGESYKEKQRTIQAKKEVEQRRAGGYSRKYASKAKNLADDMVRNTARDLLYYAVTQDAMLIFENLSRGFGRQGKRTFSAERQYTRMEDWLTAKLAYEGLPSKTYLSKTLAQYTSKTCSNCGFTITSADYDRVLEKLKKTATGWMTTINGKELKVEGQITYYNRYKRQNVVKDLSVELDRLSEESVNNDISSWTKGRSGEALSLLKKRFSHRPVQEKFVCLNCGFETHADEQAALNIARSWLFLRSQEYKKYQTNKTTGNTDKRAFVETWQSFYRKKLKEVWKPAV

SEQ ID NO: 39819 - protein, 978 aa, synthetic construct
  REGION 1..978: note = engineered CasX variant
QEIKRINKIRRRLVKDSNTKKAGKTGPMKTLLVRVMTPDLRERLENLRKKPENIPQPISNTSQANLNKLLTDYTEMKKAILHVYWEEFQKDPVGLMSRVAQPASKKIDQNKLKPEMDEKGNLTTAGFACSQCGQPLFVYKLEQVSEKGKAYTNYFGRCNVAEHEKLILLAQLKPEKDSDEAVTYSLGKFGQRALDFYSIHVTKESTHPVKPLAQIAGNRYASGPVGKALRDACMGTIASFLSKYQDIIIEHQKVVKGNQKRLESLRELAGKENLEYPSVTLPPQPHTKEGVDAYNEVIARVRMWVNLNLWQKLKLSRDDAKPLLRLKGFPSFPLVERQANEVDWWDMVCNVKKLINEKKEDGKVFWQNLAGYKRQEALRPYLSSEEDRKKGKKFARYQLGDLLLHLEKKHGEDWGKVYDEAWERIDKKVEGLSKHIKLEEERRSEDAQSKAALTDWLRAKASFVIEGLKEADKDEFCRCELKLQKWYGDLRGKPFAIEAENSILDISGFSKQYNCAFIWQKDGVKKLNLYLIINYFKGGKLRFKKIKPEAFEANRFYTVINKKSGEIVPMEVNFNFDDPNLIILPLAFGKRQGREFIWNDLLSLETGSLKLANGRVIEKTLYNRRTRQDEPALFVALTFERREVLDSSNIKPMNLIGVDRGENIPAVIALTDPEGCPLSRFKDSLGNPTHILRIGESYKEKQRTIQAKKEVEQRRAGGYSRKYASKAKNLADDMVRNTARDLLYYAVTQDAMLIFENLSRGFGRQGKRTFMAERQYTRMEDWLTAKLAYEGLPSKTYLSKTLAQYTSKTCSNCGFTITSADYDRVLEKLKKTATGWMTTINGKELKVEGQITYYNRYKRQNVVKDLSVELDRLSEESVNNDISSWDKGRSGEALSLLKKRFSHRPVQEKFVCLNCGFETHADEQAALNIARSWLFLRSQEYKKYQTNKTTGNTDKRAFVETWQSFYRKKLKEVWKPAV

SEQ ID NO: 39820 - protein, 978 aa, synthetic construct
  REGION 1..978: note = engineered CasX variant
QEIKRINKIRRRLVKDSNTKKAGKTGPMKTLLVRVMTPDLRERLENLRKKPENIPQPISNTSQANLNKLLTDYTEMKKAILHVYWEEFQVDPVGLMSRVAQPASKKIDQNKLKPEMDEKGNLTTAGFACSQCGQPLFVYKLEQVSEKGKAYTNYFGRCNVAEHEKLILLAQLKPEKDSDEAVTYSLGKFGQRALDFYSIHVTKESTHPVKPLAQIAGNRYASGPVGKALRDACMGTIASFLSKYQDIIIEHQKVVKGNQKRLESLRELAGKENLEYPSVTLPPQPHTKEGVDAYNEVIARVRMWVNLNLWQKLKLSRDDAKPLLRLKGFPSFPLVERQANEVDWWDMVCNVKKLINEKKEDGKVFWQNLAGYKRQEALRPYLSSEEDRKKGKKFARYQLGDLLLHLEKKHGEDWGKVYDEAWERIDKKVEGLSKHIKLEEERRSEDAQSKAALTDWLRAKASFVIEGLKEADKDEFCRCELKLQKWYGDLRGKPFAIEAENSILDISGFSKQYNCAFIWQKDGVKKLNLYLIINYFKGGKLRFKKIKPEAFEANRFYTVINKKSGEIVPMEVNFNFDDPNLIILPLAFGKRQGREFIWNDLLSLETGSLKLANGRVIEKTLYNRRTRQDEPALFVALTFERREVLDSSNIKPMNLIGVDRGENIPAVIALTDPEGCPLSRFKDSLGNPTHILRIGESYKEKQRTIQAKKEVEQRRAGGYSRKYASKAKNLADDMVRNTARDLLYYAVTQDAMLIFENLSRGFGRQGKRTFMAERQYTRMEDWLTAKLAYEGLPSKTYLSKTLAQYTSKTCSNCGFTITSADYDRVLEKLKKTATGWMTTINGKELKVEGQITYYNRYKRQNVVKDLSVELDRLSEESVNNDISSWTKGRSGEALSLLKKRFSHRPVQEKFVCLNCGFETHADEQAALNIARSWLFLRSQEYKKYQTNKTTGNTDKRAFVETWQSFYRKKLKEVWKPAV

SEQ ID NO: 39821 - protein, 978 aa, synthetic construct
  REGION 1..978: note = engineered CasX variant
QEIKRLNKIRRRLVKDSNTKKAGKTGPMKTLLVRVMTPDLRERLENLRKKPENIPQPISNTSQANLNKLLTDYTEMKKAILHVYWEEFQKDPVGLMSRVAQPASKKIDQNKLKPEMDEKGNLTTAGFACSQCGQPLFVYKLEQVSEKGKAYTNYFGRCNVAEHEKLILLAQLKPEKDSDEAVTYSLGKFGQRALDFYSIHVTKESTHPVKPLAQIAGNRYASGPVGKALRDACMGTIASFLSKYQDIIIEHQKVVKGNQKRLESLRELAGKENLEYPSVTLPPQPHTKEGVDAYNEVIARVRMWVNLNLWQKLKLSRDDAKPLLRLKGFPSFPLVERQANEVDWWDMVCNVKKLINEKKEDGKVFWQNLAGYKRQEALRPYLSSEEDRKKGKKFARYQLGDLLLHLEKKHGEDWGKVYDEAWERIDKKVEGLSKHIKLEEERRSEDAQSKAALTDWLRAKASFVIEGLKEADKDEFCRCELKLQKWYGDLRGKPFAIEAENSILDISGFSKQYNCAFIWQKDGVKKLNLYLIINYFKGGKLRFKKIKPEAFEANRFYTVINKKSGEIVPMEVNFNFDDPNLIILPLAFGKRQGREFIWNDLLSLETGSLKLANGRVIEKTLYNRRTRQDEPALFVALTFERREVLDSSNIKPMNLIGVDRGENIPAVIALTDPEGCPLSRFKDSLGNPTHILRIGESYKEKQRTIQAKKEVEQRRAGGYSRKYASKAKNLADDMVRNTARDLLYYAVTQDAMLIFENLSRGFGRQGKRTFMAERQYTRMEDWLTAKLAYEGLPSKTYLSKTLAQYTSKTCSNCGFTITSADYDRVLEKLKKTATGWMTTINGKELKVEGQITYYNRYKRQNVVKDLSVELDRLSEESVNNDISSWTKGRSGEALSLLKKRFSHRPVQEKFVCLNCGFETHADEQAALNIARSWLFLRSQEYKKYQTNKTTGNTDKRAFVETWQSFYRKKLKEVWKPAV

SEQ ID NO: 39822 - protein, 978 aa, synthetic construct
  REGION 1..978: note = engineered CasX variant
QEIKRINKIRRRLVKDSNTKKAGKTGPMKTLLVRVMTPDLRERLENLRKKPENIPQPISNTSQANLNKLLTDYTEMKKAILHVYWEEFQKDPVGLMSRVAQPASKKIDQNKLKPEMDEKGNLTTAGFACSQCGQPLFVYKLEQVSEKGKAYTNYVGRCNVAEHEKLILLAQLKPEKDSDEAVTYSLGKFGQRALDFYSIHVTKESTHPVKPLAQIAGNRYASGPVGKALRDACMGTIASFLSKYQDIIIEHQKVVKGNQKRLESLRELAGKENLEYPSVTLPPQPHTKEGVDAYNEVIARVRMWVNLNLWQKLKLSRDDAKPLLRLKGFPSFPLVERQANEVDWWDMVCNVKKLINEKKEDGKVFWQNLAGYKRQEALRPYLSSEEDRKKGKKFARYQLGDLLLHLEKKHGEDWGKVYDEAWERIDKKVEGLSKHIKLEEERRSEDAQSKAALTDWLRAKASFVIEGLKEADKDEFCRCELKLQKWYGDLRGKPFAIEAENSILDISGFSKQYNCAFIWQKDGVKKLNLYLIINYFKGGKLRFKKIKPEAFEANRFYTVINKKSGEIVPMEVNFNFDDPNLIILPLAFGKRQGREFIWNDLLSLETGSLKLANGRVIEKTLYNRRTRQDEPALFVALTFERREVLDSSNIKPMNLIGVDRGENIPAVIALTDPEGCPLSRFKDSLGNPTHILRIGESYKEKQRTIQAKKEVEQRRAGGYSRKYASKAKNLADDMVRNTARDLLYYAVTQDAMLIFENLSRGFGRQGKRTFMAERQYTRMEDWLTAKLAYEGLPSKTYLSKTLAQYTSKTCSNCGFTITSADYDRVLEKLKKTATGWMTTINGKELKVEGQITYYNRYKRQNVVKDLSVELDRLSEESVNNDISSWTKGRSGEALSLLKKRFSHRPVQEKFVCLNCGFETHADEQAALNIARSWLFLRSQEYKKYQTNKTTGNTDKRAFVETWQSFYRKKLKEVWKPAV

SEQ ID NO: 39823 - protein, 978 aa, synthetic construct
  REGION 1..978: note = engineered CasX variant
QEIKRINKIRRRLVKDSNTKKAGKTGPMKTLLVRVMTPDLRERLENLRKKPENIPQPISNTSQANLNKLLTDYTEMKKAILHVYWEEFQKDPVGLMSRVAQPASKKIDQNKLKPEMDEKGNLTTAGFACSQCGQPLFVYKLEQVSEKGKAYTNYFGRCNVAEHEKLILLAQLKPEKDSDEAVTYSLGKFGQRALDFYSIHVTKESTHPVKPLAQIAGNRYASGPVGKALRDACMGTIASFLSKYQDIIIEHQKVVKGNQKRLESLRELAGKENLEYPSVTLPPQPHTKEGVDAYNEVIARVRMWVNLNLWQKLKLSRDDAKPLLRLKGFPSFPLVERQANEVDWWDMVCNVKKLINEKKEDGKVFWQNLAGYKRQEALRPYLSSEEDRKKGKKFARYQLGDLLLHLEKKHGEDWGKVYDEAWERIDKKVEGLSKHIKLEEERRSEDAQSKAALTDWLRAKASFVIEGLKEADKDEFCRCELKLQKWYGDLRGKPFAIEAENSILDISGFSKQYNCAFIWQKDGVKKLNLYLIINYFKGGKLRFKKIKPEAFEANRFYTVINKKSGEIVPMEVNFNFDDPNLIILPLAFGKRQGREFIWNDLLSLETGSLKLANGRVIEKTLYNRRTRQDEPALFVALTFERREVLDSSNIKPMNLIGVDRGENIPAVIALTDPEGCPLSRFKDSLGNPTHILRIGESYKEKQRTIQAKKEVEQRRAGGYSRKYASKAKNLADDMVRNTARDLLYYAVTQDAMLIFENLSRGFGRQGKRTFMAERQYTRMEDWLTAKLAYEGLASKTYLSKTLAQYTSKTCSNCGFTITSADYDRVLEKLKKTATGWMTTINGKELKVEGQITYYNRYKRQNVVKDLSVELDRLSEESVNNDISSWTKGRSGEALSLLKKRFSHRPVQEKFVCLNCGFETHADEQAALNIARSWLFLRSQEYKKYQTNKTTGNTDKRAFVETWQSFYRKKLKEVWKPAV

SEQ ID NO: 39824 - protein, 978 aa, synthetic construct
  REGION 1..978: note = engineered CasX variant
QEIKRINKIRRRLVKDSNTKKAGKTGPMKTLLVRVMTPDLRERLENLRKKPENIPQPISNTSQANLNKLLTDYTEMKKAILHVYWEEFQKDPVGLMSRVAQPASKKIDQNKLKPEMDEKGNLTTAGFACSQCGQPLFVYKLEQVSEKGKAYTNYFGRCNVAEHEKLILLAQLKPEKDSDEAVTYSLGKFGQRALDFYSIHVTKESTHPVKPLAQIAGNRYASGPVGKALRDACMGTIASFLSKYQDIIIEHQKVVKGNQKRLESLRELAGKENLEYPSVTLPPQPHTKEGVDAYNEVIARVRMWVNLNLWQKLKLSRDDAKPLLRLKGFPSFPLVERQANEVDWWDMVCNVKKLINEKKEDGKVFWQNLAGYKRQEALRPYLSSEEDRKKGKKFARYQLGDLLLHLEKKHGEDWGKVYDEAWERIDKKVEGLSKHIKLEEERRSEDAQSKAALTDWLRAKASFVIEGLKEADKDEFCRCELKLQKWYGDLRGKPFAIEAENSILDISGFSKQYNCAFIWQKDGVKKLNLYLIINYFKGGKLRFKKIKPEAFEANRFYTVINKKSGEIVPMEVNFNFDDPNLIILPLAFGKRQGREFIWNDLLSLETGSLKLANGRVIEKTLYNRRTRQDEPALFVALTFERREVLDSSNIKPMNLIGVDRGENIPAVIALTDPEGCPLSRFKDSLGNPTHILRIGESYKEKQRTIQAKKEVEQRRAGGYSRKYASKAKNLADDMVRNTARDLLYYAVTQDAMLIFENLSRGFGRQGKRTFMAERQYTRMEDWLTAKLAYEGLPSKVYLSKTLAQYTSKTCSNCGFTITSADYDRVLEKLKKTATGWMTTINGKELKVEGQITYYNRYKRQNVVKDLSVELDRLSEESVNNDISSWTKGRSGEALSLLKKRFSHRPVQEKFVCLNCGFETHADEQAALNIARSWLFLRSQEYKKYQTNKTTGNTDKRAFVETWQSFYRKKLKEVWKPAV

SEQ ID NO: 39825 - protein, 979 aa, synthetic construct
  REGION 1..979: note = engineered CasX variant
QEIKRINKIRRRLVKDSNTKKAGKTGPMKTLLVRVMTPDLRERLENLRKKPENIPQPISNTSQANLNKLLTDYTEMKKAILHVYWEEFQKDPVGLMSRVAQPASKKIDQNKLKPEMDEKGNLTTAGFACSQCGQPLFVYKLEQVSEKGKAYTNYFGRCNVAEHEKLILLAQLKPEKDSDEAVTYSLGKFGQRALDFYSIHVTKESTHPVKPLAQIAGNRYASGPVGKALRDACMGTIASFLSKYQDIIIEHQKVVKGNQKRLESLRELAGKENLEYPSVTLPPQPHTKEGVDAYNEVIARVRMWVNLNLWQKLKLSRDDAKPLLRLKGFPSFPLVERQANEVDWWDMVCNVKKLINEKKEDGKVFWQNLAGYKRQEALRPYLSSEEDRKKGKKFARYQLGDLLLHLEKKHGEDWGKVYDEAWERIDKKVEGLSKHIKLEEERRSEDAQSKAALTDWLRAKASFVIEGLKEADKDEFCRCELKLQKWYGDLRGKPFAIEAENSILDISGFSKQYNCAFIWQKDGVKKLNLYLIINYFKGGKLRFKKIKPEAFEANRFYTVINKKSGEIVPMEVNFNFDDPNLIILPLAFGKRQGREFIWNDLLSLETGSLKLANGRVIEKTLYNRRTRQDEPALFVALTFERREVLDSSNIKPMNLIGVDRGENIPAVIALTDPEGCPLSRFKDSLGNPTHILRIGESYKEKQRTIQAKKEVEQRRAGGYSRKYASKAKNLADDMVRNTARDLLYYAVTQDAMLIFENLSRGFGRQGKRTFMAERQYTRMEDWLTAKLAYEGPLPSKTYLSKTLAQYTSKTCSNCGFTITSADYDRVLEKLKKTATGWMTTINGKELKVEGQITYYNRYKRQNVVKDLSVELDRLSEESVNNDISSWTKGRSGEALSLLKKRFSHRPVQEKFVCLNCGFETHADEQAALNIARSWLFLRSQEYKKYQTNKTTGNTDKRAFVETWQSFYRKKLKEVWKPAV

SEQ ID NO: 39826 - protein, 979 aa, synthetic construct
  REGION 1..979: note = engineered CasX variant
QEIKRINKIRRRLVKDSNTKKAGKTGPMKTLLVRVMTPDLRERLENLRKKPENIPQPISNTSQANLNKLLTDYTEMKKAILHVYWEEFQKDPVGLMSRVAQPASKKIDQNKLKPEMDEKGNLTTAGFACSQCGQPLFVYKLEQVSEKGKAYTNYFGRCNVAEHEKLILLAQLKPEKDSDEAVTYSLGKFGQRALDFYSIHVTKESTHPVKPLAQIAGNRYASGPVGKALRDACMGTIASFLSKYQDIIIEHQKVVKGNQKRLESLRELAGKENLEYPSVTLPPQPHTKEGVDAYNEVIARVRMWVNLNLWQKLKLSRDDAKPLLRLKGFPSFPLVERQANEVDWWDMVCNVKKLINEKKEDGKVFWQNLAGYKRQEALRPYLSSEEDVRKKGKKFARYQLGDLLLHLEKKHGEDWGKVYDEAWERIDKKVEGLSKHIKLEEERRSEDAQSKAALTDWLRAKASFVIEGLKEADKDEFCRCELKLQKWYGDLRGKPFAIEAENSILDISGFSKQYNCAFIWQKDGVKKLNLYLIINYFKGGKLRFKKIKPEAFEANRFYTVINKKSGEIVPMEVNFNFDDPNLIILPLAFGKRQGREFIWNDLLSLETGSLKLANGRVIEKTLYNRRTRQDEPALFVALTFERREVLDSSNIKPMNLIGVDRGENIPAVIALTDPEGCPLSRFKDSLGNPTHILRIGESYKEKQRTIQAKKEVEQRRAGGYSRKYASKAKNLADDMVRNTARDLLYYAVTQDAMLIFENLSRGFGRQGKRTFMAERQYTRMEDWLTAKLAYEGLPSKTYLSKTLAQYTSKTCSNCGFTITSADYDRVLEKLKKTATGWMTTINGKELKVEGQITYYNRYKRQNVVKDLSVELDRLSEESVNNDISSWTKGRSGEALSLLKKRFSHRPVQEKFVCLNCGFETHADEQAALNIARSWLFLRSQEYKKYQTNKTTGNTDKRAFVETWQSFYRKKLKEVWKPAV

SEQ ID NO: 39827 - protein, 978 aa, synthetic construct
  REGION 1..978: note = engineered CasX variant
QEIKRINKIRRRLVKDSNTKKAGKTGPMKTLLVRVMTPDLRERLENLRKKPENIPQPISNTSQANLNKLLTDYTEMKKAILHVYWEEFQKDPVGLMSRVAQPASKKIDQNKLKPEMDEKGNLTTAGFACSQCGQPLFVYKLEQVSEKGKAYTNYFGRCNVAEHEKLILLAQLKPEKDSDEAVTYSLGKFGQRALDFYSIHVTKESTHPVKPLAQIAGNRYASGPVGKALRDACMGTIASFLSKYQDIIIEHQKVVKGNQKRLESLRELAGKENLEYPSVTLPPQPHTKEGVDAYNEVIARVRMWVNLNLWQKLKLSRDDAKPLLRLKGFPSFPLVERQANEVDWWDMVCNVKKLINEKKEDGKVFWQNLAGYKRQEALRPYLSSEEDRKKGKKFARYQLGDLLLHLEKKHGEDWGKVYDEAWERIDKKVEGLSKHIKLEEERRSEDAQSKAALTDWLRAKASFVIEGLKEADKDEFCRCELKLQKWYGDLRGKPFAIEAENSILDISGFSKQYNCAFIWQKDGVKKLNLYLIINYFKGGKLRFKKIKPEAFEANRFYTVINKKSGEIVPMEVNFNFDDPNLIILPLAFGKRQGREFIWNDLLSLETGSLKLANGRVIEKTLYNRRTRQDEPALFVALTFERREVLDSSNIKPMNLIGVDRGENIPAVIALTDPEGCPLSRFKDSLGNPTHILRIGESYKEKQRTIQAKKEVEQRRAGGYSRKYASKAKNLADDMVRNTARDLLYYAVTQDAMLIFENLSRGFGRQGKRTFMAERQYTRMEDWLTAKLAYEGLPSKTYLSKTLAQYTSKTCSNCGFTITSADYDRMLEKLKKTATGWMTTINGKELKVEGQITYYNRYKRQNVVKDLSVELDRLSEESVNNDISSWTKGRSGEALSLLKKRFSHRPVQEKFVCLNCGFETHADEQAALNIARSWLFLRSQEYKKYQTNKTTGNTDKRAFVETWQSFYRKKLKEVWKPAV

SEQ ID NO: 39828 - protein, 978 aa, synthetic construct
  REGION 1..978: note = engineered CasX variant
QEIKRINKIRRRLVKDSNTKKAGKTGPMKTLLVRVMTPDLRERLENLRKKPENIPQPISNTSQANLNKLLTDYTEMKKAILHVYWEEFQKDPVGLMSRVAQPASKKIDQNKLKPEMDEKGNLTTAGFACSQCGQPLFVYKLEQVSEKGKAYTNYFGRCNVAEHEKLILLAQLKPEKDSDEAVTYSLGKFGQRALDFYSIHVTKESTHPVKPLAQIAGNRYASGPVGKALRDACMGTIASFLSKYQDIIIEHQKVVKGNQKRLESLRELAGKENLEYPSVTLPPQPHTKEGVDAYNEVIARVRMWVNLNLWQKLKLSRDDAKPLLRLKGFPSFPLVERQANEVDWWDMVCNVKKLINEKKEDGKVFWQNLAGYKRQEALRPYLSSEEDRKKGKKFARYQLGDLLLHLEKKHGEDWGKVYDEAWERIDKKVEGLSKHIKLEEERRSEDAQSKAALTDWLRAKASFVIEGLKEADKDEFCRCELKLQKWYGDLRGKPFAIEAENSILDISGFSKQYNCAFIWQKDGVKKLNLYLIINYFKGGKLRFKKIKPEAFEANRFYTVINKKSGEIVPMEVNFNFDDPNLIILPLAFGKRQGREFIWNDLLSLETGSLKLANGRVIEKTLYNRRTRQDEPALFVALTFERREVLDSSNIKPMNLIGVDRGENIPAVIALTDPEGCPLSRFKDSLGNPTHILRIGESYKEKQRTIQAKKEVEQRRAGGYSRKYASKAKNLADDMVRNTARDLLYYAVTQDAMLIFENLSRGFGRQGKRTFMAERQYTRMEDWLTAKLAYEGLPSKTYLSKTLAQYTSKTCSNCGFTITSADYDRVLEKLKKTATGWMTTINGKELKVEGQITYYNRYKRQNVVKDLSVELDRLSEESVNNDISSWTKGRQGEALSLLKKRFSHRPVQEKFVCLNCGFETHADEQAALNIARSWLFLRSQEYKKYQTNKTTGNTDKRAFVETWQSFYRKKLKEVWKPAV

SEQ ID NO: 39829 - protein, 978 aa, synthetic construct
  REGION 1..978: note = engineered CasX variant
QEIKRINKIRRRLVKDSNTKKAGKTGPMKTLLVRVMTPDLRERLENLRKKPENIPQPISNTSQANLNKLLTDYTEMKKAILHVYWEEFQKDPVGLMSRVAQPASKKIDQNKLKPEMDEKGNLTTAGFACSQCGQPLFVYKLEQVSEKGKAYTNYFGRCNVAEHEKLILLAQLKPEKDSDEAVTYSLGKFGQRALDFYSIHVTKESTHPVKPLAQIAGNRYASGPVGKALRDACMGTIASFLSKYQDIIIEHQKVVKGNQKRLESLRELAGKENLEYPSVTLPPQPHTKEGVDAYNEVIARVRMWVNLNLWQKLKLSRDDAKPLLRLKGFPSFPLVERQANEVDWWDMVCNVKKLINEKKEDGKVFWQNLAGYKRQEALRPYLSSEEDRKKGKKFARYQLGDLLLHLEKKHGEDWGKVYDEAWERIDKKVEGLSKHIKLEEERRSEDAQSKAALTDWLRAKASFVIEGLKEADKDEFCRCELKLQKWYGDLRGKPFAIEAENSILDISGFSKQYNCAFIWQKDGVKKLNLYLIINYFKGGKLRFKKIKPEAFEANRFYTVINKKSGEIVPMEVNFNFDDPNLIILPLAFGKRQGREFIWNDLLSLETGSLKLANGRVIEKTLYNRRTRQDEPALFVALTFERREVLDSSNIKPMNLIGVDRGENIPAVIALTDPEGCPLSRFKDSLGNPTHILRIGESYKEKQRTIQAKKEVEQRRAGGYSRKYASKAKNLADDMVRNTARDLLYYAVTQDAMLIFENLSRGFGRQGKRTFMAERQYTRMEDWLTAKLAYEGLPSKTYLSKTLAQYTSKTCSNCGFTITSADYDRVLEKLKKTATGWMTTINGKELKVEGQITYYNRYKRQNVVKDLSVELDRLSEESVNNDISSWTKGRSGEALSLLKKRFSHRPVQEKFVCLNCEFETHADEQAALNIARSWLFLRSQEYKKYQTNKTTGNTDKRAFVETWQSFYRKKLKEVWKPAV

SEQ ID NO: 39830 - protein, 979 aa, synthetic construct
  REGION 1..979: note = engineered CasX variant
QEIKRINKIRRRLVKDSNTKKAGKTGPMKTLLVRVMTPDLRERLENLRKKPENIPQPISNTSQANLNKLLTDYTEMKKAILHVYWEEFQKDPVGLMSRVAQPASKKIDQNKLKPEMDEKGNLTTAGFACSQCGQPLFVYKLEQVSEKGKAYTNYFGRCNVAEHEKLILLAQLKPEKDSDEAVTYSLGKFGQRALDFYSIHVTKESTHPVKPLAQIAGNRYASGPVGKALRDACMGTIASFLSKYQDIIIEHQKVVKGNQKRLESLRELAGKENLEYPSVTLPPQPHTKEGVDAYNEVIARVRMWVNLNLWQKLKLSRDDAKPLLRLKGFPSFPLVERQANEVDWWDMVCNVKKLINEKKEDGKVFWQNLAGYKRQEALRPYLSSEEDRKKGKKFARYQLGDLLLHLEKKHGEDWGKVYDEAWERIDKKVEGLSKHIKLEEERRSEDAQSKAALTDWLRAKASFVIEGLKEADKDEFCRCELKLQKWYGDLRGKPFAIEAENSILDISGFSKQYNCAFIWQKDGVKKLNLYLIINYFKGGKLRFKKIKPEAFEANRFYTVINKKSGEIVPMEVNFNFDDPNLIILPLAFGKRQGREFIWNDLLSLETGSLKLANGRVIEKTLYNRRTRQDEPALFVALTFERREVLDSSNIKPMNLIGVDRGENIPAVIALTDPEGCPLSRFKDSLGNPTHILRIGESYKEKQRTIQAKKEVEQRRAGGYSRKYASKAKNLADDMVRNTARDLLYYAVTQDAMLIFENLSRGFGRQGKRTFMAERQYTRMEDWLTAKLAYEGLPSKTYLSKTLAQYTSKTCSNCGFTITSADYDRVLEKLKKTATGWMTTINGKELKVEGQITYYNRYKRQNVVKDLSVELDRLSEESVNNDISSWTKGRSGEALSLLKKRFSHRPVQEKFVCLNCGFETHADEQAALNIARSWLFLRSQEYKKYQTNKTSTGNTDKRAFVETWQSFYRKKLKEVWKPAV

SEQ ID NO: 39831 - protein, 979 aa, synthetic construct
  REGION 1..979: note = engineered CasX variant
QEIKRINKIRRRLVKDSNTKKAGKTGPMKTLLVRVMTPDLRERLENLRKKPENIPQPISNTSQANLNKLLTDYTEMKKAILHVYWEEFQKDPVGLMSRVAQPASKKIDQNKLKPEMDEKGNLTTAGFACSQCGQPLFVYKLEQVSEKGKAYTNYFGRCNVAEHEKLILLAQLKPEKDSDEAVTYSLGKFGQRALDFYSIHVTKESTHPVKPLAQIAGNRYASGPVGKALRDACMGTIASFLSKYQDIIIEHQKVVKGNQKRLESLRELAGKENLEYPSVTLPPQPHTKEGVDAYNEVIARVRMWVNLNLWQKLKLSRDDAKPLLRLKGFPSFPLVERQANEVDWWDMVCNVKKLINEKKEDGKVFWQNLAGYKRQEALRPYLSSEEDRKKGKKFARYQLGDLLLHLEKKHGEDWGKVYDEAWERIDKKVEGLSKHIKLEEERRSEDAQSKAALTDWLRAKASFVIEGLKEADKDEFCRCELKLQKWYGDLRGKPFAIEAENSILDISGFSKQYNCAFIWQKDGVKKLNLYLIINYFKGGKLRFKKIKPEAFEANRFYTVINKKSGEIVPMEVNFNFDDPNLIILPLAFGKRQGREFIWNDLLSLETGSLKLANGRVIEKTLYNRRTRQDEPALFVALTFERREVLDSSNIKPMNLIGVDRGENIPAVIALTDPEGCPLSRFKDSLGNPTHILRIGESYKEKQRTIQAKKEVEQRRAGGYSRKYASKAKNLADDMVRNTARDLLYYAVTQDAMLIFENLSRGFGRQGKRTFMAERQYTRMEDWLTAKLAYEGLPSKTYLSKTLAQYTSKTCSNCGFTITSADYDRVLEKLKKTATGWMTTINGKELKVEGQITYYNRYKRQNVVKDLSVELDRLSEESVNNDISSWTKGRSGEALSLLKKRFSHRPVQEKFVCLNCGFETHADEQAALNIARSWLFLRSQEYKKYQTNKTTGKNTDKRAFVETWQSFYRKKLKEVWKPAV

SEQ ID NO: 39832 - protein, 978 aa, synthetic construct
  REGION 1..978: note = engineered CasX variant
QEIKRINKIRRRLVKDSNTKKAGKTGPMKTLLVRVMTPDLRERLENLRKKPENIPQPISNTSQANLNKLLTDYTEMKKAILHVYWEEFQKDPVGLMSRVAQPASKKIDQNKLKPEMDEKGNLTTAGFACSQCGQPLFVYKLEQVSEKGKAYTNYFGRCNVAEHEKLILLAQLKPEKDSDEAVTYSLGKFGQRALDFYSIHVTKESTHPVKPLAQIAGNRYASGPVGKALRDACMGTIASFLSKYQDIIIEHQKVVKGNQKRLESLRELAGKENLEYPSVTLPPQPHTKEGVDAYNEVIARVRMWVNLNLWQKLKLSRDDAKPLLRLKKFPSFPLVERQANEVDWWDMVCNVKKLINEKKEDGKVFWQNLAGYKRQEALRPYLSSEEDRKKGKKFARYQLGDLLLHLEKKHGEDWGKVYDEAWERIDKKVEGLSKHIKLEEERRSEDAQSKAALTDWLRAKASFVIEGLKEADKDEFCRCELKLQKWYGDLRGKPFAIEAENSILDISGFSKQYNCAFIWQKDGVKKLNLYLIINYFKGGKLRFKKIKPEAFEANRFYTVINKKSGEIVPMEVNFNFDDPNLIILPLAFGKRQGREFIWNDLLSLETGSLKLANGRVIEKTLYNRRTRQDEPALFVALTFERREVLDSSNIKPMNLIGVDRGENIPAVIALTDPEGCPLSRFKDSLGNPTHILRIGESYKEKQRTIQAKKEVEQRRAGGYSRKYASKAKNLADDMVRNTARDLLYYAVTQDAMLIFENLSRGFGRQGKRTFMAERQYTRMEDWLTAKLAYEGLPSKTYLSKTLAQYTSKTCSNCGFTITSADYDRVLEKLKKTATGWMTTINGKELKVEGQITYYNRYKRQNVVKDLSVELDRLSEESVNNDISSWTKGRSGEALSLLKKRFSHRPVQEKFVCLNCGFETHADEQAALNIARSWLFLRSQEYKKYQTNKTTGNTDKRAFVETWQSFYRKKLKEVWKPAV

SEQ ID NO: 39833 - protein, 978 aa, synthetic construct
  REGION 1..978: note = engineered CasX variant
QEIKRINKIRRRLVKDSNTKKAGKTGPMKTLLVRVMTPDLRERLENLRKKPENIPQPISNTSQANLNKLLTDYTEMKKAILHVYWEEFQKDPVGLMSRVAQPASKKIDQNKLKPEMDEKGNLTTAGFACSQCGQPLFVYKLEQVSEKGKAYTNYFGRCNVAEHEKLILLAQLKPEKDSDEAVTYSLGKFGQRALDFYSIHVTKESTHPVKPLAQIAGNRYASGPVGKALRDACMGTIASFLSKYQDIIIEHQKVVKGNQKRLESLRELAGKENLEYPSVTLPPQPHTKEGVDAYNEVIARVRMWVNLNLWQKLKLSRDDAKPLLRLKGFPSFPLVERQANEVDWWDMVCNVKKLINEKKEDGKVFWQNLAGYKRQEALRPYLSSEEDRKKGKKFARYQLGDLLLHLEKKHGEDWGKVYDEAWERIDKKVEGLSKHIKLEEERRSEDAQSKAALTDWLRAKASFVIEGLKEADKDEFCRCELKLQKWYGDLRGKPFAIEAENSILDISGFSKQYNCAFIWQKDGVKKLNLYLIINYFKGGKLRFKKIKPEAFEANRFYTVINKKSGEIVPMEVNFNFDDPNLIILPLAFGKRQGREFIWNDLLSLETGSLKLANGRVIEKTLYNRRTRQDEPALFVALTFERREVLDSSNIKPMNLIGVDRGENIPAVIALTDPEGCPLSRFKDSLGNPTHILRIGERYKEKQRTIQAKKEVEQRRAGGYSRKYASKAKNLADDMVRNTARDLLYYAVTQDAMLIFENLSRGFGRQGKRTFMAERQYTRMEDWLTAKLAYEGLPSKTYLSKTLAQYTSKTCSNCGFTITSADYDRVLEKLKKTATGWMTTINGKELKVEGQITYYNRYKRQNVVKDLSVELDRLSEESVNNDISSWTKGRSGEALSLLKKRFSHRPVQEKFVCLNCGFETHADEQAALNIARSWLFLRSQEYKKYQTNKTTGNTDKRAFVETWQSFYRKKLKEVWKPAV

SEQ ID NO: 39834 - protein, 978 aa, synthetic construct
  REGION 1..978: note = engineered CasX variant
QEIKRINKIRRRLVKDSNTKKAGKTGPMKTLLVRVMTPDLRERLENLRKKPENIPQPISNTSQANLNKLLTDYTEMKKAILHVYWEEFQKDPVGLMSRVAQPASKKIDQNKLKPEMDEKGNLTTAGFACSQCGQPLFVYKLEQVSEKGKAYTNYFGRCNVAEHEKLILLAQLKPEKDSDEAVTYSLGKFGQRALDFYSIHVTKESTHPVKPLAQIAGNRYASGPVGKALRDACMGTIASFLSKYQDIIIEHQKVVKGNQKRLESLRELAGKENLEYPSVTLPPQPHTKEGVDAYNEVIARVRMWVNLNLWQKLKLSRDDAKPLLRLKGFPSFPLVERQANEVDWWDMVCNVKKLINEKKEDGKVFWQNLAGYKRQEALRPYLSSEEDRKKGKKFARYQLGDLLLHLEKKHGEDWGKVYDEAWERIDKKVEGLSKHIKLEEERRSEDAQSKAALTDWLRAKASFVIEGLKEADKDEFCRCELKLQKWYGDLRGKPFAIEAENSILDISGFSKQYNCAFIWQKDGVKKLNLYLIINYFKGGKLRFKKIKPEAFEANRFYTVINKKSGEIVPMEVNFNFDDPNLIILPLAFGKRQGREFIWNDLLSLETGSLQLANGRVIEKTLYNRRTRQDEPALFVALTFERREVLDSSNIKPMNLIGVDRGENIPAVIALTDPEGCPLSRFKDSLGNPTHILRIGESYKEKQRTIQAKKEVEQRRAGGYSRKYASKAKNLADDMVRNTARDLLYYAVTQDAMLIFENLSRGFGRQGKRTFMAERQYTRMEDWLTAKLAYEGLPSKTYLSKTLAQYTSKTCSNCGFTITSADYDRVLEKLKKTATGWMTTINGKELKVEGQITYYNRYKRQNVVKDLSVELDRLSEESVNNDISSWTKGRSGEALSLLKKRFSHRPVQEKFVCLNCGFETHADEQAALNIARSWLFLRSQEYKKYQTNKTTGNTDKRAFVETWQSFYRKKLKEVWKPAV

SEQ ID NO: 39835 - protein, 978 aa, synthetic construct
  REGION 1..978: note = engineered CasX variant
QEIKRINKIRRRLVKDSNTKKAGKTGPMKTLLVRVMTPDLRERLENLRKKPENIPQPISNTSRANLNKLLTDYTEMKKAILHVYDEEFQKDPVGLMSRVAQPASKKIDQNKLKPEMDEKGNLTTAGFACSQCGQPLFVYKLEQVSEKGKAYTNYFGRCNVAEHEKLIKLAQLKPEKDSDEAVTYSLGKFGQRALDFYSIHVTKESTHPVKPLAQIAGNRYASGPVGKALRDACMGTIASFLSKYQDIIIEHQKVVKGNQKRLESLRELAGKENLEYPSVTLPPQPHTKEGVDAYNEVIARVRMWVNLNLWQKLKLSRDDAKPLLRLKGFPSFPLVERQANEVDWWDMVCNVKKLINEKKEDGKVFWQNLAGYKRQEALRPYLSSEEDRKKGKKFARYQLGDLLLHLEKKHGEDWGKVYDEAWERIDKKVEGLSKHIKLEEERRSEDAQSKAALTDWLRAKASFVIEGLKEADKDEFCRCELKLQKWYGDLRGKPFAIEAENSILDISGFSKQYNCAFIWQKDGVKKLNLYLIINYFKGGKLRFKKIKPEAFEANRFYTVINKKSGEIVPMEVNFNFDDPNLIILPLAFGKRQGREFIWNDLLSLETGSLKLANGRVIEKTLYNRRTRQDEPALFVALTFERREVLDSSNIKPMNLIGVDRGENIPAVIALTDPEGCPLSRFKDSLGNPTHILRIGESYKEKQRTIQAKKEVEQRRAGGYSRKYASKAKNLADDMVRNTARDLLYYAVTQDAMLIFENLSRGFGRQGKRTFMAERQYTRMEDWLTAKLAYEGLPSKTYLSKTLAQYTSKTCSNCGFTITSADYDRVLEKLKKTATGWMTTINGKELKVEGQITYYNRYKRQNVVKDLSVELDRLSEESVNNDISSWTKGRSGEALSLLKKRFSHRPVQEKFVCLNCGFETHADEQAALNIARSWLFLRSQEYKKYQTNKTTGNTDKRAFVETWQSFYRKKLKEVWKPAV

SEQ ID NO: 39836 - protein, 978 aa, synthetic construct
  REGION 1..978: note = engineered CasX variant
QEIKRINKIRRRLVKDSNTKKAGKTGPMKTLLVRVMTPDLRERLENLRKKPENIPQPISNTSRANLNKLLTDYTEMKKAILHVYDEEFQKDPVGLMSRVAQPASKKIDQNKLKPEMDEKGNLTTAGFACSQCGQPLFVYKLEQVSEKGKAYTNYFGRCNVAEHEKLILLYQLKPEKDSDEAVTYSLGKFGQRALDFYSIHVTKESTHPVKPLAQIAGNRYASGPVGKALRDACMGTIASFLSKYQDIIIEHQKVVKGNQKRLESLRELAGKENLEYPSVTLPPQPHTKEGVDAYNEVIARVRMWVNLNLWQKLKLSRDDAKPLLRLKGFPSFPLVERQANEVDWWDMVCNVKKLINEKKEDGKVFWQNLAGYKRQEALRPYLSSEEDRKKGKKFARYQLGDLLLHLEKKHGEDWGKVYDEAWERIDKKVEGLSKHIKLEEERRSEDAQSKAALTDWLRAKASFVIEGLKEADKDEFCRCELKLQKWYGDLRGKPFAIEAENSILDISGFSKQYNCAFIWQKDGVKKLNLYLIINYFKGGKLRFKKIKPEAFEANRFYTVINKKSGEIVPMEVNFNFDDPNLIILPLAFGKRQGREFIWNDLLSLETGSLKLANGRVIEKTLYNRRTRQDEPALFVALTFERREVLDSSNIKPMNLIGVDRGENIPAVIALTDPEGCPLSRFKDSLGNPTHILRIGESYKEKQRTIQAKKEVEQRRAGGYSRKYASKAKNLADDMVRNTARDLLYYAVTQDAMLIFENLSRGFGRQGKRTFMAERQYTRMEDWLTAKLAYEGLPSKTYLSKTLAQYTSKTCSNCGFTITSADYDRVLEKLKKTATGWMTTINGKELKVEGQITYYNRYKRQNVVKDLSVELDRLSEESVNNDISSWTKGRSGEALSLLKKRFSHRPVQEKFVCLNCGFETHADEQAALNIARSWLFLRSQEYKKYQTNKTTGNTDKRAFVETWQSFYRKKLKEVWKPAV

SEQ ID NO: 39837 - protein, 978 aa, synthetic construct
  REGION 1..978: note = engineered CasX variant
QEIKRINKIRRRLVKDSNTKKAGKTGPMKTLLVRVMTPDLRERLENLRKKPENIPQPISNTSRANLNKLLTDYTEMKKAILHVYDEEFQKDPVGLMSRVAQPASKKIDQNKLKPEMDEKGNLTTAGFACSQCGQPLFVYKLEQVSEKGKAYTNYFGRCNVAEHEKLILLSQLKPEKDSDEAVTYSLGKFGQRALDFYSIHVTKESTHPVKPLAQIAGNRYASGPVGKALRDACMGTIASFLSKYQDIIIEHQKVVKGNQKRLESLRELAGKENLEYPSVTLPPQPHTKEGVDAYNEVIARVRMWVNLNLWQKLKLSRDDAKPLLRLKGFPSFPLVERQANEVDWWDMVCNVKKLINEKKEDGKVFWQNLAGYKRQEALRPYLSSEEDRKKGKKFARYQLGDLLLHLEKKHGEDWGKVYDEAWERIDKKVEGLSKHIKLEEERRSEDAQSKAALTDWLRAKASFVIEGLKEADKDEFCRCELKLQKWYGDLRGKPFAIEAENSILDISGFSKQYNCAFIWQKDGVKKLNLYLIINYFKGGKLRFKKIKPEAFEANRFYTVINKKSGEIVPMEVNFNFDDPNLIILPLAFGKRQGREFIWNDLLSLETGSLKLANGRVIEKTLYNRRTRQDEPALFVALTFERREVLDSSNIKPMNLIGVDRGENIPAVIALTDPEGCPLSRFKDSLGNPTHILRIGESYKEKQRTIQAKKEVEQRRAGGYSRKYASKAKNLADDMVRNTARDLLYYAVTQDAMLIFENLSRGFGRQGKRTFMAERQYTRMEDWLTAKLAYEGLPSKTYLSKTLAQYTSKTCSNCGFTITSADYDRVLEKLKKTATGWMTTINGKELKVEGQITYYNRYKRQNVVKDLSVELDRLSEESVNNDISSWTKGRSGEALSLLKKRFSHRPVQEKFVCLNCGFETHADEQAALNIARSWLFLRSQEYKKYQTNKTTGNTDKRAFVETWQSFYRKKLKEVWKPAV

SEQ ID NO: 39838 - protein, 977 aa, synthetic construct
  REGION 1..977: note = engineered CasX variant
QEIKRINKIRRRLVKDSNTKKAGKTGPMKTLLVRVMTPDLRERLENLRKKPENIPQPISNTSRANLNKLLTDYTEMKKAILHVYDEEFQKDPVGLMSRVAQPASKKIDQNKLKPEMDEKGNLTTAGFACSQCGQPLFVYKLEQVSEKGKAYTNYFGRCNVAEHEKLILLAQLKPEKDSDEAVTYSLGKFGQRALDFYSIHVTKESTHPVKPLAQIAGNRYASPVGKALRDACMGTIASFLSKYQDIIIEHQKVVKGNQKRLESLRELAGKENLEYPSVTLPPQPHTKEGVDAYNEVIARVRMWVNLNLWQKLKLSRDDAKPLLRLKGFPSFPLVERQANEVDWWDMVCNVKKLINEKKEDGKVFWQNLAGYKRQEALRPYLSSEEDRKKGKKFARYQLGDLLLHLEKKHGEDWGKVYDEAWERIDKKVEGLSKHIKLEEERRSEDAQSKAALTDWLRAKASFVIEGLKEADKDEFCRCELKLQKWYGDLRGKPFAIEAENSILDISGFSKQYNCAFIWQKDGVKKLNLYLIINYFKGGKLRFKKIKPEAFEANRFYTVINKKSGEIVPMEVNFNFDDPNLIILPLAFGKRQGREFIWNDLLSLETGSLKLANGRVIEKTLYNRRTRQDEPALFVALTFERREVLDSSNIKPMNLIGVDRGENIPAVIALTDPEGCPLSRFKDSLGNPTHILRIGESYKEKQRTIQAKKEVEQRRAGGYSRKYASKAKNLADDMVRNTARDLLYYAVTQDAMLIFENLSRGFGRQGKRTFMAERQYTRMEDWLTAKLAYEGLPSKTYLSKTLAQYTSKTCSNCGFTITSADYDRVLEKLKKTATGWMTTINGKELKVEGQITYYNRYKRQNVVKDLSVELDRLSEESVNNDISSWTKGRSGEALSLLKKRFSHRPVQEKFVCLNCGFETHADEQAALNIARSWLFLRSQEYKKYQTNKTTGNTDKRAFVETWQSFYRKKLKEVWKPAV

SEQ ID NO: 39839 - protein, 978 aa, synthetic construct
  REGION 1..978: note = engineered CasX variant
QEIKRINKIRRRLVKDSNTKKAGKTGPMKTLLVRVMTPDLRERLENLRKKPENIPQPISNTSRANLNKLLTDYTEMKKAILHVYDEEFQKDPVGLMSRVAQPASKKIDQNKLKPEMDEKGNLTTAGFACSQCGQPLFVYKLEQVSEKGKAYTNYFGRCNVAEHEKLILLAQLKPEKDSDEAVTYSLGKFGQRALDFYSIHVTKESTHPVKPLAQIAGNRYASGPVGKALRDACMGTIASFLSKYQDIIIEHQKVVKGNQKRLESLRELAGKENLEYPSVTLPPQPHTSEGVDAYNEVIARVRMWVNLNLWQKLKLSRDDAKPLLRLKGFPSFPLVERQANEVDWWDMVCNVKKLINEKKEDGKVFWQNLAGYKRQEALRPYLSSEEDRKKGKKFARYQLGDLLLHLEKKHGEDWGKVYDEAWERIDKKVEGLSKHIKLEEERRSEDAQSKAALTDWLRAKASFVIEGLKEADKDEFCRCELKLQKWYGDLRGKPFAIEAENSILDISGFSKQYNCAFIWQKDGVKKLNLYLIINYFKGGKLRFKKIKPEAFEANRFYTVINKKSGEIVPMEVNFNFDDPNLIILPLAFGKRQGREFIWNDLLSLETGSLKLANGRVIEKTLYNRRTRQDEPALFVALTFERREVLDSSNIKPMNLIGVDRGENIPAVIALTDPEGCPLSRFKDSLGNPTHILRIGESYKEKQRTIQAKKEVEQRRAGGYSRKYASKAKNLADDMVRNTARDLLYYAVTQDAMLIFENLSRGFGRQGKRTFMAERQYTRMEDWLTAKLAYEGLPSKTYLSKTLAQYTSKTCSNCGFTITSADYDRVLEKLKKTATGWMTTINGKELKVEGQITYYNRYKRQNVVKDLSVELDRLSEESVNNDISSWTKGRSGEALSLLKKRFSHRPVQEKFVCLNCGFETHADEQAALNIARSWLFLRSQEYKKYQTNKTTGNTDKRAFVETWQSFYRKKLKEVWKPAV

SEQ ID NO: 39840 - protein, 978 aa, synthetic construct
  REGION 1..978: note = engineered CasX variant
QEIKRINKIRRRLVKDSNTKKAGKTGPMKTLLVRVMTPDLRERLENLRKKPENIPQPISNTSRANLNKLLTDYTEMKKAILHVYDEEFQKDPVGLMSRVAQPASKKIDQNKLKPEMDEKGNLTTAGFACSQCGQPLFVYKLEQVSEKGKAYTNYFGRCNVAEHEKLILLAQLKPEKDSDEAVTYSLGKFGQRALDFYSIHVTKESTHPVKPLAQIAGNRYASGPVGKALRDACMGTIASFLSKYQDIIIEHQKVVKGNQKRLESLRELAGKENLEYPSVTLPPQPHTKEGLDAYNEVIARVRMWVNLNLWQKLKLSRDDAKPLLRLKGFPSFPLVERQANEVDWWDMVCNVKKLINEKKEDGKVFWQNLAGYKRQEALRPYLSSEEDRKKGKKFARYQLGDLLLHLEKKHGEDWGKVYDEAWERIDKKVEGLSKHIKLEEERRSEDAQSKAALTDWLRAKASFVIEGLKEADKDEFCRCELKLQKWYGDLRGKPFAIEAENSILDISGFSKQYNCAFIWQKDGVKKLNLYLIINYFKGGKLRFKKIKPEAFEANRFYTVINKKSGEIVPMEVNFNFDDPNLIILPLAFGKRQGREFIWNDLLSLETGSLKLANGRVIEKTLYNRRTRQDEPALFVALTFERREVLDSSNIKPMNLIGVDRGENIPAVIALTDPEGCPLSRFKDSLGNPTHILRIGESYKEKQRTIQAKKEVEQRRAGGYSRKYASKAKNLADDMVRNTARDLLYYAVTQDAMLIFENLSRGFGRQGKRTFMAERQYTRMEDWLTAKLAYEGLPSKTYLSKTLAQYTSKTCSNCGFTITSADYDRVLEKLKKTATGWMTTINGKELKVEGQITYYNRYKRQNVVKDLSVELDRLSEESVNNDISSWTKGRSGEALSLLKKRFSHRPVQEKFVCLNCGFETHADEQAALNIARSWLFLRSQEYKKYQTNKTTGNTDKRAFVETWQSFYRKKLKEVWKPAV

SEQ ID NO: 39841 - protein, 978 aa, synthetic construct
  REGION 1..978: note = engineered CasX variant
QEIKRINKIRRRLVKDSNTKKAGKTGPMKTLLVRVMTPDLRERLENLRKKPENIPQPISNTSRANLNKLLTDYTEMKKAILHVYDEEFQKDPVGLMSRVAQPASKKIDQNKLKPEMDEKGNLTTAGFACSQCGQPLFVYKLEQVSEKGKAYTNYFGRCNVAEHEKLILLAQLKPEKDSDEAVTYSLGKFGQRALDFYSIHVTKESTHPVKPLAQIAGNRYASGPVGKALRDACMGTIASFLSKYQDIIIEHQKVVKGNQKRLESLRELAGKENLEYPSVTLPPQPHTKEGVDAYNEVIARVRTWVNLNLWQKLKLSRDDAKPLLRLKGFPSFPLVERQANEVDWWDMVCNVKKLINEKKEDGKVFWQNLAGYKRQEALRPYLSSEEDRKKGKKFARYQLGDLLLHLEKKHGEDWGKVYDEAWERIDKKVEGLSKHIKLEEERRSEDAQSKAALTDWLRAKASFVIEGLKEADKDEFCRCELKLQKWYGDLRGKPFAIEAENSILDISGFSKQYNCAFIWQKDGVKKLNLYLIINYFKGGKLRFKKIKPEAFEANRFYTVINKKSGEIVPMEVNFNFDDPNLIILPLAFGKRQGREFIWNDLLSLETGSLKLANGRVIEKTLYNRRTRQDEPALFVALTFERREVLDSSNIKPMNLIGVDRGENIPAVIALTDPEGCPLSRFKDSLGNPTHILRIGESYKEKQRTIQAKKEVEQRRAGGYSRKYASKAKNLADDMVRNTARDLLYYAVTQDAMLIFENLSRGFGRQGKRTFMAERQYTRMEDWLTAKLAYEGLPSKTYLSKTLAQYTSKTCSNCGFTITSADYDRVLEKLKKTATGWMTTINGKELKVEGQITYYNRYKRQNVVKDLSVELDRLSEESVNNDISSWTKGRSGEALSLLKKRFSHRPVQEKFVCLNCGFETHADEQAALNIARSWLFLRSQEYKKYQTNKTTGNTDKRAFVETWQSFYRKKLKEVWKPAV

SEQ ID NO: 39842 - protein, 978 aa, synthetic construct
  REGION 1..978: note = engineered CasX variant
QEIKRINKIRRRLVKDSNTKKAGKTGPMKTLLVRVMTPDLRERLENLRKKPENIPQPISNTSRANLNKLLTDYTEMKKAILHVYDEEFQKDPVGLMSRVAQPASKKIDQNKLKPEMDEKGNLTTAGFACSQCGQPLFVYKLEQVSEKGKAYTNYFGRCNVAEHEKLILLAQLKPEKDSDEAVTYSLGKFGQRALDFYSIHVTKESTHPVKPLAQIAGNRYASGPVGKALRDACMGTIASFLSKYQDIIIEHQKVVKGNQKRLESLRELAGKENLEYPSVTLPPQPHTKEGVDAYNEVIARVRWWVNLNLWQKLKLSRDDAKPLLRLKGFPSFPLVERQANEVDWWDMVCNVKKLINEKKEDGKVFWQNLAGYKRQEALRPYLSSEEDRKKGKKFARYQLGDLLLHLEKKHGEDWGKVYDEAWERIDKKVEGLSKHIKLEEERRSEDAQSKAALTDWLRAKASFVIEGLKEADKDEFCRCELKLQKWYGDLRGKPFAIEAENSILDISGFSKQYNCAFIWQKDGVKKLNLYLIINYFKGGKLRFKKIKPEAFEANRFYTVINKKSGEIVPMEVNFNFDDPNLIILPLAFGKRQGREFIWNDLLSLETGSLKLANGRVIEKTLYNRRTRQDEPALFVALTFERREVLDSSNIKPMNLIGVDRGENIPAVIALTDPEGCPLSRFKDSLGNPTHILRIGESYKEKQRTIQAKKEVEQRRAGGYSRKYASKAKNLADDMVRNTARDLLYYAVTQDAMLIFENLSRGFGRQGKRTFMAERQYTRMEDWLTAKLAYEGLPSKTYLSKTLAQYTSKTCSNCGFTITSADYDRVLEKLKKTATGWMTTINGKELKVEGQITYYNRYKRQNVVKDLSVELDRLSEESVNNDISSWTKGRSGEALSLLKKRFSHRPVQEKFVCLNCGFETHADEQAALNIARSWLFLRSQEYKKYQTNKTTGNTDKRAFVETWQSFYRKKLKEVWKPAV

SEQ ID NO: 39843 - protein, 979 aa, synthetic construct
  REGION 1..979: note = engineered CasX variant
QEIKRINKIRRRLVKDSNTKKAGKTGPMKTLLVRVMTPDLRERLENLRKKPENIPQPISNTSRANLNKLLTDYTEMKKAILHVYDEEFQKDPVGLMSRVAQPASKKIDQNKLKPEMDEKGNLTTAGFACSQCGQPLFVYKLEQVSEKGKAYTNYFGRCNVAEHEKLILLAQLKPEKDSDEAVTYSLGKFGQRALDFYSIHVTKESTHPVKPLAQIAGNRYASGPVGKALRDACMGTIASFLSKYQDIIIEHQKVVKGNQKRLESLRELAGKENLEYPSVTLPPQPHTKEGVDAYNEVIARVRMWVNLNLWQKLKLSRDDAKPLLRLKGFPSFPLVERQQANEVDWWDMVCNVKKLINEKKEDGKVFWQNLAGYKRQEALRPYLSSEEDRKKGKKFARYQLGDLLLHLEKKHGEDWGKVYDEAWERIDKKVEGLSKHIKLEEERRSEDAQSKAALTDWLRAKASFVIEGLKEADKDEFCRCELKLQKWYGDLRGKPFAIEAENSILDISGFSKQYNCAFIWQKDGVKKLNLYLIINYFKGGKLRFKKIKPEAFEANRFYTVINKKSGEIVPMEVNFNFDDPNLIILPLAFGKRQGREFIWNDLLSLETGSLKLANGRVIEKTLYNRRTRQDEPALFVALTFERREVLDSSNIKPMNLIGVDRGENIPAVIALTDPEGCPLSRFKDSLGNPTHILRIGESYKEKQRTIQAKKEVEQRRAGGYSRKYASKAKNLADDMVRNTARDLLYYAVTQDAMLIFENLSRGFGRQGKRTFMAERQYTRMEDWLTAKLAYEGLPSKTYLSKTLAQYTSKTCSNCGFTITSADYDRVLEKLKKTATGWMTTINGKELKVEGQITYYNRYKRQNVVKDLSVELDRLSEESVNNDISSWTKGRSGEALSLLKKRFSHRPVQEKFVCLNCGFETHADEQAALNIARSWLFLRSQEYKKYQTNKTTGNTDKRAFVETWQSFYRKKLKEVWKPAV

SEQ ID NO: 39844 - protein, 979 aa, synthetic construct
  REGION 1..979: note = engineered CasX variant
QEIKRINKIRRRLVKDSNTKKAGKTGPMKTLLVRVMTPDLRERLENLRKKPENIPQPISNTSRANLNKLLTDYTEMKKAILHVYDEEFQKDPVGLMSRVAQPASKKIDQNKLKPEMDEKGNLTTAGFACSQCGQPLFVYKLEQVSEKGKAYTNYFGRCNVAEHEKLILLAQLKPEKDSDEAVTYSLGKFGQRALDFYSIHVTKESTHPVKPLAQIAGNRYASGPVGKALRDACMGTIASFLSKYQDIIIEHQKVVKGNQKRLESLRELAGKENLEYPSVTLPPQPHTKEGVDAYNEVIARVRMWVNLNLWQKLKLSRDDAKPLLRLKGFPSFPLVERQANAEVDWWDMVCNVKKLINEKKEDGKVFWQNLAGYKRQEALRPYLSSEEDRKKGKKFARYQLGDLLLHLEKKHGEDWGKVYDEAWERIDKKVEGLSKHIKLEEERRSEDAQSKAALTDWLRAKASFVIEGLKEADKDEFCRCELKLQKWYGDLRGKPFAIEAENSILDISGFSKQYNCAFIWQKDGVKKLNLYLIINYFKGGKLRFKKIKPEAFEANRFYTVINKKSGEIVPMEVNFNFDDPNLIILPLAFGKRQGREFIWNDLLSLETGSLKLANGRVIEKTLYNRRTRQDEPALFVALTFERREVLDSSNIKPMNLIGVDRGENIPAVIALTDPEGCPLSRFKDSLGNPTHILRIGESYKEKQRTIQAKKEVEQRRAGGYSRKYASKAKNLADDMVRNTARDLLYYAVTQDAMLIFENLSRGFGRQGKRTFMAERQYTRMEDWLTAKLAYEGLPSKTYLSKTLAQYTSKTCSNCGFTITSADYDRVLEKLKKTATGWMTTINGKELKVEGQITYYNRYKRQNVVKDLSVELDRLSEESVNNDISSWTKGRSGEALSLLKKRFSHRPVQEKFVCLNCGFETHADEQAALNIARSWLFLRSQEYKKYQTNKTTGNTDKRAFVETWQSFYRKKLKEVWKPAV

SEQ ID NO: 39845 - protein, 978 aa, synthetic construct
  REGION 1..978: note = engineered CasX variant
QEIKRINKIRRRLVKDSNTKKAGKTGPMKTLLVRVMTPDLRERLENLRKKPENIPQPISNTSRANLNKLLTDYTEMKKAILHVYDEEFQKDPVGLMSRVAQPASKKIDQNKLKPEMDEKGNLTTAGFACSQCGQPLFVYKLEQVSEKGKAYTNYFGRCNVAEHEKLILLAQLKPEKDSDEAVTYSLGKFGQRALDFYSIHVTKESTHPVKPLAQIAGNRYASGPVGKALRDACMGTIASFLSKYQDIIIEHQKVVKGNQKRLESLRELAGKENLEYPSVTLPPQPHTKEGVDAYNEVIARVRMWVNLNLWQKLKLSRDDAKPLLRLKGFPSFPLVERQANEVDWWDMVCNVKKLINEKKEDGKVFWQNLAGYKRQEALRPYLSSEEDRKKGKKFARTQLGDLLLHLEKKHGEDWGKVYDEAWERIDKKVEGLSKHIKLEEERRSEDAQSKAALTDWLRAKASFVIEGLKEADKDEFCRCELKLQKWYGDLRGKPFAIEAENSILDISGFSKQYNCAFIWQKDGVKKLNLYLIINYFKGGKLRFKKIKPEAFEANRFYTVINKKSGEIVPMEVNFNFDDPNLIILPLAFGKRQGREFIWNDLLSLETGSLKLANGRVIEKTLYNRRTRQDEPALFVALTFERREVLDSSNIKPMNLIGVDRGENIPAVIALTDPEGCPLSRFKDSLGNPTHILRIGESYKEKQRTIQAKKEVEQRRAGGYSRKYASKAKNLADDMVRNTARDLLYYAVTQDAMLIFENLSRGFGRQGKRTFMAERQYTRMEDWLTAKLAYEGLPSKTYLSKTLAQYTSKTCSNCGFTITSADYDRVLEKLKKTATGWMTTINGKELKVEGQITYYNRYKRQNVVKDLSVELDRLSEESVNNDISSWTKGRSGEALSLLKKRFSHRPVQEKFVCLNCGFETHADEQAALNIARSWLFLRSQEYKKYQTNKTTGNTDKRAFVETWQSFYRKKLKEVWKPAV

SEQ ID NO: 39846 - protein, 979 aa, synthetic construct
  REGION 1..979: note = engineered CasX variant
QEIKRINKIRRRLVKDSNTKKAGKTGPMKTLLVRVMTPDLRERLENLRKKPENIPQPISNTSRANLNKLLTDYTEMKKAILHVYDEEFQKDPVGLMSRVAQPASKKIDQNKLKPEMDEKGNLTTAGFACSQCGQPLFVYKLEQVSEKGKAYTNYFGRCNVAEHEKLILLAQLKPEKDSDEAVTYSLGKFGQRALDFYSIHVTKESTHPVKPLAQIAGNRYASGPVGKALRDACMGTIASFLSKYQDIIIEHQKVVKGNQKRLESLRELAGKENLEYPSVTLPPQPHTKEGVDAYNEVIARVRMWVNLNLWQKLKLSRDDAKPLLRLKGFPSFPLVERQANEVDWWDMVCNVKKLINEKKEDGKVFWQNLAGYKRQEALRPYLSSEEDRKKGKKFARYQLGDLLLHLEKKHEGEDWGKVYDEAWERIDKKVEGLSKHIKLEEERRSEDAQSKAALTDWLRAKASFVIEGLKEADKDEFCRCELKLQKWYGDLRGKPFAIEAENSILDISGFSKQYNCAFIWQKDGVKKLNLYLIINYFKGGKLRFKKIKPEAFEANRFYTVINKKSGEIVPMEVNFNFDDPNLIILPLAFGKRQGREFIWNDLLSLETGSLKLANGRVIEKTLYNRRTRQDEPALFVALTFERREVLDSSNIKPMNLIGVDRGENIPAVIALTDPEGCPLSRFKDSLGNPTHILRIGESYKEKQRTIQAKKEVEQRRAGGYSRKYASKAKNLADDMVRNTARDLLYYAVTQDAMLIFENLSRGFGRQGKRTFMAERQYTRMEDWLTAKLAYEGLPSKTYLSKTLAQYTSKTCSNCGFTITSADYDRVLEKLKKTATGWMTTINGKELKVEGQITYYNRYKRQNVVKDLSVELDRLSEESVNNDISSWTKGRSGEALSLLKKRFSHRPVQEKFVCLNCGFETHADEQAALNIARSWLFLRSQEYKKYQTNKTTGNTDKRAFVETWQSFYRKKLKEVWKPAV

SEQ ID NO: 39847 - protein, 978 aa, synthetic construct
  REGION 1..978: note = engineered CasX variant
QEIKRINKIRRRLVKDSNTKKAGKTGPMKTLLVRVMTPDLRERLENLRKKPENIPQPISNTSRANLNKLLTDYTEMKKAILHVYDEEFQKDPVGLMSRVAQPASKKIDQNKLKPEMDEKGNLTTAGFACSQCGQPLFVYKLEQVSEKGKAYTNYFGRCNVAEHEKLILLAQLKPEKDSDEAVTYSLGKFGQRALDFYSIHVTKESTHPVKPLAQIAGNRYASGPVGKALRDACMGTIASFLSKYQDIIIEHQKVVKGNQKRLESLRELAGKENLEYPSVTLPPQPHTKEGVDAYNEVIARVRMWVNLNLWQKLKLSRDDAKPLLRLKGFPSFPLVERQANEVDWWDMVCNVKKLINEKKEDGKVFWQNLAGYKRQEALRPYLSSEEDRKKGKKFARYQLGDLLLHLEKKHGEDWGKVYDEAWERIDKKVEGLSKHIKLEEERRSEDAQSKAALTDWLRAKASFVIEGLKEADKDEFCRCDLKLQKWYGDLRGKPFAIEAENSILDISGFSKQYNCAFIWQKDGVKKLNLYLIINYFKGGKLRFKKIKPEAFEANRFYTVINKKSGEIVPMEVNFNFDDPNLIILPLAFGKRQGREFIWNDLLSLETGSLKLANGRVIEKTLYNRRTRQDEPALFVALTFERREVLDSSNIKPMNLIGVDRGENIPAVIALTDPEGCPLSRFKDSLGNPTHILRIGESYKEKQRTIQAKKEVEQRRAGGYSRKYASKAKNLADDMVRNTARDLLYYAVTQDAMLIFENLSRGFGRQGKRTFMAERQYTRMEDWLTAKLAYEGLPSKTYLSKTLAQYTSKTCSNCGFTITSADYDRVLEKLKKTATGWMTTINGKELKVEGQITYYNRYKRQNVVKDLSVELDRLSEESVNNDISSWTKGRSGEALSLLKKRFSHRPVQEKFVCLNCGFETHADEQAALNIARSWLFLRSQEYKKYQTNKTTGNTDKRAFVETWQSFYRKKLKEVWKPAV

SEQ ID NO: 39848 - protein, 978 aa, synthetic construct
  REGION 1..978: note = engineered CasX variant
QEIKRINKIRRRLVKDSNTKKAGKTGPMKTLLVRVMTPDLRERLENLRKKPENIPQPISNTSRANLNKLLTDYTEMKKAILHVYDEEFQKDPVGLMSRVAQPASKKIDQNKLKPEMDEKGNLTTAGFACSQCGQPLFVYKLEQVSEKGKAYTNYFGRCNVAEHEKLILLAQLKPEKDSDEAVTYSLGKFGQRALDFYSIHVTKESTHPVKPLAQIAGNRYASGPVGKALRDACMGTIASFLSKYQDIIIEHQKVVKGNQKRLESLRELAGKENLEYPSVTLPPQPHTKEGVDAYNEVIARVRMWVNLNLWQKLKLSRDDAKPLLRLKGFPSFPLVERQANEVDWWDMVCNVKKLINEKKEDGKVFWQNLAGYKRQEALRPYLSSEEDRKKGKKFARYQLGDLLLHLEKKHGEDWGKVYDEAWERIDKKVEGLSKHIKLEEERRSEDAQSKAALTDWLRAKASFVIEGLKEADKDEFCRCELKLQKWYGDLRGKPFAIEAENSILDISGFSKQYNCAFIWQKDGVKKLNLYLIINYFKGGKLRFKKIKPEAFEANRFYTVINKKSGEIVPMEVNFNFDDPNLIILPLAFGKRFGREFIWNDLLSLETGSLKLANGRVIEKTLYNRRTRQDEPALFVALTFERREVLDSSNIKPMNLIGVDRGENIPAVIALTDPEGCPLSRFKDSLGNPTHILRIGESYKEKQRTIQAKKEVEQRRAGGYSRKYASKAKNLADDMVRNTARDLLYYAVTQDAMLIFENLSRGFGRQGKRTFMAERQYTRMEDWLTAKLAYEGLPSKTYLSKTLAQYTSKTCSNCGFTITSADYDRVLEKLKKTATGWMTTINGKELKVEGQITYYNRYKRQNVVKDLSVELDRLSEESVNNDISSWTKGRSGEALSLLKKRFSHRPVQEKFVCLNCGFETHADEQAALNIARSWLFLRSQEYKKYQTNKTTGNTDKRAFVETWQSFYRKKLKEVWKPAV

SEQ ID NO: 39849 - protein, 978 aa, synthetic construct
  REGION 1..978: note = engineered CasX variant
QEIKRINKIRRRLVKDSNTKKAGKTGPMKTLLVRVMTPDLRERLENLRKKPENIPQPISNTSRANLNKLLTDYTEMKKAILHVYDEEFQKDPVGLMSRVAQPASKKIDQNKLKPEMDEKGNLTTAGFACSQCGQPLFVYKLEQVSEKGKAYTNYFGRCNVAEHEKLILLAQLKPEKDSDEAVTYSLGKFGQRALDFYSIHVTKESTHPVKPLAQIAGNRYASGPVGKALRDACMGTIASFLSKYQDIIIEHQKVVKGNQKRLESLRELAGKENLEYPSVTLPPQPHTKEGVDAYNEVIARVRMWVNLNLWQKLKLSRDDAKPLLRLKGFPSFPLVERQANEVDWWDMVCNVKKLINEKKEDGKVFWQNLAGYKRQEALRPYLSSEEDRKKGKKFARYQLGDLLLHLEKKHGEDWGKVYDEAWERIDKKVEGLSKHIKLEEERRSEDAQSKAALTDWLRAKASFVIEGLKEADKDEFCRCELKLQKWYGDLRGKPFAIEAENSILDISGFSKQYNCAFIWQKDGVKKLNLYLIINYFKGGKLRFKKIKPEAFEANRFYTVINKKSGEIVPMEVNFNFDDPNLIILPLAFGKRVGREFIWNDLLSLETGSLKLANGRVIEKTLYNRRTRQDEPALFVALTFERREVLDSSNIKPMNLIGVDRGENIPAVIALTDPEGCPLSRFKDSLGNPTHILRIGESYKEKQRTIQAKKEVEQRRAGGYSRKYASKAKNLADDMVRNTARDLLYYAVTQDAMLIFENLSRGFGRQGKRTFMAERQYTRMEDWLTAKLAYEGLPSKTYLSKTLAQYTSKTCSNCGFTITSADYDRVLEKLKKTATGWMTTINGKELKVEGQITYYNRYKRQNVVKDLSVELDRLSEESVNNDISSWTKGRSGEALSLLKKRFSHRPVQEKFVCLNCGFETHADEQAALNIARSWLFLRSQEYKKYQTNKTTGNTDKRAFVETWQSFYRKKLKEVWKPAV

SEQ ID NO: 39850 - protein, 979 aa, synthetic construct
  REGION 1..979: note = engineered CasX variant
QEIKRINKIRRRLVKDSNTKKAGKTGPMKTLLVRVMTPDLRERLENLRKKPENIPQPISNTSRANLNKLLTDYTEMKKAILHVYDEEFQKDPVGLMSRVAQPASKKIDQNKLKPEMDEKGNLTTAGFACSQCGQPLFVYKLEQVSEKGKAYTNYFGRCNVAEHEKLILLAQLKPEKDSDEAVTYSLGKFGQRALDFYSIHVTKESTHPVKPLAQIAGNRYASGPVGKALRDACMGTIASFLSKYQDIIIEHQKVVKGNQKRLESLRELAGKENLEYPSVTLPPQPHTKEGVDAYNEVIARVRMWVNLNLWQKLKLSRDDAKPLLRLKGFPSFPLVERQANEVDWWDMVCNVKKLINEKKEDGKVFWQNLAGYKRQEALRPYLSSEEDRKKGKKFARYQLGDLLLHLEKKHGEDWGKVYDEAWERIDKKVEGLSKHIKLEEERRSEDAQSKAALTDWLRAKASFVIEGLKEADKDEFCRCELKLQKWYGDLRGKPFAIEAENSILDISGFSKQYNCAFIWQKDGVKKLNLYLIINYFKGGKLRFKKIKPEAFEANRFYTVINKKSGEIVPMEVNFNFDDPNLIILPLAFGKRQGREFIWNDLLSLETGSLKLANGRVIEKTLYNRRTRQDEPALFVALTFERREVLDSSNIKTPMNLIGVDRGENIPAVIALTDPEGCPLSRFKDSLGNPTHILRIGESYKEKQRTIQAKKEVEQRRAGGYSRKYASKAKNLADDMVRNTARDLLYYAVTQDAMLIFENLSRGFGRQGKRTFMAERQYTRMEDWLTAKLAYEGLPSKTYLSKTLAQYTSKTCSNCGFTITSADYDRVLEKLKKTATGWMTTINGKELKVEGQITYYNRYKRQNVVKDLSVELDRLSEESVNNDISSWTKGRSGEALSLLKKRFSHRPVQEKFVCLNCGFETHADEQAALNIARSWLFLRSQEYKKYQTNKTTGNTDKRAFVETWQSFYRKKLKEVWKPAV

SEQ ID NO: 39851 - protein, 979 aa, synthetic construct
  REGION 1..979: note = engineered CasX variant
QEIKRINKIRRRLVKDSNTKKAGKTGPMKTLLVRVMTPDLRERLENLRKKPENIPQPISNTSRANLNKLLTDYTEMKKAILHVYDEEFQKDPVGLMSRVAQPASKKIDQNKLKPEMDEKGNLTTAGFACSQCGQPLFVYKLEQVSEKGKAYTNYFGRCNVAEHEKLILLAQLKPEKDSDEAVTYSLGKFGQRALDFYSIHVTKESTHPVKPLAQIAGNRYASGPVGKALRDACMGTIASFLSKYQDIIIEHQKVVKGNQKRLESLRELAGKENLEYPSVTLPPQPHTKEGVDAYNEVIARVRMWVNLNLWQKLKLSRDDAKPLLRLKGFPSFPLVERQANEVDWWDMVCNVKKLINEKKEDGKVFWQNLAGYKRQEALRPYLSSEEDRKKGKKFARYQLGDLLLHLEKKHGEDWGKVYDEAWERIDKKVEGLSKHIKLEEERRSEDAQSKAALTDWLRAKASFVIEGLKEADKDEFCRCELKLQKWYGDLRGKPFAIEAENSILDISGFSKQYNCAFIWQKDGVKKLNLYLIINYFKGGKLRFKKIKPEAFEANRFYTVINKKSGEIVPMEVNFNFDDPNLIILPLAFGKRQGREFIWNDLLSLETGSLKLANGRVIEKTLYNRRTRQDEPALFVALTFERREVLDSSNIKPMSNLIGVDRGENIPAVIALTDPEGCPLSRFKDSLGNPTHILRIGESYKEKQRTIQAKKEVEQRRAGGYSRKYASKAKNLADDMVRNTARDLLYYAVTQDAMLIFENLSRGFGRQGKRTFMAERQYTRMEDWLTAKLAYEGLPSKTYLSKTLAQYTSKTCSNCGFTITSADYDRVLEKLKKTATGWMTTINGKELKVEGQITYYNRYKRQNVVKDLSVELDRLSEESVNNDISSWTKGRSGEALSLLKKRFSHRPVQEKFVCLNCGFETHADEQAALNIARSWLFLRSQEYKKYQTNKTTGNTDKRAFVETWQSFYRKKLKEVWKPAV

SEQ ID NO: 39852 - protein, 978 aa, synthetic construct
  REGION 1..978: note = engineered CasX variant
QEIKRINKIRRRLVKDSNTKKAGKTGPMKTLLVRVMTPDLRERLENLRKKPENIPQPISNTSRANLNKLLTDYTEMKKAILHVYDEEFQKDPVGLMSRVAQPASKKIDQNKLKPEMDEKGNLTTAGFACSQCGQPLFVYKLEQVSEKGKAYTNYFGRCNVAEHEKLILLAQLKPEKDSDEAVTYSLGKFGQRALDFYSIHVTKESTHPVKPLAQIAGNRYASGPVGKALRDACMGTIASFLSKYQDIIIEHQKVVKGNQKRLESLRELAGKENLEYPSVTLPPQPHTKEGVDAYNEVIARVRMWVNLNLWQKLKLSRDDAKPLLRLKGFPSFPLVERQANEVDWWDMVCNVKKLINEKKEDGKVFWQNLAGYKRQEALRPYLSSEEDRKKGKKFARYQLGDLLLHLEKKHGEDWGKVYDEAWERIDKKVEGLSKHIKLEEERRSEDAQSKAALTDWLRAKASFVIEGLKEADKDEFCRCELKLQKWYGDLRGKPFAIEAENSILDISGFSKQYNCAFIWQKDGVKKLNLYLIINYFKGGKLRFKKIKPEAFEANRFYTVINKKSGEIVPMEVNFNFDDPNLIILPLAFGKRQGREFIWNDLLSLETGSLKLANGRVIEKTLYNRRTRQDEPALFVALTFERREVLDSSNIKPMNLIGVDRGENIPAVIALTDPEGCPLSRFKDSLGNPTHILRIRESYKEKQRTIQAKKEVEQRRAGGYSRKYASKAKNLADDMVRNTARDLLYYAVTQDAMLIFENLSRGFGRQGKRTFMAERQYTRMEDWLTAKLAYEGLPSKTYLSKTLAQYTSKTCSNCGFTITSADYDRVLEKLKKTATGWMTTINGKELKVEGQITYYNRYKRQNVVKDLSVELDRLSEESVNNDISSWTKGRSGEALSLLKKRFSHRPVQEKFVCLNCGFETHADEQAALNIARSWLFLRSQEYKKYQTNKTTGNTDKRAFVETWQSFYRKKLKEVWKPAV

SEQ ID NO: 39853 - protein, 978 aa, synthetic construct
  REGION 1..978: note = engineered CasX variant
QEIKRINKIRRRLVKDSNTKKAGKTGPMKTLLVRVMTPDLRERLENLRKKPENIPQPISNTSRANLNKLLTDYTEMKKAILHVYDEEFQKDPVGLMSRVAQPASKKIDQNKLKPEMDEKGNLTTAGFACSQCGQPLFVYKLEQVSEKGKAYTNYFGRCNVAEHEKLILLAQLKPEKDSDEAVTYSLGKFGQRALDFYSIHVTKESTHPVKPLAQIAGNRYASGPVGKALRDACMGTIASFLSKYQDIIIEHQKVVKGNQKRLESLRELAGKENLEYPSVTLPPQPHTKEGVDAYNEVIARVRMWVNLNLWQKLKLSRDDAKPLLRLKGFPSFPLVERQANEVDWWDMVCNVKKLINEKKEDGKVFWQNLAGYKRQEALRPYLSSEEDRKKGKKFARYQLGDLLLHLEKKHGEDWGKVYDEAWERIDKKVEGLSKHIKLEEERRSEDAQSKAALTDWLRAKASFVIEGLKEADKDEFCRCELKLQKWYGDLRGKPFAIEAENSILDISGFSKQYNCAFIWQKDGVKKLNLYLIINYFKGGKLRFKKIKPEAFEANRFYTVINKKSGEIVPMEVNFNFDDPNLIILPLAFGKRQGREFIWNDLLSLETGSLKLANGRVIEKTLYNRRTRQDEPALFVALTFERREVLDSSNIKPMNLIGVDRGENIPAVIALTDPEGCPLSRFKDSLGNPTHILRIGESYKEKQRTIQAKKEVEQRRAGGYSRKYASKAKNLADDMVRNTARDLLYYAVTQDAMLIFENLSRGFGRQGKRTFSAERQYTRMEDWLTAKLAYEGLPSKTYLSKTLAQYTSKTCSNCGFTITSADYDRVLEKLKKTATGWMTTINGKELKVEGQITYYNRYKRQNVVKDLSVELDRLSEESVNNDISSWTKGRSGEALSLLKKRFSHRPVQEKFVCLNCGFETHADEQAALNIARSWLFLRSQEYKKYQTNKTTGNTDKRAFVETWQSFYRKKLKEVWKPAV

SEQ ID NO: 39854 - protein, 978 aa, synthetic construct
  REGION 1..978: note = engineered CasX variant
QEIKRINKIRRRLVKDSNTKKAGKTGPMKTLLVRVMTPDLRERLENLRKKPENIPQPISNTSRANLNKLLTDYTEMKKAILHVYDEEFQKDPVGLMSRVAQPASKKIDQNKLKPEMDEKGNLTTAGFACSQCGQPLFVYKLEQVSEKGKAYTNYFGRCNVAEHEKLILLAQLKPEKDSDEAVTYSLGKFGQRALDFYSIHVTKESTHPVKPLAQIAGNRYASGPVGKALRDACMGTIASFLSKYQDIIIEHQKVVKGNQKRLESLRELAGKENLEYPSVTLPPQPHTKEGVDAYNEVIARVRMWVNLNLWQKLKLSRDDAKPLLRLKGFPSFPLVERQANEVDWWDMVCNVKKLINEKKEDGKVFWQNLAGYKRQEALRPYLSSEEDRKKGKKFARYQLGDLLLHLEKKHGEDWGKVYDEAWERIDKKVEGLSKHIKLEEERRSEDAQSKAALTDWLRAKASFVIEGLKEADKDEFCRCELKLQKWYGDLRGKPFAIEAENSILDISGFSKQYNCAFIWQKDGVKKLNLYLIINYFKGGKLRFKKIKPEAFEANRFYTVINKKSGEIVPMEVNFNFDDPNLIILPLAFGKRQGREFIWNDLLSLETGSLKLANGRVIEKTLYNRRTRQDEPALFVALTFERREVLDSSNIKPMNLIGVDRGENIPAVIALTDPEGCPLSRFKDSLGNPTHILRIGESYKEKQRTIQAKKEVEQRRAGGYSRKYASKAKNLADDMVRNTARDLLYYAVTQDAMLIFENLSRGFGRQGKRTFMAERQYTRMEDWLTAKLAYEGLPSKTYLSKTLAQYTSKTCSNCGFTITSADYDRVLEKLKKTATGWMTTINGKELKVEGQITYYNRYKRQNVVKDLSVELDRLSEESVNNDISSWDKGRSGEALSLLKKRFSHRPVQEKFVCLNCGFETHADEQAALNIARSWLFLRSQEYKKYQTNKTTGNTDKRAFVETWQSFYRKKLKEVWKPAV

SEQ ID NO: 39855 - protein, 978 aa, synthetic construct
  REGION 1..978: note = engineered CasX variant
QEIKRINKIRRRLVKDSNTKKAGKTGPMKTLLVRVMTPDLRERLENLRKKPENIPQPISNTSRANLNKLLTDYTEMKKAILHVYDEEFQVDPVGLMSRVAQPASKKIDQNKLKPEMDEKGNLTTAGFACSQCGQPLFVYKLEQVSEKGKAYTNYFGRCNVAEHEKLILLAQLKPEKDSDEAVTYSLGKFGQRALDFYSIHVTKESTHPVKPLAQIAGNRYASGPVGKALRDACMGTIASFLSKYQDIIIEHQKVVKGNQKRLESLRELAGKENLEYPSVTLPPQPHTKEGVDAYNEVIARVRMWVNLNLWQKLKLSRDDAKPLLRLKGFPSFPLVERQANEVDWWDMVCNVKKLINEKKEDGKVFWQNLAGYKRQEALRPYLSSEEDRKKGKKFARYQLGDLLLHLEKKHGEDWGKVYDEAWERIDKKVEGLSKHIKLEEERRSEDAQSKAALTDWLRAKASFVIEGLKEADKDEFCRCELKLQKWYGDLRGKPFAIEAENSILDISGFSKQYNCAFIWQKDGVKKLNLYLIINYFKGGKLRFKKIKPEAFEANRFYTVINKKSGEIVPMEVNFNFDDPNLIILPLAFGKRQGREFIWNDLLSLETGSLKLANGRVIEKTLYNRRTRQDEPALFVALTFERREVLDSSNIKPMNLIGVDRGENIPAVIALTDPEGCPLSRFKDSLGNPTHILRIGESYKEKQRTIQAKKEVEQRRAGGYSRKYASKAKNLADDMVRNTARDLLYYAVTQDAMLIFENLSRGFGRQGKRTFMAERQYTRMEDWLTAKLAYEGLPSKTYLSKTLAQYTSKTCSNCGFTITSADYDRVLEKLKKTATGWMTTINGKELKVEGQITYYNRYKRQNVVKDLSVELDRLSEESVNNDISSWTKGRSGEALSLLKKRFSHRPVQEKFVCLNCGFETHADEQAALNIARSWLFLRSQEYKKYQTNKTTGNTDKRAFVETWQSFYRKKLKEVWKPAV

SEQ ID NO: 39856 - protein, 978 aa, synthetic construct
  REGION 1..978: note = engineered CasX variant
QEIKRLNKIRRRLVKDSNTKKAGKTGPMKTLLVRVMTPDLRERLENLRKKPENIPQPISNTSRANLNKLLTDYTEMKKAILHVYDEEFQKDPVGLMSRVAQPASKKIDQNKLKPEMDEKGNLTTAGFACSQCGQPLFVYKLEQVSEKGKAYTNYFGRCNVAEHEKLILLAQLKPEKDSDEAVTYSLGKFGQRALDFYSIHVTKESTHPVKPLAQIAGNRYASGPVGKALRDACMGTIASFLSKYQDIIIEHQKVVKGNQKRLESLRELAGKENLEYPSVTLPPQPHTKEGVDAYNEVIARVRMWVNLNLWQKLKLSRDDAKPLLRLKGFPSFPLVERQANEVDWWDMVCNVKKLINEKKEDGKVFWQNLAGYKRQEALRPYLSSEEDRKKGKKFARYQLGDLLLHLEKKHGEDWGKVYDEAWERIDKKVEGLSKHIKLEEERRSEDAQSKAALTDWLRAKASFVIEGLKEADKDEFCRCELKLQKWYGDLRGKPFAIEAENSILDISGFSKQYNCAFIWQKDGVKKLNLYLIINYFKGGKLRFKKIKPEAFEANRFYTVINKKSGEIVPMEVNFNFDDPNLIILPLAFGKRQGREFIWNDLLSLETGSLKLANGRVIEKTLYNRRTRQDEPALFVALTFERREVLDSSNIKPMNLIGVDRGENIPAVIALTDPEGCPLSRFKDSLGNPTHILRIGESYKEKQRTIQAKKEVEQRRAGGYSRKYASKAKNLADDMVRNTARDLLYYAVTQDAMLIFENLSRGFGRQGKRTFMAERQYTRMEDWLTAKLAYEGLPSKTYLSKTLAQYTSKTCSNCGFTITSADYDRVLEKLKKTATGWMTTINGKELKVEGQITYYNRYKRQNVVKDLSVELDRLSEESVNNDISSWTKGRSGEALSLLKKRFSHRPVQEKFVCLNCGFETHADEQAALNIARSWLFLRSQEYKKYQTNKTTGNTDKRAFVETWQSFYRKKLKEVWKPAV

SEQ ID NO: 39857 - protein, 978 aa, synthetic construct
  REGION 1..978: note = engineered CasX variant
QEIKRINKIRRRLVKDSNTKKAGKTGPMKTLLVRVMTPDLRERLENLRKKPENIPQPISNTSRANLNKLLTDYTEMKKAILHVYDEEFQKDPVGLMSRVAQPASKKIDQNKLKPEMDEKGNLTTAGFACSQCGQPLFVYKLEQVSEKGKAYTNYVGRCNVAEHEKLILLAQLKPEKDSDEAVTYSLGKFGQRALDFYSIHVTKESTHPVKPLAQIAGNRYASGPVGKALRDACMGTIASFLSKYQDIIIEHQKVVKGNQKRLESLRELAGKENLEYPSVTLPPQPHTKEGVDAYNEVIARVRMWVNLNLWQKLKLSRDDAKPLLRLKGFPSFPLVERQANEVDWWDMVCNVKKLINEKKEDGKVFWQNLAGYKRQEALRPYLSSEEDRKKGKKFARYQLGDLLLHLEKKHGEDWGKVYDEAWERIDKKVEGLSKHIKLEEERRSEDAQSKAALTDWLRAKASFVIEGLKEADKDEFCRCELKLQKWYGDLRGKPFAIEAENSILDISGFSKQYNCAFIWQKDGVKKLNLYLIINYFKGGKLRFKKIKPEAFEANRFYTVINKKSGEIVPMEVNFNFDDPNLIILPLAFGKRQGREFIWNDLLSLETGSLKLANGRVIEKTLYNRRTRQDEPALFVALTFERREVLDSSNIKPMNLIGVDRGENIPAVIALTDPEGCPLSRFKDSLGNPTHILRIGESYKEKQRTIQAKKEVEQRRAGGYSRKYASKAKNLADDMVRNTARDLLYYAVTQDAMLIFENLSRGFGRQGKRTFMAERQYTRMEDWLTAKLAYEGLPSKTYLSKTLAQYTSKTCSNCGFTITSADYDRVLEKLKKTATGWMTTINGKELKVEGQITYYNRYKRQNVVKDLSVELDRLSEESVNNDISSWTKGRSGEALSLLKKRFSHRPVQEKFVCLNCGFETHADEQAALNIARSWLFLRSQEYKKYQTNKTTGNTDKRAFVETWQSFYRKKLKEVWKPAV

SEQ ID NO: 39858 - protein, 978 aa, synthetic construct
  REGION 1..978: note = engineered CasX variant
QEIKRINKIRRRLVKDSNTKKAGKTGPMKTLLVRVMTPDLRERLENLRKKPENIPQPISNTSRANLNKLLTDYTEMKKAILHVYDEEFQKDPVGLMSRVAQPASKKIDQNKLKPEMDEKGNLTTAGFACSQCGQPLFVYKLEQVSEKGKAYTNYFGRCNVAEHEKLILLAQLKPEKDSDEAVTYSLGKFGQRALDFYSIHVTKESTHPVKPLAQIAGNRYASGPVGKALRDACMGTIASFLSKYQDIIIEHQKVVKGNQKRLESLRELAGKENLEYPSVTLPPQPHTKEGVDAYNEVIARVRMWVNLNLWQKLKLSRDDAKPLLRLKGFPSFPLVERQANEVDWWDMVCNVKKLINEKKEDGKVFWQNLAGYKRQEALRPYLSSEEDRKKGKKFARYQLGDLLLHLEKKHGEDWGKVYDEAWERIDKKVEGLSKHIKLEEERRSEDAQSKAALTDWLRAKASFVIEGLKEADKDEFCRCELKLQKWYGDLRGKPFAIEAENSILDISGFSKQYNCAFIWQKDGVKKLNLYLIINYFKGGKLRFKKIKPEAFEANRFYTVINKKSGEIVPMEVNFNFDDPNLIILPLAFGKRQGREFIWNDLLSLETGSLKLANGRVIEKTLYNRRTRQDEPALFVALTFERREVLDSSNIKPMNLIGVDRGENIPAVIALTDPEGCPLSRFKDSLGNPTHILRIGESYKEKQRTIQAKKEVEQRRAGGYSRKYASKAKNLADDMVRNTARDLLYYAVTQDAMLIFENLSRGFGRQGKRTFMAERQYTRMEDWLTAKLAYEGLASKTYLSKTLAQYTSKTCSNCGFTITSADYDRVLEKLKKTATGWMTTINGKELKVEGQITYYNRYKRQNVVKDLSVELDRLSEESVNNDISSWTKGRSGEALSLLKKRFSHRPVQEKFVCLNCGFETHADEQAALNIARSWLFLRSQEYKKYQTNKTTGNTDKRAFVETWQSFYRKKLKEVWKPAV

SEQ ID NO: 39859 - protein, 978 aa, synthetic construct
  REGION 1..978: note = engineered CasX variant
QEIKRINKIRRRLVKDSNTKKAGKTGPMKTLLVRVMTPDLRERLENLRKKPENIPQPISNTSRANLNKLLTDYTEMKKAILHVYDEEFQKDPVGLMSRVAQPASKKIDQNKLKPEMDEKGNLTTAGFACSQCGQPLFVYKLEQVSEKGKAYTNYFGRCNVAEHEKLILLAQLKPEKDSDEAVTYSLGKFGQRALDFYSIHVTKESTHPVKPLAQIAGNRYASGPVGKALRDACMGTIASFLSKYQDIIIEHQKVVKGNQKRLESLRELAGKENLEYPSVTLPPQPHTKEGVDAYNEVIARVRMWVNLNLWQKLKLSRDDAKPLLRLKGFPSFPLVERQANEVDWWDMVCNVKKLINEKKEDGKVFWQNLAGYKRQEALRPYLSSEEDRKKGKKFARYQLGDLLLHLEKKHGEDWGKVYDEAWERIDKKVEGLSKHIKLEEERRSEDAQSKAALTDWLRAKASFVIEGLKEADKDEFCRCELKLQKWYGDLRGKPFAIEAENSILDISGFSKQYNCAFIWQKDGVKKLNLYLIINYFKGGKLRFKKIKPEAFEANRFYTVINKKSGEIVPMEVNFNFDDPNLIILPLAFGKRQGREFIWNDLLSLETGSLKLANGRVIEKTLYNRRTRQDEPALFVALTFERREVLDSSNIKPMNLIGVDRGENIPAVIALTDPEGCPLSRFKDSLGNPTHILRIGESYKEKQRTIQAKKEVEQRRAGGYSRKYASKAKNLADDMVRNTARDLLYYAVTQDAMLIFENLSRGFGRQGKRTFMAERQYTRMEDWLTAKLAYEGLPSKVYLSKTLAQYTSKTCSNCGFTITSADYDRVLEKLKKTATGWMTTINGKELKVEGQITYYNRYKRQNVVKDLSVELDRLSEESVNNDISSWTKGRSGEALSLLKKRFSHRPVQEKFVCLNCGFETHADEQAALNIARSWLFLRSQEYKKYQTNKTTGNTDKRAFVETWQSFYRKKLKEVWKPAV

SEQ ID NO: 39860 - protein, 979 aa, synthetic construct
  REGION 1..979: note = engineered CasX variant
QEIKRINKIRRRLVKDSNTKKAGKTGPMKTLLVRVMTPDLRERLENLRKKPENIPQPISNTSRANLNKLLTDYTEMKKAILHVYDEEFQKDPVGLMSRVAQPASKKIDQNKLKPEMDEKGNLTTAGFACSQCGQPLFVYKLEQVSEKGKAYTNYFGRCNVAEHEKLILLAQLKPEKDSDEAVTYSLGKFGQRALDFYSIHVTKESTHPVKPLAQIAGNRYASGPVGKALRDACMGTIASFLSKYQDIIIEHQKVVKGNQKRLESLRELAGKENLEYPSVTLPPQPHTKEGVDAYNEVIARVRMWVNLNLWQKLKLSRDDAKPLLRLKGFPSFPLVERQANEVDWWDMVCNVKKLINEKKEDGKVFWQNLAGYKRQEALRPYLSSEEDRKKGKKFARYQLGDLLLHLEKKHGEDWGKVYDEAWERIDKKVEGLSKHIKLEEERRSEDAQSKAALTDWLRAKASFVIEGLKEADKDEFCRCELKLQKWYGDLRGKPFAIEAENSILDISGFSKQYNCAFIWQKDGVKKLNLYLIINYFKGGKLRFKKIKPEAFEANRFYTVINKKSGEIVPMEVNFNFDDPNLIILPLAFGKRQGREFIWNDLLSLETGSLKLANGRVIEKTLYNRRTRQDEPALFVALTFERREVLDSSNIKPMNLIGVDRGENIPAVIALTDPEGCPLSRFKDSLGNPTHILRIGESYKEKQRTIQAKKEVEQRRAGGYSRKYASKAKNLADDMVRNTARDLLYYAVTQDAMLIFENLSRGFGRQGKRTFMAERQYTRMEDWLTAKLAYEGPLPSKTYLSKTLAQYTSKTCSNCGFTITSADYDRVLEKLKKTATGWMTTINGKELKVEGQITYYNRYKRQNVVKDLSVELDRLSEESVNNDISSWTKGRSGEALSLLKKRFSHRPVQEKFVCLNCGFETHADEQAALNIARSWLFLRSQEYKKYQTNKTTGNTDKRAFVETWQSFYRKKLKEVWKPAV

SEQ ID NO: 39861 - protein, 979 aa, synthetic construct
  REGION 1..979: note = engineered CasX variant
QEIKRINKIRRRLVKDSNTKKAGKTGPMKTLLVRVMTPDLRERLENLRKKPENIPQPISNTSRANLNKLLTDYTEMKKAILHVYDEEFQKDPVGLMSRVAQPASKKIDQNKLKPEMDEKGNLTTAGFACSQCGQPLFVYKLEQVSEKGKAYTNYFGRCNVAEHEKLILLAQLKPEKDSDEAVTYSLGKFGQRALDFYSIHVTKESTHPVKPLAQIAGNRYASGPVGKALRDACMGTIASFLSKYQDIIIEHQKVVKGNQKRLESLRELAGKENLEYPSVTLPPQPHTKEGVDAYNEVIARVRMWVNLNLWQKLKLSRDDAKPLLRLKGFPSFPLVERQANEVDWWDMVCNVKKLINEKKEDGKVFWQNLAGYKRQEALRPYLSSEEDVRKKGKKFARYQLGDLLLHLEKKHGEDWGKVYDEAWERIDKKVEGLSKHIKLEEERRSEDAQSKAALTDWLRAKASFVIEGLKEADKDEFCRCELKLQKWYGDLRGKPFAIEAENSILDISGFSKQYNCAFIWQKDGVKKLNLYLIINYFKGGKLRFKKIKPEAFEANRFYTVINKKSGEIVPMEVNFNFDDPNLIILPLAFGKRQGREFIWNDLLSLETGSLKLANGRVIEKTLYNRRTRQDEPALFVALTFERREVLDSSNIKPMNLIGVDRGENIPAVIALTDPEGCPLSRFKDSLGNPTHILRIGESYKEKQRTIQAKKEVEQRRAGGYSRKYASKAKNLADDMVRNTARDLLYYAVTQDAMLIFENLSRGFGRQGKRTFMAERQYTRMEDWLTAKLAYEGLPSKTYLSKTLAQYTSKTCSNCGFTITSADYDRVLEKLKKTATGWMTTINGKELKVEGQITYYNRYKRQNVVKDLSVELDRLSEESVNNDISSWTKGRSGEALSLLKKRFSHRPVQEKFVCLNCGFETHADEQAALNIARSWLFLRSQEYKKYQTNKTTGNTDKRAFVETWQSFYRKKLKEVWKPAV

SEQ ID NO: 39862 - protein, 978 aa, synthetic construct
  REGION 1..978: note = engineered CasX variant
QEIKRINKIRRRLVKDSNTKKAGKTGPMKTLLVRVMTPDLRERLENLRKKPENIPQPISNTSRANLNKLLTDYTEMKKAILHVYDEEFQKDPVGLMSRVAQPASKKIDQNKLKPEMDEKGNLTTAGFACSQCGQPLFVYKLEQVSEKGKAYTNYFGRCNVAEHEKLILLAQLKPEKDSDEAVTYSLGKFGQRALDFYSIHVTKESTHPVKPLAQIAGNRYASGPVGKALRDACMGTIASFLSKYQDIIIEHQKVVKGNQKRLESLRELAGKENLEYPSVTLPPQPHTKEGVDAYNEVIARVRMWVNLNLWQKLKLSRDDAKPLLRLKGFPSFPLVERQANEVDWWDMVCNVKKLINEKKEDGKVFWQNLAGYKRQEALRPYLSSEEDRKKGKKFARYQLGDLLLHLEKKHGEDWGKVYDEAWERIDKKVEGLSKHIKLEEERRSEDAQSKAALTDWLRAKASFVIEGLKEADKDEFCRCELKLQKWYGDLRGKPFAIEAENSILDISGFSKQYNCAFIWQKDGVKKLNLYLIINYFKGGKLRFKKIKPEAFEANRFYTVINKKSGEIVPMEVNFNFDDPNLIILPLAFGKRQGREFIWNDLLSLETGSLKLANGRVIEKTLYNRRTRQDEPALFVALTFERREVLDSSNIKPMNLIGVDRGENIPAVIALTDPEGCPLSRFKDSLGNPTHILRIGESYKEKQRTIQAKKEVEQRRAGGYSRKYASKAKNLADDMVRNTARDLLYYAVTQDAMLIFENLSRGFGRQGKRTFMAERQYTRMEDWLTAKLAYEGLPSKTYLSKTLAQYTSKTCSNCGFTITSADYDRMLEKLKKTATGWMTTINGKELKVEGQITYYNRYKRQNVVKDLSVELDRLSEESVNNDISSWTKGRSGEALSLLKKRFSHRPVQEKFVCLNCGFETHADEQAALNIARSWLFLRSQEYKKYQTNKTTGNTDKRAFVETWQSFYRKKLKEVWKPAV

SEQ ID NO: 39863 - protein, 978 aa, synthetic construct
  REGION 1..978: note = engineered CasX variant
QEIKRINKIRRRLVKDSNTKKAGKTGPMKTLLVRVMTPDLRERLENLRKKPENIPQPISNTSRANLNKLLTDYTEMKKAILHVYDEEFQKDPVGLMSRVAQPASKKIDQNKLKPEMDEKGNLTTAGFACSQCGQPLFVYKLEQVSEKGKAYTNYFGRCNVAEHEKLILLAQLKPEKDSDEAVTYSLGKFGQRALDFYSIHVTKESTHPVKPLAQIAGNRYASGPVGKALRDACMGTIASFLSKYQDIIIEHQKVVKGNQKRLESLRELAGKENLEYPSVTLPPQPHTKEGVDAYNEVIARVRMWVNLNLWQKLKLSRDDAKPLLRLKGFPSFPLVERQANEVDWWDMVCNVKKLINEKKEDGKVFWQNLAGYKRQEALRPYLSSEEDRKKGKKFARYQLGDLLLHLEKKHGEDWGKVYDEAWERIDKKVEGLSKHIKLEEERRSEDAQSKAALTDWLRAKASFVIEGLKEADKDEFCRCELKLQKWYGDLRGKPFAIEAENSILDISGFSKQYNCAFIWQKDGVKKLNLYLIINYFKGGKLRFKKIKPEAFEANRFYTVINKKSGEIVPMEVNFNFDDPNLIILPLAFGKRQGREFIWNDLLSLETGSLKLANGRVIEKTLYNRRTRQDEPALFVALTFERREVLDSSNIKPMNLIGVDRGENIPAVIALTDPEGCPLSRFKDSLGNPTHILRIGESYKEKQRTIQAKKEVEQRRAGGYSRKYASKAKNLADDMVRNTARDLLYYAVTQDAMLIFENLSRGFGRQGKRTFMAERQYTRMEDWLTAKLAYEGLPSKTYLSKTLAQYTSKTCSNCGFTITSADYDRVLEKLKKTATGWMTTINGKELKVEGQITYYNRYKRQNVVKDLSVELDRLSEESVNNDISSWTKGRQGEALSLLKKRFSHRPVQEKFVCLNCGFETHADEQAALNIARSWLFLRSQEYKKYQTNKTTGNTDKRAFVETWQSFYRKKLKEVWKPAV

SEQ ID NO: 39864 - protein, 978 aa, synthetic construct
  REGION 1..978: note = engineered CasX variant
QEIKRINKIRRRLVKDSNTKKAGKTGPMKTLLVRVMTPDLRERLENLRKKPENIPQPISNTSRANLNKLLTDYTEMKKAILHVYDEEFQKDPVGLMSRVAQPASKKIDQNKLKPEMDEKGNLTTAGFACSQCGQPLFVYKLEQVSEKGKAYTNYFGRCNVAEHEKLILLAQLKPEKDSDEAVTYSLGKFGQRALDFYSIHVTKESTHPVKPLAQIAGNRYASGPVGKALRDACMGTIASFLSKYQDIIIEHQKVVKGNQKRLESLRELAGKENLEYPSVTLPPQPHTKEGVDAYNEVIARVRMWVNLNLWQKLKLSRDDAKPLLRLKGFPSFPLVERQANEVDWWDMVCNVKKLINEKKEDGKVFWQNLAGYKRQEALRPYLSSEEDRKKGKKFARYQLGDLLLHLEKKHGEDWGKVYDEAWERIDKKVEGLSKHIKLEEERRSEDAQSKAALTDWLRAKASFVIEGLKEADKDEFCRCELKLQKWYGDLRGKPFAIEAENSILDISGFSKQYNCAFIWQKDGVKKLNLYLIINYFKGGKLRFKKIKPEAFEANRFYTVINKKSGEIVPMEVNFNFDDPNLIILPLAFGKRQGREFIWNDLLSLETGSLKLANGRVIEKTLYNRRTRQDEPALFVALTFERREVLDSSNIKPMNLIGVDRGENIPAVIALTDPEGCPLSRFKDSLGNPTHILRIGESYKEKQRTIQAKKEVEQRRAGGYSRKYASKAKNLADDMVRNTARDLLYYAVTQDAMLIFENLSRGFGRQGKRTFMAERQYTRMEDWLTAKLAYEGLPSKTYLSKTLAQYTSKTCSNCGFTITSADYDRVLEKLKKTATGWMTTINGKELKVEGQITYYNRYKRQNVVKDLSVELDRLSEESVNNDISSWTKGRSGEALSLLKKRFSHRPVQEKFVCLNCEFETHADEQAALNIARSWLFLRSQEYKKYQTNKTTGNTDKRAFVETWQSFYRKKLKEVWKPAV

SEQ ID NO: 39865 - protein, 979 aa, synthetic construct
  REGION 1..979: note = engineered CasX variant
QEIKRINKIRRRLVKDSNTKKAGKTGPMKTLLVRVMTPDLRERLENLRKKPENIPQPISNTSRANLNKLLTDYTEMKKAILHVYDEEFQKDPVGLMSRVAQPASKKIDQNKLKPEMDEKGNLTTAGFACSQCGQPLFVYKLEQVSEKGKAYTNYFGRCNVAEHEKLILLAQLKPEKDSDEAVTYSLGKFGQRALDFYSIHVTKESTHPVKPLAQIAGNRYASGPVGKALRDACMGTIASFLSKYQDIIIEHQKVVKGNQKRLESLRELAGKENLEYPSVTLPPQPHTKEGVDAYNEVIARVRMWVNLNLWQKLKLSRDDAKPLLRLKGFPSFPLVERQANEVDWWDMVCNVKKLINEKKEDGKVFWQNLAGYKRQEALRPYLSSEEDRKKGKKFARYQLGDLLLHLEKKHGEDWGKVYDEAWERIDKKVEGLSKHIKLEEERRSEDAQSKAALTDWLRAKASFVIEGLKEADKDEFCRCELKLQKWYGDLRGKPFAIEAENSILDISGFSKQYNCAFIWQKDGVKKLNLYLIINYFKGGKLRFKKIKPEAFEANRFYTVINKKSGEIVPMEVNFNFDDPNLIILPLAFGKRQGREFIWNDLLSLETGSLKLANGRVIEKTLYNRRTRQDEPALFVALTFERREVLDSSNIKPMNLIGVDRGENIPAVIALTDPEGCPLSRFKDSLGNPTHILRIGESYKEKQRTIQAKKEVEQRRAGGYSRKYASKAKNLADDMVRNTARDLLYYAVTQDAMLIFENLSRGFGRQGKRTFMAERQYTRMEDWLTAKLAYEGLPSKTYLSKTLAQYTSKTCSNCGFTITSADYDRVLEKLKKTATGWMTTINGKELKVEGQITYYNRYKRQNVVKDLSVELDRLSEESVNNDISSWTKGRSGEALSLLKKRFSHRPVQEKFVCLNCGFETHADEQAALNIARSWLFLRSQEYKKYQTNKTSTGNTDKRAFVETWQSFYRKKLKEVWKPAV

SEQ ID NO: 39866 - protein, 979 aa, synthetic construct
  REGION 1..979: note = engineered CasX variant
QEIKRINKIRRRLVKDSNTKKAGKTGPMKTLLVRVMTPDLRERLENLRKKPENIPQPISNTSRANLNKLLTDYTEMKKAILHVYDEEFQKDPVGLMSRVAQPASKKIDQNKLKPEMDEKGNLTTAGFACSQCGQPLFVYKLEQVSEKGKAYTNYFGRCNVAEHEKLILLAQLKPEKDSDEAVTYSLGKFGQRALDFYSIHVTKESTHPVKPLAQIAGNRYASGPVGKALRDACMGTIASFLSKYQDIIIEHQKVVKGNQKRLESLRELAGKENLEYPSVTLPPQPHTKEGVDAYNEVIARVRMWVNLNLWQKLKLSRDDAKPLLRLKGFPSFPLVERQANEVDWWDMVCNVKKLINEKKEDGKVFWQNLAGYKRQEALRPYLSSEEDRKKGKKFARYQLGDLLLHLEKKHGEDWGKVYDEAWERIDKKVEGLSKHIKLEEERRSEDAQSKAALTDWLRAKASFVIEGLKEADKDEFCRCELKLQKWYGDLRGKPFAIEAENSILDISGFSKQYNCAFIWQKDGVKKLNLYLIINYFKGGKLRFKKIKPEAFEANRFYTVINKKSGEIVPMEVNFNFDDPNLIILPLAFGKRQGREFIWNDLLSLETGSLKLANGRVIEKTLYNRRTRQDEPALFVALTFERREVLDSSNIKPMNLIGVDRGENIPAVIALTDPEGCPLSRFKDSLGNPTHILRIGESYKEKQRTIQAKKEVEQRRAGGYSRKYASKAKNLADDMVRNTARDLLYYAVTQDAMLIFENLSRGFGRQGKRTFMAERQYTRMEDWLTAKLAYEGLPSKTYLSKTLAQYTSKTCSNCGFTITSADYDRVLEKLKKTATGWMTTINGKELKVEGQITYYNRYKRQNVVKDLSVELDRLSEESVNNDISSWTKGRSGEALSLLKKRFSHRPVQEKFVCLNCGFETHADEQAALNIARSWLFLRSQEYKKYQTNKTTGKNTDKRAFVETWQSFYRKKLKEVWKPAV

SEQ ID NO: 39867 - protein, 978 aa, synthetic construct
  REGION 1..978: note = engineered CasX variant
QEIKRINKIRRRLVKDSNTKKAGKTGPMKTLLVRVMTPDLRERLENLRKKPENIPQPISNTSRANLNKLLTDYTEMKKAILHVYDEEFQKDPVGLMSRVAQPASKKIDQNKLKPEMDEKGNLTTAGFACSQCGQPLFVYKLEQVSEKGKAYTNYFGRCNVAEHEKLILLAQLKPEKDSDEAVTYSLGKFGQRALDFYSIHVTKESTHPVKPLAQIAGNRYASGPVGKALRDACMGTIASFLSKYQDIIIEHQKVVKGNQKRLESLRELAGKENLEYPSVTLPPQPHTKEGVDAYNEVIARVRMWVNLNLWQKLKLSRDDAKPLLRLKKFPSFPLVERQANEVDWWDMVCNVKKLINEKKEDGKVFWQNLAGYKRQEALRPYLSSEEDRKKGKKFARYQLGDLLLHLEKKHGEDWGKVYDEAWERIDKKVEGLSKHIKLEEERRSEDAQSKAALTDWLRAKASFVIEGLKEADKDEFCRCELKLQKWYGDLRGKPFAIEAENSILDISGFSKQYNCAFIWQKDGVKKLNLYLIINYFKGGKLRFKKIKPEAFEANRFYTVINKKSGEIVPMEVNFNFDDPNLIILPLAFGKRQGREFIWNDLLSLETGSLKLANGRVIEKTLYNRRTRQDEPALFVALTFERREVLDSSNIKPMNLIGVDRGENIPAVIALTDPEGCPLSRFKDSLGNPTHILRIGESYKEKQRTIQAKKEVEQRRAGGYSRKYASKAKNLADDMVRNTARDLLYYAVTQDAMLIFENLSRGFGRQGKRTFMAERQYTRMEDWLTAKLAYEGLPSKTYLSKTLAQYTSKTCSNCGFTITSADYDRVLEKLKKTATGWMTTINGKELKVEGQITYYNRYKRQNVVKDLSVELDRLSEESVNNDISSWTKGRSGEALSLLKKRFSHRPVQEKFVCLNCGFETHADEQAALNIARSWLFLRSQEYKKYQTNKTTGNTDKRAFVETWQSFYRKKLKEVWKPAV

SEQ ID NO: 39868 - protein, 978 aa, synthetic construct
  REGION 1..978: note = engineered CasX variant
QEIKRINKIRRRLVKDSNTKKAGKTGPMKTLLVRVMTPDLRERLENLRKKPENIPQPISNTSRANLNKLLTDYTEMKKAILHVYDEEFQKDPVGLMSRVAQPASKKIDQNKLKPEMDEKGNLTTAGFACSQCGQPLFVYKLEQVSEKGKAYTNYFGRCNVAEHEKLILLAQLKPEKDSDEAVTYSLGKFGQRALDFYSIHVTKESTHPVKPLAQIAGNRYASGPVGKALRDACMGTIASFLSKYQDIIIEHQKVVKGNQKRLESLRELAGKENLEYPSVTLPPQPHTKEGVDAYNEVIARVRMWVNLNLWQKLKLSRDDAKPLLRLKGFPSFPLVERQANEVDWWDMVCNVKKLINEKKEDGKVFWQNLAGYKRQEALRPYLSSEEDRKKGKKFARYQLGDLLLHLEKKHGEDWGKVYDEAWERIDKKVEGLSKHIKLEEERRSEDAQSKAALTDWLRAKASFVIEGLKEADKDEFCRCELKLQKWYGDLRGKPFAIEAENSILDISGFSKQYNCAFIWQKDGVKKLNLYLIINYFKGGKLRFKKIKPEAFEANRFYTVINKKSGEIVPMEVNFNFDDPNLIILPLAFGKRQGREFIWNDLLSLETGSLKLANGRVIEKTLYNRRTRQDEPALFVALTFERREVLDSSNIKPMNLIGVDRGENIPAVIALTDPEGCPLSRFKDSLGNPTHILRIGERYKEKQRTIQAKKEVEQRRAGGYSRKYASKAKNLADDMVRNTARDLLYYAVTQDAMLIFENLSRGFGRQGKRTFMAERQYTRMEDWLTAKLAYEGLPSKTYLSKTLAQYTSKTCSNCGFTITSADYDRVLEKLKKTATGWMTTINGKELKVEGQITYYNRYKRQNVVKDLSVELDRLSEESVNNDISSWTKGRSGEALSLLKKRFSHRPVQEKFVCLNCGFETHADEQAALNIARSWLFLRSQEYKKYQTNKTTGNTDKRAFVETWQSFYRKKLKEVWKPAV

SEQ ID NO: 39869 - protein, 978 aa, synthetic construct
  REGION 1..978: note = engineered CasX variant
QEIKRINKIRRRLVKDSNTKKAGKTGPMKTLLVRVMTPDLRERLENLRKKPENIPQPISNTSRANLNKLLTDYTEMKKAILHVYDEEFQKDPVGLMSRVAQPASKKIDQNKLKPEMDEKGNLTTAGFACSQCGQPLFVYKLEQVSEKGKAYTNYFGRCNVAEHEKLILLAQLKPEKDSDEAVTYSLGKFGQRALDFYSIHVTKESTHPVKPLAQIAGNRYASGPVGKALRDACMGTIASFLSKYQDIIIEHQKVVKGNQKRLESLRELAGKENLEYPSVTLPPQPHTKEGVDAYNEVIARVRMWVNLNLWQKLKLSRDDAKPLLRLKGFPSFPLVERQANEVDWWDMVCNVKKLINEKKEDGKVFWQNLAGYKRQEALRPYLSSEEDRKKGKKFARYQLGDLLLHLEKKHGEDWGKVYDEAWERIDKKVEGLSKHIKLEEERRSEDAQSKAALTDWLRAKASFVIEGLKEADKDEFCRCELKLQKWYGDLRGKPFAIEAENSILDISGFSKQYNCAFIWQKDGVKKLNLYLIINYFKGGKLRFKKIKPEAFEANRFYTVINKKSGEIVPMEVNFNFDDPNLIILPLAFGKRQGREFIWNDLLSLETGSLQLANGRVIEKTLYNRRTRQDEPALFVALTFERREVLDSSNIKPMNLIGVDRGENIPAVIALTDPEGCPLSRFKDSLGNPTHILRIGESYKEKQRTIQAKKEVEQRRAGGYSRKYASKAKNLADDMVRNTARDLLYYAVTQDAMLIFENLSRGFGRQGKRTFMAERQYTRMEDWLTAKLAYEGLPSKTYLSKTLAQYTSKTCSNCGFTITSADYDRVLEKLKKTATGWMTTINGKELKVEGQITYYNRYKRQNVVKDLSVELDRLSEESVNNDISSWTKGRSGEALSLLKKRFSHRPVQEKFVCLNCGFETHADEQAALNIARSWLFLRSQEYKKYQTNKTTGNTDKRAFVETWQSFYRKKLKEVWKPAV

SEQ ID NO: 39870 - protein, 978 aa, synthetic construct
  REGION 1..978: note = engineered CasX variant
QEIKRINKIRRRLVKDSNTKKAGKTGPMKTLLVRVMTPDLRERLENLRKKPENIPQPISNTSRANLNKLLTDYTEMKKAILHVYWEEFQKDPVGLMSRVAQPASKKIDQNKLKPEMDEKGNLTTAGFACSQCGQPLFVYKLEQVSEKGKAYTNYFGRCNVAEHEKLIKLYQLKPEKDSDEAVTYSLGKFGQRALDFYSIHVTKESTHPVKPLAQIAGNRYASGPVGKALRDACMGTIASFLSKYQDIIIEHQKVVKGNQKRLESLRELAGKENLEYPSVTLPPQPHTKEGVDAYNEVIARVRMWVNLNLWQKLKLSRDDAKPLLRLKGFPSFPLVERQANEVDWWDMVCNVKKLINEKKEDGKVFWQNLAGYKRQEALRPYLSSEEDRKKGKKFARYQLGDLLLHLEKKHGEDWGKVYDEAWERIDKKVEGLSKHIKLEEERRSEDAQSKAALTDWLRAKASFVIEGLKEADKDEFCRCELKLQKWYGDLRGKPFAIEAENSILDISGFSKQYNCAFIWQKDGVKKLNLYLIINYFKGGKLRFKKIKPEAFEANRFYTVINKKSGEIVPMEVNFNFDDPNLIILPLAFGKRQGREFIWNDLLSLETGSLKLANGRVIEKTLYNRRTRQDEPALFVALTFERREVLDSSNIKPMNLIGVDRGENIPAVIALTDPEGCPLSRFKDSLGNPTHILRIGESYKEKQRTIQAKKEVEQRRAGGYSRKYASKAKNLADDMVRNTARDLLYYAVTQDAMLIFENLSRGFGRQGKRTFMAERQYTRMEDWLTAKLAYEGLPSKTYLSKTLAQYTSKTCSNCGFTITSADYDRVLEKLKKTATGWMTTINGKELKVEGQITYYNRYKRQNVVKDLSVELDRLSEESVNNDISSWTKGRSGEALSLLKKRFSHRPVQEKFVCLNCGFETHADEQAALNIARSWLFLRSQEYKKYQTNKTTGNTDKRAFVETWQSFYRKKLKEVWKPAV

SEQ ID NO: 39871 - protein, 978 aa, synthetic construct
  REGION 1..978: note = engineered CasX variant
QEIKRINKIRRRLVKDSNTKKAGKTGPMKTLLVRVMTPDLRERLENLRKKPENIPQPISNTSRANLNKLLTDYTEMKKAILHVYWEEFQKDPVGLMSRVAQPASKKIDQNKLKPEMDEKGNLTTAGFACSQCGQPLFVYKLEQVSEKGKAYTNYFGRCNVAEHEKLIKLSQLKPEKDSDEAVTYSLGKFGQRALDFYSIHVTKESTHPVKPLAQIAGNRYASGPVGKALRDACMGTIASFLSKYQDIIIEHQKVVKGNQKRLESLRELAGKENLEYPSVTLPPQPHTKEGVDAYNEVIARVRMWVNLNLWQKLKLSRDDAKPLLRLKGFPSFPLVERQANEVDWWDMVCNVKKLINEKKEDGKVFWQNLAGYKRQEALRPYLSSEEDRKKGKKFARYQLGDLLLHLEKKHGEDWGKVYDEAWERIDKKVEGLSKHIKLEEERRSEDAQSKAALTDWLRAKASFVIEGLKEADKDEFCRCELKLQKWYGDLRGKPFAIEAENSILDISGFSKQYNCAFIWQKDGVKKLNLYLIINYFKGGKLRFKKIKPEAFEANRFYTVINKKSGEIVPMEVNFNFDDPNLIILPLAFGKRQGREFIWNDLLSLETGSLKLANGRVIEKTLYNRRTRQDEPALFVALTFERREVLDSSNIKPMNLIGVDRGENIPAVIALTDPEGCPLSRFKDSLGNPTHILRIGESYKEKQRTIQAKKEVEQRRAGGYSRKYASKAKNLADDMVRNTARDLLYYAVTQDAMLIFENLSRGFGRQGKRTFMAERQYTRMEDWLTAKLAYEGLPSKTYLSKTLAQYTSKTCSNCGFTITSADYDRVLEKLKKTATGWMTTINGKELKVEGQITYYNRYKRQNVVKDLSVELDRLSEESVNNDISSWTKGRSGEALSLLKKRFSHRPVQEKFVCLNCGFETHADEQAALNIARSWLFLRSQEYKKYQTNKTTGNTDKRAFVETWQSFYRKKLKEVWKPAV

SEQ ID NO: 39872 - protein, 977 aa, synthetic construct
  REGION 1..977: note = engineered CasX variant
QEIKRINKIRRRLVKDSNTKKAGKTGPMKTLLVRVMTPDLRERLENLRKKPENIPQPISNTSRANLNKLLTDYTEMKKAILHVYWEEFQKDPVGLMSRVAQPASKKIDQNKLKPEMDEKGNLTTAGFACSQCGQPLFVYKLEQVSEKGKAYTNYFGRCNVAEHEKLIKLAQLKPEKDSDEAVTYSLGKFGQRALDFYSIHVTKESTHPVKPLAQIAGNRYASPVGKALRDACMGTIASFLSKYQDIIIEHQKVVKGNQKRLESLRELAGKENLEYPSVTLPPQPHTKEGVDAYNEVIARVRMWVNLNLWQKLKLSRDDAKPLLRLKGFPSFPLVERQANEVDWWDMVCNVKKLINEKKEDGKVFWQNLAGYKRQEALRPYLSSEEDRKKGKKFARYQLGDLLLHLEKKHGEDWGKVYDEAWERIDKKVEGLSKHIKLEEERRSEDAQSKAALTDWLRAKASFVIEGLKEADKDEFCRCELKLQKWYGDLRGKPFAIEAENSILDISGFSKQYNCAFIWQKDGVKKLNLYLIINYFKGGKLRFKKIKPEAFEANRFYTVINKKSGEIVPMEVNFNFDDPNLIILPLAFGKRQGREFIWNDLLSLETGSLKLANGRVIEKTLYNRRTRQDEPALFVALTFERREVLDSSNIKPMNLIGVDRGENIPAVIALTDPEGCPLSRFKDSLGNPTHILRIGESYKEKQRTIQAKKEVEQRRAGGYSRKYASKAKNLADDMVRNTARDLLYYAVTQDAMLIFENLSRGFGRQGKRTFMAERQYTRMEDWLTAKLAYEGLPSKTYLSKTLAQYTSKTCSNCGFTITSADYDRVLEKLKKTATGWMTTINGKELKVEGQITYYNRYKRQNVVKDLSVELDRLSEESVNNDISSWTKGRSGEALSLLKKRFSHRPVQEKFVCLNCGFETHADEQAALNIARSWLFLRSQEYKKYQTNKTTGNTDKRAFVETWQSFYRKKLKEVWKPAV

SEQ ID NO: 39873 - protein, 978 aa, synthetic construct
  REGION 1..978: note = engineered CasX variant
QEIKRINKIRRRLVKDSNTKKAGKTGPMKTLLVRVMTPDLRERLENLRKKPENIPQPISNTSRANLNKLLTDYTEMKKAILHVYWEEFQKDPVGLMSRVAQPASKKIDQNKLKPEMDEKGNLTTAGFACSQCGQPLFVYKLEQVSEKGKAYTNYFGRCNVAEHEKLIKLAQLKPEKDSDEAVTYSLGKFGQRALDFYSIHVTKESTHPVKPLAQIAGNRYASGPVGKALRDACMGTIASFLSKYQDIIIEHQKVVKGNQKRLESLRELAGKENLEYPSVTLPPQPHTSEGVDAYNEVIARVRMWVNLNLWQKLKLSRDDAKPLLRLKGFPSFPLVERQANEVDWWDMVCNVKKLINEKKEDGKVFWQNLAGYKRQEALRPYLSSEEDRKKGKKFARYQLGDLLLHLEKKHGEDWGKVYDEAWERIDKKVEGLSKHIKLEEERRSEDAQSKAALTDWLRAKASFVIEGLKEADKDEFCRCELKLQKWYGDLRGKPFAIEAENSILDISGFSKQYNCAFIWQKDGVKKLNLYLIINYFKGGKLRFKKIKPEAFEANRFYTVINKKSGEIVPMEVNFNFDDPNLIILPLAFGKRQGREFIWNDLLSLETGSLKLANGRVIEKTLYNRRTRQDEPALFVALTFERREVLDSSNIKPMNLIGVDRGENIPAVIALTDPEGCPLSRFKDSLGNPTHILRIGESYKEKQRTIQAKKEVEQRRAGGYSRKYASKAKNLADDMVRNTARDLLYYAVTQDAMLIFENLSRGFGRQGKRTFMAERQYTRMEDWLTAKLAYEGLPSKTYLSKTLAQYTSKTCSNCGFTITSADYDRVLEKLKKTATGWMTTINGKELKVEGQITYYNRYKRQNVVKDLSVELDRLSEESVNNDISSWTKGRSGEALSLLKKRFSHRPVQEKFVCLNCGFETHADEQAALNIARSWLFLRSQEYKKYQTNKTTGNTDKRAFVETWQSFYRKKLKEVWKPAV

SEQ ID NO: 39874 - protein, 978 aa, synthetic construct
  REGION 1..978: note = engineered CasX variant
QEIKRINKIRRRLVKDSNTKKAGKTGPMKTLLVRVMTPDLRERLENLRKKPENIPQPISNTSRANLNKLLTDYTEMKKAILHVYWEEFQKDPVGLMSRVAQPASKKIDQNKLKPEMDEKGNLTTAGFACSQCGQPLFVYKLEQVSEKGKAYTNYFGRCNVAEHEKLIKLAQLKPEKDSDEAVTYSLGKFGQRALDFYSIHVTKESTHPVKPLAQIAGNRYASGPVGKALRDACMGTIASFLSKYQDIIIEHQKVVKGNQKRLESLRELAGKENLEYPSVTLPPQPHTKEGLDAYNEVIARVRMWVNLNLWQKLKLSRDDAKPLLRLKGFPSFPLVERQANEVDWWDMVCNVKKLINEKKEDGKVFWQNLAGYKRQEALRPYLSSEEDRKKGKKFARYQLGDLLLHLEKKHGEDWGKVYDEAWERIDKKVEGLSKHIKLEEERRSEDAQSKAALTDWLRAKASFVIEGLKEADKDEFCRCELKLQKWYGDLRGKPFAIEAENSILDISGFSKQYNCAFIWQKDGVKKLNLYLIINYFKGGKLRFKKIKPEAFEANRFYTVINKKSGEIVPMEVNFNFDDPNLIILPLAFGKRQGREFIWNDLLSLETGSLKLANGRVIEKTLYNRRTRQDEPALFVALTFERREVLDSSNIKPMNLIGVDRGENIPAVIALTDPEGCPLSRFKDSLGNPTHILRIGESYKEKQRTIQAKKEVEQRRAGGYSRKYASKAKNLADDMVRNTARDLLYYAVTQDAMLIFENLSRGFGRQGKRTFMAERQYTRMEDWLTAKLAYEGLPSKTYLSKTLAQYTSKTCSNCGFTITSADYDRVLEKLKKTATGWMTTINGKELKVEGQITYYNRYKRQNVVKDLSVELDRLSEESVNNDISSWTKGRSGEALSLLKKRFSHRPVQEKFVCLNCGFETHADEQAALNIARSWLFLRSQEYKKYQTNKTTGNTDKRAFVETWQSFYRKKLKEVWKPAV

SEQ ID NO: 39875 - protein, 978 aa, synthetic construct
  REGION 1..978: note = engineered CasX variant
QEIKRINKIRRRLVKDSNTKKAGKTGPMKTLLVRVMTPDLRERLENLRKKPENIPQPISNTSRANLNKLLTDYTEMKKAILHVYWEEFQKDPVGLMSRVAQPASKKIDQNKLKPEMDEKGNLTTAGFACSQCGQPLFVYKLEQVSEKGKAYTNYFGRCNVAEHEKLIKLAQLKPEKDSDEAVTYSLGKFGQRALDFYSIHVTKESTHPVKPLAQIAGNRYASGPVGKALRDACMGTIASFLSKYQDIIIEHQKVVKGNQKRLESLRELAGKENLEYPSVTLPPQPHTKEGVDAYNEVIARVRTWVNLNLWQKLKLSRDDAKPLLRLKGFPSFPLVERQANEVDWWDMVCNVKKLINEKKEDGKVFWQNLAGYKRQEALRPYLSSEEDRKKGKKFARYQLGDLLLHLEKKHGEDWGKVYDEAWERIDKKVEGLSKHIKLEEERRSEDAQSKAALTDWLRAKASFVIEGLKEADKDEFCRCELKLQKWYGDLRGKPFAIEAENSILDISGFSKQYNCAFIWQKDGVKKLNLYLIINYFKGGKLRFKKIKPEAFEANRFYTVINKKSGEIVPMEVNFNFDDPNLIILPLAFGKRQGREFIWNDLLSLETGSLKLANGRVIEKTLYNRRTRQDEPALFVALTFERREVLDSSNIKPMNLIGVDRGENIPAVIALTDPEGCPLSRFKDSLGNPTHILRIGESYKEKQRTIQAKKEVEQRRAGGYSRKYASKAKNLADDMVRNTARDLLYYAVTQDAMLIFENLSRGFGRQGKRTFMAERQYTRMEDWLTAKLAYEGLPSKTYLSKTLAQYTSKTCSNCGFTITSADYDRVLEKLKKTATGWMTTINGKELKVEGQITYYNRYKRQNVVKDLSVELDRLSEESVNNDISSWTKGRSGEALSLLKKRFSHRPVQEKFVCLNCGFETHADEQAALNIARSWLFLRSQEYKKYQTNKTTGNTDKRAFVETWQSFYRKKLKEVWKPAV

SEQ ID NO: 39876 - protein, 978 aa, synthetic construct
  REGION 1..978: note = engineered CasX variant
QEIKRINKIRRRLVKDSNTKKAGKTGPMKTLLVRVMTPDLRERLENLRKKPENIPQPISNTSRANLNKLLTDYTEMKKAILHVYWEEFQKDPVGLMSRVAQPASKKIDQNKLKPEMDEKGNLTTAGFACSQCGQPLFVYKLEQVSEKGKAYTNYFGRCNVAEHEKLIKLAQLKPEKDSDEAVTYSLGKFGQRALDFYSIHVTKESTHPVKPLAQIAGNRYASGPVGKALRDACMGTIASFLSKYQDIIIEHQKVVKGNQKRLESLRELAGKENLEYPSVTLPPQPHTKEGVDAYNEVIARVRWWVNLNLWQKLKLSRDDAKPLLRLKGFPSFPLVERQANEVDWWDMVCNVKKLINEKKEDGKVFWQNLAGYKRQEALRPYLSSEEDRKKGKKFARYQLGDLLLHLEKKHGEDWGKVYDEAWERIDKKVEGLSKHIKLEEERRSEDAQSKAALTDWLRAKASFVIEGLKEADKDEFCRCELKLQKWYGDLRGKPFAIEAENSILDISGFSKQYNCAFIWQKDGVKKLNLYLIINYFKGGKLRFKKIKPEAFEANRFYTVINKKSGEIVPMEVNFNFDDPNLIILPLAFGKRQGREFIWNDLLSLETGSLKLANGRVIEKTLYNRRTRQDEPALFVALTFERREVLDSSNIKPMNLIGVDRGENIPAVIALTDPEGCPLSRFKDSLGNPTHILRIGESYKEKQRTIQAKKEVEQRRAGGYSRKYASKAKNLADDMVRNTARDLLYYAVTQDAMLIFENLSRGFGRQGKRTFMAERQYTRMEDWLTAKLAYEGLPSKTYLSKTLAQYTSKTCSNCGFTITSADYDRVLEKLKKTATGWMTTINGKELKVEGQITYYNRYKRQNVVKDLSVELDRLSEESVNNDISSWTKGRSGEALSLLKKRFSHRPVQEKFVCLNCGFETHADEQAALNIARSWLFLRSQEYKKYQTNKTTGNTDKRAFVETWQSFYRKKLKEVWKPAV

SEQ ID NO: 39877 - protein, 979 aa, synthetic construct
  REGION 1..979: note = engineered CasX variant
QEIKRINKIRRRLVKDSNTKKAGKTGPMKTLLVRVMTPDLRERLENLRKKPENIPQPISNTSRANLNKLLTDYTEMKKAILHVYWEEFQKDPVGLMSRVAQPASKKIDQNKLKPEMDEKGNLTTAGFACSQCGQPLFVYKLEQVSEKGKAYTNYFGRCNVAEHEKLIKLAQLKPEKDSDEAVTYSLGKFGQRALDFYSIHVTKESTHPVKPLAQIAGNRYASGPVGKALRDACMGTIASFLSKYQDIIIEHQKVVKGNQKRLESLRELAGKENLEYPSVTLPPQPHTKEGVDAYNEVIARVRMWVNLNLWQKLKLSRDDAKPLLRLKGFPSFPLVERQQANEVDWWDMVCNVKKLINEKKEDGKVFWQNLAGYKRQEALRPYLSSEEDRKKGKKFARYQLGDLLLHLEKKHGEDWGKVYDEAWERIDKKVEGLSKHIKLEEERRSEDAQSKAALTDWLRAKASFVIEGLKEADKDEFCRCELKLQKWYGDLRGKPFAIEAENSILDISGFSKQYNCAFIWQKDGVKKLNLYLIINYFKGGKLRFKKIKPEAFEANRFYTVINKKSGEIVPMEVNFNFDDPNLIILPLAFGKRQGREFIWNDLLSLETGSLKLANGRVIEKTLYNRRTRQDEPALFVALTFERREVLDSSNIKPMNLIGVDRGENIPAVIALTDPEGCPLSRFKDSLGNPTHILRIGESYKEKQRTIQAKKEVEQRRAGGYSRKYASKAKNLADDMVRNTARDLLYYAVTQDAMLIFENLSRGFGRQGKRTFMAERQYTRMEDWLTAKLAYEGLPSKTYLSKTLAQYTSKTCSNCGFTITSADYDRVLEKLKKTATGWMTTINGKELKVEGQITYYNRYKRQNVVKDLSVELDRLSEESVNNDISSWTKGRSGEALSLLKKRFSHRPVQEKFVCLNCGFETHADEQAALNIARSWLFLRSQEYKKYQTNKTTGNTDKRAFVETWQSFYRKKLKEVWKPAV

SEQ ID NO: 39878 - protein, 979 aa, synthetic construct
  REGION 1..979: note = engineered CasX variant
QEIKRINKIRRRLVKDSNTKKAGKTGPMKTLLVRVMTPDLRERLENLRKKPENIPQPISNTSRANLNKLLTDYTEMKKAILHVYWEEFQKDPVGLMSRVAQPASKKIDQNKLKPEMDEKGNLTTAGFACSQCGQPLFVYKLEQVSEKGKAYTNYFGRCNVAEHEKLIKLAQLKPEKDSDEAVTYSLGKFGQRALDFYSIHVTKESTHPVKPLAQIAGNRYASGPVGKALRDACMGTIASFLSKYQDIIIEHQKVVKGNQKRLESLRELAGKENLEYPSVTLPPQPHTKEGVDAYNEVIARVRMWVNLNLWQKLKLSRDDAKPLLRLKGFPSFPLVERQANAEVDWWDMVCNVKKLINEKKEDGKVFWQNLAGYKRQEALRPYLSSEEDRKKGKKFARYQLGDLLLHLEKKHGEDWGKVYDEAWERIDKKVEGLSKHIKLEEERRSEDAQSKAALTDWLRAKASFVIEGLKEADKDEFCRCELKLQKWYGDLRGKPFAIEAENSILDISGFSKQYNCAFIWQKDGVKKLNLYLIINYFKGGKLRFKKIKPEAFEANRFYTVINKKSGEIVPMEVNFNFDDPNLIILPLAFGKRQGREFIWNDLLSLETGSLKLANGRVIEKTLYNRRTRQDEPALFVALTFERREVLDSSNIKPMNLIGVDRGENIPAVIALTDPEGCPLSRFKDSLGNPTHILRIGESYKEKQRTIQAKKEVEQRRAGGYSRKYASKAKNLADDMVRNTARDLLYYAVTQDAMLIFENLSRGFGRQGKRTFMAERQYTRMEDWLTAKLAYEGLPSKTYLSKTLAQYTSKTCSNCGFTITSADYDRVLEKLKKTATGWMTTINGKELKVEGQITYYNRYKRQNVVKDLSVELDRLSEESVNNDISSWTKGRSGEALSLLKKRFSHRPVQEKFVCLNCGFETHADEQAALNIARSWLFLRSQEYKKYQTNKTTGNTDKRAFVETWQSFYRKKLKEVWKPAV

SEQ ID NO: 39879 - protein, 978 aa, synthetic construct
  REGION 1..978: note = engineered CasX variant
QEIKRINKIRRRLVKDSNTKKAGKTGPMKTLLVRVMTPDLRERLENLRKKPENIPQPISNTSRANLNKLLTDYTEMKKAILHVYWEEFQKDPVGLMSRVAQPASKKIDQNKLKPEMDEKGNLTTAGFACSQCGQPLFVYKLEQVSEKGKAYTNYFGRCNVAEHEKLIKLAQLKPEKDSDEAVTYSLGKFGQRALDFYSIHVTKESTHPVKPLAQIAGNRYASGPVGKALRDACMGTIASFLSKYQDIIIEHQKVVKGNQKRLESLRELAGKENLEYPSVTLPPQPHTKEGVDAYNEVIARVRMWVNLNLWQKLKLSRDDAKPLLRLKGFPSFPLVERQANEVDWWDMVCNVKKLINEKKEDGKVFWQNLAGYKRQEALRPYLSSEEDRKKGKKFARTQLGDLLLHLEKKHGEDWGKVYDEAWERIDKKVEGLSKHIKLEEERRSEDAQSKAALTDWLRAKASFVIEGLKEADKDEFCRCELKLQKWYGDLRGKPFAIEAENSILDISGFSKQYNCAFIWQKDGVKKLNLYLIINYFKGGKLRFKKIKPEAFEANRFYTVINKKSGEIVPMEVNFNFDDPNLIILPLAFGKRQGREFIWNDLLSLETGSLKLANGRVIEKTLYNRRTRQDEPALFVALTFERREVLDSSNIKPMNLIGVDRGENIPAVIALTDPEGCPLSRFKDSLGNPTHILRIGESYKEKQRTIQAKKEVEQRRAGGYSRKYASKAKNLADDMVRNTARDLLYYAVTQDAMLIFENLSRGFGRQGKRTFMAERQYTRMEDWLTAKLAYEGLPSKTYLSKTLAQYTSKTCSNCGFTITSADYDRVLEKLKKTATGWMTTINGKELKVEGQITYYNRYKRQNVVKDLSVELDRLSEESVNNDISSWTKGRSGEALSLLKKRFSHRPVQEKFVCLNCGFETHADEQAALNIARSWLFLRSQEYKKYQTNKTTGNTDKRAFVETWQSFYRKKLKEVWKPAV

SEQ ID NO: 39880 - protein, 979 aa, synthetic construct
  REGION 1..979: note = engineered CasX variant
QEIKRINKIRRRLVKDSNTKKAGKTGPMKTLLVRVMTPDLRERLENLRKKPENIPQPISNTSRANLNKLLTDYTEMKKAILHVYWEEFQKDPVGLMSRVAQPASKKIDQNKLKPEMDEKGNLTTAGFACSQCGQPLFVYKLEQVSEKGKAYTNYFGRCNVAEHEKLIKLAQLKPEKDSDEAVTYSLGKFGQRALDFYSIHVTKESTHPVKPLAQIAGNRYASGPVGKALRDACMGTIASFLSKYQDIIIEHQKVVKGNQKRLESLRELAGKENLEYPSVTLPPQPHTKEGVDAYNEVIARVRMWVNLNLWQKLKLSRDDAKPLLRLKGFPSFPLVERQANEVDWWDMVCNVKKLINEKKEDGKVFWQNLAGYKRQEALRPYLSSEEDRKKGKKFARYQLGDLLLHLEKKHEGEDWGKVYDEAWERIDKKVEGLSKHIKLEEERRSEDAQSKAALTDWLRAKASFVIEGLKEADKDEFCRCELKLQKWYGDLRGKPFAIEAENSILDISGFSKQYNCAFIWQKDGVKKLNLYLIINYFKGGKLRFKKIKPEAFEANRFYTVINKKSGEIVPMEVNFNFDDPNLIILPLAFGKRQGREFIWNDLLSLETGSLKLANGRVIEKTLYNRRTRQDEPALFVALTFERREVLDSSNIKPMNLIGVDRGENIPAVIALTDPEGCPLSRFKDSLGNPTHILRIGESYKEKQRTIQAKKEVEQRRAGGYSRKYASKAKNLADDMVRNTARDLLYYAVTQDAMLIFENLSRGFGRQGKRTFMAERQYTRMEDWLTAKLAYEGLPSKTYLSKTLAQYTSKTCSNCGFTITSADYDRVLEKLKKTATGWMTTINGKELKVEGQITYYNRYKRQNVVKDLSVELDRLSEESVNNDISSWTKGRSGEALSLLKKRFSHRPVQEKFVCLNCGFETHADEQAALNIARSWLFLRSQEYKKYQTNKTTGNTDKRAFVETWQSFYRKKLKEVWKPAV

SEQ ID NO: 39881 - protein, 978 aa, synthetic construct
  REGION 1..978: note = engineered CasX variant
QEIKRINKIRRRLVKDSNTKKAGKTGPMKTLLVRVMTPDLRERLENLRKKPENIPQPISNTSRANLNKLLTDYTEMKKAILHVYWEEFQKDPVGLMSRVAQPASKKIDQNKLKPEMDEKGNLTTAGFACSQCGQPLFVYKLEQVSEKGKAYTNYFGRCNVAEHEKLIKLAQLKPEKDSDEAVTYSLGKFGQRALDFYSIHVTKESTHPVKPLAQIAGNRYASGPVGKALRDACMGTIASFLSKYQDIIIEHQKVVKGNQKRLESLRELAGKENLEYPSVTLPPQPHTKEGVDAYNEVIARVRMWVNLNLWQKLKLSRDDAKPLLRLKGFPSFPLVERQANEVDWWDMVCNVKKLINEKKEDGKVFWQNLAGYKRQEALRPYLSSEEDRKKGKKFARYQLGDLLLHLEKKHGEDWGKVYDEAWERIDKKVEGLSKHIKLEEERRSEDAQSKAALTDWLRAKASFVIEGLKEADKDEFCRCDLKLQKWYGDLRGKPFAIEAENSILDISGFSKQYNCAFIWQKDGVKKLNLYLIINYFKGGKLRFKKIKPEAFEANRFYTVINKKSGEIVPMEVNFNFDDPNLIILPLAFGKRQGREFIWNDLLSLETGSLKLANGRVIEKTLYNRRTRQDEPALFVALTFERREVLDSSNIKPMNLIGVDRGENIPAVIALTDPEGCPLSRFKDSLGNPTHILRIGESYKEKQRTIQAKKEVEQRRAGGYSRKYASKAKNLADDMVRNTARDLLYYAVTQDAMLIFENLSRGFGRQGKRTFMAERQYTRMEDWLTAKLAYEGLPSKTYLSKTLAQYTSKTCSNCGFTITSADYDRVLEKLKKTATGWMTTINGKELKVEGQITYYNRYKRQNVVKDLSVELDRLSEESVNNDISSWTKGRSGEALSLLKKRFSHRPVQEKFVCLNCGFETHADEQAALNIARSWLFLRSQEYKKYQTNKTTGNTDKRAFVETWQSFYRKKLKEVWKPAV

SEQ ID NO: 39882 - protein, 978 aa, synthetic construct
  REGION 1..978: note = engineered CasX variant
QEIKRINKIRRRLVKDSNTKKAGKTGPMKTLLVRVMTPDLRERLENLRKKPENIPQPISNTSRANLNKLLTDYTEMKKAILHVYWEEFQKDPVGLMSRVAQPASKKIDQNKLKPEMDEKGNLTTAGFACSQCGQPLFVYKLEQVSEKGKAYTNYFGRCNVAEHEKLIKLAQLKPEKDSDEAVTYSLGKFGQRALDFYSIHVTKESTHPVKPLAQIAGNRYASGPVGKALRDACMGTIASFLSKYQDIIIEHQKVVKGNQKRLESLRELAGKENLEYPSVTLPPQPHTKEGVDAYNEVIARVRMWVNLNLWQKLKLSRDDAKPLLRLKGFPSFPLVERQANEVDWWDMVCNVKKLINEKKEDGKVFWQNLAGYKRQEALRPYLSSEEDRKKGKKFARYQLGDLLLHLEKKHGEDWGKVYDEAWERIDKKVEGLSKHIKLEEERRSEDAQSKAALTDWLRAKASFVIEGLKEADKDEFCRCELKLQKWYGDLRGKPFAIEAENSILDISGFSKQYNCAFIWQKDGVKKLNLYLIINYFKGGKLRFKKIKPEAFEANRFYTVINKKSGEIVPMEVNFNFDDPNLIILPLAFGKRFGREFIWNDLLSLETGSLKLANGRVIEKTLYNRRTRQDEPALFVALTFERREVLDSSNIKPMNLIGVDRGENIPAVIALTDPEGCPLSRFKDSLGNPTHILRIGESYKEKQRTIQAKKEVEQRRAGGYSRKYASKAKNLADDMVRNTARDLLYYAVTQDAMLIFENLSRGFGRQGKRTFMAERQYTRMEDWLTAKLAYEGLPSKTYLSKTLAQYTSKTCSNCGFTITSADYDRVLEKLKKTATGWMTTINGKELKVEGQITYYNRYKRQNVVKDLSVELDRLSEESVNNDISSWTKGRSGEALSLLKKRFSHRPVQEKFVCLNCGFETHADEQAALNIARSWLFLRSQEYKKYQTNKTTGNTDKRAFVETWQSFYRKKLKEVWKPAV

SEQ ID NO: 39883 - protein, 978 aa, synthetic construct
  REGION 1..978: note = engineered CasX variant
QEIKRINKIRRRLVKDSNTKKAGKTGPMKTLLVRVMTPDLRERLENLRKKPENIPQPISNTSRANLNKLLTDYTEMKKAILHVYWEEFQKDPVGLMSRVAQPASKKIDQNKLKPEMDEKGNLTTAGFACSQCGQPLFVYKLEQVSEKGKAYTNYFGRCNVAEHEKLIKLAQLKPEKDSDEAVTYSLGKFGQRALDFYSIHVTKESTHPVKPLAQIAGNRYASGPVGKALRDACMGTIASFLSKYQDIIIEHQKVVKGNQKRLESLRELAGKENLEYPSVTLPPQPHTKEGVDAYNEVIARVRMWVNLNLWQKLKLSRDDAKPLLRLKGFPSFPLVERQANEVDWWDMVCNVKKLINEKKEDGKVFWQNLAGYKRQEALRPYLSSEEDRKKGKKFARYQLGDLLLHLEKKHGEDWGKVYDEAWERIDKKVEGLSKHIKLEEERRSEDAQSKAALTDWLRAKASFVIEGLKEADKDEFCRCELKLQKWYGDLRGKPFAIEAENSILDISGFSKQYNCAFIWQKDGVKKLNLYLIINYFKGGKLRFKKIKPEAFEANRFYTVINKKSGEIVPMEVNFNFDDPNLIILPLAFGKRVGREFIWNDLLSLETGSLKLANGRVIEKTLYNRRTRQDEPALFVALTFERREVLDSSNIKPMNLIGVDRGENIPAVIALTDPEGCPLSRFKDSLGNPTHILRIGESYKEKQRTIQAKKEVEQRRAGGYSRKYASKAKNLADDMVRNTARDLLYYAVTQDAMLIFENLSRGFGRQGKRTFMAERQYTRMEDWLTAKLAYEGLPSKTYLSKTLAQYTSKTCSNCGFTITSADYDRVLEKLKKTATGWMTTINGKELKVEGQITYYNRYKRQNVVKDLSVELDRLSEESVNNDISSWTKGRSGEALSLLKKRFSHRPVQEKFVCLNCGFETHADEQAALNIARSWLFLRSQEYKKYQTNKTTGNTDKRAFVETWQSFYRKKLKEVWKPAV

SEQ ID NO: 39884 - protein, 979 aa, synthetic construct
  REGION 1..979: note = engineered CasX variant
QEIKRINKIRRRLVKDSNTKKAGKTGPMKTLLVRVMTPDLRERLENLRKKPENIPQPISNTSRANLNKLLTDYTEMKKAILHVYWEEFQKDPVGLMSRVAQPASKKIDQNKLKPEMDEKGNLTTAGFACSQCGQPLFVYKLEQVSEKGKAYTNYFGRCNVAEHEKLIKLAQLKPEKDSDEAVTYSLGKFGQRALDFYSIHVTKESTHPVKPLAQIAGNRYASGPVGKALRDACMGTIASFLSKYQDIIIEHQKVVKGNQKRLESLRELAGKENLEYPSVTLPPQPHTKEGVDAYNEVIARVRMWVNLNLWQKLKLSRDDAKPLLRLKGFPSFPLVERQANEVDWWDMVCNVKKLINEKKEDGKVFWQNLAGYKRQEALRPYLSSEEDRKKGKKFARYQLGDLLLHLEKKHGEDWGKVYDEAWERIDKKVEGLSKHIKLEEERRSEDAQSKAALTDWLRAKASFVIEGLKEADKDEFCRCELKLQKWYGDLRGKPFAIEAENSILDISGFSKQYNCAFIWQKDGVKKLNLYLIINYFKGGKLRFKKIKPEAFEANRFYTVINKKSGEIVPMEVNFNFDDPNLIILPLAFGKRQGREFIWNDLLSLETGSLKLANGRVIEKTLYNRRTRQDEPALFVALTFERREVLDSSNIKTPMNLIGVDRGENIPAVIALTDPEGCPLSRFKDSLGNPTHILRIGESYKEKQRTIQAKKEVEQRRAGGYSRKYASKAKNLADDMVRNTARDLLYYAVTQDAMLIFENLSRGFGRQGKRTFMAERQYTRMEDWLTAKLAYEGLPSKTYLSKTLAQYTSKTCSNCGFTITSADYDRVLEKLKKTATGWMTTINGKELKVEGQITYYNRYKRQNVVKDLSVELDRLSEESVNNDISSWTKGRSGEALSLLKKRFSHRPVQEKFVCLNCGFETHADEQAALNIARSWLFLRSQEYKKYQTNKTTGNTDKRAFVETWQSFYRKKLKEVWKPAV

SEQ ID NO: 39885 - protein, 979 aa, synthetic construct
  REGION 1..979: note = engineered CasX variant
QEIKRINKIRRRLVKDSNTKKAGKTGPMKTLLVRVMTPDLRERLENLRKKPENIPQPISNTSRANLNKLLTDYTEMKKAILHVYWEEFQKDPVGLMSRVAQPASKKIDQNKLKPEMDEKGNLTTAGFACSQCGQPLFVYKLEQVSEKGKAYTNYFGRCNVAEHEKLIKLAQLKPEKDSDEAVTYSLGKFGQRALDFYSIHVTKESTHPVKPLAQIAGNRYASGPVGKALRDACMGTIASFLSKYQDIIIEHQKVVKGNQKRLESLRELAGKENLEYPSVTLPPQPHTKEGVDAYNEVIARVRMWVNLNLWQKLKLSRDDAKPLLRLKGFPSFPLVERQANEVDWWDMVCNVKKLINEKKEDGKVFWQNLAGYKRQEALRPYLSSEEDRKKGKKFARYQLGDLLLHLEKKHGEDWGKVYDEAWERIDKKVEGLSKHIKLEEERRSEDAQSKAALTDWLRAKASFVIEGLKEADKDEFCRCELKLQKWYGDLRGKPFAIEAENSILDISGFSKQYNCAFIWQKDGVKKLNLYLIINYFKGGKLRFKKIKPEAFEANRFYTVINKKSGEIVPMEVNFNFDDPNLIILPLAFGKRQGREFIWNDLLSLETGSLKLANGRVIEKTLYNRRTRQDEPALFVALTFERREVLDSSNIKPMSNLIGVDRGENIPAVIALTDPEGCPLSRFKDSLGNPTHILRIGESYKEKQRTIQAKKEVEQRRAGGYSRKYASKAKNLADDMVRNTARDLLYYAVTQDAMLIFENLSRGFGRQGKRTFMAERQYTRMEDWLTAKLAYEGLPSKTYLSKTLAQYTSKTCSNCGFTITSADYDRVLEKLKKTATGWMTTINGKELKVEGQITYYNRYKRQNVVKDLSVELDRLSEESVNNDISSWTKGRSGEALSLLKKRFSHRPVQEKFVCLNCGFETHADEQAALNIARSWLFLRSQEYKKYQTNKTTGNTDKRAFVETWQSFYRKKLKEVWKPAV

SEQ ID NO: 39886 - protein, 978 aa, synthetic construct
  REGION 1..978: note = engineered CasX variant
QEIKRINKIRRRLVKDSNTKKAGKTGPMKTLLVRVMTPDLRERLENLRKKPENIPQPISNTSRANLNKLLTDYTEMKKAILHVYWEEFQKDPVGLMSRVAQPASKKIDQNKLKPEMDEKGNLTTAGFACSQCGQPLFVYKLEQVSEKGKAYTNYFGRCNVAEHEKLIKLAQLKPEKDSDEAVTYSLGKFGQRALDFYSIHVTKESTHPVKPLAQIAGNRYASGPVGKALRDACMGTIASFLSKYQDIIIEHQKVVKGNQKRLESLRELAGKENLEYPSVTLPPQPHTKEGVDAYNEVIARVRMWVNLNLWQKLKLSRDDAKPLLRLKGFPSFPLVERQANEVDWWDMVCNVKKLINEKKEDGKVFWQNLAGYKRQEALRPYLSSEEDRKKGKKFARYQLGDLLLHLEKKHGEDWGKVYDEAWERIDKKVEGLSKHIKLEEERRSEDAQSKAALTDWLRAKASFVIEGLKEADKDEFCRCELKLQKWYGDLRGKPFAIEAENSILDISGFSKQYNCAFIWQKDGVKKLNLYLIINYFKGGKLRFKKIKPEAFEANRFYTVINKKSGEIVPMEVNFNFDDPNLIILPLAFGKRQGREFIWNDLLSLETGSLKLANGRVIEKTLYNRRTRQDEPALFVALTFERREVLDSSNIKPMNLIGVDRGENIPAVIALTDPEGCPLSRFKDSLGNPTHILRIRESYKEKQRTIQAKKEVEQRRAGGYSRKYASKAKNLADDMVRNTARDLLYYAVTQDAMLIFENLSRGFGRQGKRTFMAERQYTRMEDWLTAKLAYEGLPSKTYLSKTLAQYTSKTCSNCGFTITSADYDRVLEKLKKTATGWMTTINGKELKVEGQITYYNRYKRQNVVKDLSVELDRLSEESVNNDISSWTKGRSGEALSLLKKRFSHRPVQEKFVCLNCGFETHADEQAALNIARSWLFLRSQEYKKYQTNKTTGNTDKRAFVETWQSFYRKKLKEVWKPAV

SEQ ID NO: 39887 - protein, 978 aa, synthetic construct
  REGION 1..978: note = engineered CasX variant
QEIKRINKIRRRLVKDSNTKKAGKTGPMKTLLVRVMTPDLRERLENLRKKPENIPQPISNTSRANLNKLLTDYTEMKKAILHVYWEEFQKDPVGLMSRVAQPASKKIDQNKLKPEMDEKGNLTTAGFACSQCGQPLFVYKLEQVSEKGKAYTNYFGRCNVAEHEKLIKLAQLKPEKDSDEAVTYSLGKFGQRALDFYSIHVTKESTHPVKPLAQIAGNRYASGPVGKALRDACMGTIASFLSKYQDIIIEHQKVVKGNQKRLESLRELAGKENLEYPSVTLPPQPHTKEGVDAYNEVIARVRMWVNLNLWQKLKLSRDDAKPLLRLKGFPSFPLVERQANEVDWWDMVCNVKKLINEKKEDGKVFWQNLAGYKRQEALRPYLSSEEDRKKGKKFARYQLGDLLLHLEKKHGEDWGKVYDEAWERIDKKVEGLSKHIKLEEERRSEDAQSKAALTDWLRAKASFVIEGLKEADKDEFCRCELKLQKWYGDLRGKPFAIEAENSILDISGFSKQYNCAFIWQKDGVKKLNLYLIINYFKGGKLRFKKIKPEAFEANRFYTVINKKSGEIVPMEVNFNFDDPNLIILPLAFGKRQGREFIWNDLLSLETGSLKLANGRVIEKTLYNRRTRQDEPALFVALTFERREVLDSSNIKPMNLIGVDRGENIPAVIALTDPEGCPLSRFKDSLGNPTHILRIGESYKEKQRTIQAKKEVEQRRAGGYSRKYASKAKNLADDMVRNTARDLLYYAVTQDAMLIFENLSRGFGRQGKRTFSAERQYTRMEDWLTAKLAYEGLPSKTYLSKTLAQYTSKTCSNCGFTITSADYDRVLEKLKKTATGWMTTINGKELKVEGQITYYNRYKRQNVVKDLSVELDRLSEESVNNDISSWTKGRSGEALSLLKKRFSHRPVQEKFVCLNCGFETHADEQAALNIARSWLFLRSQEYKKYQTNKTTGNTDKRAFVETWQSFYRKKLKEVWKPAV

SEQ ID NO: 39888 - protein, 978 aa, synthetic construct
  REGION 1..978: note = engineered CasX variant
QEIKRINKIRRRLVKDSNTKKAGKTGPMKTLLVRVMTPDLRERLENLRKKPENIPQPISNTSRANLNKLLTDYTEMKKAILHVYWEEFQKDPVGLMSRVAQPASKKIDQNKLKPEMDEKGNLTTAGFACSQCGQPLFVYKLEQVSEKGKAYTNYFGRCNVAEHEKLIKLAQLKPEKDSDEAVTYSLGKFGQRALDFYSIHVTKESTHPVKPLAQIAGNRYASGPVGKALRDACMGTIASFLSKYQDIIIEHQKVVKGNQKRLESLRELAGKENLEYPSVTLPPQPHTKEGVDAYNEVIARVRMWVNLNLWQKLKLSRDDAKPLLRLKGFPSFPLVERQANEVDWWDMVCNVKKLINEKKEDGKVFWQNLAGYKRQEALRPYLSSEEDRKKGKKFARYQLGDLLLHLEKKHGEDWGKVYDEAWERIDKKVEGLSKHIKLEEERRSEDAQSKAALTDWLRAKASFVIEGLKEADKDEFCRCELKLQKWYGDLRGKPFAIEAENSILDISGFSKQYNCAFIWQKDGVKKLNLYLIINYFKGGKLRFKKIKPEAFEANRFYTVINKKSGEIVPMEVNFNFDDPNLIILPLAFGKRQGREFIWNDLLSLETGSLKLANGRVIEKTLYNRRTRQDEPALFVALTFERREVLDSSNIKPMNLIGVDRGENIPAVIALTDPEGCPLSRFKDSLGNPTHILRIGESYKEKQRTIQAKKEVEQRRAGGYSRKYASKAKNLADDMVRNTARDLLYYAVTQDAMLIFENLSRGFGRQGKRTFMAERQYTRMEDWLTAKLAYEGLPSKTYLSKTLAQYTSKTCSNCGFTITSADYDRVLEKLKKTATGWMTTINGKELKVEGQITYYNRYKRQNVVKDLSVELDRLSEESVNNDISSWDKGRSGEALSLLKKRFSHRPVQEKFVCLNCGFETHADEQAALNIARSWLFLRSQEYKKYQTNKTTGNTDKRAFVETWQSFYRKKLKEVWKPAV

SEQ ID NO: 39889 - protein, 978 aa, synthetic construct
  REGION 1..978: note = engineered CasX variant
QEIKRINKIRRRLVKDSNTKKAGKTGPMKTLLVRVMTPDLRERLENLRKKPENIPQPISNTSRANLNKLLTDYTEMKKAILHVYWEEFQVDPVGLMSRVAQPASKKIDQNKLKPEMDEKGNLTTAGFACSQCGQPLFVYKLEQVSEKGKAYTNYFGRCNVAEHEKLIKLAQLKPEKDSDEAVTYSLGKFGQRALDFYSIHVTKESTHPVKPLAQIAGNRYASGPVGKALRDACMGTIASFLSKYQDIIIEHQKVVKGNQKRLESLRELAGKENLEYPSVTLPPQPHTKEGVDAYNEVIARVRMWVNLNLWQKLKLSRDDAKPLLRLKGFPSFPLVERQANEVDWWDMVCNVKKLINEKKEDGKVFWQNLAGYKRQEALRPYLSSEEDRKKGKKFARYQLGDLLLHLEKKHGEDWGKVYDEAWERIDKKVEGLSKHIKLEEERRSEDAQSKAALTDWLRAKASFVIEGLKEADKDEFCRCELKLQKWYGDLRGKPFAIEAENSILDISGFSKQYNCAFIWQKDGVKKLNLYLIINYFKGGKLRFKKIKPEAFEANRFYTVINKKSGEIVPMEVNFNFDDPNLIILPLAFGKRQGREFIWNDLLSLETGSLKLANGRVIEKTLYNRRTRQDEPALFVALTFERREVLDSSNIKPMNLIGVDRGENIPAVIALTDPEGCPLSRFKDSLGNPTHILRIGESYKEKQRTIQAKKEVEQRRAGGYSRKYASKAKNLADDMVRNTARDLLYYAVTQDAMLIFENLSRGFGRQGKRTFMAERQYTRMEDWLTAKLAYEGLPSKTYLSKTLAQYTSKTCSNCGFTITSADYDRVLEKLKKTATGWMTTINGKELKVEGQITYYNRYKRQNVVKDLSVELDRLSEESVNNDISSWTKGRSGEALSLLKKRFSHRPVQEKFVCLNCGFETHADEQAALNIARSWLFLRSQEYKKYQTNKTTGNTDKRAFVETWQSFYRKKLKEVWKPAV

SEQ ID NO: 39890 - protein, 978 aa, synthetic construct
  REGION 1..978: note = engineered CasX variant
QEIKRLNKIRRRLVKDSNTKKAGKTGPMKTLLVRVMTPDLRERLENLRKKPENIPQPISNTSRANLNKLLTDYTEMKKAILHVYWEEFQKDPVGLMSRVAQPASKKIDQNKLKPEMDEKGNLTTAGFACSQCGQPLFVYKLEQVSEKGKAYTNYFGRCNVAEHEKLIKLAQLKPEKDSDEAVTYSLGKFGQRALDFYSIHVTKESTHPVKPLAQIAGNRYASGPVGKALRDACMGTIASFLSKYQDIIIEHQKVVKGNQKRLESLRELAGKENLEYPSVTLPPQPHTKEGVDAYNEVIARVRMWVNLNLWQKLKLSRDDAKPLLRLKGFPSFPLVERQANEVDWWDMVCNVKKLINEKKEDGKVFWQNLAGYKRQEALRPYLSSEEDRKKGKKFARYQLGDLLLHLEKKHGEDWGKVYDEAWERIDKKVEGLSKHIKLEEERRSEDAQSKAALTDWLRAKASFVIEGLKEADKDEFCRCELKLQKWYGDLRGKPFAIEAENSILDISGFSKQYNCAFIWQKDGVKKLNLYLIINYFKGGKLRFKKIKPEAFEANRFYTVINKKSGEIVPMEVNFNFDDPNLIILPLAFGKRQGREFIWNDLLSLETGSLKLANGRVIEKTLYNRRTRQDEPALFVALTFERREVLDSSNIKPMNLIGVDRGENIPAVIALTDPEGCPLSRFKDSLGNPTHILRIGESYKEKQRTIQAKKEVEQRRAGGYSRKYASKAKNLADDMVRNTARDLLYYAVTQDAMLIFENLSRGFGRQGKRTFMAERQYTRMEDWLTAKLAYEGLPSKTYLSKTLAQYTSKTCSNCGFTITSADYDRVLEKLKKTATGWMTTINGKELKVEGQITYYNRYKRQNVVKDLSVELDRLSEESVNNDISSWTKGRSGEALSLLKKRFSHRPVQEKFVCLNCGFETHADEQAALNIARSWLFLRSQEYKKYQTNKTTGNTDKRAFVETWQSFYRKKLKEVWKPAV

SEQ ID NO: 39891 - protein, 978 aa, synthetic construct
  REGION 1..978: note = engineered CasX variant
QEIKRINKIRRRLVKDSNTKKAGKTGPMKTLLVRVMTPDLRERLENLRKKPENIPQPISNTSRANLNKLLTDYTEMKKAILHVYWEEFQKDPVGLMSRVAQPASKKIDQNKLKPEMDEKGNLTTAGFACSQCGQPLFVYKLEQVSEKGKAYTNYVGRCNVAEHEKLIKLAQLKPEKDSDEAVTYSLGKFGQRALDFYSIHVTKESTHPVKPLAQIAGNRYASGPVGKALRDACMGTIASFLSKYQDIIIEHQKVVKGNQKRLESLRELAGKENLEYPSVTLPPQPHTKEGVDAYNEVIARVRMWVNLNLWQKLKLSRDDAKPLLRLKGFPSFPLVERQANEVDWWDMVCNVKKLINEKKEDGKVFWQNLAGYKRQEALRPYLSSEEDRKKGKKFARYQLGDLLLHLEKKHGEDWGKVYDEAWERIDKKVEGLSKHIKLEEERRSEDAQSKAALTDWLRAKASFVIEGLKEADKDEFCRCELKLQKWYGDLRGKPFAIEAENSILDISGFSKQYNCAFIWQKDGVKKLNLYLIINYFKGGKLRFKKIKPEAFEANRFYTVINKKSGEIVPMEVNFNFDDPNLIILPLAFGKRQGREFIWNDLLSLETGSLKLANGRVIEKTLYNRRTRQDEPALFVALTFERREVLDSSNIKPMNLIGVDRGENIPAVIALTDPEGCPLSRFKDSLGNPTHILRIGESYKEKQRTIQAKKEVEQRRAGGYSRKYASKAKNLADDMVRNTARDLLYYAVTQDAMLIFENLSRGFGRQGKRTFMAERQYTRMEDWLTAKLAYEGLPSKTYLSKTLAQYTSKTCSNCGFTITSADYDRVLEKLKKTATGWMTTINGKELKVEGQITYYNRYKRQNVVKDLSVELDRLSEESVNNDISSWTKGRSGEALSLLKKRFSHRPVQEKFVCLNCGFETHADEQAALNIARSWLFLRSQEYKKYQTNKTTGNTDKRAFVETWQSFYRKKLKEVWKPAV

SEQ ID NO: 39892 - protein, 978 aa, synthetic construct
  REGION 1..978: note = engineered CasX variant
QEIKRINKIRRRLVKDSNTKKAGKTGPMKTLLVRVMTPDLRERLENLRKKPENIPQPISNTSRANLNKLLTDYTEMKKAILHVYWEEFQKDPVGLMSRVAQPASKKIDQNKLKPEMDEKGNLTTAGFACSQCGQPLFVYKLEQVSEKGKAYTNYFGRCNVAEHEKLIKLAQLKPEKDSDEAVTYSLGKFGQRALDFYSIHVTKESTHPVKPLAQIAGNRYASGPVGKALRDACMGTIASFLSKYQDIIIEHQKVVKGNQKRLESLRELAGKENLEYPSVTLPPQPHTKEGVDAYNEVIARVRMWVNLNLWQKLKLSRDDAKPLLRLKGFPSFPLVERQANEVDWWDMVCNVKKLINEKKEDGKVFWQNLAGYKRQEALRPYLSSEEDRKKGKKFARYQLGDLLLHLEKKHGEDWGKVYDEAWERIDKKVEGLSKHIKLEEERRSEDAQSKAALTDWLRAKASFVIEGLKEADKDEFCRCELKLQKWYGDLRGKPFAIEAENSILDISGFSKQYNCAFIWQKDGVKKLNLYLIINYFKGGKLRFKKIKPEAFEANRFYTVINKKSGEIVPMEVNFNFDDPNLIILPLAFGKRQGREFIWNDLLSLETGSLKLANGRVIEKTLYNRRTRQDEPALFVALTFERREVLDSSNIKPMNLIGVDRGENIPAVIALTDPEGCPLSRFKDSLGNPTHILRIGESYKEKQRTIQAKKEVEQRRAGGYSRKYASKAKNLADDMVRNTARDLLYYAVTQDAMLIFENLSRGFGRQGKRTFMAERQYTRMEDWLTAKLAYEGLASKTYLSKTLAQYTSKTCSNCGFTITSADYDRVLEKLKKTATGWMTTINGKELKVEGQITYYNRYKRQNVVKDLSVELDRLSEESVNNDISSWTKGRSGEALSLLKKRFSHRPVQEKFVCLNCGFETHADEQAALNIARSWLFLRSQEYKKYQTNKTTGNTDKRAFVETWQSFYRKKLKEVWKPAV

SEQ ID NO: 39893 - protein, 978 aa, synthetic construct
  REGION 1..978: note = engineered CasX variant
QEIKRINKIRRRLVKDSNTKKAGKTGPMKTLLVRVMTPDLRERLENLRKKPENIPQPISNTSRANLNKLLTDYTEMKKAILHVYWEEFQKDPVGLMSRVAQPASKKIDQNKLKPEMDEKGNLTTAGFACSQCGQPLFVYKLEQVSEKGKAYTNYFGRCNVAEHEKLIKLAQLKPEKDSDEAVTYSLGKFGQRALDFYSIHVTKESTHPVKPLAQIAGNRYASGPVGKALRDACMGTIASFLSKYQDIIIEHQKVVKGNQKRLESLRELAGKENLEYPSVTLPPQPHTKEGVDAYNEVIARVRMWVNLNLWQKLKLSRDDAKPLLRLKGFPSFPLVERQANEVDWWDMVCNVKKLINEKKEDGKVFWQNLAGYKRQEALRPYLSSEEDRKKGKKFARYQLGDLLLHLEKKHGEDWGKVYDEAWERIDKKVEGLSKHIKLEEERRSEDAQSKAALTDWLRAKASFVIEGLKEADKDEFCRCELKLQKWYGDLRGKPFAIEAENSILDISGFSKQYNCAFIWQKDGVKKLNLYLIINYFKGGKLRFKKIKPEAFEANRFYTVINKKSGEIVPMEVNFNFDDPNLIILPLAFGKRQGREFIWNDLLSLETGSLKLANGRVIEKTLYNRRTRQDEPALFVALTFERREVLDSSNIKPMNLIGVDRGENIPAVIALTDPEGCPLSRFKDSLGNPTHILRIGESYKEKQRTIQAKKEVEQRRAGGYSRKYASKAKNLADDMVRNTARDLLYYAVTQDAMLIFENLSRGFGRQGKRTFMAERQYTRMEDWLTAKLAYEGLPSKVYLSKTLAQYTSKTCSNCGFTITSADYDRVLEKLKKTATGWMTTINGKELKVEGQITYYNRYKRQNVVKDLSVELDRLSEESVNNDISSWTKGRSGEALSLLKKRFSHRPVQEKFVCLNCGFETHADEQAALNIARSWLFLRSQEYKKYQTNKTTGNTDKRAFVETWQSFYRKKLKEVWKPAV

SEQ ID NO: 39894 - protein, 979 aa, synthetic construct
  REGION 1..979: note = engineered CasX variant
QEIKRINKIRRRLVKDSNTKKAGKTGPMKTLLVRVMTPDLRERLENLRKKPENIPQPISNTSRANLNKLLTDYTEMKKAILHVYWEEFQKDPVGLMSRVAQPASKKIDQNKLKPEMDEKGNLTTAGFACSQCGQPLFVYKLEQVSEKGKAYTNYFGRCNVAEHEKLIKLAQLKPEKDSDEAVTYSLGKFGQRALDFYSIHVTKESTHPVKPLAQIAGNRYASGPVGKALRDACMGTIASFLSKYQDIIIEHQKVVKGNQKRLESLRELAGKENLEYPSVTLPPQPHTKEGVDAYNEVIARVRMWVNLNLWQKLKLSRDDAKPLLRLKGFPSFPLVERQANEVDWWDMVCNVKKLINEKKEDGKVFWQNLAGYKRQEALRPYLSSEEDRKKGKKFARYQLGDLLLHLEKKHGEDWGKVYDEAWERIDKKVEGLSKHIKLEEERRSEDAQSKAALTDWLRAKASFVIEGLKEADKDEFCRCELKLQKWYGDLRGKPFAIEAENSILDISGFSKQYNCAFIWQKDGVKKLNLYLIINYFKGGKLRFKKIKPEAFEANRFYTVINKKSGEIVPMEVNFNFDDPNLIILPLAFGKRQGREFIWNDLLSLETGSLKLANGRVIEKTLYNRRTRQDEPALFVALTFERREVLDSSNIKPMNLIGVDRGENIPAVIALTDPEGCPLSRFKDSLGNPTHILRIGESYKEKQRTIQAKKEVEQRRAGGYSRKYASKAKNLADDMVRNTARDLLYYAVTQDAMLIFENLSRGFGRQGKRTFMAERQYTRMEDWLTAKLAYEGPLPSKTYLSKTLAQYTSKTCSNCGFTITSADYDRVLEKLKKTATGWMTTINGKELKVEGQITYYNRYKRQNVVKDLSVELDRLSEESVNNDISSWTKGRSGEALSLLKKRFSHRPVQEKFVCLNCGFETHADEQAALNIARSWLFLRSQEYKKYQTNKTTGNTDKRAFVETWQSFYRKKLKEVWKPAV

SEQ ID NO: 39895 - protein, 979 aa, synthetic construct
  REGION 1..979: note = engineered CasX variant
QEIKRINKIRRRLVKDSNTKKAGKTGPMKTLLVRVMTPDLRERLENLRKKPENIPQPISNTSRANLNKLLTDYTEMKKAILHVYWEEFQKDPVGLMSRVAQPASKKIDQNKLKPEMDEKGNLTTAGFACSQCGQPLFVYKLEQVSEKGKAYTNYFGRCNVAEHEKLIKLAQLKPEKDSDEAVTYSLGKFGQRALDFYSIHVTKESTHPVKPLAQIAGNRYASGPVGKALRDACMGTIASFLSKYQDIIIEHQKVVKGNQKRLESLRELAGKENLEYPSVTLPPQPHTKEGVDAYNEVIARVRMWVNLNLWQKLKLSRDDAKPLLRLKGFPSFPLVERQANEVDWWDMVCNVKKLINEKKEDGKVFWQNLAGYKRQEALRPYLSSEEDVRKKGKKFARYQLGDLLLHLEKKHGEDWGKVYDEAWERIDKKVEGLSKHIKLEEERRSEDAQSKAALTDWLRAKASFVIEGLKEADKDEFCRCELKLQKWYGDLRGKPFAIEAENSILDISGFSKQYNCAFIWQKDGVKKLNLYLIINYFKGGKLRFKKIKPEAFEANRFYTVINKKSGEIVPMEVNFNFDDPNLIILPLAFGKRQGREFIWNDLLSLETGSLKLANGRVIEKTLYNRRTRQDEPALFVALTFERREVLDSSNIKPMNLIGVDRGENIPAVIALTDPEGCPLSRFKDSLGNPTHILRIGESYKEKQRTIQAKKEVEQRRAGGYSRKYASKAKNLADDMVRNTARDLLYYAVTQDAMLIFENLSRGFGRQGKRTFMAERQYTRMEDWLTAKLAYEGLPSKTYLSKTLAQYTSKTCSNCGFTITSADYDRVLEKLKKTATGWMTTINGKELKVEGQITYYNRYKRQNVVKDLSVELDRLSEESVNNDISSWTKGRSGEALSLLKKRFSHRPVQEKFVCLNCGFETHADEQAALNIARSWLFLRSQEYKKYQTNKTTGNTDKRAFVETWQSFYRKKLKEVWKPAV

SEQ ID NO: 39896 - protein, 978 aa, synthetic construct
  REGION 1..978: note = engineered CasX variant
QEIKRINKIRRRLVKDSNTKKAGKTGPMKTLLVRVMTPDLRERLENLRKKPENIPQPISNTSRANLNKLLTDYTEMKKAILHVYWEEFQKDPVGLMSRVAQPASKKIDQNKLKPEMDEKGNLTTAGFACSQCGQPLFVYKLEQVSEKGKAYTNYFGRCNVAEHEKLIKLAQLKPEKDSDEAVTYSLGKFGQRALDFYSIHVTKESTHPVKPLAQIAGNRYASGPVGKALRDACMGTIASFLSKYQDIIIEHQKVVKGNQKRLESLRELAGKENLEYPSVTLPPQPHTKEGVDAYNEVIARVRMWVNLNLWQKLKLSRDDAKPLLRLKGFPSFPLVERQANEVDWWDMVCNVKKLINEKKEDGKVFWQNLAGYKRQEALRPYLSSEEDRKKGKKFARYQLGDLLLHLEKKHGEDWGKVYDEAWERIDKKVEGLSKHIKLEEERRSEDAQSKAALTDWLRAKASFVIEGLKEADKDEFCRCELKLQKWYGDLRGKPFAIEAENSILDISGFSKQYNCAFIWQKDGVKKLNLYLIINYFKGGKLRFKKIKPEAFEANRFYTVINKKSGEIVPMEVNFNFDDPNLIILPLAFGKRQGREFIWNDLLSLETGSLKLANGRVIEKTLYNRRTRQDEPALFVALTFERREVLDSSNIKPMNLIGVDRGENIPAVIALTDPEGCPLSRFKDSLGNPTHILRIGESYKEKQRTIQAKKEVEQRRAGGYSRKYASKAKNLADDMVRNTARDLLYYAVTQDAMLIFENLSRGFGRQGKRTFMAERQYTRMEDWLTAKLAYEGLPSKTYLSKTLAQYTSKTCSNCGFTITSADYDRMLEKLKKTATGWMTTINGKELKVEGQITYYNRYKRQNVVKDLSVELDRLSEESVNNDISSWTKGRSGEALSLLKKRFSHRPVQEKFVCLNCGFETHADEQAALNIARSWLFLRSQEYKKYQTNKTTGNTDKRAFVETWQSFYRKKLKEVWKPAV

SEQ ID NO: 39897 - protein, 978 aa, synthetic construct
  REGION 1..978: note = engineered CasX variant
QEIKRINKIRRRLVKDSNTKKAGKTGPMKTLLVRVMTPDLRERLENLRKKPENIPQPISNTSRANLNKLLTDYTEMKKAILHVYWEEFQKDPVGLMSRVAQPASKKIDQNKLKPEMDEKGNLTTAGFACSQCGQPLFVYKLEQVSEKGKAYTNYFGRCNVAEHEKLIKLAQLKPEKDSDEAVTYSLGKFGQRALDFYSIHVTKESTHPVKPLAQIAGNRYASGPVGKALRDACMGTIASFLSKYQDIIIEHQKVVKGNQKRLESLRELAGKENLEYPSVTLPPQPHTKEGVDAYNEVIARVRMWVNLNLWQKLKLSRDDAKPLLRLKGFPSFPLVERQANEVDWWDMVCNVKKLINEKKEDGKVFWQNLAGYKRQEALRPYLSSEEDRKKGKKFARYQLGDLLLHLEKKHGEDWGKVYDEAWERIDKKVEGLSKHIKLEEERRSEDAQSKAALTDWLRAKASFVIEGLKEADKDEFCRCELKLQKWYGDLRGKPFAIEAENSILDISGFSKQYNCAFIWQKDGVKKLNLYLIINYFKGGKLRFKKIKPEAFEANRFYTVINKKSGEIVPMEVNFNFDDPNLIILPLAFGKRQGREFIWNDLLSLETGSLKLANGRVIEKTLYNRRTRQDEPALFVALTFERREVLDSSNIKPMNLIGVDRGENIPAVIALTDPEGCPLSRFKDSLGNPTHILRIGESYKEKQRTIQAKKEVEQRRAGGYSRKYASKAKNLADDMVRNTARDLLYYAVTQDAMLIFENLSRGFGRQGKRTFMAERQYTRMEDWLTAKLAYEGLPSKTYLSKTLAQYTSKTCSNCGFTITSADYDRVLEKLKKTATGWMTTINGKELKVEGQITYYNRYKRQNVVKDLSVELDRLSEESVNNDISSWTKGRQGEALSLLKKRFSHRPVQEKFVCLNCGFETHADEQAALNIARSWLFLRSQEYKKYQTNKTTGNTDKRAFVETWQSFYRKKLKEVWKPAV

SEQ ID NO: 39898 - protein, 978 aa, synthetic construct
  REGION 1..978: note = engineered CasX variant
QEIKRINKIRRRLVKDSNTKKAGKTGPMKTLLVRVMTPDLRERLENLRKKPENIPQPISNTSRANLNKLLTDYTEMKKAILHVYWEEFQKDPVGLMSRVAQPASKKIDQNKLKPEMDEKGNLTTAGFACSQCGQPLFVYKLEQVSEKGKAYTNYFGRCNVAEHEKLIKLAQLKPEKDSDEAVTYSLGKFGQRALDFYSIHVTKESTHPVKPLAQIAGNRYASGPVGKALRDACMGTIASFLSKYQDIIIEHQKVVKGNQKRLESLRELAGKENLEYPSVTLPPQPHTKEGVDAYNEVIARVRMWVNLNLWQKLKLSRDDAKPLLRLKGFPSFPLVERQANEVDWWDMVCNVKKLINEKKEDGKVFWQNLAGYKRQEALRPYLSSEEDRKKGKKFARYQLGDLLLHLEKKHGEDWGKVYDEAWERIDKKVEGLSKHIKLEEERRSEDAQSKAALTDWLRAKASFVIEGLKEADKDEFCRCELKLQKWYGDLRGKPFAIEAENSILDISGFSKQYNCAFIWQKDGVKKLNLYLIINYFKGGKLRFKKIKPEAFEANRFYTVINKKSGEIVPMEVNFNFDDPNLIILPLAFGKRQGREFIWNDLLSLETGSLKLANGRVIEKTLYNRRTRQDEPALFVALTFERREVLDSSNIKPMNLIGVDRGENIPAVIALTDPEGCPLSRFKDSLGNPTHILRIGESYKEKQRTIQAKKEVEQRRAGGYSRKYASKAKNLADDMVRNTARDLLYYAVTQDAMLIFENLSRGFGRQGKRTFMAERQYTRMEDWLTAKLAYEGLPSKTYLSKTLAQYTSKTCSNCGFTITSADYDRVLEKLKKTATGWMTTINGKELKVEGQITYYNRYKRQNVVKDLSVELDRLSEESVNNDISSWTKGRSGEALSLLKKRFSHRPVQEKFVCLNCEFETHADEQAALNIARSWLFLRSQEYKKYQTNKTTGNTDKRAFVETWQSFYRKKLKEVWKPAV

SEQ ID NO: 39899 - protein, 979 aa, synthetic construct
  REGION 1..979: note = engineered CasX variant
QEIKRINKIRRRLVKDSNTKKAGKTGPMKTLLVRVMTPDLRERLENLRKKPENIPQPISNTSRANLNKLLTDYTEMKKAILHVYWEEFQKDPVGLMSRVAQPASKKIDQNKLKPEMDEKGNLTTAGFACSQCGQPLFVYKLEQVSEKGKAYTNYFGRCNVAEHEKLIKLAQLKPEKDSDEAVTYSLGKFGQRALDFYSIHVTKESTHPVKPLAQIAGNRYASGPVGKALRDACMGTIASFLSKYQDIIIEHQKVVKGNQKRLESLRELAGKENLEYPSVTLPPQPHTKEGVDAYNEVIARVRMWVNLNLWQKLKLSRDDAKPLLRLKGFPSFPLVERQANEVDWWDMVCNVKKLINEKKEDGKVFWQNLAGYKRQEALRPYLSSEEDRKKGKKFARYQLGDLLLHLEKKHGEDWGKVYDEAWERIDKKVEGLSKHIKLEEERRSEDAQSKAALTDWLRAKASFVIEGLKEADKDEFCRCELKLQKWYGDLRGKPFAIEAENSILDISGFSKQYNCAFIWQKDGVKKLNLYLIINYFKGGKLRFKKIKPEAFEANRFYTVINKKSGEIVPMEVNFNFDDPNLIILPLAFGKRQGREFIWNDLLSLETGSLKLANGRVIEKTLYNRRTRQDEPALFVALTFERREVLDSSNIKPMNLIGVDRGENIPAVIALTDPEGCPLSRFKDSLGNPTHILRIGESYKEKQRTIQAKKEVEQRRAGGYSRKYASKAKNLADDMVRNTARDLLYYAVTQDAMLIFENLSRGFGRQGKRTFMAERQYTRMEDWLTAKLAYEGLPSKTYLSKTLAQYTSKTCSNCGFTITSADYDRVLEKLKKTATGWMTTINGKELKVEGQITYYNRYKRQNVVKDLSVELDRLSEESVNNDISSWTKGRSGEALSLLKKRFSHRPVQEKFVCLNCGFETHADEQAALNIARSWLFLRSQEYKKYQTNKTSTGNTDKRAFVETWQSFYRKKLKEVWKPAV

SEQ ID NO: 39900 - protein, 979 aa, synthetic construct
  REGION 1..979: note = engineered CasX variant
QEIKRINKIRRRLVKDSNTKKAGKTGPMKTLLVRVMTPDLRERLENLRKKPENIPQPISNTSRANLNKLLTDYTEMKKAILHVYWEEFQKDPVGLMSRVAQPASKKIDQNKLKPEMDEKGNLTTAGFACSQCGQPLFVYKLEQVSEKGKAYTNYFGRCNVAEHEKLIKLAQLKPEKDSDEAVTYSLGKFGQRALDFYSIHVTKESTHPVKPLAQIAGNRYASGPVGKALRDACMGTIASFLSKYQDIIIEHQKVVKGNQKRLESLRELAGKENLEYPSVTLPPQPHTKEGVDAYNEVIARVRMWVNLNLWQKLKLSRDDAKPLLRLKGFPSFPLVERQANEVDWWDMVCNVKKLINEKKEDGKVFWQNLAGYKRQEALRPYLSSEEDRKKGKKFARYQLGDLLLHLEKKHGEDWGKVYDEAWERIDKKVEGLSKHIKLEEERRSEDAQSKAALTDWLRAKASFVIEGLKEADKDEFCRCELKLQKWYGDLRGKPFAIEAENSILDISGFSKQYNCAFIWQKDGVKKLNLYLIINYFKGGKLRFKKIKPEAFEANRFYTVINKKSGEIVPMEVNFNFDDPNLIILPLAFGKRQGREFIWNDLLSLETGSLKLANGRVIEKTLYNRRTRQDEPALFVALTFERREVLDSSNIKPMNLIGVDRGENIPAVIALTDPEGCPLSRFKDSLGNPTHILRIGESYKEKQRTIQAKKEVEQRRAGGYSRKYASKAKNLADDMVRNTARDLLYYAVTQDAMLIFENLSRGFGRQGKRTFMAERQYTRMEDWLTAKLAYEGLPSKTYLSKTLAQYTSKTCSNCGFTITSADYDRVLEKLKKTATGWMTTINGKELKVEGQITYYNRYKRQNVVKDLSVELDRLSEESVNNDISSWTKGRSGEALSLLKKRFSHRPVQEKFVCLNCGFETHADEQAALNIARSWLFLRSQEYKKYQTNKTTGKNTDKRAFVETWQSFYRKKLKEVWKPAV

SEQ ID NO: 39901 - protein, 978 aa, synthetic construct
  REGION 1..978: note = engineered CasX variant
QEIKRINKIRRRLVKDSNTKKAGKTGPMKTLLVRVMTPDLRERLENLRKKPENIPQPISNTSRANLNKLLTDYTEMKKAILHVYWEEFQKDPVGLMSRVAQPASKKIDQNKLKPEMDEKGNLTTAGFACSQCGQPLFVYKLEQVSEKGKAYTNYFGRCNVAEHEKLIKLAQLKPEKDSDEAVTYSLGKFGQRALDFYSIHVTKESTHPVKPLAQIAGNRYASGPVGKALRDACMGTIASFLSKYQDIIIEHQKVVKGNQKRLESLRELAGKENLEYPSVTLPPQPHTKEGVDAYNEVIARVRMWVNLNLWQKLKLSRDDAKPLLRLKKFPSFPLVERQANEVDWWDMVCNVKKLINEKKEDGKVFWQNLAGYKRQEALRPYLSSEEDRKKGKKFARYQLGDLLLHLEKKHGEDWGKVYDEAWERIDKKVEGLSKHIKLEEERRSEDAQSKAALTDWLRAKASFVIEGLKEADKDEFCRCELKLQKWYGDLRGKPFAIEAENSILDISGFSKQYNCAFIWQKDGVKKLNLYLIINYFKGGKLRFKKIKPEAFEANRFYTVINKKSGEIVPMEVNFNFDDPNLIILPLAFGKRQGREFIWNDLLSLETGSLKLANGRVIEKTLYNRRTRQDEPALFVALTFERREVLDSSNIKPMNLIGVDRGENIPAVIALTDPEGCPLSRFKDSLGNPTHILRIGESYKEKQRTIQAKKEVEQRRAGGYSRKYASKAKNLADDMVRNTARDLLYYAVTQDAMLIFENLSRGFGRQGKRTFMAERQYTRMEDWLTAKLAYEGLPSKTYLSKTLAQYTSKTCSNCGFTITSADYDRVLEKLKKTATGWMTTINGKELKVEGQITYYNRYKRQNVVKDLSVELDRLSEESVNNDISSWTKGRSGEALSLLKKRFSHRPVQEKFVCLNCGFETHADEQAALNIARSWLFLRSQEYKKYQTNKTTGNTDKRAFVETWQSFYRKKLKEVWKPAV

SEQ ID NO: 39902 - protein, 978 aa, synthetic construct
  REGION 1..978: note = engineered CasX variant
QEIKRINKIRRRLVKDSNTKKAGKTGPMKTLLVRVMTPDLRERLENLRKKPENIPQPISNTSRANLNKLLTDYTEMKKAILHVYWEEFQKDPVGLMSRVAQPASKKIDQNKLKPEMDEKGNLTTAGFACSQCGQPLFVYKLEQVSEKGKAYTNYFGRCNVAEHEKLIKLAQLKPEKDSDEAVTYSLGKFGQRALDFYSIHVTKESTHPVKPLAQIAGNRYASGPVGKALRDACMGTIASFLSKYQDIIIEHQKVVKGNQKRLESLRELAGKENLEYPSVTLPPQPHTKEGVDAYNEVIARVRMWVNLNLWQKLKLSRDDAKPLLRLKGFPSFPLVERQANEVDWWDMVCNVKKLINEKKEDGKVFWQNLAGYKRQEALRPYLSSEEDRKKGKKFARYQLGDLLLHLEKKHGEDWGKVYDEAWERIDKKVEGLSKHIKLEEERRSEDAQSKAALTDWLRAKASFVIEGLKEADKDEFCRCELKLQKWYGDLRGKPFAIEAENSILDISGFSKQYNCAFIWQKDGVKKLNLYLIINYFKGGKLRFKKIKPEAFEANRFYTVINKKSGEIVPMEVNFNFDDPNLIILPLAFGKRQGREFIWNDLLSLETGSLKLANGRVIEKTLYNRRTRQDEPALFVALTFERREVLDSSNIKPMNLIGVDRGENIPAVIALTDPEGCPLSRFKDSLGNPTHILRIGERYKEKQRTIQAKKEVEQRRAGGYSRKYASKAKNLADDMVRNTARDLLYYAVTQDAMLIFENLSRGFGRQGKRTFMAERQYTRMEDWLTAKLAYEGLPSKTYLSKTLAQYTSKTCSNCGFTITSADYDRVLEKLKKTATGWMTTINGKELKVEGQITYYNRYKRQNVVKDLSVELDRLSEESVNNDISSWTKGRSGEALSLLKKRFSHRPVQEKFVCLNCGFETHADEQAALNIARSWLFLRSQEYKKYQTNKTTGNTDKRAFVETWQSFYRKKLKEVWKPAV

SEQ ID NO: 39903 - protein, 978 aa, synthetic construct
  REGION 1..978: note = engineered CasX variant
QEIKRINKIRRRLVKDSNTKKAGKTGPMKTLLVRVMTPDLRERLENLRKKPENIPQPISNTSRANLNKLLTDYTEMKKAILHVYWEEFQKDPVGLMSRVAQPASKKIDQNKLKPEMDEKGNLTTAGFACSQCGQPLFVYKLEQVSEKGKAYTNYFGRCNVAEHEKLIKLAQLKPEKDSDEAVTYSLGKFGQRALDFYSIHVTKESTHPVKPLAQIAGNRYASGPVGKALRDACMGTIASFLSKYQDIIIEHQKVVKGNQKRLESLRELAGKENLEYPSVTLPPQPHTKEGVDAYNEVIARVRMWVNLNLWQKLKLSRDDAKPLLRLKGFPSFPLVERQANEVDWWDMVCNVKKLINEKKEDGKVFWQNLAGYKRQEALRPYLSSEEDRKKGKKFARYQLGDLLLHLEKKHGEDWGKVYDEAWERIDKKVEGLSKHIKLEEERRSEDAQSKAALTDWLRAKASFVIEGLKEADKDEFCRCELKLQKWYGDLRGKPFAIEAENSILDISGFSKQYNCAFIWQKDGVKKLNLYLIINYFKGGKLRFKKIKPEAFEANRFYTVINKKSGEIVPMEVNFNFDDPNLIILPLAFGKRQGREFIWNDLLSLETGSLQLANGRVIEKTLYNRRTRQDEPALFVALTFERREVLDSSNIKPMNLIGVDRGENIPAVIALTDPEGCPLSRFKDSLGNPTHILRIGESYKEKQRTIQAKKEVEQRRAGGYSRKYASKAKNLADDMVRNTARDLLYYAVTQDAMLIFENLSRGFGRQGKRTFMAERQYTRMEDWLTAKLAYEGLPSKTYLSKTLAQYTSKTCSNCGFTITSADYDRVLEKLKKTATGWMTTINGKELKVEGQITYYNRYKRQNVVKDLSVELDRLSEESVNNDISSWTKGRSGEALSLLKKRFSHRPVQEKFVCLNCGFETHADEQAALNIARSWLFLRSQEYKKYQTNKTTGNTDKRAFVETWQSFYRKKLKEVWKPAV

SEQ ID NO: 39904 - protein, 979 aa, synthetic construct
  REGION 1..979: note = engineered CasX variant
QEIKRINKIRRRLVKDSNTKKAGKTGPMKTLLVRVMTPDLRERLENLRKKPENIPQPISNTSRANLNKLLTDYTEMKKAILHVYWEEFQKDPVGLMSRVAQPASKKIDQNKLKPEMDEKGNLTTAGFACSQCGQPLFVYKLEQVSEKGKAYTNYFGRCNVAEHEKLILLYDQLKPEKDSDEAVTYSLGKFGQRALDFYSIHVTKESTHPVKPLAQIAGNRYASGPVGKALRDACMGTIASFLSKYQDIIIEHQKVVKGNQKRLESLRELAGKENLEYPSVTLPPQPHTKEGVDAYNEVIARVRMWVNLNLWQKLKLSRDDAKPLLRLKGFPSFPLVERQANEVDWWDMVCNVKKLINEKKEDGKVFWQNLAGYKRQEALRPYLSSEEDRKKGKKFARYQLGDLLLHLEKKHGEDWGKVYDEAWERIDKKVEGLSKHIKLEEERRSEDAQSKAALTDWLRAKASFVIEGLKEADKDEFCRCELKLQKWYGDLRGKPFAIEAENSILDISGFSKQYNCAFIWQKDGVKKLNLYLIINYFKGGKLRFKKIKPEAFEANRFYTVINKKSGEIVPMEVNFNFDDPNLIILPLAFGKRQGREFIWNDLLSLETGSLKLANGRVIEKTLYNRRTRQDEPALFVALTFERREVLDSSNIKPMNLIGVDRGENIPAVIALTDPEGCPLSRFKDSLGNPTHILRIGESYKEKQRTIQAKKEVEQRRAGGYSRKYASKAKNLADDMVRNTARDLLYYAVTQDAMLIFENLSRGFGRQGKRTFMAERQYTRMEDWLTAKLAYEGLPSKTYLSKTLAQYTSKTCSNCGFTITSADYDRVLEKLKKTATGWMTTINGKELKVEGQITYYNRYKRQNVVKDLSVELDRLSEESVNNDISSWTKGRSGEALSLLKKRFSHRPVQEKFVCLNCGFETHADEQAALNIARSWLFLRSQEYKKYQTNKTTGNTDKRAFVETWQSFYRKKLKEVWKPAV

SEQ ID NO: 39905 - protein, 979 aa, synthetic construct
  REGION 1..979: note = engineered CasX variant
QEIKRINKIRRRLVKDSNTKKAGKTGPMKTLLVRVMTPDLRERLENLRKKPENIPQPISNTSRANLNKLLTDYTEMKKAILHVYWEEFQKDPVGLMSRVAQPASKKIDQNKLKPEMDEKGNLTTAGFACSQCGQPLFVYKLEQVSEKGKAYTNYFGRCNVAEHEKLILLYSQLKPEKDSDEAVTYSLGKFGQRALDFYSIHVTKESTHPVKPLAQIAGNRYASGPVGKALRDACMGTIASFLSKYQDIIIEHQKVVKGNQKRLESLRELAGKENLEYPSVTLPPQPHTKEGVDAYNEVIARVRMWVNLNLWQKLKLSRDDAKPLLRLKGFPSFPLVERQANEVDWWDMVCNVKKLINEKKEDGKVFWQNLAGYKRQEALRPYLSSEEDRKKGKKFARYQLGDLLLHLEKKHGEDWGKVYDEAWERIDKKVEGLSKHIKLEEERRSEDAQSKAALTDWLRAKASFVIEGLKEADKDEFCRCELKLQKWYGDLRGKPFAIEAENSILDISGFSKQYNCAFIWQKDGVKKLNLYLIINYFKGGKLRFKKIKPEAFEANRFYTVINKKSGEIVPMEVNFNFDDPNLIILPLAFGKRQGREFIWNDLLSLETGSLKLANGRVIEKTLYNRRTRQDEPALFVALTFERREVLDSSNIKPMNLIGVDRGENIPAVIALTDPEGCPLSRFKDSLGNPTHILRIGESYKEKQRTIQAKKEVEQRRAGGYSRKYASKAKNLADDMVRNTARDLLYYAVTQDAMLIFENLSRGFGRQGKRTFMAERQYTRMEDWLTAKLAYEGLPSKTYLSKTLAQYTSKTCSNCGFTITSADYDRVLEKLKKTATGWMTTINGKELKVEGQITYYNRYKRQNVVKDLSVELDRLSEESVNNDISSWTKGRSGEALSLLKKRFSHRPVQEKFVCLNCGFETHADEQAALNIARSWLFLRSQEYKKYQTNKTTGNTDKRAFVETWQSFYRKKLKEVWKPAV

SEQ ID NO: 39906 - protein, 977 aa, synthetic construct
  REGION 1..977: note = engineered CasX variant
QEIKRINKIRRRLVKDSNTKKAGKTGPMKTLLVRVMTPDLRERLENLRKKPENIPQPISNTSRANLNKLLTDYTEMKKAILHVYWEEFQKDPVGLMSRVAQPASKKIDQNKLKPEMDEKGNLTTAGFACSQCGQPLFVYKLEQVSEKGKAYTNYFGRCNVAEHEKLILLYQLKPEKDSDEAVTYSLGKFGQRALDFYSIHVTKESTHPVKPLAQIAGNRYASPVGKALRDACMGTIASFLSKYQDIIIEHQKVVKGNQKRLESLRELAGKENLEYPSVTLPPQPHTKEGVDAYNEVIARVRMWVNLNLWQKLKLSRDDAKPLLRLKGFPSFPLVERQANEVDWWDMVCNVKKLINEKKEDGKVFWQNLAGYKRQEALRPYLSSEEDRKKGKKFARYQLGDLLLHLEKKHGEDWGKVYDEAWERIDKKVEGLSKHIKLEEERRSEDAQSKAALTDWLRAKASFVIEGLKEADKDEFCRCELKLQKWYGDLRGKPFAIEAENSILDISGFSKQYNCAFIWQKDGVKKLNLYLIINYFKGGKLRFKKIKPEAFEANRFYTVINKKSGEIVPMEVNFNFDDPNLIILPLAFGKRQGREFIWNDLLSLETGSLKLANGRVIEKTLYNRRTRQDEPALFVALTFERREVLDSSNIKPMNLIGVDRGENIPAVIALTDPEGCPLSRFKDSLGNPTHILRIGESYKEKQRTIQAKKEVEQRRAGGYSRKYASKAKNLADDMVRNTARDLLYYAVTQDAMLIFENLSRGFGRQGKRTFMAERQYTRMEDWLTAKLAYEGLPSKTYLSKTLAQYTSKTCSNCGFTITSADYDRVLEKLKKTATGWMTTINGKELKVEGQITYYNRYKRQNVVKDLSVELDRLSEESVNNDISSWTKGRSGEALSLLKKRFSHRPVQEKFVCLNCGFETHADEQAALNIARSWLFLRSQEYKKYQTNKTTGNTDKRAFVETWQSFYRKKLKEVWKPAV

SEQ ID NO: 39907 - protein, 978 aa, synthetic construct
  REGION 1..978: note = engineered CasX variant
QEIKRINKIRRRLVKDSNTKKAGKTGPMKTLLVRVMTPDLRERLENLRKKPENIPQPISNTSRANLNKLLTDYTEMKKAILHVYWEEFQKDPVGLMSRVAQPASKKIDQNKLKPEMDEKGNLTTAGFACSQCGQPLFVYKLEQVSEKGKAYTNYFGRCNVAEHEKLILLYQLKPEKDSDEAVTYSLGKFGQRALDFYSIHVTKESTHPVKPLAQIAGNRYASGPVGKALRDACMGTIASFLSKYQDIIIEHQKVVKGNQKRLESLRELAGKENLEYPSVTLPPQPHTSEGVDAYNEVIARVRMWVNLNLWQKLKLSRDDAKPLLRLKGFPSFPLVERQANEVDWWDMVCNVKKLINEKKEDGKVFWQNLAGYKRQEALRPYLSSEEDRKKGKKFARYQLGDLLLHLEKKHGEDWGKVYDEAWERIDKKVEGLSKHIKLEEERRSEDAQSKAALTDWLRAKASFVIEGLKEADKDEFCRCELKLQKWYGDLRGKPFAIEAENSILDISGFSKQYNCAFIWQKDGVKKLNLYLIINYFKGGKLRFKKIKPEAFEANRFYTVINKKSGEIVPMEVNFNFDDPNLIILPLAFGKRQGREFIWNDLLSLETGSLKLANGRVIEKTLYNRRTRQDEPALFVALTFERREVLDSSNIKPMNLIGVDRGENIPAVIALTDPEGCPLSRFKDSLGNPTHILRIGESYKEKQRTIQAKKEVEQRRAGGYSRKYASKAKNLADDMVRNTARDLLYYAVTQDAMLIFENLSRGFGRQGKRTFMAERQYTRMEDWLTAKLAYEGLPSKTYLSKTLAQYTSKTCSNCGFTITSADYDRVLEKLKKTATGWMTTINGKELKVEGQITYYNRYKRQNVVKDLSVELDRLSEESVNNDISSWTKGRSGEALSLLKKRFSHRPVQEKFVCLNCGFETHADEQAALNIARSWLFLRSQEYKKYQTNKTTGNTDKRAFVETWQSFYRKKLKEVWKPAV

SEQ ID NO: 39908 - protein, 978 aa, synthetic construct
  REGION 1..978: note = engineered CasX variant
QEIKRINKIRRRLVKDSNTKKAGKTGPMKTLLVRVMTPDLRERLENLRKKPENIPQPISNTSRANLNKLLTDYTEMKKAILHVYWEEFQKDPVGLMSRVAQPASKKIDQNKLKPEMDEKGNLTTAGFACSQCGQPLFVYKLEQVSEKGKAYTNYFGRCNVAEHEKLILLYQLKPEKDSDEAVTYSLGKFGQRALDFYSIHVTKESTHPVKPLAQIAGNRYASGPVGKALRDACMGTIASFLSKYQDIIIEHQKVVKGNQKRLESLRELAGKENLEYPSVTLPPQPHTKEGLDAYNEVIARVRMWVNLNLWQKLKLSRDDAKPLLRLKGFPSFPLVERQANEVDWWDMVCNVKKLINEKKEDGKVFWQNLAGYKRQEALRPYLSSEEDRKKGKKFARYQLGDLLLHLEKKHGEDWGKVYDEAWERIDKKVEGLSKHIKLEEERRSEDAQSKAALTDWLRAKASFVIEGLKEADKDEFCRCELKLQKWYGDLRGKPFAIEAENSILDISGFSKQYNCAFIWQKDGVKKLNLYLIINYFKGGKLRFKKIKPEAFEANRFYTVINKKSGEIVPMEVNFNFDDPNLIILPLAFGKRQGREFIWNDLLSLETGSLKLANGRVIEKTLYNRRTRQDEPALFVALTFERREVLDSSNIKPMNLIGVDRGENIPAVIALTDPEGCPLSRFKDSLGNPTHILRIGESYKEKQRTIQAKKEVEQRRAGGYSRKYASKAKNLADDMVRNTARDLLYYAVTQDAMLIFENLSRGFGRQGKRTFMAERQYTRMEDWLTAKLAYEGLPSKTYLSKTLAQYTSKTCSNCGFTITSADYDRVLEKLKKTATGWMTTINGKELKVEGQITYYNRYKRQNVVKDLSVELDRLSEESVNNDISSWTKGRSGEALSLLKKRFSHRPVQEKFVCLNCGFETHADEQAALNIARSWLFLRSQEYKKYQTNKTTGNTDKRAFVETWQSFYRKKLKEVWKPAV

SEQ ID NO: 39909 - protein, 978 aa, synthetic construct
  REGION 1..978: note = engineered CasX variant
QEIKRINKIRRRLVKDSNTKKAGKTGPMKTLLVRVMTPDLRERLENLRKKPENIPQPISNTSRANLNKLLTDYTEMKKAILHVYWEEFQKDPVGLMSRVAQPASKKIDQNKLKPEMDEKGNLTTAGFACSQCGQPLFVYKLEQVSEKGKAYTNYFGRCNVAEHEKLILLYQLKPEKDSDEAVTYSLGKFGQRALDFYSIHVTKESTHPVKPLAQIAGNRYASGPVGKALRDACMGTIASFLSKYQDIIIEHQKVVKGNQKRLESLRELAGKENLEYPSVTLPPQPHTKEGVDAYNEVIARVRTWVNLNLWQKLKLSRDDAKPLLRLKGFPSFPLVERQANEVDWWDMVCNVKKLINEKKEDGKVFWQNLAGYKRQEALRPYLSSEEDRKKGKKFARYQLGDLLLHLEKKHGEDWGKVYDEAWERIDKKVEGLSKHIKLEEERRSEDAQSKAALTDWLRAKASFVIEGLKEADKDEFCRCELKLQKWYGDLRGKPFAIEAENSILDISGFSKQYNCAFIWQKDGVKKLNLYLIINYFKGGKLRFKKIKPEAFEANRFYTVINKKSGEIVPMEVNFNFDDPNLIILPLAFGKRQGREFIWNDLLSLETGSLKLANGRVIEKTLYNRRTRQDEPALFVALTFERREVLDSSNIKPMNLIGVDRGENIPAVIALTDPEGCPLSRFKDSLGNPTHILRIGESYKEKQRTIQAKKEVEQRRAGGYSRKYASKAKNLADDMVRNTARDLLYYAVTQDAMLIFENLSRGFGRQGKRTFMAERQYTRMEDWLTAKLAYEGLPSKTYLSKTLAQYTSKTCSNCGFTITSADYDRVLEKLKKTATGWMTTINGKELKVEGQITYYNRYKRQNVVKDLSVELDRLSEESVNNDISSWTKGRSGEALSLLKKRFSHRPVQEKFVCLNCGFETHADEQAALNIARSWLFLRSQEYKKYQTNKTTGNTDKRAFVETWQSFYRKKLKEVWKPAV

SEQ ID NO: 39910 - protein, 978 aa, synthetic construct
  REGION 1..978: note = engineered CasX variant
QEIKRINKIRRRLVKDSNTKKAGKTGPMKTLLVRVMTPDLRERLENLRKKPENIPQPISNTSRANLNKLLTDYTEMKKAILHVYWEEFQKDPVGLMSRVAQPASKKIDQNKLKPEMDEKGNLTTAGFACSQCGQPLFVYKLEQVSEKGKAYTNYFGRCNVAEHEKLILLYQLKPEKDSDEAVTYSLGKFGQRALDFYSIHVTKESTHPVKPLAQIAGNRYASGPVGKALRDACMGTIASFLSKYQDIIIEHQKVVKGNQKRLESLRELAGKENLEYPSVTLPPQPHTKEGVDAYNEVIARVRWWVNLNLWQKLKLSRDDAKPLLRLKGFPSFPLVERQANEVDWWDMVCNVKKLINEKKEDGKVFWQNLAGYKRQEALRPYLSSEEDRKKGKKFARYQLGDLLLHLEKKHGEDWGKVYDEAWERIDKKVEGLSKHIKLEEERRSEDAQSKAALTDWLRAKASFVIEGLKEADKDEFCRCELKLQKWYGDLRGKPFAIEAENSILDISGFSKQYNCAFIWQKDGVKKLNLYLIINYFKGGKLRFKKIKPEAFEANRFYTVINKKSGEIVPMEVNFNFDDPNLIILPLAFGKRQGREFIWNDLLSLETGSLKLANGRVIEKTLYNRRTRQDEPALFVALTFERREVLDSSNIKPMNLIGVDRGENIPAVIALTDPEGCPLSRFKDSLGNPTHILRIGESYKEKQRTIQAKKEVEQRRAGGYSRKYASKAKNLADDMVRNTARDLLYYAVTQDAMLIFENLSRGFGRQGKRTFMAERQYTRMEDWLTAKLAYEGLPSKTYLSKTLAQYTSKTCSNCGFTITSADYDRVLEKLKKTATGWMTTINGKELKVEGQITYYNRYKRQNVVKDLSVELDRLSEESVNNDISSWTKGRSGEALSLLKKRFSHRPVQEKFVCLNCGFETHADEQAALNIARSWLFLRSQEYKKYQTNKTTGNTDKRAFVETWQSFYRKKLKEVWKPAV

SEQ ID NO: 39911 - protein, 979 aa, synthetic construct
  REGION 1..979: note = engineered CasX variant
QEIKRINKIRRRLVKDSNTKKAGKTGPMKTLLVRVMTPDLRERLENLRKKPENIPQPISNTSRANLNKLLTDYTEMKKAILHVYWEEFQKDPVGLMSRVAQPASKKIDQNKLKPEMDEKGNLTTAGFACSQCGQPLFVYKLEQVSEKGKAYTNYFGRCNVAEHEKLILLYQLKPEKDSDEAVTYSLGKFGQRALDFYSIHVTKESTHPVKPLAQIAGNRYASGPVGKALRDACMGTIASFLSKYQDIIIEHQKVVKGNQKRLESLRELAGKENLEYPSVTLPPQPHTKEGVDAYNEVIARVRMWVNLNLWQKLKLSRDDAKPLLRLKGFPSFPLVERQQANEVDWWDMVCNVKKLINEKKEDGKVFWQNLAGYKRQEALRPYLSSEEDRKKGKKFARYQLGDLLLHLEKKHGEDWGKVYDEAWERIDKKVEGLSKHIKLEEERRSEDAQSKAALTDWLRAKASFVIEGLKEADKDEFCRCELKLQKWYGDLRGKPFAIEAENSILDISGFSKQYNCAFIWQKDGVKKLNLYLIINYFKGGKLRFKKIKPEAFEANRFYTVINKKSGEIVPMEVNFNFDDPNLIILPLAFGKRQGREFIWNDLLSLETGSLKLANGRVIEKTLYNRRTRQDEPALFVALTFERREVLDSSNIKPMNLIGVDRGENIPAVIALTDPEGCPLSRFKDSLGNPTHILRIGESYKEKQRTIQAKKEVEQRRAGGYSRKYASKAKNLADDMVRNTARDLLYYAVTQDAMLIFENLSRGFGRQGKRTFMAERQYTRMEDWLTAKLAYEGLPSKTYLSKTLAQYTSKTCSNCGFTITSADYDRVLEKLKKTATGWMTTINGKELKVEGQITYYNRYKRQNVVKDLSVELDRLSEESVNNDISSWTKGRSGEALSLLKKRFSHRPVQEKFVCLNCGFETHADEQAALNIARSWLFLRSQEYKKYQTNKTTGNTDKRAFVETWQSFYRKKLKEVWKPAV

SEQ ID NO: 39912 - protein, 979 aa, synthetic construct
  REGION 1..979: note = engineered CasX variant
QEIKRINKIRRRLVKDSNTKKAGKTGPMKTLLVRVMTPDLRERLENLRKKPENIPQPISNTSRANLNKLLTDYTEMKKAILHVYWEEFQKDPVGLMSRVAQPASKKIDQNKLKPEMDEKGNLTTAGFACSQCGQPLFVYKLEQVSEKGKAYTNYFGRCNVAEHEKLILLYQLKPEKDSDEAVTYSLGKFGQRALDFYSIHVTKESTHPVKPLAQIAGNRYASGPVGKALRDACMGTIASFLSKYQDIIIEHQKVVKGNQKRLESLRELAGKENLEYPSVTLPPQPHTKEGVDAYNEVIARVRMWVNLNLWQKLKLSRDDAKPLLRLKGFPSFPLVERQANAEVDWWDMVCNVKKLINEKKEDGKVFWQNLAGYKRQEALRPYLSSEEDRKKGKKFARYQLGDLLLHLEKKHGEDWGKVYDEAWERIDKKVEGLSKHIKLEEERRSEDAQSKAALTDWLRAKASFVIEGLKEADKDEFCRCELKLQKWYGDLRGKPFAIEAENSILDISGFSKQYNCAFIWQKDGVKKLNLYLIINYFKGGKLRFKKIKPEAFEANRFYTVINKKSGEIVPMEVNFNFDDPNLIILPLAFGKRQGREFIWNDLLSLETGSLKLANGRVIEKTLYNRRTRQDEPALFVALTFERREVLDSSNIKPMNLIGVDRGENIPAVIALTDPEGCPLSRFKDSLGNPTHILRIGESYKEKQRTIQAKKEVEQRRAGGYSRKYASKAKNLADDMVRNTARDLLYYAVTQDAMLIFENLSRGFGRQGKRTFMAERQYTRMEDWLTAKLAYEGLPSKTYLSKTLAQYTSKTCSNCGFTITSADYDRVLEKLKKTATGWMTTINGKELKVEGQITYYNRYKRQNVVKDLSVELDRLSEESVNNDISSWTKGRSGEALSLLKKRFSHRPVQEKFVCLNCGFETHADEQAALNIARSWLFLRSQEYKKYQTNKTTGNTDKRAFVETWQSFYRKKLKEVWKPAV

SEQ ID NO: 39913 - protein, 978 aa, synthetic construct
  REGION 1..978: note = engineered CasX variant
QEIKRINKIRRRLVKDSNTKKAGKTGPMKTLLVRVMTPDLRERLENLRKKPENIPQPISNTSRANLNKLLTDYTEMKKAILHVYWEEFQKDPVGLMSRVAQPASKKIDQNKLKPEMDEKGNLTTAGFACSQCGQPLFVYKLEQVSEKGKAYTNYFGRCNVAEHEKLILLYQLKPEKDSDEAVTYSLGKFGQRALDFYSIHVTKESTHPVKPLAQIAGNRYASGPVGKALRDACMGTIASFLSKYQDIIIEHQKVVKGNQKRLESLRELAGKENLEYPSVTLPPQPHTKEGVDAYNEVIARVRMWVNLNLWQKLKLSRDDAKPLLRLKGFPSFPLVERQANEVDWWDMVCNVKKLINEKKEDGKVFWQNLAGYKRQEALRPYLSSEEDRKKGKKFARTQLGDLLLHLEKKHGEDWGKVYDEAWERIDKKVEGLSKHIKLEEERRSEDAQSKAALTDWLRAKASFVIEGLKEADKDEFCRCELKLQKWYGDLRGKPFAIEAENSILDISGFSKQYNCAFIWQKDGVKKLNLYLIINYFKGGKLRFKKIKPEAFEANRFYTVINKKSGEIVPMEVNFNFDDPNLIILPLAFGKRQGREFIWNDLLSLETGSLKLANGRVIEKTLYNRRTRQDEPALFVALTFERREVLDSSNIKPMNLIGVDRGENIPAVIALTDPEGCPLSRFKDSLGNPTHILRIGESYKEKQRTIQAKKEVEQRRAGGYSRKYASKAKNLADDMVRNTARDLLYYAVTQDAMLIFENLSRGFGRQGKRTFMAERQYTRMEDWLTAKLAYEGLPSKTYLSKTLAQYTSKTCSNCGFTITSADYDRVLEKLKKTATGWMTTINGKELKVEGQITYYNRYKRQNVVKDLSVELDRLSEESVNNDISSWTKGRSGEALSLLKKRFSHRPVQEKFVCLNCGFETHADEQAALNIARSWLFLRSQEYKKYQTNKTTGNTDKRAFVETWQSFYRKKLKEVWKPAV

SEQ ID NO: 39914 - protein, 979 aa, synthetic construct
  REGION 1..979: note = engineered CasX variant
QEIKRINKIRRRLVKDSNTKKAGKTGPMKTLLVRVMTPDLRERLENLRKKPENIPQPISNTSRANLNKLLTDYTEMKKAILHVYWEEFQKDPVGLMSRVAQPASKKIDQNKLKPEMDEKGNLTTAGFACSQCGQPLFVYKLEQVSEKGKAYTNYFGRCNVAEHEKLILLYQLKPEKDSDEAVTYSLGKFGQRALDFYSIHVTKESTHPVKPLAQIAGNRYASGPVGKALRDACMGTIASFLSKYQDIIIEHQKVVKGNQKRLESLRELAGKENLEYPSVTLPPQPHTKEGVDAYNEVIARVRMWVNLNLWQKLKLSRDDAKPLLRLKGFPSFPLVERQANEVDWWDMVCNVKKLINEKKEDGKVFWQNLAGYKRQEALRPYLSSEEDRKKGKKFARYQLGDLLLHLEKKHEGEDWGKVYDEAWERIDKKVEGLSKHIKLEEERRSEDAQSKAALTDWLRAKASFVIEGLKEADKDEFCRCELKLQKWYGDLRGKPFAIEAENSILDISGFSKQYNCAFIWQKDGVKKLNLYLIINYFKGGKLRFKKIKPEAFEANRFYTVINKKSGEIVPMEVNFNFDDPNLIILPLAFGKRQGREFIWNDLLSLETGSLKLANGRVIEKTLYNRRTRQDEPALFVALTFERREVLDSSNIKPMNLIGVDRGENIPAVIALTDPEGCPLSRFKDSLGNPTHILRIGESYKEKQRTIQAKKEVEQRRAGGYSRKYASKAKNLADDMVRNTARDLLYYAVTQDAMLIFENLSRGFGRQGKRTFMAERQYTRMEDWLTAKLAYEGLPSKTYLSKTLAQYTSKTCSNCGFTITSADYDRVLEKLKKTATGWMTTINGKELKVEGQITYYNRYKRQNVVKDLSVELDRLSEESVNNDISSWTKGRSGEALSLLKKRFSHRPVQEKFVCLNCGFETHADEQAALNIARSWLFLRSQEYKKYQTNKTTGNTDKRAFVETWQSFYRKKLKEVWKPAV

SEQ ID NO: 39915 - protein, 978 aa, synthetic construct
  REGION 1..978: note = engineered CasX variant
QEIKRINKIRRRLVKDSNTKKAGKTGPMKTLLVRVMTPDLRERLENLRKKPENIPQPISNTSRANLNKLLTDYTEMKKAILHVYWEEFQKDPVGLMSRVAQPASKKIDQNKLKPEMDEKGNLTTAGFACSQCGQPLFVYKLEQVSEKGKAYTNYFGRCNVAEHEKLILLYQLKPEKDSDEAVTYSLGKFGQRALDFYSIHVTKESTHPVKPLAQIAGNRYASGPVGKALRDACMGTIASFLSKYQDIIIEHQKVVKGNQKRLESLRELAGKENLEYPSVTLPPQPHTKEGVDAYNEVIARVRMWVNLNLWQKLKLSRDDAKPLLRLKGFPSFPLVERQANEVDWWDMVCNVKKLINEKKEDGKVFWQNLAGYKRQEALRPYLSSEEDRKKGKKFARYQLGDLLLHLEKKHGEDWGKVYDEAWERIDKKVEGLSKHIKLEEERRSEDAQSKAALTDWLRAKASFVIEGLKEADKDEFCRCDLKLQKWYGDLRGKPFAIEAENSILDISGFSKQYNCAFIWQKDGVKKLNLYLIINYFKGGKLRFKKIKPEAFEANRFYTVINKKSGEIVPMEVNFNFDDPNLIILPLAFGKRQGREFIWNDLLSLETGSLKLANGRVIEKTLYNRRTRQDEPALFVALTFERREVLDSSNIKPMNLIGVDRGENIPAVIALTDPEGCPLSRFKDSLGNPTHILRIGESYKEKQRTIQAKKEVEQRRAGGYSRKYASKAKNLADDMVRNTARDLLYYAVTQDAMLIFENLSRGFGRQGKRTFMAERQYTRMEDWLTAKLAYEGLPSKTYLSKTLAQYTSKTCSNCGFTITSADYDRVLEKLKKTATGWMTTINGKELKVEGQITYYNRYKRQNVVKDLSVELDRLSEESVNNDISSWTKGRSGEALSLLKKRFSHRPVQEKFVCLNCGFETHADEQAALNIARSWLFLRSQEYKKYQTNKTTGNTDKRAFVETWQSFYRKKLKEVWKPAV

SEQ ID NO: 39916 - protein, 978 aa, synthetic construct
  REGION 1..978: note = engineered CasX variant
QEIKRINKIRRRLVKDSNTKKAGKTGPMKTLLVRVMTPDLRERLENLRKKPENIPQPISNTSRANLNKLLTDYTEMKKAILHVYWEEFQKDPVGLMSRVAQPASKKIDQNKLKPEMDEKGNLTTAGFACSQCGQPLFVYKLEQVSEKGKAYTNYFGRCNVAEHEKLILLYQLKPEKDSDEAVTYSLGKFGQRALDFYSIHVTKESTHPVKPLAQIAGNRYASGPVGKALRDACMGTIASFLSKYQDIIIEHQKVVKGNQKRLESLRELAGKENLEYPSVTLPPQPHTKEGVDAYNEVIARVRMWVNLNLWQKLKLSRDDAKPLLRLKGFPSFPLVERQANEVDWWDMVCNVKKLINEKKEDGKVFWQNLAGYKRQEALRPYLSSEEDRKKGKKFARYQLGDLLLHLEKKHGEDWGKVYDEAWERIDKKVEGLSKHIKLEEERRSEDAQSKAALTDWLRAKASFVIEGLKEADKDEFCRCELKLQKWYGDLRGKPFAIEAENSILDISGFSKQYNCAFIWQKDGVKKLNLYLIINYFKGGKLRFKKIKPEAFEANRFYTVINKKSGEIVPMEVNFNFDDPNLIILPLAFGKRFGREFIWNDLLSLETGSLKLANGRVIEKTLYNRRTRQDEPALFVALTFERREVLDSSNIKPMNLIGVDRGENIPAVIALTDPEGCPLSRFKDSLGNPTHILRIGESYKEKQRTIQAKKEVEQRRAGGYSRKYASKAKNLADDMVRNTARDLLYYAVTQDAMLIFENLSRGFGRQGKRTFMAERQYTRMEDWLTAKLAYEGLPSKTYLSKTLAQYTSKTCSNCGFTITSADYDRVLEKLKKTATGWMTTINGKELKVEGQITYYNRYKRQNVVKDLSVELDRLSEESVNNDISSWTKGRSGEALSLLKKRFSHRPVQEKFVCLNCGFETHADEQAALNIARSWLFLRSQEYKKYQTNKTTGNTDKRAFVETWQSFYRKKLKEVWKPAV

SEQ ID NO: 39917 - protein, 978 aa, synthetic construct
  REGION 1..978: note = engineered CasX variant
QEIKRINKIRRRLVKDSNTKKAGKTGPMKTLLVRVMTPDLRERLENLRKKPENIPQPISNTSRANLNKLLTDYTEMKKAILHVYWEEFQKDPVGLMSRVAQPASKKIDQNKLKPEMDEKGNLTTAGFACSQCGQPLFVYKLEQVSEKGKAYTNYFGRCNVAEHEKLILLYQLKPEKDSDEAVTYSLGKFGQRALDFYSIHVTKESTHPVKPLAQIAGNRYASGPVGKALRDACMGTIASFLSKYQDIIIEHQKVVKGNQKRLESLRELAGKENLEYPSVTLPPQPHTKEGVDAYNEVIARVRMWVNLNLWQKLKLSRDDAKPLLRLKGFPSFPLVERQANEVDWWDMVCNVKKLINEKKEDGKVFWQNLAGYKRQEALRPYLSSEEDRKKGKKFARYQLGDLLLHLEKKHGEDWGKVYDEAWERIDKKVEGLSKHIKLEEERRSEDAQSKAALTDWLRAKASFVIEGLKEADKDEFCRCELKLQKWYGDLRGKPFAIEAENSILDISGFSKQYNCAFIWQKDGVKKLNLYLIINYFKGGKLRFKKIKPEAFEANRFYTVINKKSGEIVPMEVNFNFDDPNLIILPLAFGKRVGREFIWNDLLSLETGSLKLANGRVIEKTLYNRRTRQDEPALFVALTFERREVLDSSNIKPMNLIGVDRGENIPAVIALTDPEGCPLSRFKDSLGNPTHILRIGESYKEKQRTIQAKKEVEQRRAGGYSRKYASKAKNLADDMVRNTARDLLYYAVTQDAMLIFENLSRGFGRQGKRTFMAERQYTRMEDWLTAKLAYEGLPSKTYLSKTLAQYTSKTCSNCGFTITSADYDRVLEKLKKTATGWMTTINGKELKVEGQITYYNRYKRQNVVKDLSVELDRLSEESVNNDISSWTKGRSGEALSLLKKRFSHRPVQEKFVCLNCGFETHADEQAALNIARSWLFLRSQEYKKYQTNKTTGNTDKRAFVETWQSFYRKKLKEVWKPAV

SEQ ID NO: 39918 - protein, 979 aa, synthetic construct
  REGION 1..979: note = engineered CasX variant
QEIKRINKIRRRLVKDSNTKKAGKTGPMKTLLVRVMTPDLRERLENLRKKPENIPQPISNTSRANLNKLLTDYTEMKKAILHVYWEEFQKDPVGLMSRVAQPASKKIDQNKLKPEMDEKGNLTTAGFACSQCGQPLFVYKLEQVSEKGKAYTNYFGRCNVAEHEKLILLYQLKPEKDSDEAVTYSLGKFGQRALDFYSIHVTKESTHPVKPLAQIAGNRYASGPVGKALRDACMGTIASFLSKYQDIIIEHQKVVKGNQKRLESLRELAGKENLEYPSVTLPPQPHTKEGVDAYNEVIARVRMWVNLNLWQKLKLSRDDAKPLLRLKGFPSFPLVERQANEVDWWDMVCNVKKLINEKKEDGKVFWQNLAGYKRQEALRPYLSSEEDRKKGKKFARYQLGDLLLHLEKKHGEDWGKVYDEAWERIDKKVEGLSKHIKLEEERRSEDAQSKAALTDWLRAKASFVIEGLKEADKDEFCRCELKLQKWYGDLRGKPFAIEAENSILDISGFSKQYNCAFIWQKDGVKKLNLYLIINYFKGGKLRFKKIKPEAFEANRFYTVINKKSGEIVPMEVNFNFDDPNLIILPLAFGKRQGREFIWNDLLSLETGSLKLANGRVIEKTLYNRRTRQDEPALFVALTFERREVLDSSNIKTPMNLIGVDRGENIPAVIALTDPEGCPLSRFKDSLGNPTHILRIGESYKEKQRTIQAKKEVEQRRAGGYSRKYASKAKNLADDMVRNTARDLLYYAVTQDAMLIFENLSRGFGRQGKRTFMAERQYTRMEDWLTAKLAYEGLPSKTYLSKTLAQYTSKTCSNCGFTITSADYDRVLEKLKKTATGWMTTINGKELKVEGQITYYNRYKRQNVVKDLSVELDRLSEESVNNDISSWTKGRSGEALSLLKKRFSHRPVQEKFVCLNCGFETHADEQAALNIARSWLFLRSQEYKKYQTNKTTGNTDKRAFVETWQSFYRKKLKEVWKPAV

SEQ ID NO: 39919 - protein, 979 aa, synthetic construct
  REGION 1..979: note = engineered CasX variant
QEIKRINKIRRRLVKDSNTKKAGKTGPMKTLLVRVMTPDLRERLENLRKKPENIPQPISNTSRANLNKLLTDYTEMKKAILHVYWEEFQKDPVGLMSRVAQPASKKIDQNKLKPEMDEKGNLTTAGFACSQCGQPLFVYKLEQVSEKGKAYTNYFGRCNVAEHEKLILLYQLKPEKDSDEAVTYSLGKFGQRALDFYSIHVTKESTHPVKPLAQIAGNRYASGPVGKALRDACMGTIASFLSKYQDIIIEHQKVVKGNQKRLESLRELAGKENLEYPSVTLPPQPHTKEGVDAYNEVIARVRMWVNLNLWQKLKLSRDDAKPLLRLKGFPSFPLVERQANEVDWWDMVCNVKKLINEKKEDGKVFWQNLAGYKRQEALRPYLSSEEDRKKGKKFARYQLGDLLLHLEKKHGEDWGKVYDEAWERIDKKVEGLSKHIKLEEERRSEDAQSKAALTDWLRAKASFVIEGLKEADKDEFCRCELKLQKWYGDLRGKPFAIEAENSILDISGFSKQYNCAFIWQKDGVKKLNLYLIINYFKGGKLRFKKIKPEAFEANRFYTVINKKSGEIVPMEVNFNFDDPNLIILPLAFGKRQGREFIWNDLLSLETGSLKLANGRVIEKTLYNRRTRQDEPALFVALTFERREVLDSSNIKPMSNLIGVDRGENIPAVIALTDPEGCPLSRFKDSLGNPTHILRIGESYKEKQRTIQAKKEVEQRRAGGYSRKYASKAKNLADDMVRNTARDLLYYAVTQDAMLIFENLSRGFGRQGKRTFMAERQYTRMEDWLTAKLAYEGLPSKTYLSKTLAQYTSKTCSNCGFTITSADYDRVLEKLKKTATGWMTTINGKELKVEGQITYYNRYKRQNVVKDLSVELDRLSEESVNNDISSWTKGRSGEALSLLKKRFSHRPVQEKFVCLNCGFETHADEQAALNIARSWLFLRSQEYKKYQTNKTTGNTDKRAFVETWQSFYRKKLKEVWKPAV

SEQ ID NO: 39920 - protein, 978 aa, synthetic construct
  REGION 1..978: note = engineered CasX variant
QEIKRINKIRRRLVKDSNTKKAGKTGPMKTLLVRVMTPDLRERLENLRKKPENIPQPISNTSRANLNKLLTDYTEMKKAILHVYWEEFQKDPVGLMSRVAQPASKKIDQNKLKPEMDEKGNLTTAGFACSQCGQPLFVYKLEQVSEKGKAYTNYFGRCNVAEHEKLILLYQLKPEKDSDEAVTYSLGKFGQRALDFYSIHVTKESTHPVKPLAQIAGNRYASGPVGKALRDACMGTIASFLSKYQDIIIEHQKVVKGNQKRLESLRELAGKENLEYPSVTLPPQPHTKEGVDAYNEVIARVRMWVNLNLWQKLKLSRDDAKPLLRLKGFPSFPLVERQANEVDWWDMVCNVKKLINEKKEDGKVFWQNLAGYKRQEALRPYLSSEEDRKKGKKFARYQLGDLLLHLEKKHGEDWGKVYDEAWERIDKKVEGLSKHIKLEEERRSEDAQSKAALTDWLRAKASFVIEGLKEADKDEFCRCELKLQKWYGDLRGKPFAIEAENSILDISGFSKQYNCAFIWQKDGVKKLNLYLIINYFKGGKLRFKKIKPEAFEANRFYTVINKKSGEIVPMEVNFNFDDPNLIILPLAFGKRQGREFIWNDLLSLETGSLKLANGRVIEKTLYNRRTRQDEPALFVALTFERREVLDSSNIKPMNLIGVDRGENIPAVIALTDPEGCPLSRFKDSLGNPTHILRIRESYKEKQRTIQAKKEVEQRRAGGYSRKYASKAKNLADDMVRNTARDLLYYAVTQDAMLIFENLSRGFGRQGKRTFMAERQYTRMEDWLTAKLAYEGLPSKTYLSKTLAQYTSKTCSNCGFTITSADYDRVLEKLKKTATGWMTTINGKELKVEGQITYYNRYKRQNVVKDLSVELDRLSEESVNNDISSWTKGRSGEALSLLKKRFSHRPVQEKFVCLNCGFETHADEQAALNIARSWLFLRSQEYKKYQTNKTTGNTDKRAFVETWQSFYRKKLKEVWKPAV

SEQ ID NO: 39921 - protein, 978 aa, synthetic construct
  REGION 1..978: note = engineered CasX variant
QEIKRINKIRRRLVKDSNTKKAGKTGPMKTLLVRVMTPDLRERLENLRKKPENIPQPISNTSRANLNKLLTDYTEMKKAILHVYWEEFQKDPVGLMSRVAQPASKKIDQNKLKPEMDEKGNLTTAGFACSQCGQPLFVYKLEQVSEKGKAYTNYFGRCNVAEHEKLILLYQLKPEKDSDEAVTYSLGKFGQRALDFYSIHVTKESTHPVKPLAQIAGNRYASGPVGKALRDACMGTIASFLSKYQDIIIEHQKVVKGNQKRLESLRELAGKENLEYPSVTLPPQPHTKEGVDAYNEVIARVRMWVNLNLWQKLKLSRDDAKPLLRLKGFPSFPLVERQANEVDWWDMVCNVKKLINEKKEDGKVFWQNLAGYKRQEALRPYLSSEEDRKKGKKFARYQLGDLLLHLEKKHGEDWGKVYDEAWERIDKKVEGLSKHIKLEEERRSEDAQSKAALTDWLRAKASFVIEGLKEADKDEFCRCELKLQKWYGDLRGKPFAIEAENSILDISGFSKQYNCAFIWQKDGVKKLNLYLIINYFKGGKLRFKKIKPEAFEANRFYTVINKKSGEIVPMEVNFNFDDPNLIILPLAFGKRQGREFIWNDLLSLETGSLKLANGRVIEKTLYNRRTRQDEPALFVALTFERREVLDSSNIKPMNLIGVDRGENIPAVIALTDPEGCPLSRFKDSLGNPTHILRIGESYKEKQRTIQAKKEVEQRRAGGYSRKYASKAKNLADDMVRNTARDLLYYAVTQDAMLIFENLSRGFGRQGKRTFSAERQYTRMEDWLTAKLAYEGLPSKTYLSKTLAQYTSKTCSNCGFTITSADYDRVLEKLKKTATGWMTTINGKELKVEGQITYYNRYKRQNVVKDLSVELDRLSEESVNNDISSWTKGRSGEALSLLKKRFSHRPVQEKFVCLNCGFETHADEQAALNIARSWLFLRSQEYKKYQTNKTTGNTDKRAFVETWQSFYRKKLKEVWKPAV

SEQ ID NO: 39922 - protein, 978 aa, synthetic construct
  REGION 1..978: note = engineered CasX variant
QEIKRINKIRRRLVKDSNTKKAGKTGPMKTLLVRVMTPDLRERLENLRKKPENIPQPISNTSRANLNKLLTDYTEMKKAILHVYWEEFQKDPVGLMSRVAQPASKKIDQNKLKPEMDEKGNLTTAGFACSQCGQPLFVYKLEQVSEKGKAYTNYFGRCNVAEHEKLILLYQLKPEKDSDEAVTYSLGKFGQRALDFYSIHVTKESTHPVKPLAQIAGNRYASGPVGKALRDACMGTIASFLSKYQDIIIEHQKVVKGNQKRLESLRELAGKENLEYPSVTLPPQPHTKEGVDAYNEVIARVRMWVNLNLWQKLKLSRDDAKPLLRLKGFPSFPLVERQANEVDWWDMVCNVKKLINEKKEDGKVFWQNLAGYKRQEALRPYLSSEEDRKKGKKFARYQLGDLLLHLEKKHGEDWGKVYDEAWERIDKKVEGLSKHIKLEEERRSEDAQSKAALTDWLRAKASFVIEGLKEADKDEFCRCELKLQKWYGDLRGKPFAIEAENSILDISGFSKQYNCAFIWQKDGVKKLNLYLIINYFKGGKLRFKKIKPEAFEANRFYTVINKKSGEIVPMEVNFNFDDPNLIILPLAFGKRQGREFIWNDLLSLETGSLKLANGRVIEKTLYNRRTRQDEPALFVALTFERREVLDSSNIKPMNLIGVDRGENIPAVIALTDPEGCPLSRFKDSLGNPTHILRIGESYKEKQRTIQAKKEVEQRRAGGYSRKYASKAKNLADDMVRNTARDLLYYAVTQDAMLIFENLSRGFGRQGKRTFMAERQYTRMEDWLTAKLAYEGLPSKTYLSKTLAQYTSKTCSNCGFTITSADYDRVLEKLKKTATGWMTTINGKELKVEGQITYYNRYKRQNVVKDLSVELDRLSEESVNNDISSWDKGRSGEALSLLKKRFSHRPVQEKFVCLNCGFETHADEQAALNIARSWLFLRSQEYKKYQTNKTTGNTDKRAFVETWQSFYRKKLKEVWKPAV

SEQ ID NO: 39923 - protein, 978 aa, synthetic construct
  REGION 1..978: note = engineered CasX variant
QEIKRINKIRRRLVKDSNTKKAGKTGPMKTLLVRVMTPDLRERLENLRKKPENIPQPISNTSRANLNKLLTDYTEMKKAILHVYWEEFQVDPVGLMSRVAQPASKKIDQNKLKPEMDEKGNLTTAGFACSQCGQPLFVYKLEQVSEKGKAYTNYFGRCNVAEHEKLILLYQLKPEKDSDEAVTYSLGKFGQRALDFYSIHVTKESTHPVKPLAQIAGNRYASGPVGKALRDACMGTIASFLSKYQDIIIEHQKVVKGNQKRLESLRELAGKENLEYPSVTLPPQPHTKEGVDAYNEVIARVRMWVNLNLWQKLKLSRDDAKPLLRLKGFPSFPLVERQANEVDWWDMVCNVKKLINEKKEDGKVFWQNLAGYKRQEALRPYLSSEEDRKKGKKFARYQLGDLLLHLEKKHGEDWGKVYDEAWERIDKKVEGLSKHIKLEEERRSEDAQSKAALTDWLRAKASFVIEGLKEADKDEFCRCELKLQKWYGDLRGKPFAIEAENSILDISGFSKQYNCAFIWQKDGVKKLNLYLIINYFKGGKLRFKKIKPEAFEANRFYTVINKKSGEIVPMEVNFNFDDPNLIILPLAFGKRQGREFIWNDLLSLETGSLKLANGRVIEKTLYNRRTRQDEPALFVALTFERREVLDSSNIKPMNLIGVDRGENIPAVIALTDPEGCPLSRFKDSLGNPTHILRIGESYKEKQRTIQAKKEVEQRRAGGYSRKYASKAKNLADDMVRNTARDLLYYAVTQDAMLIFENLSRGFGRQGKRTFMAERQYTRMEDWLTAKLAYEGLPSKTYLSKTLAQYTSKTCSNCGFTITSADYDRVLEKLKKTATGWMTTINGKELKVEGQITYYNRYKRQNVVKDLSVELDRLSEESVNNDISSWTKGRSGEALSLLKKRFSHRPVQEKFVCLNCGFETHADEQAALNIARSWLFLRSQEYKKYQTNKTTGNTDKRAFVETWQSFYRKKLKEVWKPAV

SEQ ID NO: 39924 - protein, 978 aa, synthetic construct
  REGION 1..978: note = engineered CasX variant
QEIKRLNKIRRRLVKDSNTKKAGKTGPMKTLLVRVMTPDLRERLENLRKKPENIPQPISNTSRANLNKLLTDYTEMKKAILHVYWEEFQKDPVGLMSRVAQPASKKIDQNKLKPEMDEKGNLTTAGFACSQCGQPLFVYKLEQVSEKGKAYTNYFGRCNVAEHEKLILLYQLKPEKDSDEAVTYSLGKFGQRALDFYSIHVTKESTHPVKPLAQIAGNRYASGPVGKALRDACMGTIASFLSKYQDIIIEHQKVVKGNQKRLESLRELAGKENLEYPSVTLPPQPHTKEGVDAYNEVIARVRMWVNLNLWQKLKLSRDDAKPLLRLKGFPSFPLVERQANEVDWWDMVCNVKKLINEKKEDGKVFWQNLAGYKRQEALRPYLSSEEDRKKGKKFARYQLGDLLLHLEKKHGEDWGKVYDEAWERIDKKVEGLSKHIKLEEERRSEDAQSKAALTDWLRAKASFVIEGLKEADKDEFCRCELKLQKWYGDLRGKPFAIEAENSILDISGFSKQYNCAFIWQKDGVKKLNLYLIINYFKGGKLRFKKIKPEAFEANRFYTVINKKSGEIVPMEVNFNFDDPNLIILPLAFGKRQGREFIWNDLLSLETGSLKLANGRVIEKTLYNRRTRQDEPALFVALTFERREVLDSSNIKPMNLIGVDRGENIPAVIALTDPEGCPLSRFKDSLGNPTHILRIGESYKEKQRTIQAKKEVEQRRAGGYSRKYASKAKNLADDMVRNTARDLLYYAVTQDAMLIFENLSRGFGRQGKRTFMAERQYTRMEDWLTAKLAYEGLPSKTYLSKTLAQYTSKTCSNCGFTITSADYDRVLEKLKKTATGWMTTINGKELKVEGQITYYNRYKRQNVVKDLSVELDRLSEESVNNDISSWTKGRSGEALSLLKKRFSHRPVQEKFVCLNCGFETHADEQAALNIARSWLFLRSQEYKKYQTNKTTGNTDKRAFVETWQSFYRKKLKEVWKPAV

SEQ ID NO: 39925 - protein, 978 aa, synthetic construct
  REGION 1..978: note = engineered CasX variant
QEIKRINKIRRRLVKDSNTKKAGKTGPMKTLLVRVMTPDLRERLENLRKKPENIPQPISNTSRANLNKLLTDYTEMKKAILHVYWEEFQKDPVGLMSRVAQPASKKIDQNKLKPEMDEKGNLTTAGFACSQCGQPLFVYKLEQVSEKGKAYTNYVGRCNVAEHEKLILLYQLKPEKDSDEAVTYSLGKFGQRALDFYSIHVTKESTHPVKPLAQIAGNRYASGPVGKALRDACMGTIASFLSKYQDIIIEHQKVVKGNQKRLESLRELAGKENLEYPSVTLPPQPHTKEGVDAYNEVIARVRMWVNLNLWQKLKLSRDDAKPLLRLKGFPSFPLVERQANEVDWWDMVCNVKKLINEKKEDGKVFWQNLAGYKRQEALRPYLSSEEDRKKGKKFARYQLGDLLLHLEKKHGEDWGKVYDEAWERIDKKVEGLSKHIKLEEERRSEDAQSKAALTDWLRAKASFVIEGLKEADKDEFCRCELKLQKWYGDLRGKPFAIEAENSILDISGFSKQYNCAFIWQKDGVKKLNLYLIINYFKGGKLRFKKIKPEAFEANRFYTVINKKSGEIVPMEVNFNFDDPNLIILPLAFGKRQGREFIWNDLLSLETGSLKLANGRVIEKTLYNRRTRQDEPALFVALTFERREVLDSSNIKPMNLIGVDRGENIPAVIALTDPEGCPLSRFKDSLGNPTHILRIGESYKEKQRTIQAKKEVEQRRAGGYSRKYASKAKNLADDMVRNTARDLLYYAVTQDAMLIFENLSRGFGRQGKRTFMAERQYTRMEDWLTAKLAYEGLPSKTYLSKTLAQYTSKTCSNCGFTITSADYDRVLEKLKKTATGWMTTINGKELKVEGQITYYNRYKRQNVVKDLSVELDRLSEESVNNDISSWTKGRSGEALSLLKKRFSHRPVQEKFVCLNCGFETHADEQAALNIARSWLFLRSQEYKKYQTNKTTGNTDKRAFVETWQSFYRKKLKEVWKPAV

SEQ ID NO: 39926 - protein, 978 aa, synthetic construct
  REGION 1..978: note = engineered CasX variant
QEIKRINKIRRRLVKDSNTKKAGKTGPMKTLLVRVMTPDLRERLENLRKKPENIPQPISNTSRANLNKLLTDYTEMKKAILHVYWEEFQKDPVGLMSRVAQPASKKIDQNKLKPEMDEKGNLTTAGFACSQCGQPLFVYKLEQVSEKGKAYTNYFGRCNVAEHEKLILLYQLKPEKDSDEAVTYSLGKFGQRALDFYSIHVTKESTHPVKPLAQIAGNRYASGPVGKALRDACMGTIASFLSKYQDIIIEHQKVVKGNQKRLESLRELAGKENLEYPSVTLPPQPHTKEGVDAYNEVIARVRMWVNLNLWQKLKLSRDDAKPLLRLKGFPSFPLVERQANEVDWWDMVCNVKKLINEKKEDGKVFWQNLAGYKRQEALRPYLSSEEDRKKGKKFARYQLGDLLLHLEKKHGEDWGKVYDEAWERIDKKVEGLSKHIKLEEERRSEDAQSKAALTDWLRAKASFVIEGLKEADKDEFCRCELKLQKWYGDLRGKPFAIEAENSILDISGFSKQYNCAFIWQKDGVKKLNLYLIINYFKGGKLRFKKIKPEAFEANRFYTVINKKSGEIVPMEVNFNFDDPNLIILPLAFGKRQGREFIWNDLLSLETGSLKLANGRVIEKTLYNRRTRQDEPALFVALTFERREVLDSSNIKPMNLIGVDRGENIPAVIALTDPEGCPLSRFKDSLGNPTHILRIGESYKEKQRTIQAKKEVEQRRAGGYSRKYASKAKNLADDMVRNTARDLLYYAVTQDAMLIFENLSRGFGRQGKRTFMAERQYTRMEDWLTAKLAYEGLASKTYLSKTLAQYTSKTCSNCGFTITSADYDRVLEKLKKTATGWMTTINGKELKVEGQITYYNRYKRQNVVKDLSVELDRLSEESVNNDISSWTKGRSGEALSLLKKRFSHRPVQEKFVCLNCGFETHADEQAALNIARSWLFLRSQEYKKYQTNKTTGNTDKRAFVETWQSFYRKKLKEVWKPAV

SEQ ID NO: 39927 - protein, 978 aa, synthetic construct
  REGION 1..978: note = engineered CasX variant
QEIKRINKIRRRLVKDSNTKKAGKTGPMKTLLVRVMTPDLRERLENLRKKPENIPQPISNTSRANLNKLLTDYTEMKKAILHVYWEEFQKDPVGLMSRVAQPASKKIDQNKLKPEMDEKGNLTTAGFACSQCGQPLFVYKLEQVSEKGKAYTNYFGRCNVAEHEKLILLYQLKPEKDSDEAVTYSLGKFGQRALDFYSIHVTKESTHPVKPLAQIAGNRYASGPVGKALRDACMGTIASFLSKYQDIIIEHQKVVKGNQKRLESLRELAGKENLEYPSVTLPPQPHTKEGVDAYNEVIARVRMWVNLNLWQKLKLSRDDAKPLLRLKGFPSFPLVERQANEVDWWDMVCNVKKLINEKKEDGKVFWQNLAGYKRQEALRPYLSSEEDRKKGKKFARYQLGDLLLHLEKKHGEDWGKVYDEAWERIDKKVEGLSKHIKLEEERRSEDAQSKAALTDWLRAKASFVIEGLKEADKDEFCRCELKLQKWYGDLRGKPFAIEAENSILDISGFSKQYNCAFIWQKDGVKKLNLYLIINYFKGGKLRFKKIKPEAFEANRFYTVINKKSGEIVPMEVNFNFDDPNLIILPLAFGKRQGREFIWNDLLSLETGSLKLANGRVIEKTLYNRRTRQDEPALFVALTFERREVLDSSNIKPMNLIGVDRGENIPAVIALTDPEGCPLSRFKDSLGNPTHILRIGESYKEKQRTIQAKKEVEQRRAGGYSRKYASKAKNLADDMVRNTARDLLYYAVTQDAMLIFENLSRGFGRQGKRTFMAERQYTRMEDWLTAKLAYEGLPSKVYLSKTLAQYTSKTCSNCGFTITSADYDRVLEKLKKTATGWMTTINGKELKVEGQITYYNRYKRQNVVKDLSVELDRLSEESVNNDISSWTKGRSGEALSLLKKRFSHRPVQEKFVCLNCGFETHADEQAALNIARSWLFLRSQEYKKYQTNKTTGNTDKRAFVETWQSFYRKKLKEVWKPAV

SEQ ID NO: 39928 - protein, 979 aa, synthetic construct
  REGION 1..979: note = engineered CasX variant
QEIKRINKIRRRLVKDSNTKKAGKTGPMKTLLVRVMTPDLRERLENLRKKPENIPQPISNTSRANLNKLLTDYTEMKKAILHVYWEEFQKDPVGLMSRVAQPASKKIDQNKLKPEMDEKGNLTTAGFACSQCGQPLFVYKLEQVSEKGKAYTNYFGRCNVAEHEKLILLYQLKPEKDSDEAVTYSLGKFGQRALDFYSIHVTKESTHPVKPLAQIAGNRYASGPVGKALRDACMGTIASFLSKYQDIIIEHQKVVKGNQKRLESLRELAGKENLEYPSVTLPPQPHTKEGVDAYNEVIARVRMWVNLNLWQKLKLSRDDAKPLLRLKGFPSFPLVERQANEVDWWDMVCNVKKLINEKKEDGKVFWQNLAGYKRQEALRPYLSSEEDRKKGKKFARYQLGDLLLHLEKKHGEDWGKVYDEAWERIDKKVEGLSKHIKLEEERRSEDAQSKAALTDWLRAKASFVIEGLKEADKDEFCRCELKLQKWYGDLRGKPFAIEAENSILDISGFSKQYNCAFIWQKDGVKKLNLYLIINYFKGGKLRFKKIKPEAFEANRFYTVINKKSGEIVPMEVNFNFDDPNLIILPLAFGKRQGREFIWNDLLSLETGSLKLANGRVIEKTLYNRRTRQDEPALFVALTFERREVLDSSNIKPMNLIGVDRGENIPAVIALTDPEGCPLSRFKDSLGNPTHILRIGESYKEKQRTIQAKKEVEQRRAGGYSRKYASKAKNLADDMVRNTARDLLYYAVTQDAMLIFENLSRGFGRQGKRTFMAERQYTRMEDWLTAKLAYEGPLPSKTYLSKTLAQYTSKTCSNCGFTITSADYDRVLEKLKKTATGWMTTINGKELKVEGQITYYNRYKRQNVVKDLSVELDRLSEESVNNDISSWTKGRSGEALSLLKKRFSHRPVQEKFVCLNCGFETHADEQAALNIARSWLFLRSQEYKKYQTNKTTGNTDKRAFVETWQSFYRKKLKEVWKPAV

SEQ ID NO: 39929 - protein, 979 aa, synthetic construct
  REGION 1..979: note = engineered CasX variant
QEIKRINKIRRRLVKDSNTKKAGKTGPMKTLLVRVMTPDLRERLENLRKKPENIPQPISNTSRANLNKLLTDYTEMKKAILHVYWEEFQKDPVGLMSRVAQPASKKIDQNKLKPEMDEKGNLTTAGFACSQCGQPLFVYKLEQVSEKGKAYTNYFGRCNVAEHEKLILLYQLKPEKDSDEAVTYSLGKFGQRALDFYSIHVTKESTHPVKPLAQIAGNRYASGPVGKALRDACMGTIASFLSKYQDIIIEHQKVVKGNQKRLESLRELAGKENLEYPSVTLPPQPHTKEGVDAYNEVIARVRMWVNLNLWQKLKLSRDDAKPLLRLKGFPSFPLVERQANEVDWWDMVCNVKKLINEKKEDGKVFWQNLAGYKRQEALRPYLSSEEDVRKKGKKFARYQLGDLLLHLEKKHGEDWGKVYDEAWERIDKKVEGLSKHIKLEEERRSEDAQSKAALTDWLRAKASFVIEGLKEADKDEFCRCELKLQKWYGDLRGKPFAIEAENSILDISGFSKQYNCAFIWQKDGVKKLNLYLIINYFKGGKLRFKKIKPEAFEANRFYTVINKKSGEIVPMEVNFNFDDPNLIILPLAFGKRQGREFIWNDLLSLETGSLKLANGRVIEKTLYNRRTRQDEPALFVALTFERREVLDSSNIKPMNLIGVDRGENIPAVIALTDPEGCPLSRFKDSLGNPTHILRIGESYKEKQRTIQAKKEVEQRRAGGYSRKYASKAKNLADDMVRNTARDLLYYAVTQDAMLIFENLSRGFGRQGKRTFMAERQYTRMEDWLTAKLAYEGLPSKTYLSKTLAQYTSKTCSNCGFTITSADYDRVLEKLKKTATGWMTTINGKELKVEGQITYYNRYKRQNVVKDLSVELDRLSEESVNNDISSWTKGRSGEALSLLKKRFSHRPVQEKFVCLNCGFETHADEQAALNIARSWLFLRSQEYKKYQTNKTTGNTDKRAFVETWQSFYRKKLKEVWKPAV

SEQ ID NO: 39930 - protein, 978 aa, synthetic construct
  REGION 1..978: note = engineered CasX variant
QEIKRINKIRRRLVKDSNTKKAGKTGPMKTLLVRVMTPDLRERLENLRKKPENIPQPISNTSRANLNKLLTDYTEMKKAILHVYWEEFQKDPVGLMSRVAQPASKKIDQNKLKPEMDEKGNLTTAGFACSQCGQPLFVYKLEQVSEKGKAYTNYFGRCNVAEHEKLILLYQLKPEKDSDEAVTYSLGKFGQRALDFYSIHVTKESTHPVKPLAQIAGNRYASGPVGKALRDACMGTIASFLSKYQDIIIEHQKVVKGNQKRLESLRELAGKENLEYPSVTLPPQPHTKEGVDAYNEVIARVRMWVNLNLWQKLKLSRDDAKPLLRLKGFPSFPLVERQANEVDWWDMVCNVKKLINEKKEDGKVFWQNLAGYKRQEALRPYLSSEEDRKKGKKFARYQLGDLLLHLEKKHGEDWGKVYDEAWERIDKKVEGLSKHIKLEEERRSEDAQSKAALTDWLRAKASFVIEGLKEADKDEFCRCELKLQKWYGDLRGKPFAIEAENSILDISGFSKQYNCAFIWQKDGVKKLNLYLIINYFKGGKLRFKKIKPEAFEANRFYTVINKKSGEIVPMEVNFNFDDPNLIILPLAFGKRQGREFIWNDLLSLETGSLKLANGRVIEKTLYNRRTRQDEPALFVALTFERREVLDSSNIKPMNLIGVDRGENIPAVIALTDPEGCPLSRFKDSLGNPTHILRIGESYKEKQRTIQAKKEVEQRRAGGYSRKYASKAKNLADDMVRNTARDLLYYAVTQDAMLIFENLSRGFGRQGKRTFMAERQYTRMEDWLTAKLAYEGLPSKTYLSKTLAQYTSKTCSNCGFTITSADYDRMLEKLKKTATGWMTTINGKELKVEGQITYYNRYKRQNVVKDLSVELDRLSEESVNNDISSWTKGRSGEALSLLKKRFSHRPVQEKFVCLNCGFETHADEQAALNIARSWLFLRSQEYKKYQTNKTTGNTDKRAFVETWQSFYRKKLKEVWKPAV

SEQ ID NO: 39931 - protein, 978 aa, synthetic construct
  REGION 1..978: note = engineered CasX variant
QEIKRINKIRRRLVKDSNTKKAGKTGPMKTLLVRVMTPDLRERLENLRKKPENIPQPISNTSRANLNKLLTDYTEMKKAILHVYWEEFQKDPVGLMSRVAQPASKKIDQNKLKPEMDEKGNLTTAGFACSQCGQPLFVYKLEQVSEKGKAYTNYFGRCNVAEHEKLILLYQLKPEKDSDEAVTYSLGKFGQRALDFYSIHVTKESTHPVKPLAQIAGNRYASGPVGKALRDACMGTIASFLSKYQDIIIEHQKVVKGNQKRLESLRELAGKENLEYPSVTLPPQPHTKEGVDAYNEVIARVRMWVNLNLWQKLKLSRDDAKPLLRLKGFPSFPLVERQANEVDWWDMVCNVKKLINEKKEDGKVFWQNLAGYKRQEALRPYLSSEEDRKKGKKFARYQLGDLLLHLEKKHGEDWGKVYDEAWERIDKKVEGLSKHIKLEEERRSEDAQSKAALTDWLRAKASFVIEGLKEADKDEFCRCELKLQKWYGDLRGKPFAIEAENSILDISGFSKQYNCAFIWQKDGVKKLNLYLIINYFKGGKLRFKKIKPEAFEANRFYTVINKKSGEIVPMEVNFNFDDPNLIILPLAFGKRQGREFIWNDLLSLETGSLKLANGRVIEKTLYNRRTRQDEPALFVALTFERREVLDSSNIKPMNLIGVDRGENIPAVIALTDPEGCPLSRFKDSLGNPTHILRIGESYKEKQRTIQAKKEVEQRRAGGYSRKYASKAKNLADDMVRNTARDLLYYAVTQDAMLIFENLSRGFGRQGKRTFMAERQYTRMEDWLTAKLAYEGLPSKTYLSKTLAQYTSKTCSNCGFTITSADYDRVLEKLKKTATGWMTTINGKELKVEGQITYYNRYKRQNVVKDLSVELDRLSEESVNNDISSWTKGRQGEALSLLKKRFSHRPVQEKFVCLNCGFETHADEQAALNIARSWLFLRSQEYKKYQTNKTTGNTDKRAFVETWQSFYRKKLKEVWKPAV

SEQ ID NO: 39932 - protein, 978 aa, synthetic construct
  REGION 1..978: note = engineered CasX variant
QEIKRINKIRRRLVKDSNTKKAGKTGPMKTLLVRVMTPDLRERLENLRKKPENIPQPISNTSRANLNKLLTDYTEMKKAILHVYWEEFQKDPVGLMSRVAQPASKKIDQNKLKPEMDEKGNLTTAGFACSQCGQPLFVYKLEQVSEKGKAYTNYFGRCNVAEHEKLILLYQLKPEKDSDEAVTYSLGKFGQRALDFYSIHVTKESTHPVKPLAQIAGNRYASGPVGKALRDACMGTIASFLSKYQDIIIEHQKVVKGNQKRLESLRELAGKENLEYPSVTLPPQPHTKEGVDAYNEVIARVRMWVNLNLWQKLKLSRDDAKPLLRLKGFPSFPLVERQANEVDWWDMVCNVKKLINEKKEDGKVFWQNLAGYKRQEALRPYLSSEEDRKKGKKFARYQLGDLLLHLEKKHGEDWGKVYDEAWERIDKKVEGLSKHIKLEEERRSEDAQSKAALTDWLRAKASFVIEGLKEADKDEFCRCELKLQKWYGDLRGKPFAIEAENSILDISGFSKQYNCAFIWQKDGVKKLNLYLIINYFKGGKLRFKKIKPEAFEANRFYTVINKKSGEIVPMEVNFNFDDPNLIILPLAFGKRQGREFIWNDLLSLETGSLKLANGRVIEKTLYNRRTRQDEPALFVALTFERREVLDSSNIKPMNLIGVDRGENIPAVIALTDPEGCPLSRFKDSLGNPTHILRIGESYKEKQRTIQAKKEVEQRRAGGYSRKYASKAKNLADDMVRNTARDLLYYAVTQDAMLIFENLSRGFGRQGKRTFMAERQYTRMEDWLTAKLAYEGLPSKTYLSKTLAQYTSKTCSNCGFTITSADYDRVLEKLKKTATGWMTTINGKELKVEGQITYYNRYKRQNVVKDLSVELDRLSEESVNNDISSWTKGRSGEALSLLKKRFSHRPVQEKFVCLNCEFETHADEQAALNIARSWLFLRSQEYKKYQTNKTTGNTDKRAFVETWQSFYRKKLKEVWKPAV

SEQ ID NO: 39933 - protein, 979 aa, synthetic construct
  REGION 1..979: note = engineered CasX variant
QEIKRINKIRRRLVKDSNTKKAGKTGPMKTLLVRVMTPDLRERLENLRKKPENIPQPISNTSRANLNKLLTDYTEMKKAILHVYWEEFQKDPVGLMSRVAQPASKKIDQNKLKPEMDEKGNLTTAGFACSQCGQPLFVYKLEQVSEKGKAYTNYFGRCNVAEHEKLILLYQLKPEKDSDEAVTYSLGKFGQRALDFYSIHVTKESTHPVKPLAQIAGNRYASGPVGKALRDACMGTIASFLSKYQDIIIEHQKVVKGNQKRLESLRELAGKENLEYPSVTLPPQPHTKEGVDAYNEVIARVRMWVNLNLWQKLKLSRDDAKPLLRLKGFPSFPLVERQANEVDWWDMVCNVKKLINEKKEDGKVFWQNLAGYKRQEALRPYLSSEEDRKKGKKFARYQLGDLLLHLEKKHGEDWGKVYDEAWERIDKKVEGLSKHIKLEEERRSEDAQSKAALTDWLRAKASFVIEGLKEADKDEFCRCELKLQKWYGDLRGKPFAIEAENSILDISGFSKQYNCAFIWQKDGVKKLNLYLIINYFKGGKLRFKKIKPEAFEANRFYTVINKKSGEIVPMEVNFNFDDPNLIILPLAFGKRQGREFIWNDLLSLETGSLKLANGRVIEKTLYNRRTRQDEPALFVALTFERREVLDSSNIKPMNLIGVDRGENIPAVIALTDPEGCPLSRFKDSLGNPTHILRIGESYKEKQRTIQAKKEVEQRRAGGYSRKYASKAKNLADDMVRNTARDLLYYAVTQDAMLIFENLSRGFGRQGKRTFMAERQYTRMEDWLTAKLAYEGLPSKTYLSKTLAQYTSKTCSNCGFTITSADYDRVLEKLKKTATGWMTTINGKELKVEGQITYYNRYKRQNVVKDLSVELDRLSEESVNNDISSWTKGRSGEALSLLKKRFSHRPVQEKFVCLNCGFETHADEQAALNIARSWLFLRSQEYKKYQTNKTSTGNTDKRAFVETWQSFYRKKLKEVWKPAV

SEQ ID NO: 39934 - protein, 979 aa, synthetic construct
  REGION 1..979: note = engineered CasX variant
QEIKRINKIRRRLVKDSNTKKAGKTGPMKTLLVRVMTPDLRERLENLRKKPENIPQPISNTSRANLNKLLTDYTEMKKAILHVYWEEFQKDPVGLMSRVAQPASKKIDQNKLKPEMDEKGNLTTAGFACSQCGQPLFVYKLEQVSEKGKAYTNYFGRCNVAEHEKLILLYQLKPEKDSDEAVTYSLGKFGQRALDFYSIHVTKESTHPVKPLAQIAGNRYASGPVGKALRDACMGTIASFLSKYQDIIIEHQKVVKGNQKRLESLRELAGKENLEYPSVTLPPQPHTKEGVDAYNEVIARVRMWVNLNLWQKLKLSRDDAKPLLRLKGFPSFPLVERQANEVDWWDMVCNVKKLINEKKEDGKVFWQNLAGYKRQEALRPYLSSEEDRKKGKKFARYQLGDLLLHLEKKHGEDWGKVYDEAWERIDKKVEGLSKHIKLEEERRSEDAQSKAALTDWLRAKASFVIEGLKEADKDEFCRCELKLQKWYGDLRGKPFAIEAENSILDISGFSKQYNCAFIWQKDGVKKLNLYLIINYFKGGKLRFKKIKPEAFEANRFYTVINKKSGEIVPMEVNFNFDDPNLIILPLAFGKRQGREFIWNDLLSLETGSLKLANGRVIEKTLYNRRTRQDEPALFVALTFERREVLDSSNIKPMNLIGVDRGENIPAVIALTDPEGCPLSRFKDSLGNPTHILRIGESYKEKQRTIQAKKEVEQRRAGGYSRKYASKAKNLADDMVRNTARDLLYYAVTQDAMLIFENLSRGFGRQGKRTFMAERQYTRMEDWLTAKLAYEGLPSKTYLSKTLAQYTSKTCSNCGFTITSADYDRVLEKLKKTATGWMTTINGKELKVEGQITYYNRYKRQNVVKDLSVELDRLSEESVNNDISSWTKGRSGEALSLLKKRFSHRPVQEKFVCLNCGFETHADEQAALNIARSWLFLRSQEYKKYQTNKTTGKNTDKRAFVETWQSFYRKKLKEVWKPAV

SEQ ID NO: 39935 - protein, 978 aa, synthetic construct
  REGION 1..978: note = engineered CasX variant
QEIKRINKIRRRLVKDSNTKKAGKTGPMKTLLVRVMTPDLRERLENLRKKPENIPQPISNTSRANLNKLLTDYTEMKKAILHVYWEEFQKDPVGLMSRVAQPASKKIDQNKLKPEMDEKGNLTTAGFACSQCGQPLFVYKLEQVSEKGKAYTNYFGRCNVAEHEKLILLYQLKPEKDSDEAVTYSLGKFGQRALDFYSIHVTKESTHPVKPLAQIAGNRYASGPVGKALRDACMGTIASFLSKYQDIIIEHQKVVKGNQKRLESLRELAGKENLEYPSVTLPPQPHTKEGVDAYNEVIARVRMWVNLNLWQKLKLSRDDAKPLLRLKKFPSFPLVERQANEVDWWDMVCNVKKLINEKKEDGKVFWQNLAGYKRQEALRPYLSSEEDRKKGKKFARYQLGDLLLHLEKKHGEDWGKVYDEAWERIDKKVEGLSKHIKLEEERRSEDAQSKAALTDWLRAKASFVIEGLKEADKDEFCRCELKLQKWYGDLRGKPFAIEAENSILDISGFSKQYNCAFIWQKDGVKKLNLYLIINYFKGGKLRFKKIKPEAFEANRFYTVINKKSGEIVPMEVNFNFDDPNLIILPLAFGKRQGREFIWNDLLSLETGSLKLANGRVIEKTLYNRRTRQDEPALFVALTFERREVLDSSNIKPMNLIGVDRGENIPAVIALTDPEGCPLSRFKDSLGNPTHILRIGESYKEKQRTIQAKKEVEQRRAGGYSRKYASKAKNLADDMVRNTARDLLYYAVTQDAMLIFENLSRGFGRQGKRTFMAERQYTRMEDWLTAKLAYEGLPSKTYLSKTLAQYTSKTCSNCGFTITSADYDRVLEKLKKTATGWMTTINGKELKVEGQITYYNRYKRQNVVKDLSVELDRLSEESVNNDISSWTKGRSGEALSLLKKRFSHRPVQEKFVCLNCGFETHADEQAALNIARSWLFLRSQEYKKYQTNKTTGNTDKRAFVETWQSFYRKKLKEVWKPAV

SEQ ID NO: 39936 - protein, 978 aa, synthetic construct
  REGION 1..978: note = engineered CasX variant
QEIKRINKIRRRLVKDSNTKKAGKTGPMKTLLVRVMTPDLRERLENLRKKPENIPQPISNTSRANLNKLLTDYTEMKKAILHVYWEEFQKDPVGLMSRVAQPASKKIDQNKLKPEMDEKGNLTTAGFACSQCGQPLFVYKLEQVSEKGKAYTNYFGRCNVAEHEKLILLYQLKPEKDSDEAVTYSLGKFGQRALDFYSIHVTKESTHPVKPLAQIAGNRYASGPVGKALRDACMGTIASFLSKYQDIIIEHQKVVKGNQKRLESLRELAGKENLEYPSVTLPPQPHTKEGVDAYNEVIARVRMWVNLNLWQKLKLSRDDAKPLLRLKGFPSFPLVERQANEVDWWDMVCNVKKLINEKKEDGKVFWQNLAGYKRQEALRPYLSSEEDRKKGKKFARYQLGDLLLHLEKKHGEDWGKVYDEAWERIDKKVEGLSKHIKLEEERRSEDAQSKAALTDWLRAKASFVIEGLKEADKDEFCRCELKLQKWYGDLRGKPFAIEAENSILDISGFSKQYNCAFIWQKDGVKKLNLYLIINYFKGGKLRFKKIKPEAFEANRFYTVINKKSGEIVPMEVNFNFDDPNLIILPLAFGKRQGREFIWNDLLSLETGSLKLANGRVIEKTLYNRRTRQDEPALFVALTFERREVLDSSNIKPMNLIGVDRGENIPAVIALTDPEGCPLSRFKDSLGNPTHILRIGERYKEKQRTIQAKKEVEQRRAGGYSRKYASKAKNLADDMVRNTARDLLYYAVTQDAMLIFENLSRGFGRQGKRTFMAERQYTRMEDWLTAKLAYEGLPSKTYLSKTLAQYTSKTCSNCGFTITSADYDRVLEKLKKTATGWMTTINGKELKVEGQITYYNRYKRQNVVKDLSVELDRLSEESVNNDISSWTKGRSGEALSLLKKRFSHRPVQEKFVCLNCGFETHADEQAALNIARSWLFLRSQEYKKYQTNKTTGNTDKRAFVETWQSFYRKKLKEVWKPAV

SEQ ID NO: 39937 - protein, 978 aa, synthetic construct
  REGION 1..978: note = engineered CasX variant
QEIKRINKIRRRLVKDSNTKKAGKTGPMKTLLVRVMTPDLRERLENLRKKPENIPQPISNTSRANLNKLLTDYTEMKKAILHVYWEEFQKDPVGLMSRVAQPASKKIDQNKLKPEMDEKGNLTTAGFACSQCGQPLFVYKLEQVSEKGKAYTNYFGRCNVAEHEKLILLYQLKPEKDSDEAVTYSLGKFGQRALDFYSIHVTKESTHPVKPLAQIAGNRYASGPVGKALRDACMGTIASFLSKYQDIIIEHQKVVKGNQKRLESLRELAGKENLEYPSVTLPPQPHTKEGVDAYNEVIARVRMWVNLNLWQKLKLSRDDAKPLLRLKGFPSFPLVERQANEVDWWDMVCNVKKLINEKKEDGKVFWQNLAGYKRQEALRPYLSSEEDRKKGKKFARYQLGDLLLHLEKKHGEDWGKVYDEAWERIDKKVEGLSKHIKLEEERRSEDAQSKAALTDWLRAKASFVIEGLKEADKDEFCRCELKLQKWYGDLRGKPFAIEAENSILDISGFSKQYNCAFIWQKDGVKKLNLYLIINYFKGGKLRFKKIKPEAFEANRFYTVINKKSGEIVPMEVNFNFDDPNLIILPLAFGKRQGREFIWNDLLSLETGSLQLANGRVIEKTLYNRRTRQDEPALFVALTFERREVLDSSNIKPMNLIGVDRGENIPAVIALTDPEGCPLSRFKDSLGNPTHILRIGESYKEKQRTIQAKKEVEQRRAGGYSRKYASKAKNLADDMVRNTARDLLYYAVTQDAMLIFENLSRGFGRQGKRTFMAERQYTRMEDWLTAKLAYEGLPSKTYLSKTLAQYTSKTCSNCGFTITSADYDRVLEKLKKTATGWMTTINGKELKVEGQITYYNRYKRQNVVKDLSVELDRLSEESVNNDISSWTKGRSGEALSLLKKRFSHRPVQEKFVCLNCGFETHADEQAALNIARSWLFLRSQEYKKYQTNKTTGNTDKRAFVETWQSFYRKKLKEVWKPAV

SEQ ID NO: 39938 - protein, 979 aa, synthetic construct
  REGION 1..979: note = engineered CasX variant
QEIKRINKIRRRLVKDSNTKKAGKTGPMKTLLVRVMTPDLRERLENLRKKPENIPQPISNTSRANLNKLLTDYTEMKKAILHVYWEEFQKDPVGLMSRVAQPASKKIDQNKLKPEMDEKGNLTTAGFACSQCGQPLFVYKLEQVSEKGKAYTNYFGRCNVAEHEKLILLSDQLKPEKDSDEAVTYSLGKFGQRALDFYSIHVTKESTHPVKPLAQIAGNRYASGPVGKALRDACMGTIASFLSKYQDIIIEHQKVVKGNQKRLESLRELAGKENLEYPSVTLPPQPHTKEGVDAYNEVIARVRMWVNLNLWQKLKLSRDDAKPLLRLKGFPSFPLVERQANEVDWWDMVCNVKKLINEKKEDGKVFWQNLAGYKRQEALRPYLSSEEDRKKGKKFARYQLGDLLLHLEKKHGEDWGKVYDEAWERIDKKVEGLSKHIKLEEERRSEDAQSKAALTDWLRAKASFVIEGLKEADKDEFCRCELKLQKWYGDLRGKPFAIEAENSILDISGFSKQYNCAFIWQKDGVKKLNLYLIINYFKGGKLRFKKIKPEAFEANRFYTVINKKSGEIVPMEVNFNFDDPNLIILPLAFGKRQGREFIWNDLLSLETGSLKLANGRVIEKTLYNRRTRQDEPALFVALTFERREVLDSSNIKPMNLIGVDRGENIPAVIALTDPEGCPLSRFKDSLGNPTHILRIGESYKEKQRTIQAKKEVEQRRAGGYSRKYASKAKNLADDMVRNTARDLLYYAVTQDAMLIFENLSRGFGRQGKRTFMAERQYTRMEDWLTAKLAYEGLPSKTYLSKTLAQYTSKTCSNCGFTITSADYDRVLEKLKKTATGWMTTINGKELKVEGQITYYNRYKRQNVVKDLSVELDRLSEESVNNDISSWTKGRSGEALSLLKKRFSHRPVQEKFVCLNCGFETHADEQAALNIARSWLFLRSQEYKKYQTNKTTGNTDKRAFVETWQSFYRKKLKEVWKPAV

SEQ ID NO: 39939 - protein, 979 aa, synthetic construct
  REGION 1..979: note = engineered CasX variant
QEIKRINKIRRRLVKDSNTKKAGKTGPMKTLLVRVMTPDLRERLENLRKKPENIPQPISNTSRANLNKLLTDYTEMKKAILHVYWEEFQKDPVGLMSRVAQPASKKIDQNKLKPEMDEKGNLTTAGFACSQCGQPLFVYKLEQVSEKGKAYTNYFGRCNVAEHEKLILLSYQLKPEKDSDEAVTYSLGKFGQRALDFYSIHVTKESTHPVKPLAQIAGNRYASGPVGKALRDACMGTIASFLSKYQDIIIEHQKVVKGNQKRLESLRELAGKENLEYPSVTLPPQPHTKEGVDAYNEVIARVRMWVNLNLWQKLKLSRDDAKPLLRLKGFPSFPLVERQANEVDWWDMVCNVKKLINEKKEDGKVFWQNLAGYKRQEALRPYLSSEEDRKKGKKFARYQLGDLLLHLEKKHGEDWGKVYDEAWERIDKKVEGLSKHIKLEEERRSEDAQSKAALTDWLRAKASFVIEGLKEADKDEFCRCELKLQKWYGDLRGKPFAIEAENSILDISGFSKQYNCAFIWQKDGVKKLNLYLIINYFKGGKLRFKKIKPEAFEANRFYTVINKKSGEIVPMEVNFNFDDPNLIILPLAFGKRQGREFIWNDLLSLETGSLKLANGRVIEKTLYNRRTRQDEPALFVALTFERREVLDSSNIKPMNLIGVDRGENIPAVIALTDPEGCPLSRFKDSLGNPTHILRIGESYKEKQRTIQAKKEVEQRRAGGYSRKYASKAKNLADDMVRNTARDLLYYAVTQDAMLIFENLSRGFGRQGKRTFMAERQYTRMEDWLTAKLAYEGLPSKTYLSKTLAQYTSKTCSNCGFTITSADYDRVLEKLKKTATGWMTTINGKELKVEGQITYYNRYKRQNVVKDLSVELDRLSEESVNNDISSWTKGRSGEALSLLKKRFSHRPVQEKFVCLNCGFETHADEQAALNIARSWLFLRSQEYKKYQTNKTTGNTDKRAFVETWQSFYRKKLKEVWKPAV

SEQ ID NO: 39940 - protein, 977 aa, synthetic construct
  REGION 1..977: note = engineered CasX variant
QEIKRINKIRRRLVKDSNTKKAGKTGPMKTLLVRVMTPDLRERLENLRKKPENIPQPISNTSRANLNKLLTDYTEMKKAILHVYWEEFQKDPVGLMSRVAQPASKKIDQNKLKPEMDEKGNLTTAGFACSQCGQPLFVYKLEQVSEKGKAYTNYFGRCNVAEHEKLILLSQLKPEKDSDEAVTYSLGKFGQRALDFYSIHVTKESTHPVKPLAQIAGNRYASPVGKALRDACMGTIASFLSKYQDIIIEHQKVVKGNQKRLESLRELAGKENLEYPSVTLPPQPHTKEGVDAYNEVIARVRMWVNLNLWQKLKLSRDDAKPLLRLKGFPSFPLVERQANEVDWWDMVCNVKKLINEKKEDGKVFWQNLAGYKRQEALRPYLSSEEDRKKGKKFARYQLGDLLLHLEKKHGEDWGKVYDEAWERIDKKVEGLSKHIKLEEERRSEDAQSKAALTDWLRAKASFVIEGLKEADKDEFCRCELKLQKWYGDLRGKPFAIEAENSILDISGFSKQYNCAFIWQKDGVKKLNLYLIINYFKGGKLRFKKIKPEAFEANRFYTVINKKSGEIVPMEVNFNFDDPNLIILPLAFGKRQGREFIWNDLLSLETGSLKLANGRVIEKTLYNRRTRQDEPALFVALTFERREVLDSSNIKPMNLIGVDRGENIPAVIALTDPEGCPLSRFKDSLGNPTHILRIGESYKEKQRTIQAKKEVEQRRAGGYSRKYASKAKNLADDMVRNTARDLLYYAVTQDAMLIFENLSRGFGRQGKRTFMAERQYTRMEDWLTAKLAYEGLPSKTYLSKTLAQYTSKTCSNCGFTITSADYDRVLEKLKKTATGWMTTINGKELKVEGQITYYNRYKRQNVVKDLSVELDRLSEESVNNDISSWTKGRSGEALSLLKKRFSHRPVQEKFVCLNCGFETHADEQAALNIARSWLFLRSQEYKKYQTNKTTGNTDKRAFVETWQSFYRKKLKEVWKPAV

SEQ ID NO: 39941 - protein, 978 aa, synthetic construct
  REGION 1..978: note = engineered CasX variant
QEIKRINKIRRRLVKDSNTKKAGKTGPMKTLLVRVMTPDLRERLENLRKKPENIPQPISNTSRANLNKLLTDYTEMKKAILHVYWEEFQKDPVGLMSRVAQPASKKIDQNKLKPEMDEKGNLTTAGFACSQCGQPLFVYKLEQVSEKGKAYTNYFGRCNVAEHEKLILLSQLKPEKDSDEAVTYSLGKFGQRALDFYSIHVTKESTHPVKPLAQIAGNRYASGPVGKALRDACMGTIASFLSKYQDIIIEHQKVVKGNQKRLESLRELAGKENLEYPSVTLPPQPHTSEGVDAYNEVIARVRMWVNLNLWQKLKLSRDDAKPLLRLKGFPSFPLVERQANEVDWWDMVCNVKKLINEKKEDGKVFWQNLAGYKRQEALRPYLSSEEDRKKGKKFARYQLGDLLLHLEKKHGEDWGKVYDEAWERIDKKVEGLSKHIKLEEERRSEDAQSKAALTDWLRAKASFVIEGLKEADKDEFCRCELKLQKWYGDLRGKPFAIEAENSILDISGFSKQYNCAFIWQKDGVKKLNLYLIINYFKGGKLRFKKIKPEAFEANRFYTVINKKSGEIVPMEVNFNFDDPNLIILPLAFGKRQGREFIWNDLLSLETGSLKLANGRVIEKTLYNRRTRQDEPALFVALTFERREVLDSSNIKPMNLIGVDRGENIPAVIALTDPEGCPLSRFKDSLGNPTHILRIGESYKEKQRTIQAKKEVEQRRAGGYSRKYASKAKNLADDMVRNTARDLLYYAVTQDAMLIFENLSRGFGRQGKRTFMAERQYTRMEDWLTAKLAYEGLPSKTYLSKTLAQYTSKTCSNCGFTITSADYDRVLEKLKKTATGWMTTINGKELKVEGQITYYNRYKRQNVVKDLSVELDRLSEESVNNDISSWTKGRSGEALSLLKKRFSHRPVQEKFVCLNCGFETHADEQAALNIARSWLFLRSQEYKKYQTNKTTGNTDKRAFVETWQSFYRKKLKEVWKPAV

SEQ ID NO: 39942 - protein, 978 aa, synthetic construct
  REGION 1..978: note = engineered CasX variant
QEIKRINKIRRRLVKDSNTKKAGKTGPMKTLLVRVMTPDLRERLENLRKKPENIPQPISNTSRANLNKLLTDYTEMKKAILHVYWEEFQKDPVGLMSRVAQPASKKIDQNKLKPEMDEKGNLTTAGFACSQCGQPLFVYKLEQVSEKGKAYTNYFGRCNVAEHEKLILLSQLKPEKDSDEAVTYSLGKFGQRALDFYSIHVTKESTHPVKPLAQIAGNRYASGPVGKALRDACMGTIASFLSKYQDIIIEHQKVVKGNQKRLESLRELAGKENLEYPSVTLPPQPHTKEGLDAYNEVIARVRMWVNLNLWQKLKLSRDDAKPLLRLKGFPSFPLVERQANEVDWWDMVCNVKKLINEKKEDGKVFWQNLAGYKRQEALRPYLSSEEDRKKGKKFARYQLGDLLLHLEKKHGEDWGKVYDEAWERIDKKVEGLSKHIKLEEERRSEDAQSKAALTDWLRAKASFVIEGLKEADKDEFCRCELKLQKWYGDLRGKPFAIEAENSILDISGFSKQYNCAFIWQKDGVKKLNLYLIINYFKGGKLRFKKIKPEAFEANRFYTVINKKSGEIVPMEVNFNFDDPNLIILPLAFGKRQGREFIWNDLLSLETGSLKLANGRVIEKTLYNRRTRQDEPALFVALTFERREVLDSSNIKPMNLIGVDRGENIPAVIALTDPEGCPLSRFKDSLGNPTHILRIGESYKEKQRTIQAKKEVEQRRAGGYSRKYASKAKNLADDMVRNTARDLLYYAVTQDAMLIFENLSRGFGRQGKRTFMAERQYTRMEDWLTAKLAYEGLPSKTYLSKTLAQYTSKTCSNCGFTITSADYDRVLEKLKKTATGWMTTINGKELKVEGQITYYNRYKRQNVVKDLSVELDRLSEESVNNDISSWTKGRSGEALSLLKKRFSHRPVQEKFVCLNCGFETHADEQAALNIARSWLFLRSQEYKKYQTNKTTGNTDKRAFVETWQSFYRKKLKEVWKPAV

SEQ ID NO: 39943 - protein, 978 aa, synthetic construct
  REGION 1..978: note = engineered CasX variant
QEIKRINKIRRRLVKDSNTKKAGKTGPMKTLLVRVMTPDLRERLENLRKKPENIPQPISNTSRANLNKLLTDYTEMKKAILHVYWEEFQKDPVGLMSRVAQPASKKIDQNKLKPEMDEKGNLTTAGFACSQCGQPLFVYKLEQVSEKGKAYTNYFGRCNVAEHEKLILLSQLKPEKDSDEAVTYSLGKFGQRALDFYSIHVTKESTHPVKPLAQIAGNRYASGPVGKALRDACMGTIASFLSKYQDIIIEHQKVVKGNQKRLESLRELAGKENLEYPSVTLPPQPHTKEGVDAYNEVIARVRTWVNLNLWQKLKLSRDDAKPLLRLKGFPSFPLVERQANEVDWWDMVCNVKKLINEKKEDGKVFWQNLAGYKRQEALRPYLSSEEDRKKGKKFARYQLGDLLLHLEKKHGEDWGKVYDEAWERIDKKVEGLSKHIKLEEERRSEDAQSKAALTDWLRAKASFVIEGLKEADKDEFCRCELKLQKWYGDLRGKPFAIEAENSILDISGFSKQYNCAFIWQKDGVKKLNLYLIINYFKGGKLRFKKIKPEAFEANRFYTVINKKSGEIVPMEVNFNFDDPNLIILPLAFGKRQGREFIWNDLLSLETGSLKLANGRVIEKTLYNRRTRQDEPALFVALTFERREVLDSSNIKPMNLIGVDRGENIPAVIALTDPEGCPLSRFKDSLGNPTHILRIGESYKEKQRTIQAKKEVEQRRAGGYSRKYASKAKNLADDMVRNTARDLLYYAVTQDAMLIFENLSRGFGRQGKRTFMAERQYTRMEDWLTAKLAYEGLPSKTYLSKTLAQYTSKTCSNCGFTITSADYDRVLEKLKKTATGWMTTINGKELKVEGQITYYNRYKRQNVVKDLSVELDRLSEESVNNDISSWTKGRSGEALSLLKKRFSHRPVQEKFVCLNCGFETHADEQAALNIARSWLFLRSQEYKKYQTNKTTGNTDKRAFVETWQSFYRKKLKEVWKPAV

SEQ ID NO: 39944 - protein, 978 aa, synthetic construct
  REGION 1..978: note = engineered CasX variant
QEIKRINKIRRRLVKDSNTKKAGKTGPMKTLLVRVMTPDLRERLENLRKKPENIPQPISNTSRANLNKLLTDYTEMKKAILHVYWEEFQKDPVGLMSRVAQPASKKIDQNKLKPEMDEKGNLTTAGFACSQCGQPLFVYKLEQVSEKGKAYTNYFGRCNVAEHEKLILLSQLKPEKDSDEAVTYSLGKFGQRALDFYSIHVTKESTHPVKPLAQIAGNRYASGPVGKALRDACMGTIASFLSKYQDIIIEHQKVVKGNQKRLESLRELAGKENLEYPSVTLPPQPHTKEGVDAYNEVIARVRWWVNLNLWQKLKLSRDDAKPLLRLKGFPSFPLVERQANEVDWWDMVCNVKKLINEKKEDGKVFWQNLAGYKRQEALRPYLSSEEDRKKGKKFARYQLGDLLLHLEKKHGEDWGKVYDEAWERIDKKVEGLSKHIKLEEERRSEDAQSKAALTDWLRAKASFVIEGLKEADKDEFCRCELKLQKWYGDLRGKPFAIEAENSILDISGFSKQYNCAFIWQKDGVKKLNLYLIINYFKGGKLRFKKIKPEAFEANRFYTVINKKSGEIVPMEVNFNFDDPNLIILPLAFGKRQGREFIWNDLLSLETGSLKLANGRVIEKTLYNRRTRQDEPALFVALTFERREVLDSSNIKPMNLIGVDRGENIPAVIALTDPEGCPLSRFKDSLGNPTHILRIGESYKEKQRTIQAKKEVEQRRAGGYSRKYASKAKNLADDMVRNTARDLLYYAVTQDAMLIFENLSRGFGRQGKRTFMAERQYTRMEDWLTAKLAYEGLPSKTYLSKTLAQYTSKTCSNCGFTITSADYDRVLEKLKKTATGWMTTINGKELKVEGQITYYNRYKRQNVVKDLSVELDRLSEESVNNDISSWTKGRSGEALSLLKKRFSHRPVQEKFVCLNCGFETHADEQAALNIARSWLFLRSQEYKKYQTNKTTGNTDKRAFVETWQSFYRKKLKEVWKPAV

SEQ ID NO: 39945 - protein, 979 aa, synthetic construct
  REGION 1..979: note = engineered CasX variant
QEIKRINKIRRRLVKDSNTKKAGKTGPMKTLLVRVMTPDLRERLENLRKKPENIPQPISNTSRANLNKLLTDYTEMKKAILHVYWEEFQKDPVGLMSRVAQPASKKIDQNKLKPEMDEKGNLTTAGFACSQCGQPLFVYKLEQVSEKGKAYTNYFGRCNVAEHEKLILLSQLKPEKDSDEAVTYSLGKFGQRALDFYSIHVTKESTHPVKPLAQIAGNRYASGPVGKALRDACMGTIASFLSKYQDIIIEHQKVVKGNQKRLESLRELAGKENLEYPSVTLPPQPHTKEGVDAYNEVIARVRMWVNLNLWQKLKLSRDDAKPLLRLKGFPSFPLVERQQANEVDWWDMVCNVKKLINEKKEDGKVFWQNLAGYKRQEALRPYLSSEEDRKKGKKFARYQLGDLLLHLEKKHGEDWGKVYDEAWERIDKKVEGLSKHIKLEEERRSEDAQSKAALTDWLRAKASFVIEGLKEADKDEFCRCELKLQKWYGDLRGKPFAIEAENSILDISGFSKQYNCAFIWQKDGVKKLNLYLIINYFKGGKLRFKKIKPEAFEANRFYTVINKKSGEIVPMEVNFNFDDPNLIILPLAFGKRQGREFIWNDLLSLETGSLKLANGRVIEKTLYNRRTRQDEPALFVALTFERREVLDSSNIKPMNLIGVDRGENIPAVIALTDPEGCPLSRFKDSLGNPTHILRIGESYKEKQRTIQAKKEVEQRRAGGYSRKYASKAKNLADDMVRNTARDLLYYAVTQDAMLIFENLSRGFGRQGKRTFMAERQYTRMEDWLTAKLAYEGLPSKTYLSKTLAQYTSKTCSNCGFTITSADYDRVLEKLKKTATGWMTTINGKELKVEGQITYYNRYKRQNVVKDLSVELDRLSEESVNNDISSWTKGRSGEALSLLKKRFSHRPVQEKFVCLNCGFETHADEQAALNIARSWLFLRSQEYKKYQTNKTTGNTDKRAFVETWQSFYRKKLKEVWKPAV

SEQ ID NO: 39946 - protein, 979 aa, synthetic construct
  REGION 1..979: note = engineered CasX variant
QEIKRINKIRRRLVKDSNTKKAGKTGPMKTLLVRVMTPDLRERLENLRKKPENIPQPISNTSRANLNKLLTDYTEMKKAILHVYWEEFQKDPVGLMSRVAQPASKKIDQNKLKPEMDEKGNLTTAGFACSQCGQPLFVYKLEQVSEKGKAYTNYFGRCNVAEHEKLILLSQLKPEKDSDEAVTYSLGKFGQRALDFYSIHVTKESTHPVKPLAQIAGNRYASGPVGKALRDACMGTIASFLSKYQDIIIEHQKVVKGNQKRLESLRELAGKENLEYPSVTLPPQPHTKEGVDAYNEVIARVRMWVNLNLWQKLKLSRDDAKPLLRLKGFPSFPLVERQANAEVDWWDMVCNVKKLINEKKEDGKVFWQNLAGYKRQEALRPYLSSEEDRKKGKKFARYQLGDLLLHLEKKHGEDWGKVYDEAWERIDKKVEGLSKHIKLEEERRSEDAQSKAALTDWLRAKASFVIEGLKEADKDEFCRCELKLQKWYGDLRGKPFAIEAENSILDISGFSKQYNCAFIWQKDGVKKLNLYLIINYFKGGKLRFKKIKPEAFEANRFYTVINKKSGEIVPMEVNFNFDDPNLIILPLAFGKRQGREFIWNDLLSLETGSLKLANGRVIEKTLYNRRTRQDEPALFVALTFERREVLDSSNIKPMNLIGVDRGENIPAVIALTDPEGCPLSRFKDSLGNPTHILRIGESYKEKQRTIQAKKEVEQRRAGGYSRKYASKAKNLADDMVRNTARDLLYYAVTQDAMLIFENLSRGFGRQGKRTFMAERQYTRMEDWLTAKLAYEGLPSKTYLSKTLAQYTSKTCSNCGFTITSADYDRVLEKLKKTATGWMTTINGKELKVEGQITYYNRYKRQNVVKDLSVELDRLSEESVNNDISSWTKGRSGEALSLLKKRFSHRPVQEKFVCLNCGFETHADEQAALNIARSWLFLRSQEYKKYQTNKTTGNTDKRAFVETWQSFYRKKLKEVWKPAV

SEQ ID NO: 39947 - protein, 978 aa, synthetic construct
  REGION 1..978: note = engineered CasX variant
QEIKRINKIRRRLVKDSNTKKAGKTGPMKTLLVRVMTPDLRERLENLRKKPENIPQPISNTSRANLNKLLTDYTEMKKAILHVYWEEFQKDPVGLMSRVAQPASKKIDQNKLKPEMDEKGNLTTAGFACSQCGQPLFVYKLEQVSEKGKAYTNYFGRCNVAEHEKLILLSQLKPEKDSDEAVTYSLGKFGQRALDFYSIHVTKESTHPVKPLAQIAGNRYASGPVGKALRDACMGTIASFLSKYQDIIIEHQKVVKGNQKRLESLRELAGKENLEYPSVTLPPQPHTKEGVDAYNEVIARVRMWVNLNLWQKLKLSRDDAKPLLRLKGFPSFPLVERQANEVDWWDMVCNVKKLINEKKEDGKVFWQNLAGYKRQEALRPYLSSEEDRKKGKKFARTQLGDLLLHLEKKHGEDWGKVYDEAWERIDKKVEGLSKHIKLEEERRSEDAQSKAALTDWLRAKASFVIEGLKEADKDEFCRCELKLQKWYGDLRGKPFAIEAENSILDISGFSKQYNCAFIWQKDGVKKLNLYLIINYFKGGKLRFKKIKPEAFEANRFYTVINKKSGEIVPMEVNFNFDDPNLIILPLAFGKRQGREFIWNDLLSLETGSLKLANGRVIEKTLYNRRTRQDEPALFVALTFERREVLDSSNIKPMNLIGVDRGENIPAVIALTDPEGCPLSRFKDSLGNPTHILRIGESYKEKQRTIQAKKEVEQRRAGGYSRKYASKAKNLADDMVRNTARDLLYYAVTQDAMLIFENLSRGFGRQGKRTFMAERQYTRMEDWLTAKLAYEGLPSKTYLSKTLAQYTSKTCSNCGFTITSADYDRVLEKLKKTATGWMTTINGKELKVEGQITYYNRYKRQNVVKDLSVELDRLSEESVNNDISSWTKGRSGEALSLLKKRFSHRPVQEKFVCLNCGFETHADEQAALNIARSWLFLRSQEYKKYQTNKTTGNTDKRAFVETWQSFYRKKLKEVWKPAV

SEQ ID NO: 39948 - protein, 979 aa, synthetic construct
  REGION 1..979: note = engineered CasX variant
QEIKRINKIRRRLVKDSNTKKAGKTGPMKTLLVRVMTPDLRERLENLRKKPENIPQPISNTSRANLNKLLTDYTEMKKAILHVYWEEFQKDPVGLMSRVAQPASKKIDQNKLKPEMDEKGNLTTAGFACSQCGQPLFVYKLEQVSEKGKAYTNYFGRCNVAEHEKLILLSQLKPEKDSDEAVTYSLGKFGQRALDFYSIHVTKESTHPVKPLAQIAGNRYASGPVGKALRDACMGTIASFLSKYQDIIIEHQKVVKGNQKRLESLRELAGKENLEYPSVTLPPQPHTKEGVDAYNEVIARVRMWVNLNLWQKLKLSRDDAKPLLRLKGFPSFPLVERQANEVDWWDMVCNVKKLINEKKEDGKVFWQNLAGYKRQEALRPYLSSEEDRKKGKKFARYQLGDLLLHLEKKHEGEDWGKVYDEAWERIDKKVEGLSKHIKLEEERRSEDAQSKAALTDWLRAKASFVIEGLKEADKDEFCRCELKLQKWYGDLRGKPFAIEAENSILDISGFSKQYNCAFIWQKDGVKKLNLYLIINYFKGGKLRFKKIKPEAFEANRFYTVINKKSGEIVPMEVNFNFDDPNLIILPLAFGKRQGREFIWNDLLSLETGSLKLANGRVIEKTLYNRRTRQDEPALFVALTFERREVLDSSNIKPMNLIGVDRGENIPAVIALTDPEGCPLSRFKDSLGNPTHILRIGESYKEKQRTIQAKKEVEQRRAGGYSRKYASKAKNLADDMVRNTARDLLYYAVTQDAMLIFENLSRGFGRQGKRTFMAERQYTRMEDWLTAKLAYEGLPSKTYLSKTLAQYTSKTCSNCGFTITSADYDRVLEKLKKTATGWMTTINGKELKVEGQITYYNRYKRQNVVKDLSVELDRLSEESVNNDISSWTKGRSGEALSLLKKRFSHRPVQEKFVCLNCGFETHADEQAALNIARSWLFLRSQEYKKYQTNKTTGNTDKRAFVETWQSFYRKKLKEVWKPAV

SEQ ID NO: 39949 - protein, 978 aa, synthetic construct
  REGION 1..978: note = engineered CasX variant
QEIKRINKIRRRLVKDSNTKKAGKTGPMKTLLVRVMTPDLRERLENLRKKPENIPQPISNTSRANLNKLLTDYTEMKKAILHVYWEEFQKDPVGLMSRVAQPASKKIDQNKLKPEMDEKGNLTTAGFACSQCGQPLFVYKLEQVSEKGKAYTNYFGRCNVAEHEKLILLSQLKPEKDSDEAVTYSLGKFGQRALDFYSIHVTKESTHPVKPLAQIAGNRYASGPVGKALRDACMGTIASFLSKYQDIIIEHQKVVKGNQKRLESLRELAGKENLEYPSVTLPPQPHTKEGVDAYNEVIARVRMWVNLNLWQKLKLSRDDAKPLLRLKGFPSFPLVERQANEVDWWDMVCNVKKLINEKKEDGKVFWQNLAGYKRQEALRPYLSSEEDRKKGKKFARYQLGDLLLHLEKKHGEDWGKVYDEAWERIDKKVEGLSKHIKLEEERRSEDAQSKAALTDWLRAKASFVIEGLKEADKDEFCRCDLKLQKWYGDLRGKPFAIEAENSILDISGFSKQYNCAFIWQKDGVKKLNLYLIINYFKGGKLRFKKIKPEAFEANRFYTVINKKSGEIVPMEVNFNFDDPNLIILPLAFGKRQGREFIWNDLLSLETGSLKLANGRVIEKTLYNRRTRQDEPALFVALTFERREVLDSSNIKPMNLIGVDRGENIPAVIALTDPEGCPLSRFKDSLGNPTHILRIGESYKEKQRTIQAKKEVEQRRAGGYSRKYASKAKNLADDMVRNTARDLLYYAVTQDAMLIFENLSRGFGRQGKRTFMAERQYTRMEDWLTAKLAYEGLPSKTYLSKTLAQYTSKTCSNCGFTITSADYDRVLEKLKKTATGWMTTINGKELKVEGQITYYNRYKRQNVVKDLSVELDRLSEESVNNDISSWTKGRSGEALSLLKKRFSHRPVQEKFVCLNCGFETHADEQAALNIARSWLFLRSQEYKKYQTNKTTGNTDKRAFVETWQSFYRKKLKEVWKPAV

SEQ ID NO: 39950 - protein, 978 aa, synthetic construct
  REGION 1..978: note = engineered CasX variant
QEIKRINKIRRRLVKDSNTKKAGKTGPMKTLLVRVMTPDLRERLENLRKKPENIPQPISNTSRANLNKLLTDYTEMKKAILHVYWEEFQKDPVGLMSRVAQPASKKIDQNKLKPEMDEKGNLTTAGFACSQCGQPLFVYKLEQVSEKGKAYTNYFGRCNVAEHEKLILLSQLKPEKDSDEAVTYSLGKFGQRALDFYSIHVTKESTHPVKPLAQIAGNRYASGPVGKALRDACMGTIASFLSKYQDIIIEHQKVVKGNQKRLESLRELAGKENLEYPSVTLPPQPHTKEGVDAYNEVIARVRMWVNLNLWQKLKLSRDDAKPLLRLKGFPSFPLVERQANEVDWWDMVCNVKKLINEKKEDGKVFWQNLAGYKRQEALRPYLSSEEDRKKGKKFARYQLGDLLLHLEKKHGEDWGKVYDEAWERIDKKVEGLSKHIKLEEERRSEDAQSKAALTDWLRAKASFVIEGLKEADKDEFCRCELKLQKWYGDLRGKPFAIEAENSILDISGFSKQYNCAFIWQKDGVKKLNLYLIINYFKGGKLRFKKIKPEAFEANRFYTVINKKSGEIVPMEVNFNFDDPNLIILPLAFGKRFGREFIWNDLLSLETGSLKLANGRVIEKTLYNRRTRQDEPALFVALTFERREVLDSSNIKPMNLIGVDRGENIPAVIALTDPEGCPLSRFKDSLGNPTHILRIGESYKEKQRTIQAKKEVEQRRAGGYSRKYASKAKNLADDMVRNTARDLLYYAVTQDAMLIFENLSRGFGRQGKRTFMAERQYTRMEDWLTAKLAYEGLPSKTYLSKTLAQYTSKTCSNCGFTITSADYDRVLEKLKKTATGWMTTINGKELKVEGQITYYNRYKRQNVVKDLSVELDRLSEESVNNDISSWTKGRSGEALSLLKKRFSHRPVQEKFVCLNCGFETHADEQAALNIARSWLFLRSQEYKKYQTNKTTGNTDKRAFVETWQSFYRKKLKEVWKPAV

SEQ ID NO: 39951 - protein, 978 aa, synthetic construct
  REGION 1..978: note = engineered CasX variant
QEIKRINKIRRRLVKDSNTKKAGKTGPMKTLLVRVMTPDLRERLENLRKKPENIPQPISNTSRANLNKLLTDYTEMKKAILHVYWEEFQKDPVGLMSRVAQPASKKIDQNKLKPEMDEKGNLTTAGFACSQCGQPLFVYKLEQVSEKGKAYTNYFGRCNVAEHEKLILLSQLKPEKDSDEAVTYSLGKFGQRALDFYSIHVTKESTHPVKPLAQIAGNRYASGPVGKALRDACMGTIASFLSKYQDIIIEHQKVVKGNQKRLESLRELAGKENLEYPSVTLPPQPHTKEGVDAYNEVIARVRMWVNLNLWQKLKLSRDDAKPLLRLKGFPSFPLVERQANEVDWWDMVCNVKKLINEKKEDGKVFWQNLAGYKRQEALRPYLSSEEDRKKGKKFARYQLGDLLLHLEKKHGEDWGKVYDEAWERIDKKVEGLSKHIKLEEERRSEDAQSKAALTDWLRAKASFVIEGLKEADKDEFCRCELKLQKWYGDLRGKPFAIEAENSILDISGFSKQYNCAFIWQKDGVKKLNLYLIINYFKGGKLRFKKIKPEAFEANRFYTVINKKSGEIVPMEVNFNFDDPNLIILPLAFGKRVGREFIWNDLLSLETGSLKLANGRVIEKTLYNRRTRQDEPALFVALTFERREVLDSSNIKPMNLIGVDRGENIPAVIALTDPEGCPLSRFKDSLGNPTHILRIGESYKEKQRTIQAKKEVEQRRAGGYSRKYASKAKNLADDMVRNTARDLLYYAVTQDAMLIFENLSRGFGRQGKRTFMAERQYTRMEDWLTAKLAYEGLPSKTYLSKTLAQYTSKTCSNCGFTITSADYDRVLEKLKKTATGWMTTINGKELKVEGQITYYNRYKRQNVVKDLSVELDRLSEESVNNDISSWTKGRSGEALSLLKKRFSHRPVQEKFVCLNCGFETHADEQAALNIARSWLFLRSQEYKKYQTNKTTGNTDKRAFVETWQSFYRKKLKEVWKPAV

SEQ ID NO: 39952 - protein, 979 aa, synthetic construct
  REGION 1..979: note = engineered CasX variant
QEIKRINKIRRRLVKDSNTKKAGKTGPMKTLLVRVMTPDLRERLENLRKKPENIPQPISNTSRANLNKLLTDYTEMKKAILHVYWEEFQKDPVGLMSRVAQPASKKIDQNKLKPEMDEKGNLTTAGFACSQCGQPLFVYKLEQVSEKGKAYTNYFGRCNVAEHEKLILLSQLKPEKDSDEAVTYSLGKFGQRALDFYSIHVTKESTHPVKPLAQIAGNRYASGPVGKALRDACMGTIASFLSKYQDIIIEHQKVVKGNQKRLESLRELAGKENLEYPSVTLPPQPHTKEGVDAYNEVIARVRMWVNLNLWQKLKLSRDDAKPLLRLKGFPSFPLVERQANEVDWWDMVCNVKKLINEKKEDGKVFWQNLAGYKRQEALRPYLSSEEDRKKGKKFARYQLGDLLLHLEKKHGEDWGKVYDEAWERIDKKVEGLSKHIKLEEERRSEDAQSKAALTDWLRAKASFVIEGLKEADKDEFCRCELKLQKWYGDLRGKPFAIEAENSILDISGFSKQYNCAFIWQKDGVKKLNLYLIINYFKGGKLRFKKIKPEAFEANRFYTVINKKSGEIVPMEVNFNFDDPNLIILPLAFGKRQGREFIWNDLLSLETGSLKLANGRVIEKTLYNRRTRQDEPALFVALTFERREVLDSSNIKTPMNLIGVDRGENIPAVIALTDPEGCPLSRFKDSLGNPTHILRIGESYKEKQRTIQAKKEVEQRRAGGYSRKYASKAKNLADDMVRNTARDLLYYAVTQDAMLIFENLSRGFGRQGKRTFMAERQYTRMEDWLTAKLAYEGLPSKTYLSKTLAQYTSKTCSNCGFTITSADYDRVLEKLKKTATGWMTTINGKELKVEGQITYYNRYKRQNVVKDLSVELDRLSEESVNNDISSWTKGRSGEALSLLKKRFSHRPVQEKFVCLNCGFETHADEQAALNIARSWLFLRSQEYKKYQTNKTTGNTDKRAFVETWQSFYRKKLKEVWKPAV

SEQ ID NO: 39953 - protein, 979 aa, synthetic construct
  REGION 1..979: note = engineered CasX variant
QEIKRINKIRRRLVKDSNTKKAGKTGPMKTLLVRVMTPDLRERLENLRKKPENIPQPISNTSRANLNKLLTDYTEMKKAILHVYWEEFQKDPVGLMSRVAQPASKKIDQNKLKPEMDEKGNLTTAGFACSQCGQPLFVYKLEQVSEKGKAYTNYFGRCNVAEHEKLILLSQLKPEKDSDEAVTYSLGKFGQRALDFYSIHVTKESTHPVKPLAQIAGNRYASGPVGKALRDACMGTIASFLSKYQDIIIEHQKVVKGNQKRLESLRELAGKENLEYPSVTLPPQPHTKEGVDAYNEVIARVRMWVNLNLWQKLKLSRDDAKPLLRLKGFPSFPLVERQANEVDWWDMVCNVKKLINEKKEDGKVFWQNLAGYKRQEALRPYLSSEEDRKKGKKFARYQLGDLLLHLEKKHGEDWGKVYDEAWERIDKKVEGLSKHIKLEEERRSEDAQSKAALTDWLRAKASFVIEGLKEADKDEFCRCELKLQKWYGDLRGKPFAIEAENSILDISGFSKQYNCAFIWQKDGVKKLNLYLIINYFKGGKLRFKKIKPEAFEANRFYTVINKKSGEIVPMEVNFNFDDPNLIILPLAFGKRQGREFIWNDLLSLETGSLKLANGRVIEKTLYNRRTRQDEPALFVALTFERREVLDSSNIKPMSNLIGVDRGENIPAVIALTDPEGCPLSRFKDSLGNPTHILRIGESYKEKQRTIQAKKEVEQRRAGGYSRKYASKAKNLADDMVRNTARDLLYYAVTQDAMLIFENLSRGFGRQGKRTFMAERQYTRMEDWLTAKLAYEGLPSKTYLSKTLAQYTSKTCSNCGFTITSADYDRVLEKLKKTATGWMTTINGKELKVEGQITYYNRYKRQNVVKDLSVELDRLSEESVNNDISSWTKGRSGEALSLLKKRFSHRPVQEKFVCLNCGFETHADEQAALNIARSWLFLRSQEYKKYQTNKTTGNTDKRAFVETWQSFYRKKLKEVWKPAV

SEQ ID NO: 39954 - protein, 978 aa, synthetic construct
  REGION 1..978: note = engineered CasX variant
QEIKRINKIRRRLVKDSNTKKAGKTGPMKTLLVRVMTPDLRERLENLRKKPENIPQPISNTSRANLNKLLTDYTEMKKAILHVYWEEFQKDPVGLMSRVAQPASKKIDQNKLKPEMDEKGNLTTAGFACSQCGQPLFVYKLEQVSEKGKAYTNYFGRCNVAEHEKLILLSQLKPEKDSDEAVTYSLGKFGQRALDFYSIHVTKESTHPVKPLAQIAGNRYASGPVGKALRDACMGTIASFLSKYQDIIIEHQKVVKGNQKRLESLRELAGKENLEYPSVTLPPQPHTKEGVDAYNEVIARVRMWVNLNLWQKLKLSRDDAKPLLRLKGFPSFPLVERQANEVDWWDMVCNVKKLINEKKEDGKVFWQNLAGYKRQEALRPYLSSEEDRKKGKKFARYQLGDLLLHLEKKHGEDWGKVYDEAWERIDKKVEGLSKHIKLEEERRSEDAQSKAALTDWLRAKASFVIEGLKEADKDEFCRCELKLQKWYGDLRGKPFAIEAENSILDISGFSKQYNCAFIWQKDGVKKLNLYLIINYFKGGKLRFKKIKPEAFEANRFYTVINKKSGEIVPMEVNFNFDDPNLIILPLAFGKRQGREFIWNDLLSLETGSLKLANGRVIEKTLYNRRTRQDEPALFVALTFERREVLDSSNIKPMNLIGVDRGENIPAVIALTDPEGCPLSRFKDSLGNPTHILRIRESYKEKQRTIQAKKEVEQRRAGGYSRKYASKAKNLADDMVRNTARDLLYYAVTQDAMLIFENLSRGFGRQGKRTFMAERQYTRMEDWLTAKLAYEGLPSKTYLSKTLAQYTSKTCSNCGFTITSADYDRVLEKLKKTATGWMTTINGKELKVEGQITYYNRYKRQNVVKDLSVELDRLSEESVNNDISSWTKGRSGEALSLLKKRFSHRPVQEKFVCLNCGFETHADEQAALNIARSWLFLRSQEYKKYQTNKTTGNTDKRAFVETWQSFYRKKLKEVWKPAV

SEQ ID NO: 39955 - protein, 978 aa, synthetic construct
  REGION 1..978: note = engineered CasX variant
QEIKRINKIRRRLVKDSNTKKAGKTGPMKTLLVRVMTPDLRERLENLRKKPENIPQPISNTSRANLNKLLTDYTEMKKAILHVYWEEFQKDPVGLMSRVAQPASKKIDQNKLKPEMDEKGNLTTAGFACSQCGQPLFVYKLEQVSEKGKAYTNYFGRCNVAEHEKLILLSQLKPEKDSDEAVTYSLGKFGQRALDFYSIHVTKESTHPVKPLAQIAGNRYASGPVGKALRDACMGTIASFLSKYQDIIIEHQKVVKGNQKRLESLRELAGKENLEYPSVTLPPQPHTKEGVDAYNEVIARVRMWVNLNLWQKLKLSRDDAKPLLRLKGFPSFPLVERQANEVDWWDMVCNVKKLINEKKEDGKVFWQNLAGYKRQEALRPYLSSEEDRKKGKKFARYQLGDLLLHLEKKHGEDWGKVYDEAWERIDKKVEGLSKHIKLEEERRSEDAQSKAALTDWLRAKASFVIEGLKEADKDEFCRCELKLQKWYGDLRGKPFAIEAENSILDISGFSKQYNCAFIWQKDGVKKLNLYLIINYFKGGKLRFKKIKPEAFEANRFYTVINKKSGEIVPMEVNFNFDDPNLIILPLAFGKRQGREFIWNDLLSLETGSLKLANGRVIEKTLYNRRTRQDEPALFVALTFERREVLDSSNIKPMNLIGVDRGENIPAVIALTDPEGCPLSRFKDSLGNPTHILRIGESYKEKQRTIQAKKEVEQRRAGGYSRKYASKAKNLADDMVRNTARDLLYYAVTQDAMLIFENLSRGFGRQGKRTFSAERQYTRMEDWLTAKLAYEGLPSKTYLSKTLAQYTSKTCSNCGFTITSADYDRVLEKLKKTATGWMTTINGKELKVEGQITYYNRYKRQNVVKDLSVELDRLSEESVNNDISSWTKGRSGEALSLLKKRFSHRPVQEKFVCLNCGFETHADEQAALNIARSWLFLRSQEYKKYQTNKTTGNTDKRAFVETWQSFYRKKLKEVWKPAV

SEQ ID NO: 39956 - protein, 978 aa, synthetic construct
  REGION 1..978: note = engineered CasX variant
QEIKRINKIRRRLVKDSNTKKAGKTGPMKTLLVRVMTPDLRERLENLRKKPENIPQPISNTSRANLNKLLTDYTEMKKAILHVYWEEFQKDPVGLMSRVAQPASKKIDQNKLKPEMDEKGNLTTAGFACSQCGQPLFVYKLEQVSEKGKAYTNYFGRCNVAEHEKLILLSQLKPEKDSDEAVTYSLGKFGQRALDFYSIHVTKESTHPVKPLAQIAGNRYASGPVGKALRDACMGTIASFLSKYQDIIIEHQKVVKGNQKRLESLRELAGKENLEYPSVTLPPQPHTKEGVDAYNEVIARVRMWVNLNLWQKLKLSRDDAKPLLRLKGFPSFPLVERQANEVDWWDMVCNVKKLINEKKEDGKVFWQNLAGYKRQEALRPYLSSEEDRKKGKKFARYQLGDLLLHLEKKHGEDWGKVYDEAWERIDKKVEGLSKHIKLEEERRSEDAQSKAALTDWLRAKASFVIEGLKEADKDEFCRCELKLQKWYGDLRGKPFAIEAENSILDISGFSKQYNCAFIWQKDGVKKLNLYLIINYFKGGKLRFKKIKPEAFEANRFYTVINKKSGEIVPMEVNFNFDDPNLIILPLAFGKRQGREFIWNDLLSLETGSLKLANGRVIEKTLYNRRTRQDEPALFVALTFERREVLDSSNIKPMNLIGVDRGENIPAVIALTDPEGCPLSRFKDSLGNPTHILRIGESYKEKQRTIQAKKEVEQRRAGGYSRKYASKAKNLADDMVRNTARDLLYYAVTQDAMLIFENLSRGFGRQGKRTFMAERQYTRMEDWLTAKLAYEGLPSKTYLSKTLAQYTSKTCSNCGFTITSADYDRVLEKLKKTATGWMTTINGKELKVEGQITYYNRYKRQNVVKDLSVELDRLSEESVNNDISSWDKGRSGEALSLLKKRFSHRPVQEKFVCLNCGFETHADEQAALNIARSWLFLRSQEYKKYQTNKTTGNTDKRAFVETWQSFYRKKLKEVWKPAV

SEQ ID NO: 39957 - protein, 978 aa, synthetic construct
  REGION 1..978: note = engineered CasX variant
QEIKRINKIRRRLVKDSNTKKAGKTGPMKTLLVRVMTPDLRERLENLRKKPENIPQPISNTSRANLNKLLTDYTEMKKAILHVYWEEFQVDPVGLMSRVAQPASKKIDQNKLKPEMDEKGNLTTAGFACSQCGQPLFVYKLEQVSEKGKAYTNYFGRCNVAEHEKLILLSQLKPEKDSDEAVTYSLGKFGQRALDFYSIHVTKESTHPVKPLAQIAGNRYASGPVGKALRDACMGTIASFLSKYQDIIIEHQKVVKGNQKRLESLRELAGKENLEYPSVTLPPQPHTKEGVDAYNEVIARVRMWVNLNLWQKLKLSRDDAKPLLRLKGFPSFPLVERQANEVDWWDMVCNVKKLINEKKEDGKVFWQNLAGYKRQEALRPYLSSEEDRKKGKKFARYQLGDLLLHLEKKHGEDWGKVYDEAWERIDKKVEGLSKHIKLEEERRSEDAQSKAALTDWLRAKASFVIEGLKEADKDEFCRCELKLQKWYGDLRGKPFAIEAENSILDISGFSKQYNCAFIWQKDGVKKLNLYLIINYFKGGKLRFKKIKPEAFEANRFYTVINKKSGEIVPMEVNFNFDDPNLIILPLAFGKRQGREFIWNDLLSLETGSLKLANGRVIEKTLYNRRTRQDEPALFVALTFERREVLDSSNIKPMNLIGVDRGENIPAVIALTDPEGCPLSRFKDSLGNPTHILRIGESYKEKQRTIQAKKEVEQRRAGGYSRKYASKAKNLADDMVRNTARDLLYYAVTQDAMLIFENLSRGFGRQGKRTFMAERQYTRMEDWLTAKLAYEGLPSKTYLSKTLAQYTSKTCSNCGFTITSADYDRVLEKLKKTATGWMTTINGKELKVEGQITYYNRYKRQNVVKDLSVELDRLSEESVNNDISSWTKGRSGEALSLLKKRFSHRPVQEKFVCLNCGFETHADEQAALNIARSWLFLRSQEYKKYQTNKTTGNTDKRAFVETWQSFYRKKLKEVWKPAV

SEQ ID NO: 39958 - protein, 978 aa, synthetic construct
  REGION 1..978: note = engineered CasX variant
QEIKRLNKIRRRLVKDSNTKKAGKTGPMKTLLVRVMTPDLRERLENLRKKPENIPQPISNTSRANLNKLLTDYTEMKKAILHVYWEEFQKDPVGLMSRVAQPASKKIDQNKLKPEMDEKGNLTTAGFACSQCGQPLFVYKLEQVSEKGKAYTNYFGRCNVAEHEKLILLSQLKPEKDSDEAVTYSLGKFGQRALDFYSIHVTKESTHPVKPLAQIAGNRYASGPVGKALRDACMGTIASFLSKYQDIIIEHQKVVKGNQKRLESLRELAGKENLEYPSVTLPPQPHTKEGVDAYNEVIARVRMWVNLNLWQKLKLSRDDAKPLLRLKGFPSFPLVERQANEVDWWDMVCNVKKLINEKKEDGKVFWQNLAGYKRQEALRPYLSSEEDRKKGKKFARYQLGDLLLHLEKKHGEDWGKVYDEAWERIDKKVEGLSKHIKLEEERRSEDAQSKAALTDWLRAKASFVIEGLKEADKDEFCRCELKLQKWYGDLRGKPFAIEAENSILDISGFSKQYNCAFIWQKDGVKKLNLYLIINYFKGGKLRFKKIKPEAFEANRFYTVINKKSGEIVPMEVNFNFDDPNLIILPLAFGKRQGREFIWNDLLSLETGSLKLANGRVIEKTLYNRRTRQDEPALFVALTFERREVLDSSNIKPMNLIGVDRGENIPAVIALTDPEGCPLSRFKDSLGNPTHILRIGESYKEKQRTIQAKKEVEQRRAGGYSRKYASKAKNLADDMVRNTARDLLYYAVTQDAMLIFENLSRGFGRQGKRTFMAERQYTRMEDWLTAKLAYEGLPSKTYLSKTLAQYTSKTCSNCGFTITSADYDRVLEKLKKTATGWMTTINGKELKVEGQITYYNRYKRQNVVKDLSVELDRLSEESVNNDISSWTKGRSGEALSLLKKRFSHRPVQEKFVCLNCGFETHADEQAALNIARSWLFLRSQEYKKYQTNKTTGNTDKRAFVETWQSFYRKKLKEVWKPAV

SEQ ID NO: 39959 - protein, 978 aa, synthetic construct
  REGION 1..978: note = engineered CasX variant
QEIKRINKIRRRLVKDSNTKKAGKTGPMKTLLVRVMTPDLRERLENLRKKPENIPQPISNTSRANLNKLLTDYTEMKKAILHVYWEEFQKDPVGLMSRVAQPASKKIDQNKLKPEMDEKGNLTTAGFACSQCGQPLFVYKLEQVSEKGKAYTNYVGRCNVAEHEKLILLSQLKPEKDSDEAVTYSLGKFGQRALDFYSIHVTKESTHPVKPLAQIAGNRYASGPVGKALRDACMGTIASFLSKYQDIIIEHQKVVKGNQKRLESLRELAGKENLEYPSVTLPPQPHTKEGVDAYNEVIARVRMWVNLNLWQKLKLSRDDAKPLLRLKGFPSFPLVERQANEVDWWDMVCNVKKLINEKKEDGKVFWQNLAGYKRQEALRPYLSSEEDRKKGKKFARYQLGDLLLHLEKKHGEDWGKVYDEAWERIDKKVEGLSKHIKLEEERRSEDAQSKAALTDWLRAKASFVIEGLKEADKDEFCRCELKLQKWYGDLRGKPFAIEAENSILDISGFSKQYNCAFIWQKDGVKKLNLYLIINYFKGGKLRFKKIKPEAFEANRFYTVINKKSGEIVPMEVNFNFDDPNLIILPLAFGKRQGREFIWNDLLSLETGSLKLANGRVIEKTLYNRRTRQDEPALFVALTFERREVLDSSNIKPMNLIGVDRGENIPAVIALTDPEGCPLSRFKDSLGNPTHILRIGESYKEKQRTIQAKKEVEQRRAGGYSRKYASKAKNLADDMVRNTARDLLYYAVTQDAMLIFENLSRGFGRQGKRTFMAERQYTRMEDWLTAKLAYEGLPSKTYLSKTLAQYTSKTCSNCGFTITSADYDRVLEKLKKTATGWMTTINGKELKVEGQITYYNRYKRQNVVKDLSVELDRLSEESVNNDISSWTKGRSGEALSLLKKRFSHRPVQEKFVCLNCGFETHADEQAALNIARSWLFLRSQEYKKYQTNKTTGNTDKRAFVETWQSFYRKKLKEVWKPAV

SEQ ID NO: 39960 - protein, 978 aa, synthetic construct
  REGION 1..978: note = engineered CasX variant
QEIKRINKIRRRLVKDSNTKKAGKTGPMKTLLVRVMTPDLRERLENLRKKPENIPQPISNTSRANLNKLLTDYTEMKKAILHVYWEEFQKDPVGLMSRVAQPASKKIDQNKLKPEMDEKGNLTTAGFACSQCGQPLFVYKLEQVSEKGKAYTNYFGRCNVAEHEKLILLSQLKPEKDSDEAVTYSLGKFGQRALDFYSIHVTKESTHPVKPLAQIAGNRYASGPVGKALRDACMGTIASFLSKYQDIIIEHQKVVKGNQKRLESLRELAGKENLEYPSVTLPPQPHTKEGVDAYNEVIARVRMWVNLNLWQKLKLSRDDAKPLLRLKGFPSFPLVERQANEVDWWDMVCNVKKLINEKKEDGKVFWQNLAGYKRQEALRPYLSSEEDRKKGKKFARYQLGDLLLHLEKKHGEDWGKVYDEAWERIDKKVEGLSKHIKLEEERRSEDAQSKAALTDWLRAKASFVIEGLKEADKDEFCRCELKLQKWYGDLRGKPFAIEAENSILDISGFSKQYNCAFIWQKDGVKKLNLYLIINYFKGGKLRFKKIKPEAFEANRFYTVINKKSGEIVPMEVNFNFDDPNLIILPLAFGKRQGREFIWNDLLSLETGSLKLANGRVIEKTLYNRRTRQDEPALFVALTFERREVLDSSNIKPMNLIGVDRGENIPAVIALTDPEGCPLSRFKDSLGNPTHILRIGESYKEKQRTIQAKKEVEQRRAGGYSRKYASKAKNLADDMVRNTARDLLYYAVTQDAMLIFENLSRGFGRQGKRTFMAERQYTRMEDWLTAKLAYEGLASKTYLSKTLAQYTSKTCSNCGFTITSADYDRVLEKLKKTATGWMTTINGKELKVEGQITYYNRYKRQNVVKDLSVELDRLSEESVNNDISSWTKGRSGEALSLLKKRFSHRPVQEKFVCLNCGFETHADEQAALNIARSWLFLRSQEYKKYQTNKTTGNTDKRAFVETWQSFYRKKLKEVWKPAV

SEQ ID NO: 39961 - protein, 978 aa, synthetic construct
  REGION 1..978: note = engineered CasX variant
QEIKRINKIRRRLVKDSNTKKAGKTGPMKTLLVRVMTPDLRERLENLRKKPENIPQPISNTSRANLNKLLTDYTEMKKAILHVYWEEFQKDPVGLMSRVAQPASKKIDQNKLKPEMDEKGNLTTAGFACSQCGQPLFVYKLEQVSEKGKAYTNYFGRCNVAEHEKLILLSQLKPEKDSDEAVTYSLGKFGQRALDFYSIHVTKESTHPVKPLAQIAGNRYASGPVGKALRDACMGTIASFLSKYQDIIIEHQKVVKGNQKRLESLRELAGKENLEYPSVTLPPQPHTKEGVDAYNEVIARVRMWVNLNLWQKLKLSRDDAKPLLRLKGFPSFPLVERQANEVDWWDMVCNVKKLINEKKEDGKVFWQNLAGYKRQEALRPYLSSEEDRKKGKKFARYQLGDLLLHLEKKHGEDWGKVYDEAWERIDKKVEGLSKHIKLEEERRSEDAQSKAALTDWLRAKASFVIEGLKEADKDEFCRCELKLQKWYGDLRGKPFAIEAENSILDISGFSKQYNCAFIWQKDGVKKLNLYLIINYFKGGKLRFKKIKPEAFEANRFYTVINKKSGEIVPMEVNFNFDDPNLIILPLAFGKRQGREFIWNDLLSLETGSLKLANGRVIEKTLYNRRTRQDEPALFVALTFERREVLDSSNIKPMNLIGVDRGENIPAVIALTDPEGCPLSRFKDSLGNPTHILRIGESYKEKQRTIQAKKEVEQRRAGGYSRKYASKAKNLADDMVRNTARDLLYYAVTQDAMLIFENLSRGFGRQGKRTFMAERQYTRMEDWLTAKLAYEGLPSKVYLSKTLAQYTSKTCSNCGFTITSADYDRVLEKLKKTATGWMTTINGKELKVEGQITYYNRYKRQNVVKDLSVELDRLSEESVNNDISSWTKGRSGEALSLLKKRFSHRPVQEKFVCLNCGFETHADEQAALNIARSWLFLRSQEYKKYQTNKTTGNTDKRAFVETWQSFYRKKLKEVWKPAV

SEQ ID NO: 39962 - protein, 979 aa, synthetic construct
  REGION 1..979: note = engineered CasX variant
QEIKRINKIRRRLVKDSNTKKAGKTGPMKTLLVRVMTPDLRERLENLRKKPENIPQPISNTSRANLNKLLTDYTEMKKAILHVYWEEFQKDPVGLMSRVAQPASKKIDQNKLKPEMDEKGNLTTAGFACSQCGQPLFVYKLEQVSEKGKAYTNYFGRCNVAEHEKLILLSQLKPEKDSDEAVTYSLGKFGQRALDFYSIHVTKESTHPVKPLAQIAGNRYASGPVGKALRDACMGTIASFLSKYQDIIIEHQKVVKGNQKRLESLRELAGKENLEYPSVTLPPQPHTKEGVDAYNEVIARVRMWVNLNLWQKLKLSRDDAKPLLRLKGFPSFPLVERQANEVDWWDMVCNVKKLINEKKEDGKVFWQNLAGYKRQEALRPYLSSEEDRKKGKKFARYQLGDLLLHLEKKHGEDWGKVYDEAWERIDKKVEGLSKHIKLEEERRSEDAQSKAALTDWLRAKASFVIEGLKEADKDEFCRCELKLQKWYGDLRGKPFAIEAENSILDISGFSKQYNCAFIWQKDGVKKLNLYLIINYFKGGKLRFKKIKPEAFEANRFYTVINKKSGEIVPMEVNFNFDDPNLIILPLAFGKRQGREFIWNDLLSLETGSLKLANGRVIEKTLYNRRTRQDEPALFVALTFERREVLDSSNIKPMNLIGVDRGENIPAVIALTDPEGCPLSRFKDSLGNPTHILRIGESYKEKQRTIQAKKEVEQRRAGGYSRKYASKAKNLADDMVRNTARDLLYYAVTQDAMLIFENLSRGFGRQGKRTFMAERQYTRMEDWLTAKLAYEGPLPSKTYLSKTLAQYTSKTCSNCGFTITSADYDRVLEKLKKTATGWMTTINGKELKVEGQITYYNRYKRQNVVKDLSVELDRLSEESVNNDISSWTKGRSGEALSLLKKRFSHRPVQEKFVCLNCGFETHADEQAALNIARSWLFLRSQEYKKYQTNKTTGNTDKRAFVETWQSFYRKKLKEVWKPAV

SEQ ID NO: 39963 - protein, 979 aa, synthetic construct
  REGION 1..979: note = engineered CasX variant
QEIKRINKIRRRLVKDSNTKKAGKTGPMKTLLVRVMTPDLRERLENLRKKPENIPQPISNTSRANLNKLLTDYTEMKKAILHVYWEEFQKDPVGLMSRVAQPASKKIDQNKLKPEMDEKGNLTTAGFACSQCGQPLFVYKLEQVSEKGKAYTNYFGRCNVAEHEKLILLSQLKPEKDSDEAVTYSLGKFGQRALDFYSIHVTKESTHPVKPLAQIAGNRYASGPVGKALRDACMGTIASFLSKYQDIIIEHQKVVKGNQKRLESLRELAGKENLEYPSVTLPPQPHTKEGVDAYNEVIARVRMWVNLNLWQKLKLSRDDAKPLLRLKGFPSFPLVERQANEVDWWDMVCNVKKLINEKKEDGKVFWQNLAGYKRQEALRPYLSSEEDVRKKGKKFARYQLGDLLLHLEKKHGEDWGKVYDEAWERIDKKVEGLSKHIKLEEERRSEDAQSKAALTDWLRAKASFVIEGLKEADKDEFCRCELKLQKWYGDLRGKPFAIEAENSILDISGFSKQYNCAFIWQKDGVKKLNLYLIINYFKGGKLRFKKIKPEAFEANRFYTVINKKSGEIVPMEVNFNFDDPNLIILPLAFGKRQGREFIWNDLLSLETGSLKLANGRVIEKTLYNRRTRQDEPALFVALTFERREVLDSSNIKPMNLIGVDRGENIPAVIALTDPEGCPLSRFKDSLGNPTHILRIGESYKEKQRTIQAKKEVEQRRAGGYSRKYASKAKNLADDMVRNTARDLLYYAVTQDAMLIFENLSRGFGRQGKRTFMAERQYTRMEDWLTAKLAYEGLPSKTYLSKTLAQYTSKTCSNCGFTITSADYDRVLEKLKKTATGWMTTINGKELKVEGQITYYNRYKRQNVVKDLSVELDRLSEESVNNDISSWTKGRSGEALSLLKKRFSHRPVQEKFVCLNCGFETHADEQAALNIARSWLFLRSQEYKKYQTNKTTGNTDKRAFVETWQSFYRKKLKEVWKPAV

SEQ ID NO: 39964 - protein, 978 aa, synthetic construct
  REGION 1..978: note = engineered CasX variant
QEIKRINKIRRRLVKDSNTKKAGKTGPMKTLLVRVMTPDLRERLENLRKKPENIPQPISNTSRANLNKLLTDYTEMKKAILHVYWEEFQKDPVGLMSRVAQPASKKIDQNKLKPEMDEKGNLTTAGFACSQCGQPLFVYKLEQVSEKGKAYTNYFGRCNVAEHEKLILLSQLKPEKDSDEAVTYSLGKFGQRALDFYSIHVTKESTHPVKPLAQIAGNRYASGPVGKALRDACMGTIASFLSKYQDIIIEHQKVVKGNQKRLESLRELAGKENLEYPSVTLPPQPHTKEGVDAYNEVIARVRMWVNLNLWQKLKLSRDDAKPLLRLKGFPSFPLVERQANEVDWWDMVCNVKKLINEKKEDGKVFWQNLAGYKRQEALRPYLSSEEDRKKGKKFARYQLGDLLLHLEKKHGEDWGKVYDEAWERIDKKVEGLSKHIKLEEERRSEDAQSKAALTDWLRAKASFVIEGLKEADKDEFCRCELKLQKWYGDLRGKPFAIEAENSILDISGFSKQYNCAFIWQKDGVKKLNLYLIINYFKGGKLRFKKIKPEAFEANRFYTVINKKSGEIVPMEVNFNFDDPNLIILPLAFGKRQGREFIWNDLLSLETGSLKLANGRVIEKTLYNRRTRQDEPALFVALTFERREVLDSSNIKPMNLIGVDRGENIPAVIALTDPEGCPLSRFKDSLGNPTHILRIGESYKEKQRTIQAKKEVEQRRAGGYSRKYASKAKNLADDMVRNTARDLLYYAVTQDAMLIFENLSRGFGRQGKRTFMAERQYTRMEDWLTAKLAYEGLPSKTYLSKTLAQYTSKTCSNCGFTITSADYDRMLEKLKKTATGWMTTINGKELKVEGQITYYNRYKRQNVVKDLSVELDRLSEESVNNDISSWTKGRSGEALSLLKKRFSHRPVQEKFVCLNCGFETHADEQAALNIARSWLFLRSQEYKKYQTNKTTGNTDKRAFVETWQSFYRKKLKEVWKPAV

SEQ ID NO: 39965 - protein, 978 aa, synthetic construct
  REGION 1..978: note = engineered CasX variant
QEIKRINKIRRRLVKDSNTKKAGKTGPMKTLLVRVMTPDLRERLENLRKKPENIPQPISNTSRANLNKLLTDYTEMKKAILHVYWEEFQKDPVGLMSRVAQPASKKIDQNKLKPEMDEKGNLTTAGFACSQCGQPLFVYKLEQVSEKGKAYTNYFGRCNVAEHEKLILLSQLKPEKDSDEAVTYSLGKFGQRALDFYSIHVTKESTHPVKPLAQIAGNRYASGPVGKALRDACMGTIASFLSKYQDIIIEHQKVVKGNQKRLESLRELAGKENLEYPSVTLPPQPHTKEGVDAYNEVIARVRMWVNLNLWQKLKLSRDDAKPLLRLKGFPSFPLVERQANEVDWWDMVCNVKKLINEKKEDGKVFWQNLAGYKRQEALRPYLSSEEDRKKGKKFARYQLGDLLLHLEKKHGEDWGKVYDEAWERIDKKVEGLSKHIKLEEERRSEDAQSKAALTDWLRAKASFVIEGLKEADKDEFCRCELKLQKWYGDLRGKPFAIEAENSILDISGFSKQYNCAFIWQKDGVKKLNLYLIINYFKGGKLRFKKIKPEAFEANRFYTVINKKSGEIVPMEVNFNFDDPNLIILPLAFGKRQGREFIWNDLLSLETGSLKLANGRVIEKTLYNRRTRQDEPALFVALTFERREVLDSSNIKPMNLIGVDRGENIPAVIALTDPEGCPLSRFKDSLGNPTHILRIGESYKEKQRTIQAKKEVEQRRAGGYSRKYASKAKNLADDMVRNTARDLLYYAVTQDAMLIFENLSRGFGRQGKRTFMAERQYTRMEDWLTAKLAYEGLPSKTYLSKTLAQYTSKTCSNCGFTITSADYDRVLEKLKKTATGWMTTINGKELKVEGQITYYNRYKRQNVVKDLSVELDRLSEESVNNDISSWTKGRQGEALSLLKKRFSHRPVQEKFVCLNCGFETHADEQAALNIARSWLFLRSQEYKKYQTNKTTGNTDKRAFVETWQSFYRKKLKEVWKPAV

SEQ ID NO: 39966 - protein, 978 aa, synthetic construct
  REGION 1..978: note = engineered CasX variant
QEIKRINKIRRRLVKDSNTKKAGKTGPMKTLLVRVMTPDLRERLENLRKKPENIPQPISNTSRANLNKLLTDYTEMKKAILHVYWEEFQKDPVGLMSRVAQPASKKIDQNKLKPEMDEKGNLTTAGFACSQCGQPLFVYKLEQVSEKGKAYTNYFGRCNVAEHEKLILLSQLKPEKDSDEAVTYSLGKFGQRALDFYSIHVTKESTHPVKPLAQIAGNRYASGPVGKALRDACMGTIASFLSKYQDIIIEHQKVVKGNQKRLESLRELAGKENLEYPSVTLPPQPHTKEGVDAYNEVIARVRMWVNLNLWQKLKLSRDDAKPLLRLKGFPSFPLVERQANEVDWWDMVCNVKKLINEKKEDGKVFWQNLAGYKRQEALRPYLSSEEDRKKGKKFARYQLGDLLLHLEKKHGEDWGKVYDEAWERIDKKVEGLSKHIKLEEERRSEDAQSKAALTDWLRAKASFVIEGLKEADKDEFCRCELKLQKWYGDLRGKPFAIEAENSILDISGFSKQYNCAFIWQKDGVKKLNLYLIINYFKGGKLRFKKIKPEAFEANRFYTVINKKSGEIVPMEVNFNFDDPNLIILPLAFGKRQGREFIWNDLLSLETGSLKLANGRVIEKTLYNRRTRQDEPALFVALTFERREVLDSSNIKPMNLIGVDRGENIPAVIALTDPEGCPLSRFKDSLGNPTHILRIGESYKEKQRTIQAKKEVEQRRAGGYSRKYASKAKNLADDMVRNTARDLLYYAVTQDAMLIFENLSRGFGRQGKRTFMAERQYTRMEDWLTAKLAYEGLPSKTYLSKTLAQYTSKTCSNCGFTITSADYDRVLEKLKKTATGWMTTINGKELKVEGQITYYNRYKRQNVVKDLSVELDRLSEESVNNDISSWTKGRSGEALSLLKKRFSHRPVQEKFVCLNCEFETHADEQAALNIARSWLFLRSQEYKKYQTNKTTGNTDKRAFVETWQSFYRKKLKEVWKPAV

SEQ ID NO: 39967 - protein, 979 aa, synthetic construct
  REGION 1..979: note = engineered CasX variant
QEIKRINKIRRRLVKDSNTKKAGKTGPMKTLLVRVMTPDLRERLENLRKKPENIPQPISNTSRANLNKLLTDYTEMKKAILHVYWEEFQKDPVGLMSRVAQPASKKIDQNKLKPEMDEKGNLTTAGFACSQCGQPLFVYKLEQVSEKGKAYTNYFGRCNVAEHEKLILLSQLKPEKDSDEAVTYSLGKFGQRALDFYSIHVTKESTHPVKPLAQIAGNRYASGPVGKALRDACMGTIASFLSKYQDIIIEHQKVVKGNQKRLESLRELAGKENLEYPSVTLPPQPHTKEGVDAYNEVIARVRMWVNLNLWQKLKLSRDDAKPLLRLKGFPSFPLVERQANEVDWWDMVCNVKKLINEKKEDGKVFWQNLAGYKRQEALRPYLSSEEDRKKGKKFARYQLGDLLLHLEKKHGEDWGKVYDEAWERIDKKVEGLSKHIKLEEERRSEDAQSKAALTDWLRAKASFVIEGLKEADKDEFCRCELKLQKWYGDLRGKPFAIEAENSILDISGFSKQYNCAFIWQKDGVKKLNLYLIINYFKGGKLRFKKIKPEAFEANRFYTVINKKSGEIVPMEVNFNFDDPNLIILPLAFGKRQGREFIWNDLLSLETGSLKLANGRVIEKTLYNRRTRQDEPALFVALTFERREVLDSSNIKPMNLIGVDRGENIPAVIALTDPEGCPLSRFKDSLGNPTHILRIGESYKEKQRTIQAKKEVEQRRAGGYSRKYASKAKNLADDMVRNTARDLLYYAVTQDAMLIFENLSRGFGRQGKRTFMAERQYTRMEDWLTAKLAYEGLPSKTYLSKTLAQYTSKTCSNCGFTITSADYDRVLEKLKKTATGWMTTINGKELKVEGQITYYNRYKRQNVVKDLSVELDRLSEESVNNDISSWTKGRSGEALSLLKKRFSHRPVQEKFVCLNCGFETHADEQAALNIARSWLFLRSQEYKKYQTNKTSTGNTDKRAFVETWQSFYRKKLKEVWKPAV

SEQ ID NO: 39968 - protein, 979 aa, synthetic construct
  REGION 1..979: note = engineered CasX variant
QEIKRINKIRRRLVKDSNTKKAGKTGPMKTLLVRVMTPDLRERLENLRKKPENIPQPISNTSRANLNKLLTDYTEMKKAILHVYWEEFQKDPVGLMSRVAQPASKKIDQNKLKPEMDEKGNLTTAGFACSQCGQPLFVYKLEQVSEKGKAYTNYFGRCNVAEHEKLILLSQLKPEKDSDEAVTYSLGKFGQRALDFYSIHVTKESTHPVKPLAQIAGNRYASGPVGKALRDACMGTIASFLSKYQDIIIEHQKVVKGNQKRLESLRELAGKENLEYPSVTLPPQPHTKEGVDAYNEVIARVRMWVNLNLWQKLKLSRDDAKPLLRLKGFPSFPLVERQANEVDWWDMVCNVKKLINEKKEDGKVFWQNLAGYKRQEALRPYLSSEEDRKKGKKFARYQLGDLLLHLEKKHGEDWGKVYDEAWERIDKKVEGLSKHIKLEEERRSEDAQSKAALTDWLRAKASFVIEGLKEADKDEFCRCELKLQKWYGDLRGKPFAIEAENSILDISGFSKQYNCAFIWQKDGVKKLNLYLIINYFKGGKLRFKKIKPEAFEANRFYTVINKKSGEIVPMEVNFNFDDPNLIILPLAFGKRQGREFIWNDLLSLETGSLKLANGRVIEKTLYNRRTRQDEPALFVALTFERREVLDSSNIKPMNLIGVDRGENIPAVIALTDPEGCPLSRFKDSLGNPTHILRIGESYKEKQRTIQAKKEVEQRRAGGYSRKYASKAKNLADDMVRNTARDLLYYAVTQDAMLIFENLSRGFGRQGKRTFMAERQYTRMEDWLTAKLAYEGLPSKTYLSKTLAQYTSKTCSNCGFTITSADYDRVLEKLKKTATGWMTTINGKELKVEGQITYYNRYKRQNVVKDLSVELDRLSEESVNNDISSWTKGRSGEALSLLKKRFSHRPVQEKFVCLNCGFETHADEQAALNIARSWLFLRSQEYKKYQTNKTTGKNTDKRAFVETWQSFYRKKLKEVWKPAV

SEQ ID NO: 39969 - protein, 978 aa, synthetic construct
  REGION 1..978: note = engineered CasX variant
QEIKRINKIRRRLVKDSNTKKAGKTGPMKTLLVRVMTPDLRERLENLRKKPENIPQPISNTSRANLNKLLTDYTEMKKAILHVYWEEFQKDPVGLMSRVAQPASKKIDQNKLKPEMDEKGNLTTAGFACSQCGQPLFVYKLEQVSEKGKAYTNYFGRCNVAEHEKLILLSQLKPEKDSDEAVTYSLGKFGQRALDFYSIHVTKESTHPVKPLAQIAGNRYASGPVGKALRDACMGTIASFLSKYQDIIIEHQKVVKGNQKRLESLRELAGKENLEYPSVTLPPQPHTKEGVDAYNEVIARVRMWVNLNLWQKLKLSRDDAKPLLRLKKFPSFPLVERQANEVDWWDMVCNVKKLINEKKEDGKVFWQNLAGYKRQEALRPYLSSEEDRKKGKKFARYQLGDLLLHLEKKHGEDWGKVYDEAWERIDKKVEGLSKHIKLEEERRSEDAQSKAALTDWLRAKASFVIEGLKEADKDEFCRCELKLQKWYGDLRGKPFAIEAENSILDISGFSKQYNCAFIWQKDGVKKLNLYLIINYFKGGKLRFKKIKPEAFEANRFYTVINKKSGEIVPMEVNFNFDDPNLIILPLAFGKRQGREFIWNDLLSLETGSLKLANGRVIEKTLYNRRTRQDEPALFVALTFERREVLDSSNIKPMNLIGVDRGENIPAVIALTDPEGCPLSRFKDSLGNPTHILRIGESYKEKQRTIQAKKEVEQRRAGGYSRKYASKAKNLADDMVRNTARDLLYYAVTQDAMLIFENLSRGFGRQGKRTFMAERQYTRMEDWLTAKLAYEGLPSKTYLSKTLAQYTSKTCSNCGFTITSADYDRVLEKLKKTATGWMTTINGKELKVEGQITYYNRYKRQNVVKDLSVELDRLSEESVNNDISSWTKGRSGEALSLLKKRFSHRPVQEKFVCLNCGFETHADEQAALNIARSWLFLRSQEYKKYQTNKTTGNTDKRAFVETWQSFYRKKLKEVWKPAV

SEQ ID NO: 39970 - protein, 978 aa, synthetic construct
  REGION 1..978: note = engineered CasX variant
QEIKRINKIRRRLVKDSNTKKAGKTGPMKTLLVRVMTPDLRERLENLRKKPENIPQPISNTSRANLNKLLTDYTEMKKAILHVYWEEFQKDPVGLMSRVAQPASKKIDQNKLKPEMDEKGNLTTAGFACSQCGQPLFVYKLEQVSEKGKAYTNYFGRCNVAEHEKLILLSQLKPEKDSDEAVTYSLGKFGQRALDFYSIHVTKESTHPVKPLAQIAGNRYASGPVGKALRDACMGTIASFLSKYQDIIIEHQKVVKGNQKRLESLRELAGKENLEYPSVTLPPQPHTKEGVDAYNEVIARVRMWVNLNLWQKLKLSRDDAKPLLRLKGFPSFPLVERQANEVDWWDMVCNVKKLINEKKEDGKVFWQNLAGYKRQEALRPYLSSEEDRKKGKKFARYQLGDLLLHLEKKHGEDWGKVYDEAWERIDKKVEGLSKHIKLEEERRSEDAQSKAALTDWLRAKASFVIEGLKEADKDEFCRCELKLQKWYGDLRGKPFAIEAENSILDISGFSKQYNCAFIWQKDGVKKLNLYLIINYFKGGKLRFKKIKPEAFEANRFYTVINKKSGEIVPMEVNFNFDDPNLIILPLAFGKRQGREFIWNDLLSLETGSLKLANGRVIEKTLYNRRTRQDEPALFVALTFERREVLDSSNIKPMNLIGVDRGENIPAVIALTDPEGCPLSRFKDSLGNPTHILRIGERYKEKQRTIQAKKEVEQRRAGGYSRKYASKAKNLADDMVRNTARDLLYYAVTQDAMLIFENLSRGFGRQGKRTFMAERQYTRMEDWLTAKLAYEGLPSKTYLSKTLAQYTSKTCSNCGFTITSADYDRVLEKLKKTATGWMTTINGKELKVEGQITYYNRYKRQNVVKDLSVELDRLSEESVNNDISSWTKGRSGEALSLLKKRFSHRPVQEKFVCLNCGFETHADEQAALNIARSWLFLRSQEYKKYQTNKTTGNTDKRAFVETWQSFYRKKLKEVWKPAV

SEQ ID NO: 39971 - protein, 978 aa, synthetic construct
  REGION 1..978: note = engineered CasX variant
QEIKRINKIRRRLVKDSNTKKAGKTGPMKTLLVRVMTPDLRERLENLRKKPENIPQPISNTSRANLNKLLTDYTEMKKAILHVYWEEFQKDPVGLMSRVAQPASKKIDQNKLKPEMDEKGNLTTAGFACSQCGQPLFVYKLEQVSEKGKAYTNYFGRCNVAEHEKLILLSQLKPEKDSDEAVTYSLGKFGQRALDFYSIHVTKESTHPVKPLAQIAGNRYASGPVGKALRDACMGTIASFLSKYQDIIIEHQKVVKGNQKRLESLRELAGKENLEYPSVTLPPQPHTKEGVDAYNEVIARVRMWVNLNLWQKLKLSRDDAKPLLRLKGFPSFPLVERQANEVDWWDMVCNVKKLINEKKEDGKVFWQNLAGYKRQEALRPYLSSEEDRKKGKKFARYQLGDLLLHLEKKHGEDWGKVYDEAWERIDKKVEGLSKHIKLEEERRSEDAQSKAALTDWLRAKASFVIEGLKEADKDEFCRCELKLQKWYGDLRGKPFAIEAENSILDISGFSKQYNCAFIWQKDGVKKLNLYLIINYFKGGKLRFKKIKPEAFEANRFYTVINKKSGEIVPMEVNFNFDDPNLIILPLAFGKRQGREFIWNDLLSLETGSLQLANGRVIEKTLYNRRTRQDEPALFVALTFERREVLDSSNIKPMNLIGVDRGENIPAVIALTDPEGCPLSRFKDSLGNPTHILRIGESYKEKQRTIQAKKEVEQRRAGGYSRKYASKAKNLADDMVRNTARDLLYYAVTQDAMLIFENLSRGFGRQGKRTFMAERQYTRMEDWLTAKLAYEGLPSKTYLSKTLAQYTSKTCSNCGFTITSADYDRVLEKLKKTATGWMTTINGKELKVEGQITYYNRYKRQNVVKDLSVELDRLSEESVNNDISSWTKGRSGEALSLLKKRFSHRPVQEKFVCLNCGFETHADEQAALNIARSWLFLRSQEYKKYQTNKTTGNTDKRAFVETWQSFYRKKLKEVWKPAV

SEQ ID NO: 39972 - protein, 977 aa, synthetic construct
  REGION 1..977: note = engineered CasX variant
QEIKRINKIRRRLVKDSNTKKAGKTGPMKTLLVRVMTPDLRERLENLRKKPENIPQPISNTSRANLNKLLTDYTEMKKAILHVYWEEFQKDPVGLMSRVAQPASKKIDQNKLKPEMDEKGNLTTAGFACSQCGQPLFVYKLEQVSEKGKAYTNYFGRCNVAEHEKLILLAQLKPEKDSDEAVTYSLGKFGQRALDFYSIHVTKESTHPVKPLAQIAGNRYASPVGKALRDACMGTIASFLSKYQDIIIEHQKVVKGNQKRLESLRELAGKENLEYPSVTLPPQPHTSEGVDAYNEVIARVRMWVNLNLWQKLKLSRDDAKPLLRLKGFPSFPLVERQANEVDWWDMVCNVKKLINEKKEDGKVFWQNLAGYKRQEALRPYLSSEEDRKKGKKFARYQLGDLLLHLEKKHGEDWGKVYDEAWERIDKKVEGLSKHIKLEEERRSEDAQSKAALTDWLRAKASFVIEGLKEADKDEFCRCELKLQKWYGDLRGKPFAIEAENSILDISGFSKQYNCAFIWQKDGVKKLNLYLIINYFKGGKLRFKKIKPEAFEANRFYTVINKKSGEIVPMEVNFNFDDPNLIILPLAFGKRQGREFIWNDLLSLETGSLKLANGRVIEKTLYNRRTRQDEPALFVALTFERREVLDSSNIKPMNLIGVDRGENIPAVIALTDPEGCPLSRFKDSLGNPTHILRIGESYKEKQRTIQAKKEVEQRRAGGYSRKYASKAKNLADDMVRNTARDLLYYAVTQDAMLIFENLSRGFGRQGKRTFMAERQYTRMEDWLTAKLAYEGLPSKTYLSKTLAQYTSKTCSNCGFTITSADYDRVLEKLKKTATGWMTTINGKELKVEGQITYYNRYKRQNVVKDLSVELDRLSEESVNNDISSWTKGRSGEALSLLKKRFSHRPVQEKFVCLNCGFETHADEQAALNIARSWLFLRSQEYKKYQTNKTTGNTDKRAFVETWQSFYRKKLKEVWKPAV

SEQ ID NO: 39973 - protein, 977 aa, synthetic construct
  REGION 1..977: note = engineered CasX variant
QEIKRINKIRRRLVKDSNTKKAGKTGPMKTLLVRVMTPDLRERLENLRKKPENIPQPISNTSRANLNKLLTDYTEMKKAILHVYWEEFQKDPVGLMSRVAQPASKKIDQNKLKPEMDEKGNLTTAGFACSQCGQPLFVYKLEQVSEKGKAYTNYFGRCNVAEHEKLILLAQLKPEKDSDEAVTYSLGKFGQRALDFYSIHVTKESTHPVKPLAQIAGNRYASPVGKALRDACMGTIASFLSKYQDIIIEHQKVVKGNQKRLESLRELAGKENLEYPSVTLPPQPHTKEGLDAYNEVIARVRMWVNLNLWQKLKLSRDDAKPLLRLKGFPSFPLVERQANEVDWWDMVCNVKKLINEKKEDGKVFWQNLAGYKRQEALRPYLSSEEDRKKGKKFARYQLGDLLLHLEKKHGEDWGKVYDEAWERIDKKVEGLSKHIKLEEERRSEDAQSKAALTDWLRAKASFVIEGLKEADKDEFCRCELKLQKWYGDLRGKPFAIEAENSILDISGFSKQYNCAFIWQKDGVKKLNLYLIINYFKGGKLRFKKIKPEAFEANRFYTVINKKSGEIVPMEVNFNFDDPNLIILPLAFGKRQGREFIWNDLLSLETGSLKLANGRVIEKTLYNRRTRQDEPALFVALTFERREVLDSSNIKPMNLIGVDRGENIPAVIALTDPEGCPLSRFKDSLGNPTHILRIGESYKEKQRTIQAKKEVEQRRAGGYSRKYASKAKNLADDMVRNTARDLLYYAVTQDAMLIFENLSRGFGRQGKRTFMAERQYTRMEDWLTAKLAYEGLPSKTYLSKTLAQYTSKTCSNCGFTITSADYDRVLEKLKKTATGWMTTINGKELKVEGQITYYNRYKRQNVVKDLSVELDRLSEESVNNDISSWTKGRSGEALSLLKKRFSHRPVQEKFVCLNCGFETHADEQAALNIARSWLFLRSQEYKKYQTNKTTGNTDKRAFVETWQSFYRKKLKEVWKPAV

SEQ ID NO: 39974 - protein, 977 aa, synthetic construct
  REGION 1..977: note = engineered CasX variant
QEIKRINKIRRRLVKDSNTKKAGKTGPMKTLLVRVMTPDLRERLENLRKKPENIPQPISNTSRANLNKLLTDYTEMKKAILHVYWEEFQKDPVGLMSRVAQPASKKIDQNKLKPEMDEKGNLTTAGFACSQCGQPLFVYKLEQVSEKGKAYTNYFGRCNVAEHEKLILLAQLKPEKDSDEAVTYSLGKFGQRALDFYSIHVTKESTHPVKPLAQIAGNRYASPVGKALRDACMGTIASFLSKYQDIIIEHQKVVKGNQKRLESLRELAGKENLEYPSVTLPPQPHTKEGVDAYNEVIARVRTWVNLNLWQKLKLSRDDAKPLLRLKGFPSFPLVERQANEVDWWDMVCNVKKLINEKKEDGKVFWQNLAGYKRQEALRPYLSSEEDRKKGKKFARYQLGDLLLHLEKKHGEDWGKVYDEAWERIDKKVEGLSKHIKLEEERRSEDAQSKAALTDWLRAKASFVIEGLKEADKDEFCRCELKLQKWYGDLRGKPFAIEAENSILDISGFSKQYNCAFIWQKDGVKKLNLYLIINYFKGGKLRFKKIKPEAFEANRFYTVINKKSGEIVPMEVNFNFDDPNLIILPLAFGKRQGREFIWNDLLSLETGSLKLANGRVIEKTLYNRRTRQDEPALFVALTFERREVLDSSNIKPMNLIGVDRGENIPAVIALTDPEGCPLSRFKDSLGNPTHILRIGESYKEKQRTIQAKKEVEQRRAGGYSRKYASKAKNLADDMVRNTARDLLYYAVTQDAMLIFENLSRGFGRQGKRTFMAERQYTRMEDWLTAKLAYEGLPSKTYLSKTLAQYTSKTCSNCGFTITSADYDRVLEKLKKTATGWMTTINGKELKVEGQITYYNRYKRQNVVKDLSVELDRLSEESVNNDISSWTKGRSGEALSLLKKRFSHRPVQEKFVCLNCGFETHADEQAALNIARSWLFLRSQEYKKYQTNKTTGNTDKRAFVETWQSFYRKKLKEVWKPAV

SEQ ID NO: 39975 - protein, 977 aa, synthetic construct
  REGION 1..977: note = engineered CasX variant
QEIKRINKIRRRLVKDSNTKKAGKTGPMKTLLVRVMTPDLRERLENLRKKPENIPQPISNTSRANLNKLLTDYTEMKKAILHVYWEEFQKDPVGLMSRVAQPASKKIDQNKLKPEMDEKGNLTTAGFACSQCGQPLFVYKLEQVSEKGKAYTNYFGRCNVAEHEKLILLAQLKPEKDSDEAVTYSLGKFGQRALDFYSIHVTKESTHPVKPLAQIAGNRYASPVGKALRDACMGTIASFLSKYQDIIIEHQKVVKGNQKRLESLRELAGKENLEYPSVTLPPQPHTKEGVDAYNEVIARVRWWVNLNLWQKLKLSRDDAKPLLRLKGFPSFPLVERQANEVDWWDMVCNVKKLINEKKEDGKVFWQNLAGYKRQEALRPYLSSEEDRKKGKKFARYQLGDLLLHLEKKHGEDWGKVYDEAWERIDKKVEGLSKHIKLEEERRSEDAQSKAALTDWLRAKASFVIEGLKEADKDEFCRCELKLQKWYGDLRGKPFAIEAENSILDISGFSKQYNCAFIWQKDGVKKLNLYLIINYFKGGKLRFKKIKPEAFEANRFYTVINKKSGEIVPMEVNFNFDDPNLIILPLAFGKRQGREFIWNDLLSLETGSLKLANGRVIEKTLYNRRTRQDEPALFVALTFERREVLDSSNIKPMNLIGVDRGENIPAVIALTDPEGCPLSRFKDSLGNPTHILRIGESYKEKQRTIQAKKEVEQRRAGGYSRKYASKAKNLADDMVRNTARDLLYYAVTQDAMLIFENLSRGFGRQGKRTFMAERQYTRMEDWLTAKLAYEGLPSKTYLSKTLAQYTSKTCSNCGFTITSADYDRVLEKLKKTATGWMTTINGKELKVEGQITYYNRYKRQNVVKDLSVELDRLSEESVNNDISSWTKGRSGEALSLLKKRFSHRPVQEKFVCLNCGFETHADEQAALNIARSWLFLRSQEYKKYQTNKTTGNTDKRAFVETWQSFYRKKLKEVWKPAV

SEQ ID NO: 39976 - protein, 978 aa, synthetic construct
  REGION 1..978: note = engineered CasX variant
QEIKRINKIRRRLVKDSNTKKAGKTGPMKTLLVRVMTPDLRERLENLRKKPENIPQPISNTSRANLNKLLTDYTEMKKAILHVYWEEFQKDPVGLMSRVAQPASKKIDQNKLKPEMDEKGNLTTAGFACSQCGQPLFVYKLEQVSEKGKAYTNYFGRCNVAEHEKLILLAQLKPEKDSDEAVTYSLGKFGQRALDFYSIHVTKESTHPVKPLAQIAGNRYASPVGKALRDACMGTIASFLSKYQDIIIEHQKVVKGNQKRLESLRELAGKENLEYPSVTLPPQPHTKEGVDAYNEVIARVRMWVNLNLWQKLKLSRDDAKPLLRLKGFPSFPLVERQQANEVDWWDMVCNVKKLINEKKEDGKVFWQNLAGYKRQEALRPYLSSEEDRKKGKKFARYQLGDLLLHLEKKHGEDWGKVYDEAWERIDKKVEGLSKHIKLEEERRSEDAQSKAALTDWLRAKASFVIEGLKEADKDEFCRCELKLQKWYGDLRGKPFAIEAENSILDISGFSKQYNCAFIWQKDGVKKLNLYLIINYFKGGKLRFKKIKPEAFEANRFYTVINKKSGEIVPMEVNFNFDDPNLIILPLAFGKRQGREFIWNDLLSLETGSLKLANGRVIEKTLYNRRTRQDEPALFVALTFERREVLDSSNIKPMNLIGVDRGENIPAVIALTDPEGCPLSRFKDSLGNPTHILRIGESYKEKQRTIQAKKEVEQRRAGGYSRKYASKAKNLADDMVRNTARDLLYYAVTQDAMLIFENLSRGFGRQGKRTFMAERQYTRMEDWLTAKLAYEGLPSKTYLSKTLAQYTSKTCSNCGFTITSADYDRVLEKLKKTATGWMTTINGKELKVEGQITYYNRYKRQNVVKDLSVELDRLSEESVNNDISSWTKGRSGEALSLLKKRFSHRPVQEKFVCLNCGFETHADEQAALNIARSWLFLRSQEYKKYQTNKTTGNTDKRAFVETWQSFYRKKLKEVWKPAV

SEQ ID NO: 39977 - protein, 978 aa, synthetic construct
  REGION 1..978: note = engineered CasX variant
QEIKRINKIRRRLVKDSNTKKAGKTGPMKTLLVRVMTPDLRERLENLRKKPENIPQPISNTSRANLNKLLTDYTEMKKAILHVYWEEFQKDPVGLMSRVAQPASKKIDQNKLKPEMDEKGNLTTAGFACSQCGQPLFVYKLEQVSEKGKAYTNYFGRCNVAEHEKLILLAQLKPEKDSDEAVTYSLGKFGQRALDFYSIHVTKESTHPVKPLAQIAGNRYASPVGKALRDACMGTIASFLSKYQDIIIEHQKVVKGNQKRLESLRELAGKENLEYPSVTLPPQPHTKEGVDAYNEVIARVRMWVNLNLWQKLKLSRDDAKPLLRLKGFPSFPLVERQANAEVDWWDMVCNVKKLINEKKEDGKVFWQNLAGYKRQEALRPYLSSEEDRKKGKKFARYQLGDLLLHLEKKHGEDWGKVYDEAWERIDKKVEGLSKHIKLEEERRSEDAQSKAALTDWLRAKASFVIEGLKEADKDEFCRCELKLQKWYGDLRGKPFAIEAENSILDISGFSKQYNCAFIWQKDGVKKLNLYLIINYFKGGKLRFKKIKPEAFEANRFYTVINKKSGEIVPMEVNFNFDDPNLIILPLAFGKRQGREFIWNDLLSLETGSLKLANGRVIEKTLYNRRTRQDEPALFVALTFERREVLDSSNIKPMNLIGVDRGENIPAVIALTDPEGCPLSRFKDSLGNPTHILRIGESYKEKQRTIQAKKEVEQRRAGGYSRKYASKAKNLADDMVRNTARDLLYYAVTQDAMLIFENLSRGFGRQGKRTFMAERQYTRMEDWLTAKLAYEGLPSKTYLSKTLAQYTSKTCSNCGFTITSADYDRVLEKLKKTATGWMTTINGKELKVEGQITYYNRYKRQNVVKDLSVELDRLSEESVNNDISSWTKGRSGEALSLLKKRFSHRPVQEKFVCLNCGFETHADEQAALNIARSWLFLRSQEYKKYQTNKTTGNTDKRAFVETWQSFYRKKLKEVWKPAV

SEQ ID NO: 39978 - protein, 977 aa, synthetic construct
  REGION 1..977: note = engineered CasX variant
QEIKRINKIRRRLVKDSNTKKAGKTGPMKTLLVRVMTPDLRERLENLRKKPENIPQPISNTSRANLNKLLTDYTEMKKAILHVYWEEFQKDPVGLMSRVAQPASKKIDQNKLKPEMDEKGNLTTAGFACSQCGQPLFVYKLEQVSEKGKAYTNYFGRCNVAEHEKLILLAQLKPEKDSDEAVTYSLGKFGQRALDFYSIHVTKESTHPVKPLAQIAGNRYASPVGKALRDACMGTIASFLSKYQDIIIEHQKVVKGNQKRLESLRELAGKENLEYPSVTLPPQPHTKEGVDAYNEVIARVRMWVNLNLWQKLKLSRDDAKPLLRLKGFPSFPLVERQANEVDWWDMVCNVKKLINEKKEDGKVFWQNLAGYKRQEALRPYLSSEEDRKKGKKFARTQLGDLLLHLEKKHGEDWGKVYDEAWERIDKKVEGLSKHIKLEEERRSEDAQSKAALTDWLRAKASFVIEGLKEADKDEFCRCELKLQKWYGDLRGKPFAIEAENSILDISGFSKQYNCAFIWQKDGVKKLNLYLIINYFKGGKLRFKKIKPEAFEANRFYTVINKKSGEIVPMEVNFNFDDPNLIILPLAFGKRQGREFIWNDLLSLETGSLKLANGRVIEKTLYNRRTRQDEPALFVALTFERREVLDSSNIKPMNLIGVDRGENIPAVIALTDPEGCPLSRFKDSLGNPTHILRIGESYKEKQRTIQAKKEVEQRRAGGYSRKYASKAKNLADDMVRNTARDLLYYAVTQDAMLIFENLSRGFGRQGKRTFMAERQYTRMEDWLTAKLAYEGLPSKTYLSKTLAQYTSKTCSNCGFTITSADYDRVLEKLKKTATGWMTTINGKELKVEGQITYYNRYKRQNVVKDLSVELDRLSEESVNNDISSWTKGRSGEALSLLKKRFSHRPVQEKFVCLNCGFETHADEQAALNIARSWLFLRSQEYKKYQTNKTTGNTDKRAFVETWQSFYRKKLKEVWKPAV

SEQ ID NO: 39979 - protein, 978 aa, synthetic construct
  REGION 1..978: note = engineered CasX variant
QEIKRINKIRRRLVKDSNTKKAGKTGPMKTLLVRVMTPDLRERLENLRKKPENIPQPISNTSRANLNKLLTDYTEMKKAILHVYWEEFQKDPVGLMSRVAQPASKKIDQNKLKPEMDEKGNLTTAGFACSQCGQPLFVYKLEQVSEKGKAYTNYFGRCNVAEHEKLILLAQLKPEKDSDEAVTYSLGKFGQRALDFYSIHVTKESTHPVKPLAQIAGNRYASPVGKALRDACMGTIASFLSKYQDIIIEHQKVVKGNQKRLESLRELAGKENLEYPSVTLPPQPHTKEGVDAYNEVIARVRMWVNLNLWQKLKLSRDDAKPLLRLKGFPSFPLVERQANEVDWWDMVCNVKKLINEKKEDGKVFWQNLAGYKRQEALRPYLSSEEDRKKGKKFARYQLGDLLLHLEKKHEGEDWGKVYDEAWERIDKKVEGLSKHIKLEEERRSEDAQSKAALTDWLRAKASFVIEGLKEADKDEFCRCELKLQKWYGDLRGKPFAIEAENSILDISGFSKQYNCAFIWQKDGVKKLNLYLIINYFKGGKLRFKKIKPEAFEANRFYTVINKKSGEIVPMEVNFNFDDPNLIILPLAFGKRQGREFIWNDLLSLETGSLKLANGRVIEKTLYNRRTRQDEPALFVALTFERREVLDSSNIKPMNLIGVDRGENIPAVIALTDPEGCPLSRFKDSLGNPTHILRIGESYKEKQRTIQAKKEVEQRRAGGYSRKYASKAKNLADDMVRNTARDLLYYAVTQDAMLIFENLSRGFGRQGKRTFMAERQYTRMEDWLTAKLAYEGLPSKTYLSKTLAQYTSKTCSNCGFTITSADYDRVLEKLKKTATGWMTTINGKELKVEGQITYYNRYKRQNVVKDLSVELDRLSEESVNNDISSWTKGRSGEALSLLKKRFSHRPVQEKFVCLNCGFETHADEQAALNIARSWLFLRSQEYKKYQTNKTTGNTDKRAFVETWQSFYRKKLKEVWKPAV

SEQ ID NO: 39980 - protein, 977 aa, synthetic construct
  REGION 1..977: note = engineered CasX variant
QEIKRINKIRRRLVKDSNTKKAGKTGPMKTLLVRVMTPDLRERLENLRKKPENIPQPISNTSRANLNKLLTDYTEMKKAILHVYWEEFQKDPVGLMSRVAQPASKKIDQNKLKPEMDEKGNLTTAGFACSQCGQPLFVYKLEQVSEKGKAYTNYFGRCNVAEHEKLILLAQLKPEKDSDEAVTYSLGKFGQRALDFYSIHVTKESTHPVKPLAQIAGNRYASPVGKALRDACMGTIASFLSKYQDIIIEHQKVVKGNQKRLESLRELAGKENLEYPSVTLPPQPHTKEGVDAYNEVIARVRMWVNLNLWQKLKLSRDDAKPLLRLKGFPSFPLVERQANEVDWWDMVCNVKKLINEKKEDGKVFWQNLAGYKRQEALRPYLSSEEDRKKGKKFARYQLGDLLLHLEKKHGEDWGKVYDEAWERIDKKVEGLSKHIKLEEERRSEDAQSKAALTDWLRAKASFVIEGLKEADKDEFCRCDLKLQKWYGDLRGKPFAIEAENSILDISGFSKQYNCAFIWQKDGVKKLNLYLIINYFKGGKLRFKKIKPEAFEANRFYTVINKKSGEIVPMEVNFNFDDPNLIILPLAFGKRQGREFIWNDLLSLETGSLKLANGRVIEKTLYNRRTRQDEPALFVALTFERREVLDSSNIKPMNLIGVDRGENIPAVIALTDPEGCPLSRFKDSLGNPTHILRIGESYKEKQRTIQAKKEVEQRRAGGYSRKYASKAKNLADDMVRNTARDLLYYAVTQDAMLIFENLSRGFGRQGKRTFMAERQYTRMEDWLTAKLAYEGLPSKTYLSKTLAQYTSKTCSNCGFTITSADYDRVLEKLKKTATGWMTTINGKELKVEGQITYYNRYKRQNVVKDLSVELDRLSEESVNNDISSWTKGRSGEALSLLKKRFSHRPVQEKFVCLNCGFETHADEQAALNIARSWLFLRSQEYKKYQTNKTTGNTDKRAFVETWQSFYRKKLKEVWKPAV

SEQ ID NO: 39981 - protein, 977 aa, synthetic construct
  REGION 1..977: note = engineered CasX variant
QEIKRINKIRRRLVKDSNTKKAGKTGPMKTLLVRVMTPDLRERLENLRKKPENIPQPISNTSRANLNKLLTDYTEMKKAILHVYWEEFQKDPVGLMSRVAQPASKKIDQNKLKPEMDEKGNLTTAGFACSQCGQPLFVYKLEQVSEKGKAYTNYFGRCNVAEHEKLILLAQLKPEKDSDEAVTYSLGKFGQRALDFYSIHVTKESTHPVKPLAQIAGNRYASPVGKALRDACMGTIASFLSKYQDIIIEHQKVVKGNQKRLESLRELAGKENLEYPSVTLPPQPHTKEGVDAYNEVIARVRMWVNLNLWQKLKLSRDDAKPLLRLKGFPSFPLVERQANEVDWWDMVCNVKKLINEKKEDGKVFWQNLAGYKRQEALRPYLSSEEDRKKGKKFARYQLGDLLLHLEKKHGEDWGKVYDEAWERIDKKVEGLSKHIKLEEERRSEDAQSKAALTDWLRAKASFVIEGLKEADKDEFCRCELKLQKWYGDLRGKPFAIEAENSILDISGFSKQYNCAFIWQKDGVKKLNLYLIINYFKGGKLRFKKIKPEAFEANRFYTVINKKSGEIVPMEVNFNFDDPNLIILPLAFGKRFGREFIWNDLLSLETGSLKLANGRVIEKTLYNRRTRQDEPALFVALTFERREVLDSSNIKPMNLIGVDRGENIPAVIALTDPEGCPLSRFKDSLGNPTHILRIGESYKEKQRTIQAKKEVEQRRAGGYSRKYASKAKNLADDMVRNTARDLLYYAVTQDAMLIFENLSRGFGRQGKRTFMAERQYTRMEDWLTAKLAYEGLPSKTYLSKTLAQYTSKTCSNCGFTITSADYDRVLEKLKKTATGWMTTINGKELKVEGQITYYNRYKRQNVVKDLSVELDRLSEESVNNDISSWTKGRSGEALSLLKKRFSHRPVQEKFVCLNCGFETHADEQAALNIARSWLFLRSQEYKKYQTNKTTGNTDKRAFVETWQSFYRKKLKEVWKPAV

SEQ ID NO: 39982 - protein, 977 aa, synthetic construct
  REGION 1..977: note = engineered CasX variant
QEIKRINKIRRRLVKDSNTKKAGKTGPMKTLLVRVMTPDLRERLENLRKKPENIPQPISNTSRANLNKLLTDYTEMKKAILHVYWEEFQKDPVGLMSRVAQPASKKIDQNKLKPEMDEKGNLTTAGFACSQCGQPLFVYKLEQVSEKGKAYTNYFGRCNVAEHEKLILLAQLKPEKDSDEAVTYSLGKFGQRALDFYSIHVTKESTHPVKPLAQIAGNRYASPVGKALRDACMGTIASFLSKYQDIIIEHQKVVKGNQKRLESLRELAGKENLEYPSVTLPPQPHTKEGVDAYNEVIARVRMWVNLNLWQKLKLSRDDAKPLLRLKGFPSFPLVERQANEVDWWDMVCNVKKLINEKKEDGKVFWQNLAGYKRQEALRPYLSSEEDRKKGKKFARYQLGDLLLHLEKKHGEDWGKVYDEAWERIDKKVEGLSKHIKLEEERRSEDAQSKAALTDWLRAKASFVIEGLKEADKDEFCRCELKLQKWYGDLRGKPFAIEAENSILDISGFSKQYNCAFIWQKDGVKKLNLYLIINYFKGGKLRFKKIKPEAFEANRFYTVINKKSGEIVPMEVNFNFDDPNLIILPLAFGKRVGREFIWNDLLSLETGSLKLANGRVIEKTLYNRRTRQDEPALFVALTFERREVLDSSNIKPMNLIGVDRGENIPAVIALTDPEGCPLSRFKDSLGNPTHILRIGESYKEKQRTIQAKKEVEQRRAGGYSRKYASKAKNLADDMVRNTARDLLYYAVTQDAMLIFENLSRGFGRQGKRTFMAERQYTRMEDWLTAKLAYEGLPSKTYLSKTLAQYTSKTCSNCGFTITSADYDRVLEKLKKTATGWMTTINGKELKVEGQITYYNRYKRQNVVKDLSVELDRLSEESVNNDISSWTKGRSGEALSLLKKRFSHRPVQEKFVCLNCGFETHADEQAALNIARSWLFLRSQEYKKYQTNKTTGNTDKRAFVETWQSFYRKKLKEVWKPAV

SEQ ID NO: 39983 - protein, 978 aa, synthetic construct
  REGION 1..978: note = engineered CasX variant
QEIKRINKIRRRLVKDSNTKKAGKTGPMKTLLVRVMTPDLRERLENLRKKPENIPQPISNTSRANLNKLLTDYTEMKKAILHVYWEEFQKDPVGLMSRVAQPASKKIDQNKLKPEMDEKGNLTTAGFACSQCGQPLFVYKLEQVSEKGKAYTNYFGRCNVAEHEKLILLAQLKPEKDSDEAVTYSLGKFGQRALDFYSIHVTKESTHPVKPLAQIAGNRYASPVGKALRDACMGTIASFLSKYQDIIIEHQKVVKGNQKRLESLRELAGKENLEYPSVTLPPQPHTKEGVDAYNEVIARVRMWVNLNLWQKLKLSRDDAKPLLRLKGFPSFPLVERQANEVDWWDMVCNVKKLINEKKEDGKVFWQNLAGYKRQEALRPYLSSEEDRKKGKKFARYQLGDLLLHLEKKHGEDWGKVYDEAWERIDKKVEGLSKHIKLEEERRSEDAQSKAALTDWLRAKASFVIEGLKEADKDEFCRCELKLQKWYGDLRGKPFAIEAENSILDISGFSKQYNCAFIWQKDGVKKLNLYLIINYFKGGKLRFKKIKPEAFEANRFYTVINKKSGEIVPMEVNFNFDDPNLIILPLAFGKRQGREFIWNDLLSLETGSLKLANGRVIEKTLYNRRTRQDEPALFVALTFERREVLDSSNIKTPMNLIGVDRGENIPAVIALTDPEGCPLSRFKDSLGNPTHILRIGESYKEKQRTIQAKKEVEQRRAGGYSRKYASKAKNLADDMVRNTARDLLYYAVTQDAMLIFENLSRGFGRQGKRTFMAERQYTRMEDWLTAKLAYEGLPSKTYLSKTLAQYTSKTCSNCGFTITSADYDRVLEKLKKTATGWMTTINGKELKVEGQITYYNRYKRQNVVKDLSVELDRLSEESVNNDISSWTKGRSGEALSLLKKRFSHRPVQEKFVCLNCGFETHADEQAALNIARSWLFLRSQEYKKYQTNKTTGNTDKRAFVETWQSFYRKKLKEVWKPAV

SEQ ID NO: 39984 - protein, 978 aa, synthetic construct
  REGION 1..978: note = engineered CasX variant
QEIKRINKIRRRLVKDSNTKKAGKTGPMKTLLVRVMTPDLRERLENLRKKPENIPQPISNTSRANLNKLLTDYTEMKKAILHVYWEEFQKDPVGLMSRVAQPASKKIDQNKLKPEMDEKGNLTTAGFACSQCGQPLFVYKLEQVSEKGKAYTNYFGRCNVAEHEKLILLAQLKPEKDSDEAVTYSLGKFGQRALDFYSIHVTKESTHPVKPLAQIAGNRYASPVGKALRDACMGTIASFLSKYQDIIIEHQKVVKGNQKRLESLRELAGKENLEYPSVTLPPQPHTKEGVDAYNEVIARVRMWVNLNLWQKLKLSRDDAKPLLRLKGFPSFPLVERQANEVDWWDMVCNVKKLINEKKEDGKVFWQNLAGYKRQEALRPYLSSEEDRKKGKKFARYQLGDLLLHLEKKHGEDWGKVYDEAWERIDKKVEGLSKHIKLEEERRSEDAQSKAALTDWLRAKASFVIEGLKEADKDEFCRCELKLQKWYGDLRGKPFAIEAENSILDISGFSKQYNCAFIWQKDGVKKLNLYLIINYFKGGKLRFKKIKPEAFEANRFYTVINKKSGEIVPMEVNFNFDDPNLIILPLAFGKRQGREFIWNDLLSLETGSLKLANGRVIEKTLYNRRTRQDEPALFVALTFERREVLDSSNIKPMSNLIGVDRGENIPAVIALTDPEGCPLSRFKDSLGNPTHILRIGESYKEKQRTIQAKKEVEQRRAGGYSRKYASKAKNLADDMVRNTARDLLYYAVTQDAMLIFENLSRGFGRQGKRTFMAERQYTRMEDWLTAKLAYEGLPSKTYLSKTLAQYTSKTCSNCGFTITSADYDRVLEKLKKTATGWMTTINGKELKVEGQITYYNRYKRQNVVKDLSVELDRLSEESVNNDISSWTKGRSGEALSLLKKRFSHRPVQEKFVCLNCGFETHADEQAALNIARSWLFLRSQEYKKYQTNKTTGNTDKRAFVETWQSFYRKKLKEVWKPAV

SEQ ID NO: 39985 - protein, 977 aa, synthetic construct
  REGION 1..977: note = engineered CasX variant
QEIKRINKIRRRLVKDSNTKKAGKTGPMKTLLVRVMTPDLRERLENLRKKPENIPQPISNTSRANLNKLLTDYTEMKKAILHVYWEEFQKDPVGLMSRVAQPASKKIDQNKLKPEMDEKGNLTTAGFACSQCGQPLFVYKLEQVSEKGKAYTNYFGRCNVAEHEKLILLAQLKPEKDSDEAVTYSLGKFGQRALDFYSIHVTKESTHPVKPLAQIAGNRYASPVGKALRDACMGTIASFLSKYQDIIIEHQKVVKGNQKRLESLRELAGKENLEYPSVTLPPQPHTKEGVDAYNEVIARVRMWVNLNLWQKLKLSRDDAKPLLRLKGFPSFPLVERQANEVDWWDMVCNVKKLINEKKEDGKVFWQNLAGYKRQEALRPYLSSEEDRKKGKKFARYQLGDLLLHLEKKHGEDWGKVYDEAWERIDKKVEGLSKHIKLEEERRSEDAQSKAALTDWLRAKASFVIEGLKEADKDEFCRCELKLQKWYGDLRGKPFAIEAENSILDISGFSKQYNCAFIWQKDGVKKLNLYLIINYFKGGKLRFKKIKPEAFEANRFYTVINKKSGEIVPMEVNFNFDDPNLIILPLAFGKRQGREFIWNDLLSLETGSLKLANGRVIEKTLYNRRTRQDEPALFVALTFERREVLDSSNIKPMNLIGVDRGENIPAVIALTDPEGCPLSRFKDSLGNPTHILRIRESYKEKQRTIQAKKEVEQRRAGGYSRKYASKAKNLADDMVRNTARDLLYYAVTQDAMLIFENLSRGFGRQGKRTFMAERQYTRMEDWLTAKLAYEGLPSKTYLSKTLAQYTSKTCSNCGFTITSADYDRVLEKLKKTATGWMTTINGKELKVEGQITYYNRYKRQNVVKDLSVELDRLSEESVNNDISSWTKGRSGEALSLLKKRFSHRPVQEKFVCLNCGFETHADEQAALNIARSWLFLRSQEYKKYQTNKTTGNTDKRAFVETWQSFYRKKLKEVWKPAV

SEQ ID NO: 39986 - protein, 977 aa, synthetic construct
  REGION 1..977: note = engineered CasX variant
QEIKRINKIRRRLVKDSNTKKAGKTGPMKTLLVRVMTPDLRERLENLRKKPENIPQPISNTSRANLNKLLTDYTEMKKAILHVYWEEFQKDPVGLMSRVAQPASKKIDQNKLKPEMDEKGNLTTAGFACSQCGQPLFVYKLEQVSEKGKAYTNYFGRCNVAEHEKLILLAQLKPEKDSDEAVTYSLGKFGQRALDFYSIHVTKESTHPVKPLAQIAGNRYASPVGKALRDACMGTIASFLSKYQDIIIEHQKVVKGNQKRLESLRELAGKENLEYPSVTLPPQPHTKEGVDAYNEVIARVRMWVNLNLWQKLKLSRDDAKPLLRLKGFPSFPLVERQANEVDWWDMVCNVKKLINEKKEDGKVFWQNLAGYKRQEALRPYLSSEEDRKKGKKFARYQLGDLLLHLEKKHGEDWGKVYDEAWERIDKKVEGLSKHIKLEEERRSEDAQSKAALTDWLRAKASFVIEGLKEADKDEFCRCELKLQKWYGDLRGKPFAIEAENSILDISGFSKQYNCAFIWQKDGVKKLNLYLIINYFKGGKLRFKKIKPEAFEANRFYTVINKKSGEIVPMEVNFNFDDPNLIILPLAFGKRQGREFIWNDLLSLETGSLKLANGRVIEKTLYNRRTRQDEPALFVALTFERREVLDSSNIKPMNLIGVDRGENIPAVIALTDPEGCPLSRFKDSLGNPTHILRIGESYKEKQRTIQAKKEVEQRRAGGYSRKYASKAKNLADDMVRNTARDLLYYAVTQDAMLIFENLSRGFGRQGKRTFSAERQYTRMEDWLTAKLAYEGLPSKTYLSKTLAQYTSKTCSNCGFTITSADYDRVLEKLKKTATGWMTTINGKELKVEGQITYYNRYKRQNVVKDLSVELDRLSEESVNNDISSWTKGRSGEALSLLKKRFSHRPVQEKFVCLNCGFETHADEQAALNIARSWLFLRSQEYKKYQTNKTTGNTDKRAFVETWQSFYRKKLKEVWKPAV

SEQ ID NO: 39987 - protein, 977 aa, synthetic construct
  REGION 1..977: note = engineered CasX variant
QEIKRINKIRRRLVKDSNTKKAGKTGPMKTLLVRVMTPDLRERLENLRKKPENIPQPISNTSRANLNKLLTDYTEMKKAILHVYWEEFQKDPVGLMSRVAQPASKKIDQNKLKPEMDEKGNLTTAGFACSQCGQPLFVYKLEQVSEKGKAYTNYFGRCNVAEHEKLILLAQLKPEKDSDEAVTYSLGKFGQRALDFYSIHVTKESTHPVKPLAQIAGNRYASPVGKALRDACMGTIASFLSKYQDIIIEHQKVVKGNQKRLESLRELAGKENLEYPSVTLPPQPHTKEGVDAYNEVIARVRMWVNLNLWQKLKLSRDDAKPLLRLKGFPSFPLVERQANEVDWWDMVCNVKKLINEKKEDGKVFWQNLAGYKRQEALRPYLSSEEDRKKGKKFARYQLGDLLLHLEKKHGEDWGKVYDEAWERIDKKVEGLSKHIKLEEERRSEDAQSKAALTDWLRAKASFVIEGLKEADKDEFCRCELKLQKWYGDLRGKPFAIEAENSILDISGFSKQYNCAFIWQKDGVKKLNLYLIINYFKGGKLRFKKIKPEAFEANRFYTVINKKSGEIVPMEVNFNFDDPNLIILPLAFGKRQGREFIWNDLLSLETGSLKLANGRVIEKTLYNRRTRQDEPALFVALTFERREVLDSSNIKPMNLIGVDRGENIPAVIALTDPEGCPLSRFKDSLGNPTHILRIGESYKEKQRTIQAKKEVEQRRAGGYSRKYASKAKNLADDMVRNTARDLLYYAVTQDAMLIFENLSRGFGRQGKRTFMAERQYTRMEDWLTAKLAYEGLPSKTYLSKTLAQYTSKTCSNCGFTITSADYDRVLEKLKKTATGWMTTINGKELKVEGQITYYNRYKRQNVVKDLSVELDRLSEESVNNDISSWDKGRSGEALSLLKKRFSHRPVQEKFVCLNCGFETHADEQAALNIARSWLFLRSQEYKKYQTNKTTGNTDKRAFVETWQSFYRKKLKEVWKPAV

SEQ ID NO: 39988 - protein, 977 aa, synthetic construct
  REGION 1..977: note = engineered CasX variant
QEIKRINKIRRRLVKDSNTKKAGKTGPMKTLLVRVMTPDLRERLENLRKKPENIPQPISNTSRANLNKLLTDYTEMKKAILHVYWEEFQVDPVGLMSRVAQPASKKIDQNKLKPEMDEKGNLTTAGFACSQCGQPLFVYKLEQVSEKGKAYTNYFGRCNVAEHEKLILLAQLKPEKDSDEAVTYSLGKFGQRALDFYSIHVTKESTHPVKPLAQIAGNRYASPVGKALRDACMGTIASFLSKYQDIIIEHQKVVKGNQKRLESLRELAGKENLEYPSVTLPPQPHTKEGVDAYNEVIARVRMWVNLNLWQKLKLSRDDAKPLLRLKGFPSFPLVERQANEVDWWDMVCNVKKLINEKKEDGKVFWQNLAGYKRQEALRPYLSSEEDRKKGKKFARYQLGDLLLHLEKKHGEDWGKVYDEAWERIDKKVEGLSKHIKLEEERRSEDAQSKAALTDWLRAKASFVIEGLKEADKDEFCRCELKLQKWYGDLRGKPFAIEAENSILDISGFSKQYNCAFIWQKDGVKKLNLYLIINYFKGGKLRFKKIKPEAFEANRFYTVINKKSGEIVPMEVNFNFDDPNLIILPLAFGKRQGREFIWNDLLSLETGSLKLANGRVIEKTLYNRRTRQDEPALFVALTFERREVLDSSNIKPMNLIGVDRGENIPAVIALTDPEGCPLSRFKDSLGNPTHILRIGESYKEKQRTIQAKKEVEQRRAGGYSRKYASKAKNLADDMVRNTARDLLYYAVTQDAMLIFENLSRGFGRQGKRTFMAERQYTRMEDWLTAKLAYEGLPSKTYLSKTLAQYTSKTCSNCGFTITSADYDRVLEKLKKTATGWMTTINGKELKVEGQITYYNRYKRQNVVKDLSVELDRLSEESVNNDISSWTKGRSGEALSLLKKRFSHRPVQEKFVCLNCGFETHADEQAALNIARSWLFLRSQEYKKYQTNKTTGNTDKRAFVETWQSFYRKKLKEVWKPAV

SEQ ID NO: 39989 - protein, 977 aa, synthetic construct
  REGION 1..977: note = engineered CasX variant
QEIKRLNKIRRRLVKDSNTKKAGKTGPMKTLLVRVMTPDLRERLENLRKKPENIPQPISNTSRANLNKLLTDYTEMKKAILHVYWEEFQKDPVGLMSRVAQPASKKIDQNKLKPEMDEKGNLTTAGFACSQCGQPLFVYKLEQVSEKGKAYTNYFGRCNVAEHEKLILLAQLKPEKDSDEAVTYSLGKFGQRALDFYSIHVTKESTHPVKPLAQIAGNRYASPVGKALRDACMGTIASFLSKYQDIIIEHQKVVKGNQKRLESLRELAGKENLEYPSVTLPPQPHTKEGVDAYNEVIARVRMWVNLNLWQKLKLSRDDAKPLLRLKGFPSFPLVERQANEVDWWDMVCNVKKLINEKKEDGKVFWQNLAGYKRQEALRPYLSSEEDRKKGKKFARYQLGDLLLHLEKKHGEDWGKVYDEAWERIDKKVEGLSKHIKLEEERRSEDAQSKAALTDWLRAKASFVIEGLKEADKDEFCRCELKLQKWYGDLRGKPFAIEAENSILDISGFSKQYNCAFIWQKDGVKKLNLYLIINYFKGGKLRFKKIKPEAFEANRFYTVINKKSGEIVPMEVNFNFDDPNLIILPLAFGKRQGREFIWNDLLSLETGSLKLANGRVIEKTLYNRRTRQDEPALFVALTFERREVLDSSNIKPMNLIGVDRGENIPAVIALTDPEGCPLSRFKDSLGNPTHILRIGESYKEKQRTIQAKKEVEQRRAGGYSRKYASKAKNLADDMVRNTARDLLYYAVTQDAMLIFENLSRGFGRQGKRTFMAERQYTRMEDWLTAKLAYEGLPSKTYLSKTLAQYTSKTCSNCGFTITSADYDRVLEKLKKTATGWMTTINGKELKVEGQITYYNRYKRQNVVKDLSVELDRLSEESVNNDISSWTKGRSGEALSLLKKRFSHRPVQEKFVCLNCGFETHADEQAALNIARSWLFLRSQEYKKYQTNKTTGNTDKRAFVETWQSFYRKKLKEVWKPAV

SEQ ID NO: 39990 - protein, 977 aa, synthetic construct
  REGION 1..977: note = engineered CasX variant
QEIKRINKIRRRLVKDSNTKKAGKTGPMKTLLVRVMTPDLRERLENLRKKPENIPQPISNTSRANLNKLLTDYTEMKKAILHVYWEEFQKDPVGLMSRVAQPASKKIDQNKLKPEMDEKGNLTTAGFACSQCGQPLFVYKLEQVSEKGKAYTNYVGRCNVAEHEKLILLAQLKPEKDSDEAVTYSLGKFGQRALDFYSIHVTKESTHPVKPLAQIAGNRYASPVGKALRDACMGTIASFLSKYQDIIIEHQKVVKGNQKRLESLRELAGKENLEYPSVTLPPQPHTKEGVDAYNEVIARVRMWVNLNLWQKLKLSRDDAKPLLRLKGFPSFPLVERQANEVDWWDMVCNVKKLINEKKEDGKVFWQNLAGYKRQEALRPYLSSEEDRKKGKKFARYQLGDLLLHLEKKHGEDWGKVYDEAWERIDKKVEGLSKHIKLEEERRSEDAQSKAALTDWLRAKASFVIEGLKEADKDEFCRCELKLQKWYGDLRGKPFAIEAENSILDISGFSKQYNCAFIWQKDGVKKLNLYLIINYFKGGKLRFKKIKPEAFEANRFYTVINKKSGEIVPMEVNFNFDDPNLIILPLAFGKRQGREFIWNDLLSLETGSLKLANGRVIEKTLYNRRTRQDEPALFVALTFERREVLDSSNIKPMNLIGVDRGENIPAVIALTDPEGCPLSRFKDSLGNPTHILRIGESYKEKQRTIQAKKEVEQRRAGGYSRKYASKAKNLADDMVRNTARDLLYYAVTQDAMLIFENLSRGFGRQGKRTFMAERQYTRMEDWLTAKLAYEGLPSKTYLSKTLAQYTSKTCSNCGFTITSADYDRVLEKLKKTATGWMTTINGKELKVEGQITYYNRYKRQNVVKDLSVELDRLSEESVNNDISSWTKGRSGEALSLLKKRFSHRPVQEKFVCLNCGFETHADEQAALNIARSWLFLRSQEYKKYQTNKTTGNTDKRAFVETWQSFYRKKLKEVWKPAV

SEQ ID NO: 39991 - protein, 977 aa, synthetic construct
  REGION 1..977: note = engineered CasX variant
QEIKRINKIRRRLVKDSNTKKAGKTGPMKTLLVRVMTPDLRERLENLRKKPENIPQPISNTSRANLNKLLTDYTEMKKAILHVYWEEFQKDPVGLMSRVAQPASKKIDQNKLKPEMDEKGNLTTAGFACSQCGQPLFVYKLEQVSEKGKAYTNYFGRCNVAEHEKLILLAQLKPEKDSDEAVTYSLGKFGQRALDFYSIHVTKESTHPVKPLAQIAGNRYASPVGKALRDACMGTIASFLSKYQDIIIEHQKVVKGNQKRLESLRELAGKENLEYPSVTLPPQPHTKEGVDAYNEVIARVRMWVNLNLWQKLKLSRDDAKPLLRLKGFPSFPLVERQANEVDWWDMVCNVKKLINEKKEDGKVFWQNLAGYKRQEALRPYLSSEEDRKKGKKFARYQLGDLLLHLEKKHGEDWGKVYDEAWERIDKKVEGLSKHIKLEEERRSEDAQSKAALTDWLRAKASFVIEGLKEADKDEFCRCELKLQKWYGDLRGKPFAIEAENSILDISGFSKQYNCAFIWQKDGVKKLNLYLIINYFKGGKLRFKKIKPEAFEANRFYTVINKKSGEIVPMEVNFNFDDPNLIILPLAFGKRQGREFIWNDLLSLETGSLKLANGRVIEKTLYNRRTRQDEPALFVALTFERREVLDSSNIKPMNLIGVDRGENIPAVIALTDPEGCPLSRFKDSLGNPTHILRIGESYKEKQRTIQAKKEVEQRRAGGYSRKYASKAKNLADDMVRNTARDLLYYAVTQDAMLIFENLSRGFGRQGKRTFMAERQYTRMEDWLTAKLAYEGLASKTYLSKTLAQYTSKTCSNCGFTITSADYDRVLEKLKKTATGWMTTINGKELKVEGQITYYNRYKRQNVVKDLSVELDRLSEESVNNDISSWTKGRSGEALSLLKKRFSHRPVQEKFVCLNCGFETHADEQAALNIARSWLFLRSQEYKKYQTNKTTGNTDKRAFVETWQSFYRKKLKEVWKPAV

SEQ ID NO: 39992 - protein, 977 aa, synthetic construct
  REGION 1..977: note = engineered CasX variant
QEIKRINKIRRRLVKDSNTKKAGKTGPMKTLLVRVMTPDLRERLENLRKKPENIPQPISNTSRANLNKLLTDYTEMKKAILHVYWEEFQKDPVGLMSRVAQPASKKIDQNKLKPEMDEKGNLTTAGFACSQCGQPLFVYKLEQVSEKGKAYTNYFGRCNVAEHEKLILLAQLKPEKDSDEAVTYSLGKFGQRALDFYSIHVTKESTHPVKPLAQIAGNRYASPVGKALRDACMGTIASFLSKYQDIIIEHQKVVKGNQKRLESLRELAGKENLEYPSVTLPPQPHTKEGVDAYNEVIARVRMWVNLNLWQKLKLSRDDAKPLLRLKGFPSFPLVERQANEVDWWDMVCNVKKLINEKKEDGKVFWQNLAGYKRQEALRPYLSSEEDRKKGKKFARYQLGDLLLHLEKKHGEDWGKVYDEAWERIDKKVEGLSKHIKLEEERRSEDAQSKAALTDWLRAKASFVIEGLKEADKDEFCRCELKLQKWYGDLRGKPFAIEAENSILDISGFSKQYNCAFIWQKDGVKKLNLYLIINYFKGGKLRFKKIKPEAFEANRFYTVINKKSGEIVPMEVNFNFDDPNLIILPLAFGKRQGREFIWNDLLSLETGSLKLANGRVIEKTLYNRRTRQDEPALFVALTFERREVLDSSNIKPMNLIGVDRGENIPAVIALTDPEGCPLSRFKDSLGNPTHILRIGESYKEKQRTIQAKKEVEQRRAGGYSRKYASKAKNLADDMVRNTARDLLYYAVTQDAMLIFENLSRGFGRQGKRTFMAERQYTRMEDWLTAKLAYEGLPSKVYLSKTLAQYTSKTCSNCGFTITSADYDRVLEKLKKTATGWMTTINGKELKVEGQITYYNRYKRQNVVKDLSVELDRLSEESVNNDISSWTKGRSGEALSLLKKRFSHRPVQEKFVCLNCGFETHADEQAALNIARSWLFLRSQEYKKYQTNKTTGNTDKRAFVETWQSFYRKKLKEVWKPAV

SEQ ID NO: 39993 - protein, 978 aa, synthetic construct
  REGION 1..978: note = engineered CasX variant
QEIKRINKIRRRLVKDSNTKKAGKTGPMKTLLVRVMTPDLRERLENLRKKPENIPQPISNTSRANLNKLLTDYTEMKKAILHVYWEEFQKDPVGLMSRVAQPASKKIDQNKLKPEMDEKGNLTTAGFACSQCGQPLFVYKLEQVSEKGKAYTNYFGRCNVAEHEKLILLAQLKPEKDSDEAVTYSLGKFGQRALDFYSIHVTKESTHPVKPLAQIAGNRYASPVGKALRDACMGTIASFLSKYQDIIIEHQKVVKGNQKRLESLRELAGKENLEYPSVTLPPQPHTKEGVDAYNEVIARVRMWVNLNLWQKLKLSRDDAKPLLRLKGFPSFPLVERQANEVDWWDMVCNVKKLINEKKEDGKVFWQNLAGYKRQEALRPYLSSEEDRKKGKKFARYQLGDLLLHLEKKHGEDWGKVYDEAWERIDKKVEGLSKHIKLEEERRSEDAQSKAALTDWLRAKASFVIEGLKEADKDEFCRCELKLQKWYGDLRGKPFAIEAENSILDISGFSKQYNCAFIWQKDGVKKLNLYLIINYFKGGKLRFKKIKPEAFEANRFYTVINKKSGEIVPMEVNFNFDDPNLIILPLAFGKRQGREFIWNDLLSLETGSLKLANGRVIEKTLYNRRTRQDEPALFVALTFERREVLDSSNIKPMNLIGVDRGENIPAVIALTDPEGCPLSRFKDSLGNPTHILRIGESYKEKQRTIQAKKEVEQRRAGGYSRKYASKAKNLADDMVRNTARDLLYYAVTQDAMLIFENLSRGFGRQGKRTFMAERQYTRMEDWLTAKLAYEGPLPSKTYLSKTLAQYTSKTCSNCGFTITSADYDRVLEKLKKTATGWMTTINGKELKVEGQITYYNRYKRQNVVKDLSVELDRLSEESVNNDISSWTKGRSGEALSLLKKRFSHRPVQEKFVCLNCGFETHADEQAALNIARSWLFLRSQEYKKYQTNKTTGNTDKRAFVETWQSFYRKKLKEVWKPAV

SEQ ID NO: 39994 - protein, 978 aa, synthetic construct
  REGION 1..978: note = engineered CasX variant
QEIKRINKIRRRLVKDSNTKKAGKTGPMKTLLVRVMTPDLRERLENLRKKPENIPQPISNTSRANLNKLLTDYTEMKKAILHVYWEEFQKDPVGLMSRVAQPASKKIDQNKLKPEMDEKGNLTTAGFACSQCGQPLFVYKLEQVSEKGKAYTNYFGRCNVAEHEKLILLAQLKPEKDSDEAVTYSLGKFGQRALDFYSIHVTKESTHPVKPLAQIAGNRYASPVGKALRDACMGTIASFLSKYQDIIIEHQKVVKGNQKRLESLRELAGKENLEYPSVTLPPQPHTKEGVDAYNEVIARVRMWVNLNLWQKLKLSRDDAKPLLRLKGFPSFPLVERQANEVDWWDMVCNVKKLINEKKEDGKVFWQNLAGYKRQEALRPYLSSEEDVRKKGKKFARYQLGDLLLHLEKKHGEDWGKVYDEAWERIDKKVEGLSKHIKLEEERRSEDAQSKAALTDWLRAKASFVIEGLKEADKDEFCRCELKLQKWYGDLRGKPFAIEAENSILDISGFSKQYNCAFIWQKDGVKKLNLYLIINYFKGGKLRFKKIKPEAFEANRFYTVINKKSGEIVPMEVNFNFDDPNLIILPLAFGKRQGREFIWNDLLSLETGSLKLANGRVIEKTLYNRRTRQDEPALFVALTFERREVLDSSNIKPMNLIGVDRGENIPAVIALTDPEGCPLSRFKDSLGNPTHILRIGESYKEKQRTIQAKKEVEQRRAGGYSRKYASKAKNLADDMVRNTARDLLYYAVTQDAMLIFENLSRGFGRQGKRTFMAERQYTRMEDWLTAKLAYEGLPSKTYLSKTLAQYTSKTCSNCGFTITSADYDRVLEKLKKTATGWMTTINGKELKVEGQITYYNRYKRQNVVKDLSVELDRLSEESVNNDISSWTKGRSGEALSLLKKRFSHRPVQEKFVCLNCGFETHADEQAALNIARSWLFLRSQEYKKYQTNKTTGNTDKRAFVETWQSFYRKKLKEVWKPAV

SEQ ID NO: 39995 - protein, 977 aa, synthetic construct
  REGION 1..977: note = engineered CasX variant
QEIKRINKIRRRLVKDSNTKKAGKTGPMKTLLVRVMTPDLRERLENLRKKPENIPQPISNTSRANLNKLLTDYTEMKKAILHVYWEEFQKDPVGLMSRVAQPASKKIDQNKLKPEMDEKGNLTTAGFACSQCGQPLFVYKLEQVSEKGKAYTNYFGRCNVAEHEKLILLAQLKPEKDSDEAVTYSLGKFGQRALDFYSIHVTKESTHPVKPLAQIAGNRYASPVGKALRDACMGTIASFLSKYQDIIIEHQKVVKGNQKRLESLRELAGKENLEYPSVTLPPQPHTKEGVDAYNEVIARVRMWVNLNLWQKLKLSRDDAKPLLRLKGFPSFPLVERQANEVDWWDMVCNVKKLINEKKEDGKVFWQNLAGYKRQEALRPYLSSEEDRKKGKKFARYQLGDLLLHLEKKHGEDWGKVYDEAWERIDKKVEGLSKHIKLEEERRSEDAQSKAALTDWLRAKASFVIEGLKEADKDEFCRCELKLQKWYGDLRGKPFAIEAENSILDISGFSKQYNCAFIWQKDGVKKLNLYLIINYFKGGKLRFKKIKPEAFEANRFYTVINKKSGEIVPMEVNFNFDDPNLIILPLAFGKRQGREFIWNDLLSLETGSLKLANGRVIEKTLYNRRTRQDEPALFVALTFERREVLDSSNIKPMNLIGVDRGENIPAVIALTDPEGCPLSRFKDSLGNPTHILRIGESYKEKQRTIQAKKEVEQRRAGGYSRKYASKAKNLADDMVRNTARDLLYYAVTQDAMLIFENLSRGFGRQGKRTFMAERQYTRMEDWLTAKLAYEGLPSKTYLSKTLAQYTSKTCSNCGFTITSADYDRMLEKLKKTATGWMTTINGKELKVEGQITYYNRYKRQNVVKDLSVELDRLSEESVNNDISSWTKGRSGEALSLLKKRFSHRPVQEKFVCLNCGFETHADEQAALNIARSWLFLRSQEYKKYQTNKTTGNTDKRAFVETWQSFYRKKLKEVWKPAV

SEQ ID NO: 39996 - protein, 977 aa, synthetic construct
  REGION 1..977: note = engineered CasX variant
QEIKRINKIRRRLVKDSNTKKAGKTGPMKTLLVRVMTPDLRERLENLRKKPENIPQPISNTSRANLNKLLTDYTEMKKAILHVYWEEFQKDPVGLMSRVAQPASKKIDQNKLKPEMDEKGNLTTAGFACSQCGQPLFVYKLEQVSEKGKAYTNYFGRCNVAEHEKLILLAQLKPEKDSDEAVTYSLGKFGQRALDFYSIHVTKESTHPVKPLAQIAGNRYASPVGKALRDACMGTIASFLSKYQDIIIEHQKVVKGNQKRLESLRELAGKENLEYPSVTLPPQPHTKEGVDAYNEVIARVRMWVNLNLWQKLKLSRDDAKPLLRLKGFPSFPLVERQANEVDWWDMVCNVKKLINEKKEDGKVFWQNLAGYKRQEALRPYLSSEEDRKKGKKFARYQLGDLLLHLEKKHGEDWGKVYDEAWERIDKKVEGLSKHIKLEEERRSEDAQSKAALTDWLRAKASFVIEGLKEADKDEFCRCELKLQKWYGDLRGKPFAIEAENSILDISGFSKQYNCAFIWQKDGVKKLNLYLIINYFKGGKLRFKKIKPEAFEANRFYTVINKKSGEIVPMEVNFNFDDPNLIILPLAFGKRQGREFIWNDLLSLETGSLKLANGRVIEKTLYNRRTRQDEPALFVALTFERREVLDSSNIKPMNLIGVDRGENIPAVIALTDPEGCPLSRFKDSLGNPTHILRIGESYKEKQRTIQAKKEVEQRRAGGYSRKYASKAKNLADDMVRNTARDLLYYAVTQDAMLIFENLSRGFGRQGKRTFMAERQYTRMEDWLTAKLAYEGLPSKTYLSKTLAQYTSKTCSNCGFTITSADYDRVLEKLKKTATGWMTTINGKELKVEGQITYYNRYKRQNVVKDLSVELDRLSEESVNNDISSWTKGRQGEALSLLKKRFSHRPVQEKFVCLNCGFETHADEQAALNIARSWLFLRSQEYKKYQTNKTTGNTDKRAFVETWQSFYRKKLKEVWKPAV

SEQ ID NO: 39997 - protein, 977 aa, synthetic construct
  REGION 1..977: note = engineered CasX variant
QEIKRINKIRRRLVKDSNTKKAGKTGPMKTLLVRVMTPDLRERLENLRKKPENIPQPISNTSRANLNKLLTDYTEMKKAILHVYWEEFQKDPVGLMSRVAQPASKKIDQNKLKPEMDEKGNLTTAGFACSQCGQPLFVYKLEQVSEKGKAYTNYFGRCNVAEHEKLILLAQLKPEKDSDEAVTYSLGKFGQRALDFYSIHVTKESTHPVKPLAQIAGNRYASPVGKALRDACMGTIASFLSKYQDIIIEHQKVVKGNQKRLESLRELAGKENLEYPSVTLPPQPHTKEGVDAYNEVIARVRMWVNLNLWQKLKLSRDDAKPLLRLKGFPSFPLVERQANEVDWWDMVCNVKKLINEKKEDGKVFWQNLAGYKRQEALRPYLSSEEDRKKGKKFARYQLGDLLLHLEKKHGEDWGKVYDEAWERIDKKVEGLSKHIKLEEERRSEDAQSKAALTDWLRAKASFVIEGLKEADKDEFCRCELKLQKWYGDLRGKPFAIEAENSILDISGFSKQYNCAFIWQKDGVKKLNLYLIINYFKGGKLRFKKIKPEAFEANRFYTVINKKSGEIVPMEVNFNFDDPNLIILPLAFGKRQGREFIWNDLLSLETGSLKLANGRVIEKTLYNRRTRQDEPALFVALTFERREVLDSSNIKPMNLIGVDRGENIPAVIALTDPEGCPLSRFKDSLGNPTHILRIGESYKEKQRTIQAKKEVEQRRAGGYSRKYASKAKNLADDMVRNTARDLLYYAVTQDAMLIFENLSRGFGRQGKRTFMAERQYTRMEDWLTAKLAYEGLPSKTYLSKTLAQYTSKTCSNCGFTITSADYDRVLEKLKKTATGWMTTINGKELKVEGQITYYNRYKRQNVVKDLSVELDRLSEESVNNDISSWTKGRSGEALSLLKKRFSHRPVQEKFVCLNCEFETHADEQAALNIARSWLFLRSQEYKKYQTNKTTGNTDKRAFVETWQSFYRKKLKEVWKPAV

SEQ ID NO: 39998 - protein, 978 aa, synthetic construct
  REGION 1..978: note = engineered CasX variant
QEIKRINKIRRRLVKDSNTKKAGKTGPMKTLLVRVMTPDLRERLENLRKKPENIPQPISNTSRANLNKLLTDYTEMKKAILHVYWEEFQKDPVGLMSRVAQPASKKIDQNKLKPEMDEKGNLTTAGFACSQCGQPLFVYKLEQVSEKGKAYTNYFGRCNVAEHEKLILLAQLKPEKDSDEAVTYSLGKFGQRALDFYSIHVTKESTHPVKPLAQIAGNRYASPVGKALRDACMGTIASFLSKYQDIIIEHQKVVKGNQKRLESLRELAGKENLEYPSVTLPPQPHTKEGVDAYNEVIARVRMWVNLNLWQKLKLSRDDAKPLLRLKGFPSFPLVERQANEVDWWDMVCNVKKLINEKKEDGKVFWQNLAGYKRQEALRPYLSSEEDRKKGKKFARYQLGDLLLHLEKKHGEDWGKVYDEAWERIDKKVEGLSKHIKLEEERRSEDAQSKAALTDWLRAKASFVIEGLKEADKDEFCRCELKLQKWYGDLRGKPFAIEAENSILDISGFSKQYNCAFIWQKDGVKKLNLYLIINYFKGGKLRFKKIKPEAFEANRFYTVINKKSGEIVPMEVNFNFDDPNLIILPLAFGKRQGREFIWNDLLSLETGSLKLANGRVIEKTLYNRRTRQDEPALFVALTFERREVLDSSNIKPMNLIGVDRGENIPAVIALTDPEGCPLSRFKDSLGNPTHILRIGESYKEKQRTIQAKKEVEQRRAGGYSRKYASKAKNLADDMVRNTARDLLYYAVTQDAMLIFENLSRGFGRQGKRTFMAERQYTRMEDWLTAKLAYEGLPSKTYLSKTLAQYTSKTCSNCGFTITSADYDRVLEKLKKTATGWMTTINGKELKVEGQITYYNRYKRQNVVKDLSVELDRLSEESVNNDISSWTKGRSGEALSLLKKRFSHRPVQEKFVCLNCGFETHADEQAALNIARSWLFLRSQEYKKYQTNKTSTGNTDKRAFVETWQSFYRKKLKEVWKPAV

SEQ ID NO: 39999 - protein, 978 aa, synthetic construct
  REGION 1..978: note = engineered CasX variant
QEIKRINKIRRRLVKDSNTKKAGKTGPMKTLLVRVMTPDLRERLENLRKKPENIPQPISNTSRANLNKLLTDYTEMKKAILHVYWEEFQKDPVGLMSRVAQPASKKIDQNKLKPEMDEKGNLTTAGFACSQCGQPLFVYKLEQVSEKGKAYTNYFGRCNVAEHEKLILLAQLKPEKDSDEAVTYSLGKFGQRALDFYSIHVTKESTHPVKPLAQIAGNRYASPVGKALRDACMGTIASFLSKYQDIIIEHQKVVKGNQKRLESLRELAGKENLEYPSVTLPPQPHTKEGVDAYNEVIARVRMWVNLNLWQKLKLSRDDAKPLLRLKGFPSFPLVERQANEVDWWDMVCNVKKLINEKKEDGKVFWQNLAGYKRQEALRPYLSSEEDRKKGKKFARYQLGDLLLHLEKKHGEDWGKVYDEAWERIDKKVEGLSKHIKLEEERRSEDAQSKAALTDWLRAKASFVIEGLKEADKDEFCRCELKLQKWYGDLRGKPFAIEAENSILDISGFSKQYNCAFIWQKDGVKKLNLYLIINYFKGGKLRFKKIKPEAFEANRFYTVINKKSGEIVPMEVNFNFDDPNLIILPLAFGKRQGREFIWNDLLSLETGSLKLANGRVIEKTLYNRRTRQDEPALFVALTFERREVLDSSNIKPMNLIGVDRGENIPAVIALTDPEGCPLSRFKDSLGNPTHILRIGESYKEKQRTIQAKKEVEQRRAGGYSRKYASKAKNLADDMVRNTARDLLYYAVTQDAMLIFENLSRGFGRQGKRTFMAERQYTRMEDWLTAKLAYEGLPSKTYLSKTLAQYTSKTCSNCGFTITSADYDRVLEKLKKTATGWMTTINGKELKVEGQITYYNRYKRQNVVKDLSVELDRLSEESVNNDISSWTKGRSGEALSLLKKRFSHRPVQEKFVCLNCGFETHADEQAALNIARSWLFLRSQEYKKYQTNKTTGKNTDKRAFVETWQSFYRKKLKEVWKPAV

SEQ ID NO: 40000 - protein, 977 aa, synthetic construct
  REGION 1..977: note = engineered CasX variant
QEIKRINKIRRRLVKDSNTKKAGKTGPMKTLLVRVMTPDLRERLENLRKKPENIPQPISNTSRANLNKLLTDYTEMKKAILHVYWEEFQKDPVGLMSRVAQPASKKIDQNKLKPEMDEKGNLTTAGFACSQCGQPLFVYKLEQVSEKGKAYTNYFGRCNVAEHEKLILLAQLKPEKDSDEAVTYSLGKFGQRALDFYSIHVTKESTHPVKPLAQIAGNRYASPVGKALRDACMGTIASFLSKYQDIIIEHQKVVKGNQKRLESLRELAGKENLEYPSVTLPPQPHTKEGVDAYNEVIARVRMWVNLNLWQKLKLSRDDAKPLLRLKKFPSFPLVERQANEVDWWDMVCNVKKLINEKKEDGKVFWQNLAGYKRQEALRPYLSSEEDRKKGKKFARYQLGDLLLHLEKKHGEDWGKVYDEAWERIDKKVEGLSKHIKLEEERRSEDAQSKAALTDWLRAKASFVIEGLKEADKDEFCRCELKLQKWYGDLRGKPFAIEAENSILDISGFSKQYNCAFIWQKDGVKKLNLYLIINYFKGGKLRFKKIKPEAFEANRFYTVINKKSGEIVPMEVNFNFDDPNLIILPLAFGKRQGREFIWNDLLSLETGSLKLANGRVIEKTLYNRRTRQDEPALFVALTFERREVLDSSNIKPMNLIGVDRGENIPAVIALTDPEGCPLSRFKDSLGNPTHILRIGESYKEKQRTIQAKKEVEQRRAGGYSRKYASKAKNLADDMVRNTARDLLYYAVTQDAMLIFENLSRGFGRQGKRTFMAERQYTRMEDWLTAKLAYEGLPSKTYLSKTLAQYTSKTCSNCGFTITSADYDRVLEKLKKTATGWMTTINGKELKVEGQITYYNRYKRQNVVKDLSVELDRLSEESVNNDISSWTKGRSGEALSLLKKRFSHRPVQEKFVCLNCGFETHADEQAALNIARSWLFLRSQEYKKYQTNKTTGNTDKRAFVETWQSFYRKKLKEVWKPAV

SEQ ID NO: 40001 - protein, 977 aa, synthetic construct
  REGION 1..977: note = engineered CasX variant
QEIKRINKIRRRLVKDSNTKKAGKTGPMKTLLVRVMTPDLRERLENLRKKPENIPQPISNTSRANLNKLLTDYTEMKKAILHVYWEEFQKDPVGLMSRVAQPASKKIDQNKLKPEMDEKGNLTTAGFACSQCGQPLFVYKLEQVSEKGKAYTNYFGRCNVAEHEKLILLAQLKPEKDSDEAVTYSLGKFGQRALDFYSIHVTKESTHPVKPLAQIAGNRYASPVGKALRDACMGTIASFLSKYQDIIIEHQKVVKGNQKRLESLRELAGKENLEYPSVTLPPQPHTKEGVDAYNEVIARVRMWVNLNLWQKLKLSRDDAKPLLRLKGFPSFPLVERQANEVDWWDMVCNVKKLINEKKEDGKVFWQNLAGYKRQEALRPYLSSEEDRKKGKKFARYQLGDLLLHLEKKHGEDWGKVYDEAWERIDKKVEGLSKHIKLEEERRSEDAQSKAALTDWLRAKASFVIEGLKEADKDEFCRCELKLQKWYGDLRGKPFAIEAENSILDISGFSKQYNCAFIWQKDGVKKLNLYLIINYFKGGKLRFKKIKPEAFEANRFYTVINKKSGEIVPMEVNFNFDDPNLIILPLAFGKRQGREFIWNDLLSLETGSLKLANGRVIEKTLYNRRTRQDEPALFVALTFERREVLDSSNIKPMNLIGVDRGENIPAVIALTDPEGCPLSRFKDSLGNPTHILRIGERYKEKQRTIQAKKEVEQRRAGGYSRKYASKAKNLADDMVRNTARDLLYYAVTQDAMLIFENLSRGFGRQGKRTFMAERQYTRMEDWLTAKLAYEGLPSKTYLSKTLAQYTSKTCSNCGFTITSADYDRVLEKLKKTATGWMTTINGKELKVEGQITYYNRYKRQNVVKDLSVELDRLSEESVNNDISSWTKGRSGEALSLLKKRFSHRPVQEKFVCLNCGFETHADEQAALNIARSWLFLRSQEYKKYQTNKTTGNTDKRAFVETWQSFYRKKLKEVWKPAV

SEQ ID NO: 40002 - protein, 977 aa, synthetic construct
  REGION 1..977: note = engineered CasX variant
QEIKRINKIRRRLVKDSNTKKAGKTGPMKTLLVRVMTPDLRERLENLRKKPENIPQPISNTSRANLNKLLTDYTEMKKAILHVYWEEFQKDPVGLMSRVAQPASKKIDQNKLKPEMDEKGNLTTAGFACSQCGQPLFVYKLEQVSEKGKAYTNYFGRCNVAEHEKLILLAQLKPEKDSDEAVTYSLGKFGQRALDFYSIHVTKESTHPVKPLAQIAGNRYASPVGKALRDACMGTIASFLSKYQDIIIEHQKVVKGNQKRLESLRELAGKENLEYPSVTLPPQPHTKEGVDAYNEVIARVRMWVNLNLWQKLKLSRDDAKPLLRLKGFPSFPLVERQANEVDWWDMVCNVKKLINEKKEDGKVFWQNLAGYKRQEALRPYLSSEEDRKKGKKFARYQLGDLLLHLEKKHGEDWGKVYDEAWERIDKKVEGLSKHIKLEEERRSEDAQSKAALTDWLRAKASFVIEGLKEADKDEFCRCELKLQKWYGDLRGKPFAIEAENSILDISGFSKQYNCAFIWQKDGVKKLNLYLIINYFKGGKLRFKKIKPEAFEANRFYTVINKKSGEIVPMEVNFNFDDPNLIILPLAFGKRQGREFIWNDLLSLETGSLQLANGRVIEKTLYNRRTRQDEPALFVALTFERREVLDSSNIKPMNLIGVDRGENIPAVIALTDPEGCPLSRFKDSLGNPTHILRIGESYKEKQRTIQAKKEVEQRRAGGYSRKYASKAKNLADDMVRNTARDLLYYAVTQDAMLIFENLSRGFGRQGKRTFMAERQYTRMEDWLTAKLAYEGLPSKTYLSKTLAQYTSKTCSNCGFTITSADYDRVLEKLKKTATGWMTTINGKELKVEGQITYYNRYKRQNVVKDLSVELDRLSEESVNNDISSWTKGRSGEALSLLKKRFSHRPVQEKFVCLNCGFETHADEQAALNIARSWLFLRSQEYKKYQTNKTTGNTDKRAFVETWQSFYRKKLKEVWKPAV

SEQ ID NO: 40003 - protein, 978 aa, synthetic construct
  REGION 1..978: note = engineered CasX variant
QEIKRINKIRRRLVKDSNTKKAGKTGPMKTLLVRVMTPDLRERLENLRKKPENIPQPISNTSRANLNKLLTDYTEMKKAILHVYWEEFQKDPVGLMSRVAQPASKKIDQNKLKPEMDEKGNLTTAGFACSQCGQPLFVYKLEQVSEKGKAYTNYFGRCNVAEHEKLILLAQLKPEKDSDEAVTYSLGKFGQRALDFYSIHVTKESTHPVKPLAQIAGNRYASGPVGKALRDACMGTIASFLSKYQDIIIEHQKVVKGNQKRLESLRELAGKENLEYPSVTLPPQPHTSEGLDAYNEVIARVRMWVNLNLWQKLKLSRDDAKPLLRLKGFPSFPLVERQANEVDWWDMVCNVKKLINEKKEDGKVFWQNLAGYKRQEALRPYLSSEEDRKKGKKFARYQLGDLLLHLEKKHGEDWGKVYDEAWERIDKKVEGLSKHIKLEEERRSEDAQSKAALTDWLRAKASFVIEGLKEADKDEFCRCELKLQKWYGDLRGKPFAIEAENSILDISGFSKQYNCAFIWQKDGVKKLNLYLIINYFKGGKLRFKKIKPEAFEANRFYTVINKKSGEIVPMEVNFNFDDPNLIILPLAFGKRQGREFIWNDLLSLETGSLKLANGRVIEKTLYNRRTRQDEPALFVALTFERREVLDSSNIKPMNLIGVDRGENIPAVIALTDPEGCPLSRFKDSLGNPTHILRIGESYKEKQRTIQAKKEVEQRRAGGYSRKYASKAKNLADDMVRNTARDLLYYAVTQDAMLIFENLSRGFGRQGKRTFMAERQYTRMEDWLTAKLAYEGLPSKTYLSKTLAQYTSKTCSNCGFTITSADYDRVLEKLKKTATGWMTTINGKELKVEGQITYYNRYKRQNVVKDLSVELDRLSEESVNNDISSWTKGRSGEALSLLKKRFSHRPVQEKFVCLNCGFETHADEQAALNIARSWLFLRSQEYKKYQTNKTTGNTDKRAFVETWQSFYRKKLKEVWKPAV

SEQ ID NO: 40004 - protein, 978 aa, synthetic construct
  REGION 1..978: note = engineered CasX variant
QEIKRINKIRRRLVKDSNTKKAGKTGPMKTLLVRVMTPDLRERLENLRKKPENIPQPISNTSRANLNKLLTDYTEMKKAILHVYWEEFQKDPVGLMSRVAQPASKKIDQNKLKPEMDEKGNLTTAGFACSQCGQPLFVYKLEQVSEKGKAYTNYFGRCNVAEHEKLILLAQLKPEKDSDEAVTYSLGKFGQRALDFYSIHVTKESTHPVKPLAQIAGNRYASGPVGKALRDACMGTIASFLSKYQDIIIEHQKVVKGNQKRLESLRELAGKENLEYPSVTLPPQPHTSEGVDAYNEVIARVRTWVNLNLWQKLKLSRDDAKPLLRLKGFPSFPLVERQANEVDWWDMVCNVKKLINEKKEDGKVFWQNLAGYKRQEALRPYLSSEEDRKKGKKFARYQLGDLLLHLEKKHGEDWGKVYDEAWERIDKKVEGLSKHIKLEEERRSEDAQSKAALTDWLRAKASFVIEGLKEADKDEFCRCELKLQKWYGDLRGKPFAIEAENSILDISGFSKQYNCAFIWQKDGVKKLNLYLIINYFKGGKLRFKKIKPEAFEANRFYTVINKKSGEIVPMEVNFNFDDPNLIILPLAFGKRQGREFIWNDLLSLETGSLKLANGRVIEKTLYNRRTRQDEPALFVALTFERREVLDSSNIKPMNLIGVDRGENIPAVIALTDPEGCPLSRFKDSLGNPTHILRIGESYKEKQRTIQAKKEVEQRRAGGYSRKYASKAKNLADDMVRNTARDLLYYAVTQDAMLIFENLSRGFGRQGKRTFMAERQYTRMEDWLTAKLAYEGLPSKTYLSKTLAQYTSKTCSNCGFTITSADYDRVLEKLKKTATGWMTTINGKELKVEGQITYYNRYKRQNVVKDLSVELDRLSEESVNNDISSWTKGRSGEALSLLKKRFSHRPVQEKFVCLNCGFETHADEQAALNIARSWLFLRSQEYKKYQTNKTTGNTDKRAFVETWQSFYRKKLKEVWKPAV

SEQ ID NO: 40005 - protein, 978 aa, synthetic construct
  REGION 1..978: note = engineered CasX variant
QEIKRINKIRRRLVKDSNTKKAGKTGPMKTLLVRVMTPDLRERLENLRKKPENIPQPISNTSRANLNKLLTDYTEMKKAILHVYWEEFQKDPVGLMSRVAQPASKKIDQNKLKPEMDEKGNLTTAGFACSQCGQPLFVYKLEQVSEKGKAYTNYFGRCNVAEHEKLILLAQLKPEKDSDEAVTYSLGKFGQRALDFYSIHVTKESTHPVKPLAQIAGNRYASGPVGKALRDACMGTIASFLSKYQDIIIEHQKVVKGNQKRLESLRELAGKENLEYPSVTLPPQPHTSEGVDAYNEVIARVRWWVNLNLWQKLKLSRDDAKPLLRLKGFPSFPLVERQANEVDWWDMVCNVKKLINEKKEDGKVFWQNLAGYKRQEALRPYLSSEEDRKKGKKFARYQLGDLLLHLEKKHGEDWGKVYDEAWERIDKKVEGLSKHIKLEEERRSEDAQSKAALTDWLRAKASFVIEGLKEADKDEFCRCELKLQKWYGDLRGKPFAIEAENSILDISGFSKQYNCAFIWQKDGVKKLNLYLIINYFKGGKLRFKKIKPEAFEANRFYTVINKKSGEIVPMEVNFNFDDPNLIILPLAFGKRQGREFIWNDLLSLETGSLKLANGRVIEKTLYNRRTRQDEPALFVALTFERREVLDSSNIKPMNLIGVDRGENIPAVIALTDPEGCPLSRFKDSLGNPTHILRIGESYKEKQRTIQAKKEVEQRRAGGYSRKYASKAKNLADDMVRNTARDLLYYAVTQDAMLIFENLSRGFGRQGKRTFMAERQYTRMEDWLTAKLAYEGLPSKTYLSKTLAQYTSKTCSNCGFTITSADYDRVLEKLKKTATGWMTTINGKELKVEGQITYYNRYKRQNVVKDLSVELDRLSEESVNNDISSWTKGRSGEALSLLKKRFSHRPVQEKFVCLNCGFETHADEQAALNIARSWLFLRSQEYKKYQTNKTTGNTDKRAFVETWQSFYRKKLKEVWKPAV

SEQ ID NO: 40006 - protein, 979 aa, synthetic construct
  REGION 1..979: note = engineered CasX variant
QEIKRINKIRRRLVKDSNTKKAGKTGPMKTLLVRVMTPDLRERLENLRKKPENIPQPISNTSRANLNKLLTDYTEMKKAILHVYWEEFQKDPVGLMSRVAQPASKKIDQNKLKPEMDEKGNLTTAGFACSQCGQPLFVYKLEQVSEKGKAYTNYFGRCNVAEHEKLILLAQLKPEKDSDEAVTYSLGKFGQRALDFYSIHVTKESTHPVKPLAQIAGNRYASGPVGKALRDACMGTIASFLSKYQDIIIEHQKVVKGNQKRLESLRELAGKENLEYPSVTLPPQPHTSEGVDAYNEVIARVRMWVNLNLWQKLKLSRDDAKPLLRLKGFPSFPLVERQQANEVDWWDMVCNVKKLINEKKEDGKVFWQNLAGYKRQEALRPYLSSEEDRKKGKKFARYQLGDLLLHLEKKHGEDWGKVYDEAWERIDKKVEGLSKHIKLEEERRSEDAQSKAALTDWLRAKASFVIEGLKEADKDEFCRCELKLQKWYGDLRGKPFAIEAENSILDISGFSKQYNCAFIWQKDGVKKLNLYLIINYFKGGKLRFKKIKPEAFEANRFYTVINKKSGEIVPMEVNFNFDDPNLIILPLAFGKRQGREFIWNDLLSLETGSLKLANGRVIEKTLYNRRTRQDEPALFVALTFERREVLDSSNIKPMNLIGVDRGENIPAVIALTDPEGCPLSRFKDSLGNPTHILRIGESYKEKQRTIQAKKEVEQRRAGGYSRKYASKAKNLADDMVRNTARDLLYYAVTQDAMLIFENLSRGFGRQGKRTFMAERQYTRMEDWLTAKLAYEGLPSKTYLSKTLAQYTSKTCSNCGFTITSADYDRVLEKLKKTATGWMTTINGKELKVEGQITYYNRYKRQNVVKDLSVELDRLSEESVNNDISSWTKGRSGEALSLLKKRFSHRPVQEKFVCLNCGFETHADEQAALNIARSWLFLRSQEYKKYQTNKTTGNTDKRAFVETWQSFYRKKLKEVWKPAV

SEQ ID NO: 40007 - protein, 979 aa, synthetic construct
  REGION 1..979: note = engineered CasX variant
QEIKRINKIRRRLVKDSNTKKAGKTGPMKTLLVRVMTPDLRERLENLRKKPENIPQPISNTSRANLNKLLTDYTEMKKAILHVYWEEFQKDPVGLMSRVAQPASKKIDQNKLKPEMDEKGNLTTAGFACSQCGQPLFVYKLEQVSEKGKAYTNYFGRCNVAEHEKLILLAQLKPEKDSDEAVTYSLGKFGQRALDFYSIHVTKESTHPVKPLAQIAGNRYASGPVGKALRDACMGTIASFLSKYQDIIIEHQKVVKGNQKRLESLRELAGKENLEYPSVTLPPQPHTSEGVDAYNEVIARVRMWVNLNLWQKLKLSRDDAKPLLRLKGFPSFPLVERQANAEVDWWDMVCNVKKLINEKKEDGKVFWQNLAGYKRQEALRPYLSSEEDRKKGKKFARYQLGDLLLHLEKKHGEDWGKVYDEAWERIDKKVEGLSKHIKLEEERRSEDAQSKAALTDWLRAKASFVIEGLKEADKDEFCRCELKLQKWYGDLRGKPFAIEAENSILDISGFSKQYNCAFIWQKDGVKKLNLYLIINYFKGGKLRFKKIKPEAFEANRFYTVINKKSGEIVPMEVNFNFDDPNLIILPLAFGKRQGREFIWNDLLSLETGSLKLANGRVIEKTLYNRRTRQDEPALFVALTFERREVLDSSNIKPMNLIGVDRGENIPAVIALTDPEGCPLSRFKDSLGNPTHILRIGESYKEKQRTIQAKKEVEQRRAGGYSRKYASKAKNLADDMVRNTARDLLYYAVTQDAMLIFENLSRGFGRQGKRTFMAERQYTRMEDWLTAKLAYEGLPSKTYLSKTLAQYTSKTCSNCGFTITSADYDRVLEKLKKTATGWMTTINGKELKVEGQITYYNRYKRQNVVKDLSVELDRLSEESVNNDISSWTKGRSGEALSLLKKRFSHRPVQEKFVCLNCGFETHADEQAALNIARSWLFLRSQEYKKYQTNKTTGNTDKRAFVETWQSFYRKKLKEVWKPAV

SEQ ID NO: 40008 - protein, 978 aa, synthetic construct
  REGION 1..978: note = engineered CasX variant
QEIKRINKIRRRLVKDSNTKKAGKTGPMKTLLVRVMTPDLRERLENLRKKPENIPQPISNTSRANLNKLLTDYTEMKKAILHVYWEEFQKDPVGLMSRVAQPASKKIDQNKLKPEMDEKGNLTTAGFACSQCGQPLFVYKLEQVSEKGKAYTNYFGRCNVAEHEKLILLAQLKPEKDSDEAVTYSLGKFGQRALDFYSIHVTKESTHPVKPLAQIAGNRYASGPVGKALRDACMGTIASFLSKYQDIIIEHQKVVKGNQKRLESLRELAGKENLEYPSVTLPPQPHTSEGVDAYNEVIARVRMWVNLNLWQKLKLSRDDAKPLLRLKGFPSFPLVERQANEVDWWDMVCNVKKLINEKKEDGKVFWQNLAGYKRQEALRPYLSSEEDRKKGKKFARTQLGDLLLHLEKKHGEDWGKVYDEAWERIDKKVEGLSKHIKLEEERRSEDAQSKAALTDWLRAKASFVIEGLKEADKDEFCRCELKLQKWYGDLRGKPFAIEAENSILDISGFSKQYNCAFIWQKDGVKKLNLYLIINYFKGGKLRFKKIKPEAFEANRFYTVINKKSGEIVPMEVNFNFDDPNLIILPLAFGKRQGREFIWNDLLSLETGSLKLANGRVIEKTLYNRRTRQDEPALFVALTFERREVLDSSNIKPMNLIGVDRGENIPAVIALTDPEGCPLSRFKDSLGNPTHILRIGESYKEKQRTIQAKKEVEQRRAGGYSRKYASKAKNLADDMVRNTARDLLYYAVTQDAMLIFENLSRGFGRQGKRTFMAERQYTRMEDWLTAKLAYEGLPSKTYLSKTLAQYTSKTCSNCGFTITSADYDRVLEKLKKTATGWMTTINGKELKVEGQITYYNRYKRQNVVKDLSVELDRLSEESVNNDISSWTKGRSGEALSLLKKRFSHRPVQEKFVCLNCGFETHADEQAALNIARSWLFLRSQEYKKYQTNKTTGNTDKRAFVETWQSFYRKKLKEVWKPAV

SEQ ID NO: 40009 - protein, 979 aa, synthetic construct
  REGION 1..979: note = engineered CasX variant
QEIKRINKIRRRLVKDSNTKKAGKTGPMKTLLVRVMTPDLRERLENLRKKPENIPQPISNTSRANLNKLLTDYTEMKKAILHVYWEEFQKDPVGLMSRVAQPASKKIDQNKLKPEMDEKGNLTTAGFACSQCGQPLFVYKLEQVSEKGKAYTNYFGRCNVAEHEKLILLAQLKPEKDSDEAVTYSLGKFGQRALDFYSIHVTKESTHPVKPLAQIAGNRYASGPVGKALRDACMGTIASFLSKYQDIIIEHQKVVKGNQKRLESLRELAGKENLEYPSVTLPPQPHTSEGVDAYNEVIARVRMWVNLNLWQKLKLSRDDAKPLLRLKGFPSFPLVERQANEVDWWDMVCNVKKLINEKKEDGKVFWQNLAGYKRQEALRPYLSSEEDRKKGKKFARYQLGDLLLHLEKKHEGEDWGKVYDEAWERIDKKVEGLSKHIKLEEERRSEDAQSKAALTDWLRAKASFVIEGLKEADKDEFCRCELKLQKWYGDLRGKPFAIEAENSILDISGFSKQYNCAFIWQKDGVKKLNLYLIINYFKGGKLRFKKIKPEAFEANRFYTVINKKSGEIVPMEVNFNFDDPNLIILPLAFGKRQGREFIWNDLLSLETGSLKLANGRVIEKTLYNRRTRQDEPALFVALTFERREVLDSSNIKPMNLIGVDRGENIPAVIALTDPEGCPLSRFKDSLGNPTHILRIGESYKEKQRTIQAKKEVEQRRAGGYSRKYASKAKNLADDMVRNTARDLLYYAVTQDAMLIFENLSRGFGRQGKRTFMAERQYTRMEDWLTAKLAYEGLPSKTYLSKTLAQYTSKTCSNCGFTITSADYDRVLEKLKKTATGWMTTINGKELKVEGQITYYNRYKRQNVVKDLSVELDRLSEESVNNDISSWTKGRSGEALSLLKKRFSHRPVQEKFVCLNCGFETHADEQAALNIARSWLFLRSQEYKKYQTNKTTGNTDKRAFVETWQSFYRKKLKEVWKPAV

SEQ ID NO: 40010 - protein, 978 aa, synthetic construct
  REGION 1..978: note = engineered CasX variant
QEIKRINKIRRRLVKDSNTKKAGKTGPMKTLLVRVMTPDLRERLENLRKKPENIPQPISNTSRANLNKLLTDYTEMKKAILHVYWEEFQKDPVGLMSRVAQPASKKIDQNKLKPEMDEKGNLTTAGFACSQCGQPLFVYKLEQVSEKGKAYTNYFGRCNVAEHEKLILLAQLKPEKDSDEAVTYSLGKFGQRALDFYSIHVTKESTHPVKPLAQIAGNRYASGPVGKALRDACMGTIASFLSKYQDIIIEHQKVVKGNQKRLESLRELAGKENLEYPSVTLPPQPHTSEGVDAYNEVIARVRMWVNLNLWQKLKLSRDDAKPLLRLKGFPSFPLVERQANEVDWWDMVCNVKKLINEKKEDGKVFWQNLAGYKRQEALRPYLSSEEDRKKGKKFARYQLGDLLLHLEKKHGEDWGKVYDEAWERIDKKVEGLSKHIKLEEERRSEDAQSKAALTDWLRAKASFVIEGLKEADKDEFCRCDLKLQKWYGDLRGKPFAIEAENSILDISGFSKQYNCAFIWQKDGVKKLNLYLIINYFKGGKLRFKKIKPEAFEANRFYTVINKKSGEIVPMEVNFNFDDPNLIILPLAFGKRQGREFIWNDLLSLETGSLKLANGRVIEKTLYNRRTRQDEPALFVALTFERREVLDSSNIKPMNLIGVDRGENIPAVIALTDPEGCPLSRFKDSLGNPTHILRIGESYKEKQRTIQAKKEVEQRRAGGYSRKYASKAKNLADDMVRNTARDLLYYAVTQDAMLIFENLSRGFGRQGKRTFMAERQYTRMEDWLTAKLAYEGLPSKTYLSKTLAQYTSKTCSNCGFTITSADYDRVLEKLKKTATGWMTTINGKELKVEGQITYYNRYKRQNVVKDLSVELDRLSEESVNNDISSWTKGRSGEALSLLKKRFSHRPVQEKFVCLNCGFETHADEQAALNIARSWLFLRSQEYKKYQTNKTTGNTDKRAFVETWQSFYRKKLKEVWKPAV

SEQ ID NO: 40011 - protein, 978 aa, synthetic construct
  REGION 1..978: note = engineered CasX variant
QEIKRINKIRRRLVKDSNTKKAGKTGPMKTLLVRVMTPDLRERLENLRKKPENIPQPISNTSRANLNKLLTDYTEMKKAILHVYWEEFQKDPVGLMSRVAQPASKKIDQNKLKPEMDEKGNLTTAGFACSQCGQPLFVYKLEQVSEKGKAYTNYFGRCNVAEHEKLILLAQLKPEKDSDEAVTYSLGKFGQRALDFYSIHVTKESTHPVKPLAQIAGNRYASGPVGKALRDACMGTIASFLSKYQDIIIEHQKVVKGNQKRLESLRELAGKENLEYPSVTLPPQPHTSEGVDAYNEVIARVRMWVNLNLWQKLKLSRDDAKPLLRLKGFPSFPLVERQANEVDWWDMVCNVKKLINEKKEDGKVFWQNLAGYKRQEALRPYLSSEEDRKKGKKFARYQLGDLLLHLEKKHGEDWGKVYDEAWERIDKKVEGLSKHIKLEEERRSEDAQSKAALTDWLRAKASFVIEGLKEADKDEFCRCELKLQKWYGDLRGKPFAIEAENSILDISGFSKQYNCAFIWQKDGVKKLNLYLIINYFKGGKLRFKKIKPEAFEANRFYTVINKKSGEIVPMEVNFNFDDPNLIILPLAFGKRFGREFIWNDLLSLETGSLKLANGRVIEKTLYNRRTRQDEPALFVALTFERREVLDSSNIKPMNLIGVDRGENIPAVIALTDPEGCPLSRFKDSLGNPTHILRIGESYKEKQRTIQAKKEVEQRRAGGYSRKYASKAKNLADDMVRNTARDLLYYAVTQDAMLIFENLSRGFGRQGKRTFMAERQYTRMEDWLTAKLAYEGLPSKTYLSKTLAQYTSKTCSNCGFTITSADYDRVLEKLKKTATGWMTTINGKELKVEGQITYYNRYKRQNVVKDLSVELDRLSEESVNNDISSWTKGRSGEALSLLKKRFSHRPVQEKFVCLNCGFETHADEQAALNIARSWLFLRSQEYKKYQTNKTTGNTDKRAFVETWQSFYRKKLKEVWKPAV

SEQ ID NO: 40012 - protein, 978 aa, synthetic construct
  REGION 1..978: note = engineered CasX variant
QEIKRINKIRRRLVKDSNTKKAGKTGPMKTLLVRVMTPDLRERLENLRKKPENIPQPISNTSRANLNKLLTDYTEMKKAILHVYWEEFQKDPVGLMSRVAQPASKKIDQNKLKPEMDEKGNLTTAGFACSQCGQPLFVYKLEQVSEKGKAYTNYFGRCNVAEHEKLILLAQLKPEKDSDEAVTYSLGKFGQRALDFYSIHVTKESTHPVKPLAQIAGNRYASGPVGKALRDACMGTIASFLSKYQDIIIEHQKVVKGNQKRLESLRELAGKENLEYPSVTLPPQPHTSEGVDAYNEVIARVRMWVNLNLWQKLKLSRDDAKPLLRLKGFPSFPLVERQANEVDWWDMVCNVKKLINEKKEDGKVFWQNLAGYKRQEALRPYLSSEEDRKKGKKFARYQLGDLLLHLEKKHGEDWGKVYDEAWERIDKKVEGLSKHIKLEEERRSEDAQSKAALTDWLRAKASFVIEGLKEADKDEFCRCELKLQKWYGDLRGKPFAIEAENSILDISGFSKQYNCAFIWQKDGVKKLNLYLIINYFKGGKLRFKKIKPEAFEANRFYTVINKKSGEIVPMEVNFNFDDPNLIILPLAFGKRVGREFIWNDLLSLETGSLKLANGRVIEKTLYNRRTRQDEPALFVALTFERREVLDSSNIKPMNLIGVDRGENIPAVIALTDPEGCPLSRFKDSLGNPTHILRIGESYKEKQRTIQAKKEVEQRRAGGYSRKYASKAKNLADDMVRNTARDLLYYAVTQDAMLIFENLSRGFGRQGKRTFMAERQYTRMEDWLTAKLAYEGLPSKTYLSKTLAQYTSKTCSNCGFTITSADYDRVLEKLKKTATGWMTTINGKELKVEGQITYYNRYKRQNVVKDLSVELDRLSEESVNNDISSWTKGRSGEALSLLKKRFSHRPVQEKFVCLNCGFETHADEQAALNIARSWLFLRSQEYKKYQTNKTTGNTDKRAFVETWQSFYRKKLKEVWKPAV

SEQ ID NO: 40013 - protein, 979 aa, synthetic construct
  REGION 1..979: note = engineered CasX variant
QEIKRINKIRRRLVKDSNTKKAGKTGPMKTLLVRVMTPDLRERLENLRKKPENIPQPISNTSRANLNKLLTDYTEMKKAILHVYWEEFQKDPVGLMSRVAQPASKKIDQNKLKPEMDEKGNLTTAGFACSQCGQPLFVYKLEQVSEKGKAYTNYFGRCNVAEHEKLILLAQLKPEKDSDEAVTYSLGKFGQRALDFYSIHVTKESTHPVKPLAQIAGNRYASGPVGKALRDACMGTIASFLSKYQDIIIEHQKVVKGNQKRLESLRELAGKENLEYPSVTLPPQPHTSEGVDAYNEVIARVRMWVNLNLWQKLKLSRDDAKPLLRLKGFPSFPLVERQANEVDWWDMVCNVKKLINEKKEDGKVFWQNLAGYKRQEALRPYLSSEEDRKKGKKFARYQLGDLLLHLEKKHGEDWGKVYDEAWERIDKKVEGLSKHIKLEEERRSEDAQSKAALTDWLRAKASFVIEGLKEADKDEFCRCELKLQKWYGDLRGKPFAIEAENSILDISGFSKQYNCAFIWQKDGVKKLNLYLIINYFKGGKLRFKKIKPEAFEANRFYTVINKKSGEIVPMEVNFNFDDPNLIILPLAFGKRQGREFIWNDLLSLETGSLKLANGRVIEKTLYNRRTRQDEPALFVALTFERREVLDSSNIKTPMNLIGVDRGENIPAVIALTDPEGCPLSRFKDSLGNPTHILRIGESYKEKQRTIQAKKEVEQRRAGGYSRKYASKAKNLADDMVRNTARDLLYYAVTQDAMLIFENLSRGFGRQGKRTFMAERQYTRMEDWLTAKLAYEGLPSKTYLSKTLAQYTSKTCSNCGFTITSADYDRVLEKLKKTATGWMTTINGKELKVEGQITYYNRYKRQNVVKDLSVELDRLSEESVNNDISSWTKGRSGEALSLLKKRFSHRPVQEKFVCLNCGFETHADEQAALNIARSWLFLRSQEYKKYQTNKTTGNTDKRAFVETWQSFYRKKLKEVWKPAV

SEQ ID NO: 40014 - protein, 979 aa, synthetic construct
  REGION 1..979: note = engineered CasX variant
QEIKRINKIRRRLVKDSNTKKAGKTGPMKTLLVRVMTPDLRERLENLRKKPENIPQPISNTSRANLNKLLTDYTEMKKAILHVYWEEFQKDPVGLMSRVAQPASKKIDQNKLKPEMDEKGNLTTAGFACSQCGQPLFVYKLEQVSEKGKAYTNYFGRCNVAEHEKLILLAQLKPEKDSDEAVTYSLGKFGQRALDFYSIHVTKESTHPVKPLAQIAGNRYASGPVGKALRDACMGTIASFLSKYQDIIIEHQKVVKGNQKRLESLRELAGKENLEYPSVTLPPQPHTSEGVDAYNEVIARVRMWVNLNLWQKLKLSRDDAKPLLRLKGFPSFPLVERQANEVDWWDMVCNVKKLINEKKEDGKVFWQNLAGYKRQEALRPYLSSEEDRKKGKKFARYQLGDLLLHLEKKHGEDWGKVYDEAWERIDKKVEGLSKHIKLEEERRSEDAQSKAALTDWLRAKASFVIEGLKEADKDEFCRCELKLQKWYGDLRGKPFAIEAENSILDISGFSKQYNCAFIWQKDGVKKLNLYLIINYFKGGKLRFKKIKPEAFEANRFYTVINKKSGEIVPMEVNFNFDDPNLIILPLAFGKRQGREFIWNDLLSLETGSLKLANGRVIEKTLYNRRTRQDEPALFVALTFERREVLDSSNIKPMSNLIGVDRGENIPAVIALTDPEGCPLSRFKDSLGNPTHILRIGESYKEKQRTIQAKKEVEQRRAGGYSRKYASKAKNLADDMVRNTARDLLYYAVTQDAMLIFENLSRGFGRQGKRTFMAERQYTRMEDWLTAKLAYEGLPSKTYLSKTLAQYTSKTCSNCGFTITSADYDRVLEKLKKTATGWMTTINGKELKVEGQITYYNRYKRQNVVKDLSVELDRLSEESVNNDISSWTKGRSGEALSLLKKRFSHRPVQEKFVCLNCGFETHADEQAALNIARSWLFLRSQEYKKYQTNKTTGNTDKRAFVETWQSFYRKKLKEVWKPAV

SEQ ID NO: 40015 - protein, 978 aa, synthetic construct
  REGION 1..978: note = engineered CasX variant
QEIKRINKIRRRLVKDSNTKKAGKTGPMKTLLVRVMTPDLRERLENLRKKPENIPQPISNTSRANLNKLLTDYTEMKKAILHVYWEEFQKDPVGLMSRVAQPASKKIDQNKLKPEMDEKGNLTTAGFACSQCGQPLFVYKLEQVSEKGKAYTNYFGRCNVAEHEKLILLAQLKPEKDSDEAVTYSLGKFGQRALDFYSIHVTKESTHPVKPLAQIAGNRYASGPVGKALRDACMGTIASFLSKYQDIIIEHQKVVKGNQKRLESLRELAGKENLEYPSVTLPPQPHTSEGVDAYNEVIARVRMWVNLNLWQKLKLSRDDAKPLLRLKGFPSFPLVERQANEVDWWDMVCNVKKLINEKKEDGKVFWQNLAGYKRQEALRPYLSSEEDRKKGKKFARYQLGDLLLHLEKKHGEDWGKVYDEAWERIDKKVEGLSKHIKLEEERRSEDAQSKAALTDWLRAKASFVIEGLKEADKDEFCRCELKLQKWYGDLRGKPFAIEAENSILDISGFSKQYNCAFIWQKDGVKKLNLYLIINYFKGGKLRFKKIKPEAFEANRFYTVINKKSGEIVPMEVNFNFDDPNLIILPLAFGKRQGREFIWNDLLSLETGSLKLANGRVIEKTLYNRRTRQDEPALFVALTFERREVLDSSNIKPMNLIGVDRGENIPAVIALTDPEGCPLSRFKDSLGNPTHILRIRESYKEKQRTIQAKKEVEQRRAGGYSRKYASKAKNLADDMVRNTARDLLYYAVTQDAMLIFENLSRGFGRQGKRTFMAERQYTRMEDWLTAKLAYEGLPSKTYLSKTLAQYTSKTCSNCGFTITSADYDRVLEKLKKTATGWMTTINGKELKVEGQITYYNRYKRQNVVKDLSVELDRLSEESVNNDISSWTKGRSGEALSLLKKRFSHRPVQEKFVCLNCGFETHADEQAALNIARSWLFLRSQEYKKYQTNKTTGNTDKRAFVETWQSFYRKKLKEVWKPAV

SEQ ID NO: 40016 - protein, 978 aa, synthetic construct
  REGION 1..978: note = engineered CasX variant
QEIKRINKIRRRLVKDSNTKKAGKTGPMKTLLVRVMTPDLRERLENLRKKPENIPQPISNTSRANLNKLLTDYTEMKKAILHVYWEEFQKDPVGLMSRVAQPASKKIDQNKLKPEMDEKGNLTTAGFACSQCGQPLFVYKLEQVSEKGKAYTNYFGRCNVAEHEKLILLAQLKPEKDSDEAVTYSLGKFGQRALDFYSIHVTKESTHPVKPLAQIAGNRYASGPVGKALRDACMGTIASFLSKYQDIIIEHQKVVKGNQKRLESLRELAGKENLEYPSVTLPPQPHTSEGVDAYNEVIARVRMWVNLNLWQKLKLSRDDAKPLLRLKGFPSFPLVERQANEVDWWDMVCNVKKLINEKKEDGKVFWQNLAGYKRQEALRPYLSSEEDRKKGKKFARYQLGDLLLHLEKKHGEDWGKVYDEAWERIDKKVEGLSKHIKLEEERRSEDAQSKAALTDWLRAKASFVIEGLKEADKDEFCRCELKLQKWYGDLRGKPFAIEAENSILDISGFSKQYNCAFIWQKDGVKKLNLYLIINYFKGGKLRFKKIKPEAFEANRFYTVINKKSGEIVPMEVNFNFDDPNLIILPLAFGKRQGREFIWNDLLSLETGSLKLANGRVIEKTLYNRRTRQDEPALFVALTFERREVLDSSNIKPMNLIGVDRGENIPAVIALTDPEGCPLSRFKDSLGNPTHILRIGESYKEKQRTIQAKKEVEQRRAGGYSRKYASKAKNLADDMVRNTARDLLYYAVTQDAMLIFENLSRGFGRQGKRTFSAERQYTRMEDWLTAKLAYEGLPSKTYLSKTLAQYTSKTCSNCGFTITSADYDRVLEKLKKTATGWMTTINGKELKVEGQITYYNRYKRQNVVKDLSVELDRLSEESVNNDISSWTKGRSGEALSLLKKRFSHRPVQEKFVCLNCGFETHADEQAALNIARSWLFLRSQEYKKYQTNKTTGNTDKRAFVETWQSFYRKKLKEVWKPAV

SEQ ID NO: 40017 - protein, 978 aa, synthetic construct
  REGION 1..978: note = engineered CasX variant
QEIKRINKIRRRLVKDSNTKKAGKTGPMKTLLVRVMTPDLRERLENLRKKPENIPQPISNTSRANLNKLLTDYTEMKKAILHVYWEEFQKDPVGLMSRVAQPASKKIDQNKLKPEMDEKGNLTTAGFACSQCGQPLFVYKLEQVSEKGKAYTNYFGRCNVAEHEKLILLAQLKPEKDSDEAVTYSLGKFGQRALDFYSIHVTKESTHPVKPLAQIAGNRYASGPVGKALRDACMGTIASFLSKYQDIIIEHQKVVKGNQKRLESLRELAGKENLEYPSVTLPPQPHTSEGVDAYNEVIARVRMWVNLNLWQKLKLSRDDAKPLLRLKGFPSFPLVERQANEVDWWDMVCNVKKLINEKKEDGKVFWQNLAGYKRQEALRPYLSSEEDRKKGKKFARYQLGDLLLHLEKKHGEDWGKVYDEAWERIDKKVEGLSKHIKLEEERRSEDAQSKAALTDWLRAKASFVIEGLKEADKDEFCRCELKLQKWYGDLRGKPFAIEAENSILDISGFSKQYNCAFIWQKDGVKKLNLYLIINYFKGGKLRFKKIKPEAFEANRFYTVINKKSGEIVPMEVNFNFDDPNLIILPLAFGKRQGREFIWNDLLSLETGSLKLANGRVIEKTLYNRRTRQDEPALFVALTFERREVLDSSNIKPMNLIGVDRGENIPAVIALTDPEGCPLSRFKDSLGNPTHILRIGESYKEKQRTIQAKKEVEQRRAGGYSRKYASKAKNLADDMVRNTARDLLYYAVTQDAMLIFENLSRGFGRQGKRTFMAERQYTRMEDWLTAKLAYEGLPSKTYLSKTLAQYTSKTCSNCGFTITSADYDRVLEKLKKTATGWMTTINGKELKVEGQITYYNRYKRQNVVKDLSVELDRLSEESVNNDISSWDKGRSGEALSLLKKRFSHRPVQEKFVCLNCGFETHADEQAALNIARSWLFLRSQEYKKYQTNKTTGNTDKRAFVETWQSFYRKKLKEVWKPAV

SEQ ID NO: 40018 - protein, 978 aa, synthetic construct
  REGION 1..978: note = engineered CasX variant
QEIKRINKIRRRLVKDSNTKKAGKTGPMKTLLVRVMTPDLRERLENLRKKPENIPQPISNTSRANLNKLLTDYTEMKKAILHVYWEEFQVDPVGLMSRVAQPASKKIDQNKLKPEMDEKGNLTTAGFACSQCGQPLFVYKLEQVSEKGKAYTNYFGRCNVAEHEKLILLAQLKPEKDSDEAVTYSLGKFGQRALDFYSIHVTKESTHPVKPLAQIAGNRYASGPVGKALRDACMGTIASFLSKYQDIIIEHQKVVKGNQKRLESLRELAGKENLEYPSVTLPPQPHTSEGVDAYNEVIARVRMWVNLNLWQKLKLSRDDAKPLLRLKGFPSFPLVERQANEVDWWDMVCNVKKLINEKKEDGKVFWQNLAGYKRQEALRPYLSSEEDRKKGKKFARYQLGDLLLHLEKKHGEDWGKVYDEAWERIDKKVEGLSKHIKLEEERRSEDAQSKAALTDWLRAKASFVIEGLKEADKDEFCRCELKLQKWYGDLRGKPFAIEAENSILDISGFSKQYNCAFIWQKDGVKKLNLYLIINYFKGGKLRFKKIKPEAFEANRFYTVINKKSGEIVPMEVNFNFDDPNLIILPLAFGKRQGREFIWNDLLSLETGSLKLANGRVIEKTLYNRRTRQDEPALFVALTFERREVLDSSNIKPMNLIGVDRGENIPAVIALTDPEGCPLSRFKDSLGNPTHILRIGESYKEKQRTIQAKKEVEQRRAGGYSRKYASKAKNLADDMVRNTARDLLYYAVTQDAMLIFENLSRGFGRQGKRTFMAERQYTRMEDWLTAKLAYEGLPSKTYLSKTLAQYTSKTCSNCGFTITSADYDRVLEKLKKTATGWMTTINGKELKVEGQITYYNRYKRQNVVKDLSVELDRLSEESVNNDISSWTKGRSGEALSLLKKRFSHRPVQEKFVCLNCGFETHADEQAALNIARSWLFLRSQEYKKYQTNKTTGNTDKRAFVETWQSFYRKKLKEVWKPAV

SEQ ID NO: 40019 - protein, 978 aa, synthetic construct
  REGION 1..978: note = engineered CasX variant
QEIKRLNKIRRRLVKDSNTKKAGKTGPMKTLLVRVMTPDLRERLENLRKKPENIPQPISNTSRANLNKLLTDYTEMKKAILHVYWEEFQKDPVGLMSRVAQPASKKIDQNKLKPEMDEKGNLTTAGFACSQCGQPLFVYKLEQVSEKGKAYTNYFGRCNVAEHEKLILLAQLKPEKDSDEAVTYSLGKFGQRALDFYSIHVTKESTHPVKPLAQIAGNRYASGPVGKALRDACMGTIASFLSKYQDIIIEHQKVVKGNQKRLESLRELAGKENLEYPSVTLPPQPHTSEGVDAYNEVIARVRMWVNLNLWQKLKLSRDDAKPLLRLKGFPSFPLVERQANEVDWWDMVCNVKKLINEKKEDGKVFWQNLAGYKRQEALRPYLSSEEDRKKGKKFARYQLGDLLLHLEKKHGEDWGKVYDEAWERIDKKVEGLSKHIKLEEERRSEDAQSKAALTDWLRAKASFVIEGLKEADKDEFCRCELKLQKWYGDLRGKPFAIEAENSILDISGFSKQYNCAFIWQKDGVKKLNLYLIINYFKGGKLRFKKIKPEAFEANRFYTVINKKSGEIVPMEVNFNFDDPNLIILPLAFGKRQGREFIWNDLLSLETGSLKLANGRVIEKTLYNRRTRQDEPALFVALTFERREVLDSSNIKPMNLIGVDRGENIPAVIALTDPEGCPLSRFKDSLGNPTHILRIGESYKEKQRTIQAKKEVEQRRAGGYSRKYASKAKNLADDMVRNTARDLLYYAVTQDAMLIFENLSRGFGRQGKRTFMAERQYTRMEDWLTAKLAYEGLPSKTYLSKTLAQYTSKTCSNCGFTITSADYDRVLEKLKKTATGWMTTINGKELKVEGQITYYNRYKRQNVVKDLSVELDRLSEESVNNDISSWTKGRSGEALSLLKKRFSHRPVQEKFVCLNCGFETHADEQAALNIARSWLFLRSQEYKKYQTNKTTGNTDKRAFVETWQSFYRKKLKEVWKPAV

SEQ ID NO: 40020 - protein, 978 aa, synthetic construct
  REGION 1..978: note = engineered CasX variant
QEIKRINKIRRRLVKDSNTKKAGKTGPMKTLLVRVMTPDLRERLENLRKKPENIPQPISNTSRANLNKLLTDYTEMKKAILHVYWEEFQKDPVGLMSRVAQPASKKIDQNKLKPEMDEKGNLTTAGFACSQCGQPLFVYKLEQVSEKGKAYTNYVGRCNVAEHEKLILLAQLKPEKDSDEAVTYSLGKFGQRALDFYSIHVTKESTHPVKPLAQIAGNRYASGPVGKALRDACMGTIASFLSKYQDIIIEHQKVVKGNQKRLESLRELAGKENLEYPSVTLPPQPHTSEGVDAYNEVIARVRMWVNLNLWQKLKLSRDDAKPLLRLKGFPSFPLVERQANEVDWWDMVCNVKKLINEKKEDGKVFWQNLAGYKRQEALRPYLSSEEDRKKGKKFARYQLGDLLLHLEKKHGEDWGKVYDEAWERIDKKVEGLSKHIKLEEERRSEDAQSKAALTDWLRAKASFVIEGLKEADKDEFCRCELKLQKWYGDLRGKPFAIEAENSILDISGFSKQYNCAFIWQKDGVKKLNLYLIINYFKGGKLRFKKIKPEAFEANRFYTVINKKSGEIVPMEVNFNFDDPNLIILPLAFGKRQGREFIWNDLLSLETGSLKLANGRVIEKTLYNRRTRQDEPALFVALTFERREVLDSSNIKPMNLIGVDRGENIPAVIALTDPEGCPLSRFKDSLGNPTHILRIGESYKEKQRTIQAKKEVEQRRAGGYSRKYASKAKNLADDMVRNTARDLLYYAVTQDAMLIFENLSRGFGRQGKRTFMAERQYTRMEDWLTAKLAYEGLPSKTYLSKTLAQYTSKTCSNCGFTITSADYDRVLEKLKKTATGWMTTINGKELKVEGQITYYNRYKRQNVVKDLSVELDRLSEESVNNDISSWTKGRSGEALSLLKKRFSHRPVQEKFVCLNCGFETHADEQAALNIARSWLFLRSQEYKKYQTNKTTGNTDKRAFVETWQSFYRKKLKEVWKPAV

SEQ ID NO: 40021 - protein, 978 aa, synthetic construct
  REGION 1..978: note = engineered CasX variant
QEIKRINKIRRRLVKDSNTKKAGKTGPMKTLLVRVMTPDLRERLENLRKKPENIPQPISNTSRANLNKLLTDYTEMKKAILHVYWEEFQKDPVGLMSRVAQPASKKIDQNKLKPEMDEKGNLTTAGFACSQCGQPLFVYKLEQVSEKGKAYTNYFGRCNVAEHEKLILLAQLKPEKDSDEAVTYSLGKFGQRALDFYSIHVTKESTHPVKPLAQIAGNRYASGPVGKALRDACMGTIASFLSKYQDIIIEHQKVVKGNQKRLESLRELAGKENLEYPSVTLPPQPHTSEGVDAYNEVIARVRMWVNLNLWQKLKLSRDDAKPLLRLKGFPSFPLVERQANEVDWWDMVCNVKKLINEKKEDGKVFWQNLAGYKRQEALRPYLSSEEDRKKGKKFARYQLGDLLLHLEKKHGEDWGKVYDEAWERIDKKVEGLSKHIKLEEERRSEDAQSKAALTDWLRAKASFVIEGLKEADKDEFCRCELKLQKWYGDLRGKPFAIEAENSILDISGFSKQYNCAFIWQKDGVKKLNLYLIINYFKGGKLRFKKIKPEAFEANRFYTVINKKSGEIVPMEVNFNFDDPNLIILPLAFGKRQGREFIWNDLLSLETGSLKLANGRVIEKTLYNRRTRQDEPALFVALTFERREVLDSSNIKPMNLIGVDRGENIPAVIALTDPEGCPLSRFKDSLGNPTHILRIGESYKEKQRTIQAKKEVEQRRAGGYSRKYASKAKNLADDMVRNTARDLLYYAVTQDAMLIFENLSRGFGRQGKRTFMAERQYTRMEDWLTAKLAYEGLASKTYLSKTLAQYTSKTCSNCGFTITSADYDRVLEKLKKTATGWMTTINGKELKVEGQITYYNRYKRQNVVKDLSVELDRLSEESVNNDISSWTKGRSGEALSLLKKRFSHRPVQEKFVCLNCGFETHADEQAALNIARSWLFLRSQEYKKYQTNKTTGNTDKRAFVETWQSFYRKKLKEVWKPAV

SEQ ID NO: 40022 - protein, 978 aa, synthetic construct
  REGION 1..978: note = engineered CasX variant
QEIKRINKIRRRLVKDSNTKKAGKTGPMKTLLVRVMTPDLRERLENLRKKPENIPQPISNTSRANLNKLLTDYTEMKKAILHVYWEEFQKDPVGLMSRVAQPASKKIDQNKLKPEMDEKGNLTTAGFACSQCGQPLFVYKLEQVSEKGKAYTNYFGRCNVAEHEKLILLAQLKPEKDSDEAVTYSLGKFGQRALDFYSIHVTKESTHPVKPLAQIAGNRYASGPVGKALRDACMGTIASFLSKYQDIIIEHQKVVKGNQKRLESLRELAGKENLEYPSVTLPPQPHTSEGVDAYNEVIARVRMWVNLNLWQKLKLSRDDAKPLLRLKGFPSFPLVERQANEVDWWDMVCNVKKLINEKKEDGKVFWQNLAGYKRQEALRPYLSSEEDRKKGKKFARYQLGDLLLHLEKKHGEDWGKVYDEAWERIDKKVEGLSKHIKLEEERRSEDAQSKAALTDWLRAKASFVIEGLKEADKDEFCRCELKLQKWYGDLRGKPFAIEAENSILDISGFSKQYNCAFIWQKDGVKKLNLYLIINYFKGGKLRFKKIKPEAFEANRFYTVINKKSGEIVPMEVNFNFDDPNLIILPLAFGKRQGREFIWNDLLSLETGSLKLANGRVIEKTLYNRRTRQDEPALFVALTFERREVLDSSNIKPMNLIGVDRGENIPAVIALTDPEGCPLSRFKDSLGNPTHILRIGESYKEKQRTIQAKKEVEQRRAGGYSRKYASKAKNLADDMVRNTARDLLYYAVTQDAMLIFENLSRGFGRQGKRTFMAERQYTRMEDWLTAKLAYEGLPSKVYLSKTLAQYTSKTCSNCGFTITSADYDRVLEKLKKTATGWMTTINGKELKVEGQITYYNRYKRQNVVKDLSVELDRLSEESVNNDISSWTKGRSGEALSLLKKRFSHRPVQEKFVCLNCGFETHADEQAALNIARSWLFLRSQEYKKYQTNKTTGNTDKRAFVETWQSFYRKKLKEVWKPAV

SEQ ID NO: 40023 - protein, 979 aa, synthetic construct
  REGION 1..979: note = engineered CasX variant
QEIKRINKIRRRLVKDSNTKKAGKTGPMKTLLVRVMTPDLRERLENLRKKPENIPQPISNTSRANLNKLLTDYTEMKKAILHVYWEEFQKDPVGLMSRVAQPASKKIDQNKLKPEMDEKGNLTTAGFACSQCGQPLFVYKLEQVSEKGKAYTNYFGRCNVAEHEKLILLAQLKPEKDSDEAVTYSLGKFGQRALDFYSIHVTKESTHPVKPLAQIAGNRYASGPVGKALRDACMGTIASFLSKYQDIIIEHQKVVKGNQKRLESLRELAGKENLEYPSVTLPPQPHTSEGVDAYNEVIARVRMWVNLNLWQKLKLSRDDAKPLLRLKGFPSFPLVERQANEVDWWDMVCNVKKLINEKKEDGKVFWQNLAGYKRQEALRPYLSSEEDRKKGKKFARYQLGDLLLHLEKKHGEDWGKVYDEAWERIDKKVEGLSKHIKLEEERRSEDAQSKAALTDWLRAKASFVIEGLKEADKDEFCRCELKLQKWYGDLRGKPFAIEAENSILDISGFSKQYNCAFIWQKDGVKKLNLYLIINYFKGGKLRFKKIKPEAFEANRFYTVINKKSGEIVPMEVNFNFDDPNLIILPLAFGKRQGREFIWNDLLSLETGSLKLANGRVIEKTLYNRRTRQDEPALFVALTFERREVLDSSNIKPMNLIGVDRGENIPAVIALTDPEGCPLSRFKDSLGNPTHILRIGESYKEKQRTIQAKKEVEQRRAGGYSRKYASKAKNLADDMVRNTARDLLYYAVTQDAMLIFENLSRGFGRQGKRTFMAERQYTRMEDWLTAKLAYEGPLPSKTYLSKTLAQYTSKTCSNCGFTITSADYDRVLEKLKKTATGWMTTINGKELKVEGQITYYNRYKRQNVVKDLSVELDRLSEESVNNDISSWTKGRSGEALSLLKKRFSHRPVQEKFVCLNCGFETHADEQAALNIARSWLFLRSQEYKKYQTNKTTGNTDKRAFVETWQSFYRKKLKEVWKPAV

SEQ ID NO: 40024 - protein, 979 aa, synthetic construct
  REGION 1..979: note = engineered CasX variant
QEIKRINKIRRRLVKDSNTKKAGKTGPMKTLLVRVMTPDLRERLENLRKKPENIPQPISNTSRANLNKLLTDYTEMKKAILHVYWEEFQKDPVGLMSRVAQPASKKIDQNKLKPEMDEKGNLTTAGFACSQCGQPLFVYKLEQVSEKGKAYTNYFGRCNVAEHEKLILLAQLKPEKDSDEAVTYSLGKFGQRALDFYSIHVTKESTHPVKPLAQIAGNRYASGPVGKALRDACMGTIASFLSKYQDIIIEHQKVVKGNQKRLESLRELAGKENLEYPSVTLPPQPHTSEGVDAYNEVIARVRMWVNLNLWQKLKLSRDDAKPLLRLKGFPSFPLVERQANEVDWWDMVCNVKKLINEKKEDGKVFWQNLAGYKRQEALRPYLSSEEDVRKKGKKFARYQLGDLLLHLEKKHGEDWGKVYDEAWERIDKKVEGLSKHIKLEEERRSEDAQSKAALTDWLRAKASFVIEGLKEADKDEFCRCELKLQKWYGDLRGKPFAIEAENSILDISGFSKQYNCAFIWQKDGVKKLNLYLIINYFKGGKLRFKKIKPEAFEANRFYTVINKKSGEIVPMEVNFNFDDPNLIILPLAFGKRQGREFIWNDLLSLETGSLKLANGRVIEKTLYNRRTRQDEPALFVALTFERREVLDSSNIKPMNLIGVDRGENIPAVIALTDPEGCPLSRFKDSLGNPTHILRIGESYKEKQRTIQAKKEVEQRRAGGYSRKYASKAKNLADDMVRNTARDLLYYAVTQDAMLIFENLSRGFGRQGKRTFMAERQYTRMEDWLTAKLAYEGLPSKTYLSKTLAQYTSKTCSNCGFTITSADYDRVLEKLKKTATGWMTTINGKELKVEGQITYYNRYKRQNVVKDLSVELDRLSEESVNNDISSWTKGRSGEALSLLKKRFSHRPVQEKFVCLNCGFETHADEQAALNIARSWLFLRSQEYKKYQTNKTTGNTDKRAFVETWQSFYRKKLKEVWKPAV

SEQ ID NO: 40025 - protein, 978 aa, synthetic construct
  REGION 1..978: note = engineered CasX variant
QEIKRINKIRRRLVKDSNTKKAGKTGPMKTLLVRVMTPDLRERLENLRKKPENIPQPISNTSRANLNKLLTDYTEMKKAILHVYWEEFQKDPVGLMSRVAQPASKKIDQNKLKPEMDEKGNLTTAGFACSQCGQPLFVYKLEQVSEKGKAYTNYFGRCNVAEHEKLILLAQLKPEKDSDEAVTYSLGKFGQRALDFYSIHVTKESTHPVKPLAQIAGNRYASGPVGKALRDACMGTIASFLSKYQDIIIEHQKVVKGNQKRLESLRELAGKENLEYPSVTLPPQPHTSEGVDAYNEVIARVRMWVNLNLWQKLKLSRDDAKPLLRLKGFPSFPLVERQANEVDWWDMVCNVKKLINEKKEDGKVFWQNLAGYKRQEALRPYLSSEEDRKKGKKFARYQLGDLLLHLEKKHGEDWGKVYDEAWERIDKKVEGLSKHIKLEEERRSEDAQSKAALTDWLRAKASFVIEGLKEADKDEFCRCELKLQKWYGDLRGKPFAIEAENSILDISGFSKQYNCAFIWQKDGVKKLNLYLIINYFKGGKLRFKKIKPEAFEANRFYTVINKKSGEIVPMEVNFNFDDPNLIILPLAFGKRQGREFIWNDLLSLETGSLKLANGRVIEKTLYNRRTRQDEPALFVALTFERREVLDSSNIKPMNLIGVDRGENIPAVIALTDPEGCPLSRFKDSLGNPTHILRIGESYKEKQRTIQAKKEVEQRRAGGYSRKYASKAKNLADDMVRNTARDLLYYAVTQDAMLIFENLSRGFGRQGKRTFMAERQYTRMEDWLTAKLAYEGLPSKTYLSKTLAQYTSKTCSNCGFTITSADYDRMLEKLKKTATGWMTTINGKELKVEGQITYYNRYKRQNVVKDLSVELDRLSEESVNNDISSWTKGRSGEALSLLKKRFSHRPVQEKFVCLNCGFETHADEQAALNIARSWLFLRSQEYKKYQTNKTTGNTDKRAFVETWQSFYRKKLKEVWKPAV

SEQ ID NO: 40026 - protein, 978 aa, synthetic construct
  REGION 1..978: note = engineered CasX variant
QEIKRINKIRRRLVKDSNTKKAGKTGPMKTLLVRVMTPDLRERLENLRKKPENIPQPISNTSRANLNKLLTDYTEMKKAILHVYWEEFQKDPVGLMSRVAQPASKKIDQNKLKPEMDEKGNLTTAGFACSQCGQPLFVYKLEQVSEKGKAYTNYFGRCNVAEHEKLILLAQLKPEKDSDEAVTYSLGKFGQRALDFYSIHVTKESTHPVKPLAQIAGNRYASGPVGKALRDACMGTIASFLSKYQDIIIEHQKVVKGNQKRLESLRELAGKENLEYPSVTLPPQPHTSEGVDAYNEVIARVRMWVNLNLWQKLKLSRDDAKPLLRLKGFPSFPLVERQANEVDWWDMVCNVKKLINEKKEDGKVFWQNLAGYKRQEALRPYLSSEEDRKKGKKFARYQLGDLLLHLEKKHGEDWGKVYDEAWERIDKKVEGLSKHIKLEEERRSEDAQSKAALTDWLRAKASFVIEGLKEADKDEFCRCELKLQKWYGDLRGKPFAIEAENSILDISGFSKQYNCAFIWQKDGVKKLNLYLIINYFKGGKLRFKKIKPEAFEANRFYTVINKKSGEIVPMEVNFNFDDPNLIILPLAFGKRQGREFIWNDLLSLETGSLKLANGRVIEKTLYNRRTRQDEPALFVALTFERREVLDSSNIKPMNLIGVDRGENIPAVIALTDPEGCPLSRFKDSLGNPTHILRIGESYKEKQRTIQAKKEVEQRRAGGYSRKYASKAKNLADDMVRNTARDLLYYAVTQDAMLIFENLSRGFGRQGKRTFMAERQYTRMEDWLTAKLAYEGLPSKTYLSKTLAQYTSKTCSNCGFTITSADYDRVLEKLKKTATGWMTTINGKELKVEGQITYYNRYKRQNVVKDLSVELDRLSEESVNNDISSWTKGRQGEALSLLKKRFSHRPVQEKFVCLNCGFETHADEQAALNIARSWLFLRSQEYKKYQTNKTTGNTDKRAFVETWQSFYRKKLKEVWKPAV

SEQ ID NO: 40027 - protein, 978 aa, synthetic construct
  REGION 1..978: note = engineered CasX variant
QEIKRINKIRRRLVKDSNTKKAGKTGPMKTLLVRVMTPDLRERLENLRKKPENIPQPISNTSRANLNKLLTDYTEMKKAILHVYWEEFQKDPVGLMSRVAQPASKKIDQNKLKPEMDEKGNLTTAGFACSQCGQPLFVYKLEQVSEKGKAYTNYFGRCNVAEHEKLILLAQLKPEKDSDEAVTYSLGKFGQRALDFYSIHVTKESTHPVKPLAQIAGNRYASGPVGKALRDACMGTIASFLSKYQDIIIEHQKVVKGNQKRLESLRELAGKENLEYPSVTLPPQPHTSEGVDAYNEVIARVRMWVNLNLWQKLKLSRDDAKPLLRLKGFPSFPLVERQANEVDWWDMVCNVKKLINEKKEDGKVFWQNLAGYKRQEALRPYLSSEEDRKKGKKFARYQLGDLLLHLEKKHGEDWGKVYDEAWERIDKKVEGLSKHIKLEEERRSEDAQSKAALTDWLRAKASFVIEGLKEADKDEFCRCELKLQKWYGDLRGKPFAIEAENSILDISGFSKQYNCAFIWQKDGVKKLNLYLIINYFKGGKLRFKKIKPEAFEANRFYTVINKKSGEIVPMEVNFNFDDPNLIILPLAFGKRQGREFIWNDLLSLETGSLKLANGRVIEKTLYNRRTRQDEPALFVALTFERREVLDSSNIKPMNLIGVDRGENIPAVIALTDPEGCPLSRFKDSLGNPTHILRIGESYKEKQRTIQAKKEVEQRRAGGYSRKYASKAKNLADDMVRNTARDLLYYAVTQDAMLIFENLSRGFGRQGKRTFMAERQYTRMEDWLTAKLAYEGLPSKTYLSKTLAQYTSKTCSNCGFTITSADYDRVLEKLKKTATGWMTTINGKELKVEGQITYYNRYKRQNVVKDLSVELDRLSEESVNNDISSWTKGRSGEALSLLKKRFSHRPVQEKFVCLNCEFETHADEQAALNIARSWLFLRSQEYKKYQTNKTTGNTDKRAFVETWQSFYRKKLKEVWKPAV

SEQ ID NO: 40028 - protein, 979 aa, synthetic construct
  REGION 1..979: note = engineered CasX variant
QEIKRINKIRRRLVKDSNTKKAGKTGPMKTLLVRVMTPDLRERLENLRKKPENIPQPISNTSRANLNKLLTDYTEMKKAILHVYWEEFQKDPVGLMSRVAQPASKKIDQNKLKPEMDEKGNLTTAGFACSQCGQPLFVYKLEQVSEKGKAYTNYFGRCNVAEHEKLILLAQLKPEKDSDEAVTYSLGKFGQRALDFYSIHVTKESTHPVKPLAQIAGNRYASGPVGKALRDACMGTIASFLSKYQDIIIEHQKVVKGNQKRLESLRELAGKENLEYPSVTLPPQPHTSEGVDAYNEVIARVRMWVNLNLWQKLKLSRDDAKPLLRLKGFPSFPLVERQANEVDWWDMVCNVKKLINEKKEDGKVFWQNLAGYKRQEALRPYLSSEEDRKKGKKFARYQLGDLLLHLEKKHGEDWGKVYDEAWERIDKKVEGLSKHIKLEEERRSEDAQSKAALTDWLRAKASFVIEGLKEADKDEFCRCELKLQKWYGDLRGKPFAIEAENSILDISGFSKQYNCAFIWQKDGVKKLNLYLIINYFKGGKLRFKKIKPEAFEANRFYTVINKKSGEIVPMEVNFNFDDPNLIILPLAFGKRQGREFIWNDLLSLETGSLKLANGRVIEKTLYNRRTRQDEPALFVALTFERREVLDSSNIKPMNLIGVDRGENIPAVIALTDPEGCPLSRFKDSLGNPTHILRIGESYKEKQRTIQAKKEVEQRRAGGYSRKYASKAKNLADDMVRNTARDLLYYAVTQDAMLIFENLSRGFGRQGKRTFMAERQYTRMEDWLTAKLAYEGLPSKTYLSKTLAQYTSKTCSNCGFTITSADYDRVLEKLKKTATGWMTTINGKELKVEGQITYYNRYKRQNVVKDLSVELDRLSEESVNNDISSWTKGRSGEALSLLKKRFSHRPVQEKFVCLNCGFETHADEQAALNIARSWLFLRSQEYKKYQTNKTSTGNTDKRAFVETWQSFYRKKLKEVWKPAV

SEQ ID NO: 40029 - protein, 979 aa, synthetic construct
  REGION 1..979: note = engineered CasX variant
QEIKRINKIRRRLVKDSNTKKAGKTGPMKTLLVRVMTPDLRERLENLRKKPENIPQPISNTSRANLNKLLTDYTEMKKAILHVYWEEFQKDPVGLMSRVAQPASKKIDQNKLKPEMDEKGNLTTAGFACSQCGQPLFVYKLEQVSEKGKAYTNYFGRCNVAEHEKLILLAQLKPEKDSDEAVTYSLGKFGQRALDFYSIHVTKESTHPVKPLAQIAGNRYASGPVGKALRDACMGTIASFLSKYQDIIIEHQKVVKGNQKRLESLRELAGKENLEYPSVTLPPQPHTSEGVDAYNEVIARVRMWVNLNLWQKLKLSRDDAKPLLRLKGFPSFPLVERQANEVDWWDMVCNVKKLINEKKEDGKVFWQNLAGYKRQEALRPYLSSEEDRKKGKKFARYQLGDLLLHLEKKHGEDWGKVYDEAWERIDKKVEGLSKHIKLEEERRSEDAQSKAALTDWLRAKASFVIEGLKEADKDEFCRCELKLQKWYGDLRGKPFAIEAENSILDISGFSKQYNCAFIWQKDGVKKLNLYLIINYFKGGKLRFKKIKPEAFEANRFYTVINKKSGEIVPMEVNFNFDDPNLIILPLAFGKRQGREFIWNDLLSLETGSLKLANGRVIEKTLYNRRTRQDEPALFVALTFERREVLDSSNIKPMNLIGVDRGENIPAVIALTDPEGCPLSRFKDSLGNPTHILRIGESYKEKQRTIQAKKEVEQRRAGGYSRKYASKAKNLADDMVRNTARDLLYYAVTQDAMLIFENLSRGFGRQGKRTFMAERQYTRMEDWLTAKLAYEGLPSKTYLSKTLAQYTSKTCSNCGFTITSADYDRVLEKLKKTATGWMTTINGKELKVEGQITYYNRYKRQNVVKDLSVELDRLSEESVNNDISSWTKGRSGEALSLLKKRFSHRPVQEKFVCLNCGFETHADEQAALNIARSWLFLRSQEYKKYQTNKTTGKNTDKRAFVETWQSFYRKKLKEVWKPAV

SEQ ID NO: 40030 - protein, 978 aa, synthetic construct
  REGION 1..978: note = engineered CasX variant
QEIKRINKIRRRLVKDSNTKKAGKTGPMKTLLVRVMTPDLRERLENLRKKPENIPQPISNTSRANLNKLLTDYTEMKKAILHVYWEEFQKDPVGLMSRVAQPASKKIDQNKLKPEMDEKGNLTTAGFACSQCGQPLFVYKLEQVSEKGKAYTNYFGRCNVAEHEKLILLAQLKPEKDSDEAVTYSLGKFGQRALDFYSIHVTKESTHPVKPLAQIAGNRYASGPVGKALRDACMGTIASFLSKYQDIIIEHQKVVKGNQKRLESLRELAGKENLEYPSVTLPPQPHTSEGVDAYNEVIARVRMWVNLNLWQKLKLSRDDAKPLLRLKKFPSFPLVERQANEVDWWDMVCNVKKLINEKKEDGKVFWQNLAGYKRQEALRPYLSSEEDRKKGKKFARYQLGDLLLHLEKKHGEDWGKVYDEAWERIDKKVEGLSKHIKLEEERRSEDAQSKAALTDWLRAKASFVIEGLKEADKDEFCRCELKLQKWYGDLRGKPFAIEAENSILDISGFSKQYNCAFIWQKDGVKKLNLYLIINYFKGGKLRFKKIKPEAFEANRFYTVINKKSGEIVPMEVNFNFDDPNLIILPLAFGKRQGREFIWNDLLSLETGSLKLANGRVIEKTLYNRRTRQDEPALFVALTFERREVLDSSNIKPMNLIGVDRGENIPAVIALTDPEGCPLSRFKDSLGNPTHILRIGESYKEKQRTIQAKKEVEQRRAGGYSRKYASKAKNLADDMVRNTARDLLYYAVTQDAMLIFENLSRGFGRQGKRTFMAERQYTRMEDWLTAKLAYEGLPSKTYLSKTLAQYTSKTCSNCGFTITSADYDRVLEKLKKTATGWMTTINGKELKVEGQITYYNRYKRQNVVKDLSVELDRLSEESVNNDISSWTKGRSGEALSLLKKRFSHRPVQEKFVCLNCGFETHADEQAALNIARSWLFLRSQEYKKYQTNKTTGNTDKRAFVETWQSFYRKKLKEVWKPAV

SEQ ID NO: 40031 - protein, 978 aa, synthetic construct
  REGION 1..978: note = engineered CasX variant
QEIKRINKIRRRLVKDSNTKKAGKTGPMKTLLVRVMTPDLRERLENLRKKPENIPQPISNTSRANLNKLLTDYTEMKKAILHVYWEEFQKDPVGLMSRVAQPASKKIDQNKLKPEMDEKGNLTTAGFACSQCGQPLFVYKLEQVSEKGKAYTNYFGRCNVAEHEKLILLAQLKPEKDSDEAVTYSLGKFGQRALDFYSIHVTKESTHPVKPLAQIAGNRYASGPVGKALRDACMGTIASFLSKYQDIIIEHQKVVKGNQKRLESLRELAGKENLEYPSVTLPPQPHTSEGVDAYNEVIARVRMWVNLNLWQKLKLSRDDAKPLLRLKGFPSFPLVERQANEVDWWDMVCNVKKLINEKKEDGKVFWQNLAGYKRQEALRPYLSSEEDRKKGKKFARYQLGDLLLHLEKKHGEDWGKVYDEAWERIDKKVEGLSKHIKLEEERRSEDAQSKAALTDWLRAKASFVIEGLKEADKDEFCRCELKLQKWYGDLRGKPFAIEAENSILDISGFSKQYNCAFIWQKDGVKKLNLYLIINYFKGGKLRFKKIKPEAFEANRFYTVINKKSGEIVPMEVNFNFDDPNLIILPLAFGKRQGREFIWNDLLSLETGSLKLANGRVIEKTLYNRRTRQDEPALFVALTFERREVLDSSNIKPMNLIGVDRGENIPAVIALTDPEGCPLSRFKDSLGNPTHILRIGERYKEKQRTIQAKKEVEQRRAGGYSRKYASKAKNLADDMVRNTARDLLYYAVTQDAMLIFENLSRGFGRQGKRTFMAERQYTRMEDWLTAKLAYEGLPSKTYLSKTLAQYTSKTCSNCGFTITSADYDRVLEKLKKTATGWMTTINGKELKVEGQITYYNRYKRQNVVKDLSVELDRLSEESVNNDISSWTKGRSGEALSLLKKRFSHRPVQEKFVCLNCGFETHADEQAALNIARSWLFLRSQEYKKYQTNKTTGNTDKRAFVETWQSFYRKKLKEVWKPAV

SEQ ID NO: 40032 - protein, 978 aa, synthetic construct
  REGION 1..978: note = engineered CasX variant
QEIKRINKIRRRLVKDSNTKKAGKTGPMKTLLVRVMTPDLRERLENLRKKPENIPQPISNTSRANLNKLLTDYTEMKKAILHVYWEEFQKDPVGLMSRVAQPASKKIDQNKLKPEMDEKGNLTTAGFACSQCGQPLFVYKLEQVSEKGKAYTNYFGRCNVAEHEKLILLAQLKPEKDSDEAVTYSLGKFGQRALDFYSIHVTKESTHPVKPLAQIAGNRYASGPVGKALRDACMGTIASFLSKYQDIIIEHQKVVKGNQKRLESLRELAGKENLEYPSVTLPPQPHTSEGVDAYNEVIARVRMWVNLNLWQKLKLSRDDAKPLLRLKGFPSFPLVERQANEVDWWDMVCNVKKLINEKKEDGKVFWQNLAGYKRQEALRPYLSSEEDRKKGKKFARYQLGDLLLHLEKKHGEDWGKVYDEAWERIDKKVEGLSKHIKLEEERRSEDAQSKAALTDWLRAKASFVIEGLKEADKDEFCRCELKLQKWYGDLRGKPFAIEAENSILDISGFSKQYNCAFIWQKDGVKKLNLYLIINYFKGGKLRFKKIKPEAFEANRFYTVINKKSGEIVPMEVNFNFDDPNLIILPLAFGKRQGREFIWNDLLSLETGSLQLANGRVIEKTLYNRRTRQDEPALFVALTFERREVLDSSNIKPMNLIGVDRGENIPAVIALTDPEGCPLSRFKDSLGNPTHILRIGESYKEKQRTIQAKKEVEQRRAGGYSRKYASKAKNLADDMVRNTARDLLYYAVTQDAMLIFENLSRGFGRQGKRTFMAERQYTRMEDWLTAKLAYEGLPSKTYLSKTLAQYTSKTCSNCGFTITSADYDRVLEKLKKTATGWMTTINGKELKVEGQITYYNRYKRQNVVKDLSVELDRLSEESVNNDISSWTKGRSGEALSLLKKRFSHRPVQEKFVCLNCGFETHADEQAALNIARSWLFLRSQEYKKYQTNKTTGNTDKRAFVETWQSFYRKKLKEVWKPAV

SEQ ID NO: 40033 - protein, 978 aa, synthetic construct
  REGION 1..978: note = engineered CasX variant
QEIKRINKIRRRLVKDSNTKKAGKTGPMKTLLVRVMTPDLRERLENLRKKPENIPQPISNTSRANLNKLLTDYTEMKKAILHVYWEEFQKDPVGLMSRVAQPASKKIDQNKLKPEMDEKGNLTTAGFACSQCGQPLFVYKLEQVSEKGKAYTNYFGRCNVAEHEKLILLAQLKPEKDSDEAVTYSLGKFGQRALDFYSIHVTKESTHPVKPLAQIAGNRYASGPVGKALRDACMGTIASFLSKYQDIIIEHQKVVKGNQKRLESLRELAGKENLEYPSVTLPPQPHTKEGLDAYNEVIARVRTWVNLNLWQKLKLSRDDAKPLLRLKGFPSFPLVERQANEVDWWDMVCNVKKLINEKKEDGKVFWQNLAGYKRQEALRPYLSSEEDRKKGKKFARYQLGDLLLHLEKKHGEDWGKVYDEAWERIDKKVEGLSKHIKLEEERRSEDAQSKAALTDWLRAKASFVIEGLKEADKDEFCRCELKLQKWYGDLRGKPFAIEAENSILDISGFSKQYNCAFIWQKDGVKKLNLYLIINYFKGGKLRFKKIKPEAFEANRFYTVINKKSGEIVPMEVNFNFDDPNLIILPLAFGKRQGREFIWNDLLSLETGSLKLANGRVIEKTLYNRRTRQDEPALFVALTFERREVLDSSNIKPMNLIGVDRGENIPAVIALTDPEGCPLSRFKDSLGNPTHILRIGESYKEKQRTIQAKKEVEQRRAGGYSRKYASKAKNLADDMVRNTARDLLYYAVTQDAMLIFENLSRGFGRQGKRTFMAERQYTRMEDWLTAKLAYEGLPSKTYLSKTLAQYTSKTCSNCGFTITSADYDRVLEKLKKTATGWMTTINGKELKVEGQITYYNRYKRQNVVKDLSVELDRLSEESVNNDISSWTKGRSGEALSLLKKRFSHRPVQEKFVCLNCGFETHADEQAALNIARSWLFLRSQEYKKYQTNKTTGNTDKRAFVETWQSFYRKKLKEVWKPAV

SEQ ID NO: 40034 - protein, 978 aa, synthetic construct
  REGION 1..978: note = engineered CasX variant
QEIKRINKIRRRLVKDSNTKKAGKTGPMKTLLVRVMTPDLRERLENLRKKPENIPQPISNTSRANLNKLLTDYTEMKKAILHVYWEEFQKDPVGLMSRVAQPASKKIDQNKLKPEMDEKGNLTTAGFACSQCGQPLFVYKLEQVSEKGKAYTNYFGRCNVAEHEKLILLAQLKPEKDSDEAVTYSLGKFGQRALDFYSIHVTKESTHPVKPLAQIAGNRYASGPVGKALRDACMGTIASFLSKYQDIIIEHQKVVKGNQKRLESLRELAGKENLEYPSVTLPPQPHTKEGLDAYNEVIARVRWWVNLNLWQKLKLSRDDAKPLLRLKGFPSFPLVERQANEVDWWDMVCNVKKLINEKKEDGKVFWQNLAGYKRQEALRPYLSSEEDRKKGKKFARYQLGDLLLHLEKKHGEDWGKVYDEAWERIDKKVEGLSKHIKLEEERRSEDAQSKAALTDWLRAKASFVIEGLKEADKDEFCRCELKLQKWYGDLRGKPFAIEAENSILDISGFSKQYNCAFIWQKDGVKKLNLYLIINYFKGGKLRFKKIKPEAFEANRFYTVINKKSGEIVPMEVNFNFDDPNLIILPLAFGKRQGREFIWNDLLSLETGSLKLANGRVIEKTLYNRRTRQDEPALFVALTFERREVLDSSNIKPMNLIGVDRGENIPAVIALTDPEGCPLSRFKDSLGNPTHILRIGESYKEKQRTIQAKKEVEQRRAGGYSRKYASKAKNLADDMVRNTARDLLYYAVTQDAMLIFENLSRGFGRQGKRTFMAERQYTRMEDWLTAKLAYEGLPSKTYLSKTLAQYTSKTCSNCGFTITSADYDRVLEKLKKTATGWMTTINGKELKVEGQITYYNRYKRQNVVKDLSVELDRLSEESVNNDISSWTKGRSGEALSLLKKRFSHRPVQEKFVCLNCGFETHADEQAALNIARSWLFLRSQEYKKYQTNKTTGNTDKRAFVETWQSFYRKKLKEVWKPAV

SEQ ID NO: 40035 - protein, 979 aa, synthetic construct
  REGION 1..979: note = engineered CasX variant
QEIKRINKIRRRLVKDSNTKKAGKTGPMKTLLVRVMTPDLRERLENLRKKPENIPQPISNTSRANLNKLLTDYTEMKKAILHVYWEEFQKDPVGLMSRVAQPASKKIDQNKLKPEMDEKGNLTTAGFACSQCGQPLFVYKLEQVSEKGKAYTNYFGRCNVAEHEKLILLAQLKPEKDSDEAVTYSLGKFGQRALDFYSIHVTKESTHPVKPLAQIAGNRYASGPVGKALRDACMGTIASFLSKYQDIIIEHQKVVKGNQKRLESLRELAGKENLEYPSVTLPPQPHTKEGLDAYNEVIARVRMWVNLNLWQKLKLSRDDAKPLLRLKGFPSFPLVERQQANEVDWWDMVCNVKKLINEKKEDGKVFWQNLAGYKRQEALRPYLSSEEDRKKGKKFARYQLGDLLLHLEKKHGEDWGKVYDEAWERIDKKVEGLSKHIKLEEERRSEDAQSKAALTDWLRAKASFVIEGLKEADKDEFCRCELKLQKWYGDLRGKPFAIEAENSILDISGFSKQYNCAFIWQKDGVKKLNLYLIINYFKGGKLRFKKIKPEAFEANRFYTVINKKSGEIVPMEVNFNFDDPNLIILPLAFGKRQGREFIWNDLLSLETGSLKLANGRVIEKTLYNRRTRQDEPALFVALTFERREVLDSSNIKPMNLIGVDRGENIPAVIALTDPEGCPLSRFKDSLGNPTHILRIGESYKEKQRTIQAKKEVEQRRAGGYSRKYASKAKNLADDMVRNTARDLLYYAVTQDAMLIFENLSRGFGRQGKRTFMAERQYTRMEDWLTAKLAYEGLPSKTYLSKTLAQYTSKTCSNCGFTITSADYDRVLEKLKKTATGWMTTINGKELKVEGQITYYNRYKRQNVVKDLSVELDRLSEESVNNDISSWTKGRSGEALSLLKKRFSHRPVQEKFVCLNCGFETHADEQAALNIARSWLFLRSQEYKKYQTNKTTGNTDKRAFVETWQSFYRKKLKEVWKPAV

SEQ ID NO: 40036 - protein, 979 aa, synthetic construct
  REGION 1..979: note = engineered CasX variant
QEIKRINKIRRRLVKDSNTKKAGKTGPMKTLLVRVMTPDLRERLENLRKKPENIPQPISNTSRANLNKLLTDYTEMKKAILHVYWEEFQKDPVGLMSRVAQPASKKIDQNKLKPEMDEKGNLTTAGFACSQCGQPLFVYKLEQVSEKGKAYTNYFGRCNVAEHEKLILLAQLKPEKDSDEAVTYSLGKFGQRALDFYSIHVTKESTHPVKPLAQIAGNRYASGPVGKALRDACMGTIASFLSKYQDIIIEHQKVVKGNQKRLESLRELAGKENLEYPSVTLPPQPHTKEGLDAYNEVIARVRMWVNLNLWQKLKLSRDDAKPLLRLKGFPSFPLVERQANAEVDWWDMVCNVKKLINEKKEDGKVFWQNLAGYKRQEALRPYLSSEEDRKKGKKFARYQLGDLLLHLEKKHGEDWGKVYDEAWERIDKKVEGLSKHIKLEEERRSEDAQSKAALTDWLRAKASFVIEGLKEADKDEFCRCELKLQKWYGDLRGKPFAIEAENSILDISGFSKQYNCAFIWQKDGVKKLNLYLIINYFKGGKLRFKKIKPEAFEANRFYTVINKKSGEIVPMEVNFNFDDPNLIILPLAFGKRQGREFIWNDLLSLETGSLKLANGRVIEKTLYNRRTRQDEPALFVALTFERREVLDSSNIKPMNLIGVDRGENIPAVIALTDPEGCPLSRFKDSLGNPTHILRIGESYKEKQRTIQAKKEVEQRRAGGYSRKYASKAKNLADDMVRNTARDLLYYAVTQDAMLIFENLSRGFGRQGKRTFMAERQYTRMEDWLTAKLAYEGLPSKTYLSKTLAQYTSKTCSNCGFTITSADYDRVLEKLKKTATGWMTTINGKELKVEGQITYYNRYKRQNVVKDLSVELDRLSEESVNNDISSWTKGRSGEALSLLKKRFSHRPVQEKFVCLNCGFETHADEQAALNIARSWLFLRSQEYKKYQTNKTTGNTDKRAFVETWQSFYRKKLKEVWKPAV

SEQ ID NO: 40037 - protein, 978 aa, synthetic construct
  REGION 1..978: note = engineered CasX variant
QEIKRINKIRRRLVKDSNTKKAGKTGPMKTLLVRVMTPDLRERLENLRKKPENIPQPISNTSRANLNKLLTDYTEMKKAILHVYWEEFQKDPVGLMSRVAQPASKKIDQNKLKPEMDEKGNLTTAGFACSQCGQPLFVYKLEQVSEKGKAYTNYFGRCNVAEHEKLILLAQLKPEKDSDEAVTYSLGKFGQRALDFYSIHVTKESTHPVKPLAQIAGNRYASGPVGKALRDACMGTIASFLSKYQDIIIEHQKVVKGNQKRLESLRELAGKENLEYPSVTLPPQPHTKEGLDAYNEVIARVRMWVNLNLWQKLKLSRDDAKPLLRLKGFPSFPLVERQANEVDWWDMVCNVKKLINEKKEDGKVFWQNLAGYKRQEALRPYLSSEEDRKKGKKFARTQLGDLLLHLEKKHGEDWGKVYDEAWERIDKKVEGLSKHIKLEEERRSEDAQSKAALTDWLRAKASFVIEGLKEADKDEFCRCELKLQKWYGDLRGKPFAIEAENSILDISGFSKQYNCAFIWQKDGVKKLNLYLIINYFKGGKLRFKKIKPEAFEANRFYTVINKKSGEIVPMEVNFNFDDPNLIILPLAFGKRQGREFIWNDLLSLETGSLKLANGRVIEKTLYNRRTRQDEPALFVALTFERREVLDSSNIKPMNLIGVDRGENIPAVIALTDPEGCPLSRFKDSLGNPTHILRIGESYKEKQRTIQAKKEVEQRRAGGYSRKYASKAKNLADDMVRNTARDLLYYAVTQDAMLIFENLSRGFGRQGKRTFMAERQYTRMEDWLTAKLAYEGLPSKTYLSKTLAQYTSKTCSNCGFTITSADYDRVLEKLKKTATGWMTTINGKELKVEGQITYYNRYKRQNVVKDLSVELDRLSEESVNNDISSWTKGRSGEALSLLKKRFSHRPVQEKFVCLNCGFETHADEQAALNIARSWLFLRSQEYKKYQTNKTTGNTDKRAFVETWQSFYRKKLKEVWKPAV

SEQ ID NO: 40038 - protein, 979 aa, synthetic construct
  REGION 1..979: note = engineered CasX variant
QEIKRINKIRRRLVKDSNTKKAGKTGPMKTLLVRVMTPDLRERLENLRKKPENIPQPISNTSRANLNKLLTDYTEMKKAILHVYWEEFQKDPVGLMSRVAQPASKKIDQNKLKPEMDEKGNLTTAGFACSQCGQPLFVYKLEQVSEKGKAYTNYFGRCNVAEHEKLILLAQLKPEKDSDEAVTYSLGKFGQRALDFYSIHVTKESTHPVKPLAQIAGNRYASGPVGKALRDACMGTIASFLSKYQDIIIEHQKVVKGNQKRLESLRELAGKENLEYPSVTLPPQPHTKEGLDAYNEVIARVRMWVNLNLWQKLKLSRDDAKPLLRLKGFPSFPLVERQANEVDWWDMVCNVKKLINEKKEDGKVFWQNLAGYKRQEALRPYLSSEEDRKKGKKFARYQLGDLLLHLEKKHEGEDWGKVYDEAWERIDKKVEGLSKHIKLEEERRSEDAQSKAALTDWLRAKASFVIEGLKEADKDEFCRCELKLQKWYGDLRGKPFAIEAENSILDISGFSKQYNCAFIWQKDGVKKLNLYLIINYFKGGKLRFKKIKPEAFEANRFYTVINKKSGEIVPMEVNFNFDDPNLIILPLAFGKRQGREFIWNDLLSLETGSLKLANGRVIEKTLYNRRTRQDEPALFVALTFERREVLDSSNIKPMNLIGVDRGENIPAVIALTDPEGCPLSRFKDSLGNPTHILRIGESYKEKQRTIQAKKEVEQRRAGGYSRKYASKAKNLADDMVRNTARDLLYYAVTQDAMLIFENLSRGFGRQGKRTFMAERQYTRMEDWLTAKLAYEGLPSKTYLSKTLAQYTSKTCSNCGFTITSADYDRVLEKLKKTATGWMTTINGKELKVEGQITYYNRYKRQNVVKDLSVELDRLSEESVNNDISSWTKGRSGEALSLLKKRFSHRPVQEKFVCLNCGFETHADEQAALNIARSWLFLRSQEYKKYQTNKTTGNTDKRAFVETWQSFYRKKLKEVWKPAV

SEQ ID NO: 40039 - protein, 978 aa, synthetic construct
  REGION 1..978: note = engineered CasX variant
QEIKRINKIRRRLVKDSNTKKAGKTGPMKTLLVRVMTPDLRERLENLRKKPENIPQPISNTSRANLNKLLTDYTEMKKAILHVYWEEFQKDPVGLMSRVAQPASKKIDQNKLKPEMDEKGNLTTAGFACSQCGQPLFVYKLEQVSEKGKAYTNYFGRCNVAEHEKLILLAQLKPEKDSDEAVTYSLGKFGQRALDFYSIHVTKESTHPVKPLAQIAGNRYASGPVGKALRDACMGTIASFLSKYQDIIIEHQKVVKGNQKRLESLRELAGKENLEYPSVTLPPQPHTKEGLDAYNEVIARVRMWVNLNLWQKLKLSRDDAKPLLRLKGFPSFPLVERQANEVDWWDMVCNVKKLINEKKEDGKVFWQNLAGYKRQEALRPYLSSEEDRKKGKKFARYQLGDLLLHLEKKHGEDWGKVYDEAWERIDKKVEGLSKHIKLEEERRSEDAQSKAALTDWLRAKASFVIEGLKEADKDEFCRCDLKLQKWYGDLRGKPFAIEAENSILDISGFSKQYNCAFIWQKDGVKKLNLYLIINYFKGGKLRFKKIKPEAFEANRFYTVINKKSGEIVPMEVNFNFDDPNLIILPLAFGKRQGREFIWNDLLSLETGSLKLANGRVIEKTLYNRRTRQDEPALFVALTFERREVLDSSNIKPMNLIGVDRGENIPAVIALTDPEGCPLSRFKDSLGNPTHILRIGESYKEKQRTIQAKKEVEQRRAGGYSRKYASKAKNLADDMVRNTARDLLYYAVTQDAMLIFENLSRGFGRQGKRTFMAERQYTRMEDWLTAKLAYEGLPSKTYLSKTLAQYTSKTCSNCGFTITSADYDRVLEKLKKTATGWMTTINGKELKVEGQITYYNRYKRQNVVKDLSVELDRLSEESVNNDISSWTKGRSGEALSLLKKRFSHRPVQEKFVCLNCGFETHADEQAALNIARSWLFLRSQEYKKYQTNKTTGNTDKRAFVETWQSFYRKKLKEVWKPAV

SEQ ID NO: 40040 - protein, 978 aa, synthetic construct
  REGION 1..978: note = engineered CasX variant
QEIKRINKIRRRLVKDSNTKKAGKTGPMKTLLVRVMTPDLRERLENLRKKPENIPQPISNTSRANLNKLLTDYTEMKKAILHVYWEEFQKDPVGLMSRVAQPASKKIDQNKLKPEMDEKGNLTTAGFACSQCGQPLFVYKLEQVSEKGKAYTNYFGRCNVAEHEKLILLAQLKPEKDSDEAVTYSLGKFGQRALDFYSIHVTKESTHPVKPLAQIAGNRYASGPVGKALRDACMGTIASFLSKYQDIIIEHQKVVKGNQKRLESLRELAGKENLEYPSVTLPPQPHTKEGLDAYNEVIARVRMWVNLNLWQKLKLSRDDAKPLLRLKGFPSFPLVERQANEVDWWDMVCNVKKLINEKKEDGKVFWQNLAGYKRQEALRPYLSSEEDRKKGKKFARYQLGDLLLHLEKKHGEDWGKVYDEAWERIDKKVEGLSKHIKLEEERRSEDAQSKAALTDWLRAKASFVIEGLKEADKDEFCRCELKLQKWYGDLRGKPFAIEAENSILDISGFSKQYNCAFIWQKDGVKKLNLYLIINYFKGGKLRFKKIKPEAFEANRFYTVINKKSGEIVPMEVNFNFDDPNLIILPLAFGKRFGREFIWNDLLSLETGSLKLANGRVIEKTLYNRRTRQDEPALFVALTFERREVLDSSNIKPMNLIGVDRGENIPAVIALTDPEGCPLSRFKDSLGNPTHILRIGESYKEKQRTIQAKKEVEQRRAGGYSRKYASKAKNLADDMVRNTARDLLYYAVTQDAMLIFENLSRGFGRQGKRTFMAERQYTRMEDWLTAKLAYEGLPSKTYLSKTLAQYTSKTCSNCGFTITSADYDRVLEKLKKTATGWMTTINGKELKVEGQITYYNRYKRQNVVKDLSVELDRLSEESVNNDISSWTKGRSGEALSLLKKRFSHRPVQEKFVCLNCGFETHADEQAALNIARSWLFLRSQEYKKYQTNKTTGNTDKRAFVETWQSFYRKKLKEVWKPAV

SEQ ID NO: 40041 - protein, 978 aa, synthetic construct
  REGION 1..978: note = engineered CasX variant
QEIKRINKIRRRLVKDSNTKKAGKTGPMKTLLVRVMTPDLRERLENLRKKPENIPQPISNTSRANLNKLLTDYTEMKKAILHVYWEEFQKDPVGLMSRVAQPASKKIDQNKLKPEMDEKGNLTTAGFACSQCGQPLFVYKLEQVSEKGKAYTNYFGRCNVAEHEKLILLAQLKPEKDSDEAVTYSLGKFGQRALDFYSIHVTKESTHPVKPLAQIAGNRYASGPVGKALRDACMGTIASFLSKYQDIIIEHQKVVKGNQKRLESLRELAGKENLEYPSVTLPPQPHTKEGLDAYNEVIARVRMWVNLNLWQKLKLSRDDAKPLLRLKGFPSFPLVERQANEVDWWDMVCNVKKLINEKKEDGKVFWQNLAGYKRQEALRPYLSSEEDRKKGKKFARYQLGDLLLHLEKKHGEDWGKVYDEAWERIDKKVEGLSKHIKLEEERRSEDAQSKAALTDWLRAKASFVIEGLKEADKDEFCRCELKLQKWYGDLRGKPFAIEAENSILDISGFSKQYNCAFIWQKDGVKKLNLYLIINYFKGGKLRFKKIKPEAFEANRFYTVINKKSGEIVPMEVNFNFDDPNLIILPLAFGKRVGREFIWNDLLSLETGSLKLANGRVIEKTLYNRRTRQDEPALFVALTFERREVLDSSNIKPMNLIGVDRGENIPAVIALTDPEGCPLSRFKDSLGNPTHILRIGESYKEKQRTIQAKKEVEQRRAGGYSRKYASKAKNLADDMVRNTARDLLYYAVTQDAMLIFENLSRGFGRQGKRTFMAERQYTRMEDWLTAKLAYEGLPSKTYLSKTLAQYTSKTCSNCGFTITSADYDRVLEKLKKTATGWMTTINGKELKVEGQITYYNRYKRQNVVKDLSVELDRLSEESVNNDISSWTKGRSGEALSLLKKRFSHRPVQEKFVCLNCGFETHADEQAALNIARSWLFLRSQEYKKYQTNKTTGNTDKRAFVETWQSFYRKKLKEVWKPAV

SEQ ID NO: 40042 - protein, 979 aa, synthetic construct
  REGION 1..979: note = engineered CasX variant
QEIKRINKIRRRLVKDSNTKKAGKTGPMKTLLVRVMTPDLRERLENLRKKPENIPQPISNTSRANLNKLLTDYTEMKKAILHVYWEEFQKDPVGLMSRVAQPASKKIDQNKLKPEMDEKGNLTTAGFACSQCGQPLFVYKLEQVSEKGKAYTNYFGRCNVAEHEKLILLAQLKPEKDSDEAVTYSLGKFGQRALDFYSIHVTKESTHPVKPLAQIAGNRYASGPVGKALRDACMGTIASFLSKYQDIIIEHQKVVKGNQKRLESLRELAGKENLEYPSVTLPPQPHTKEGLDAYNEVIARVRMWVNLNLWQKLKLSRDDAKPLLRLKGFPSFPLVERQANEVDWWDMVCNVKKLINEKKEDGKVFWQNLAGYKRQEALRPYLSSEEDRKKGKKFARYQLGDLLLHLEKKHGEDWGKVYDEAWERIDKKVEGLSKHIKLEEERRSEDAQSKAALTDWLRAKASFVIEGLKEADKDEFCRCELKLQKWYGDLRGKPFAIEAENSILDISGFSKQYNCAFIWQKDGVKKLNLYLIINYFKGGKLRFKKIKPEAFEANRFYTVINKKSGEIVPMEVNFNFDDPNLIILPLAFGKRQGREFIWNDLLSLETGSLKLANGRVIEKTLYNRRTRQDEPALFVALTFERREVLDSSNIKTPMNLIGVDRGENIPAVIALTDPEGCPLSRFKDSLGNPTHILRIGESYKEKQRTIQAKKEVEQRRAGGYSRKYASKAKNLADDMVRNTARDLLYYAVTQDAMLIFENLSRGFGRQGKRTFMAERQYTRMEDWLTAKLAYEGLPSKTYLSKTLAQYTSKTCSNCGFTITSADYDRVLEKLKKTATGWMTTINGKELKVEGQITYYNRYKRQNVVKDLSVELDRLSEESVNNDISSWTKGRSGEALSLLKKRFSHRPVQEKFVCLNCGFETHADEQAALNIARSWLFLRSQEYKKYQTNKTTGNTDKRAFVETWQSFYRKKLKEVWKPAV

SEQ ID NO: 40043 - protein, 979 aa, synthetic construct
  REGION 1..979: note = engineered CasX variant
QEIKRINKIRRRLVKDSNTKKAGKTGPMKTLLVRVMTPDLRERLENLRKKPENIPQPISNTSRANLNKLLTDYTEMKKAILHVYWEEFQKDPVGLMSRVAQPASKKIDQNKLKPEMDEKGNLTTAGFACSQCGQPLFVYKLEQVSEKGKAYTNYFGRCNVAEHEKLILLAQLKPEKDSDEAVTYSLGKFGQRALDFYSIHVTKESTHPVKPLAQIAGNRYASGPVGKALRDACMGTIASFLSKYQDIIIEHQKVVKGNQKRLESLRELAGKENLEYPSVTLPPQPHTKEGLDAYNEVIARVRMWVNLNLWQKLKLSRDDAKPLLRLKGFPSFPLVERQANEVDWWDMVCNVKKLINEKKEDGKVFWQNLAGYKRQEALRPYLSSEEDRKKGKKFARYQLGDLLLHLEKKHGEDWGKVYDEAWERIDKKVEGLSKHIKLEEERRSEDAQSKAALTDWLRAKASFVIEGLKEADKDEFCRCELKLQKWYGDLRGKPFAIEAENSILDISGFSKQYNCAFIWQKDGVKKLNLYLIINYFKGGKLRFKKIKPEAFEANRFYTVINKKSGEIVPMEVNFNFDDPNLIILPLAFGKRQGREFIWNDLLSLETGSLKLANGRVIEKTLYNRRTRQDEPALFVALTFERREVLDSSNIKPMSNLIGVDRGENIPAVIALTDPEGCPLSRFKDSLGNPTHILRIGESYKEKQRTIQAKKEVEQRRAGGYSRKYASKAKNLADDMVRNTARDLLYYAVTQDAMLIFENLSRGFGRQGKRTFMAERQYTRMEDWLTAKLAYEGLPSKTYLSKTLAQYTSKTCSNCGFTITSADYDRVLEKLKKTATGWMTTINGKELKVEGQITYYNRYKRQNVVKDLSVELDRLSEESVNNDISSWTKGRSGEALSLLKKRFSHRPVQEKFVCLNCGFETHADEQAALNIARSWLFLRSQEYKKYQTNKTTGNTDKRAFVETWQSFYRKKLKEVWKPAV

SEQ ID NO: 40044 - protein, 978 aa, synthetic construct
  REGION 1..978: note = engineered CasX variant
QEIKRINKIRRRLVKDSNTKKAGKTGPMKTLLVRVMTPDLRERLENLRKKPENIPQPISNTSRANLNKLLTDYTEMKKAILHVYWEEFQKDPVGLMSRVAQPASKKIDQNKLKPEMDEKGNLTTAGFACSQCGQPLFVYKLEQVSEKGKAYTNYFGRCNVAEHEKLILLAQLKPEKDSDEAVTYSLGKFGQRALDFYSIHVTKESTHPVKPLAQIAGNRYASGPVGKALRDACMGTIASFLSKYQDIIIEHQKVVKGNQKRLESLRELAGKENLEYPSVTLPPQPHTKEGLDAYNEVIARVRMWVNLNLWQKLKLSRDDAKPLLRLKGFPSFPLVERQANEVDWWDMVCNVKKLINEKKEDGKVFWQNLAGYKRQEALRPYLSSEEDRKKGKKFARYQLGDLLLHLEKKHGEDWGKVYDEAWERIDKKVEGLSKHIKLEEERRSEDAQSKAALTDWLRAKASFVIEGLKEADKDEFCRCELKLQKWYGDLRGKPFAIEAENSILDISGFSKQYNCAFIWQKDGVKKLNLYLIINYFKGGKLRFKKIKPEAFEANRFYTVINKKSGEIVPMEVNFNFDDPNLIILPLAFGKRQGREFIWNDLLSLETGSLKLANGRVIEKTLYNRRTRQDEPALFVALTFERREVLDSSNIKPMNLIGVDRGENIPAVIALTDPEGCPLSRFKDSLGNPTHILRIRESYKEKQRTIQAKKEVEQRRAGGYSRKYASKAKNLADDMVRNTARDLLYYAVTQDAMLIFENLSRGFGRQGKRTFMAERQYTRMEDWLTAKLAYEGLPSKTYLSKTLAQYTSKTCSNCGFTITSADYDRVLEKLKKTATGWMTTINGKELKVEGQITYYNRYKRQNVVKDLSVELDRLSEESVNNDISSWTKGRSGEALSLLKKRFSHRPVQEKFVCLNCGFETHADEQAALNIARSWLFLRSQEYKKYQTNKTTGNTDKRAFVETWQSFYRKKLKEVWKPAV

SEQ ID NO: 40045 - protein, 978 aa, synthetic construct
  REGION 1..978: note = engineered CasX variant
QEIKRINKIRRRLVKDSNTKKAGKTGPMKTLLVRVMTPDLRERLENLRKKPENIPQPISNTSRANLNKLLTDYTEMKKAILHVYWEEFQKDPVGLMSRVAQPASKKIDQNKLKPEMDEKGNLTTAGFACSQCGQPLFVYKLEQVSEKGKAYTNYFGRCNVAEHEKLILLAQLKPEKDSDEAVTYSLGKFGQRALDFYSIHVTKESTHPVKPLAQIAGNRYASGPVGKALRDACMGTIASFLSKYQDIIIEHQKVVKGNQKRLESLRELAGKENLEYPSVTLPPQPHTKEGLDAYNEVIARVRMWVNLNLWQKLKLSRDDAKPLLRLKGFPSFPLVERQANEVDWWDMVCNVKKLINEKKEDGKVFWQNLAGYKRQEALRPYLSSEEDRKKGKKFARYQLGDLLLHLEKKHGEDWGKVYDEAWERIDKKVEGLSKHIKLEEERRSEDAQSKAALTDWLRAKASFVIEGLKEADKDEFCRCELKLQKWYGDLRGKPFAIEAENSILDISGFSKQYNCAFIWQKDGVKKLNLYLIINYFKGGKLRFKKIKPEAFEANRFYTVINKKSGEIVPMEVNFNFDDPNLIILPLAFGKRQGREFIWNDLLSLETGSLKLANGRVIEKTLYNRRTRQDEPALFVALTFERREVLDSSNIKPMNLIGVDRGENIPAVIALTDPEGCPLSRFKDSLGNPTHILRIGESYKEKQRTIQAKKEVEQRRAGGYSRKYASKAKNLADDMVRNTARDLLYYAVTQDAMLIFENLSRGFGRQGKRTFSAERQYTRMEDWLTAKLAYEGLPSKTYLSKTLAQYTSKTCSNCGFTITSADYDRVLEKLKKTATGWMTTINGKELKVEGQITYYNRYKRQNVVKDLSVELDRLSEESVNNDISSWTKGRSGEALSLLKKRFSHRPVQEKFVCLNCGFETHADEQAALNIARSWLFLRSQEYKKYQTNKTTGNTDKRAFVETWQSFYRKKLKEVWKPAV

SEQ ID NO: 40046 - protein, 978 aa, synthetic construct
  REGION 1..978: note = engineered CasX variant
QEIKRINKIRRRLVKDSNTKKAGKTGPMKTLLVRVMTPDLRERLENLRKKPENIPQPISNTSRANLNKLLTDYTEMKKAILHVYWEEFQKDPVGLMSRVAQPASKKIDQNKLKPEMDEKGNLTTAGFACSQCGQPLFVYKLEQVSEKGKAYTNYFGRCNVAEHEKLILLAQLKPEKDSDEAVTYSLGKFGQRALDFYSIHVTKESTHPVKPLAQIAGNRYASGPVGKALRDACMGTIASFLSKYQDIIIEHQKVVKGNQKRLESLRELAGKENLEYPSVTLPPQPHTKEGLDAYNEVIARVRMWVNLNLWQKLKLSRDDAKPLLRLKGFPSFPLVERQANEVDWWDMVCNVKKLINEKKEDGKVFWQNLAGYKRQEALRPYLSSEEDRKKGKKFARYQLGDLLLHLEKKHGEDWGKVYDEAWERIDKKVEGLSKHIKLEEERRSEDAQSKAALTDWLRAKASFVIEGLKEADKDEFCRCELKLQKWYGDLRGKPFAIEAENSILDISGFSKQYNCAFIWQKDGVKKLNLYLIINYFKGGKLRFKKIKPEAFEANRFYTVINKKSGEIVPMEVNFNFDDPNLIILPLAFGKRQGREFIWNDLLSLETGSLKLANGRVIEKTLYNRRTRQDEPALFVALTFERREVLDSSNIKPMNLIGVDRGENIPAVIALTDPEGCPLSRFKDSLGNPTHILRIGESYKEKQRTIQAKKEVEQRRAGGYSRKYASKAKNLADDMVRNTARDLLYYAVTQDAMLIFENLSRGFGRQGKRTFMAERQYTRMEDWLTAKLAYEGLPSKTYLSKTLAQYTSKTCSNCGFTITSADYDRVLEKLKKTATGWMTTINGKELKVEGQITYYNRYKRQNVVKDLSVELDRLSEESVNNDISSWDKGRSGEALSLLKKRFSHRPVQEKFVCLNCGFETHADEQAALNIARSWLFLRSQEYKKYQTNKTTGNTDKRAFVETWQSFYRKKLKEVWKPAV

SEQ ID NO: 40047 - protein, 978 aa, synthetic construct
  REGION 1..978: note = engineered CasX variant
QEIKRINKIRRRLVKDSNTKKAGKTGPMKTLLVRVMTPDLRERLENLRKKPENIPQPISNTSRANLNKLLTDYTEMKKAILHVYWEEFQVDPVGLMSRVAQPASKKIDQNKLKPEMDEKGNLTTAGFACSQCGQPLFVYKLEQVSEKGKAYTNYFGRCNVAEHEKLILLAQLKPEKDSDEAVTYSLGKFGQRALDFYSIHVTKESTHPVKPLAQIAGNRYASGPVGKALRDACMGTIASFLSKYQDIIIEHQKVVKGNQKRLESLRELAGKENLEYPSVTLPPQPHTKEGLDAYNEVIARVRMWVNLNLWQKLKLSRDDAKPLLRLKGFPSFPLVERQANEVDWWDMVCNVKKLINEKKEDGKVFWQNLAGYKRQEALRPYLSSEEDRKKGKKFARYQLGDLLLHLEKKHGEDWGKVYDEAWERIDKKVEGLSKHIKLEEERRSEDAQSKAALTDWLRAKASFVIEGLKEADKDEFCRCELKLQKWYGDLRGKPFAIEAENSILDISGFSKQYNCAFIWQKDGVKKLNLYLIINYFKGGKLRFKKIKPEAFEANRFYTVINKKSGEIVPMEVNFNFDDPNLIILPLAFGKRQGREFIWNDLLSLETGSLKLANGRVIEKTLYNRRTRQDEPALFVALTFERREVLDSSNIKPMNLIGVDRGENIPAVIALTDPEGCPLSRFKDSLGNPTHILRIGESYKEKQRTIQAKKEVEQRRAGGYSRKYASKAKNLADDMVRNTARDLLYYAVTQDAMLIFENLSRGFGRQGKRTFMAERQYTRMEDWLTAKLAYEGLPSKTYLSKTLAQYTSKTCSNCGFTITSADYDRVLEKLKKTATGWMTTINGKELKVEGQITYYNRYKRQNVVKDLSVELDRLSEESVNNDISSWTKGRSGEALSLLKKRFSHRPVQEKFVCLNCGFETHADEQAALNIARSWLFLRSQEYKKYQTNKTTGNTDKRAFVETWQSFYRKKLKEVWKPAV

SEQ ID NO: 40048 - protein, 978 aa, synthetic construct
  REGION 1..978: note = engineered CasX variant
QEIKRLNKIRRRLVKDSNTKKAGKTGPMKTLLVRVMTPDLRERLENLRKKPENIPQPISNTSRANLNKLLTDYTEMKKAILHVYWEEFQKDPVGLMSRVAQPASKKIDQNKLKPEMDEKGNLTTAGFACSQCGQPLFVYKLEQVSEKGKAYTNYFGRCNVAEHEKLILLAQLKPEKDSDEAVTYSLGKFGQRALDFYSIHVTKESTHPVKPLAQIAGNRYASGPVGKALRDACMGTIASFLSKYQDIIIEHQKVVKGNQKRLESLRELAGKENLEYPSVTLPPQPHTKEGLDAYNEVIARVRMWVNLNLWQKLKLSRDDAKPLLRLKGFPSFPLVERQANEVDWWDMVCNVKKLINEKKEDGKVFWQNLAGYKRQEALRPYLSSEEDRKKGKKFARYQLGDLLLHLEKKHGEDWGKVYDEAWERIDKKVEGLSKHIKLEEERRSEDAQSKAALTDWLRAKASFVIEGLKEADKDEFCRCELKLQKWYGDLRGKPFAIEAENSILDISGFSKQYNCAFIWQKDGVKKLNLYLIINYFKGGKLRFKKIKPEAFEANRFYTVINKKSGEIVPMEVNFNFDDPNLIILPLAFGKRQGREFIWNDLLSLETGSLKLANGRVIEKTLYNRRTRQDEPALFVALTFERREVLDSSNIKPMNLIGVDRGENIPAVIALTDPEGCPLSRFKDSLGNPTHILRIGESYKEKQRTIQAKKEVEQRRAGGYSRKYASKAKNLADDMVRNTARDLLYYAVTQDAMLIFENLSRGFGRQGKRTFMAERQYTRMEDWLTAKLAYEGLPSKTYLSKTLAQYTSKTCSNCGFTITSADYDRVLEKLKKTATGWMTTINGKELKVEGQITYYNRYKRQNVVKDLSVELDRLSEESVNNDISSWTKGRSGEALSLLKKRFSHRPVQEKFVCLNCGFETHADEQAALNIARSWLFLRSQEYKKYQTNKTTGNTDKRAFVETWQSFYRKKLKEVWKPAV

SEQ ID NO: 40049 - protein, 978 aa, synthetic construct
  REGION 1..978: note = engineered CasX variant
QEIKRINKIRRRLVKDSNTKKAGKTGPMKTLLVRVMTPDLRERLENLRKKPENIPQPISNTSRANLNKLLTDYTEMKKAILHVYWEEFQKDPVGLMSRVAQPASKKIDQNKLKPEMDEKGNLTTAGFACSQCGQPLFVYKLEQVSEKGKAYTNYVGRCNVAEHEKLILLAQLKPEKDSDEAVTYSLGKFGQRALDFYSIHVTKESTHPVKPLAQIAGNRYASGPVGKALRDACMGTIASFLSKYQDIIIEHQKVVKGNQKRLESLRELAGKENLEYPSVTLPPQPHTKEGLDAYNEVIARVRMWVNLNLWQKLKLSRDDAKPLLRLKGFPSFPLVERQANEVDWWDMVCNVKKLINEKKEDGKVFWQNLAGYKRQEALRPYLSSEEDRKKGKKFARYQLGDLLLHLEKKHGEDWGKVYDEAWERIDKKVEGLSKHIKLEEERRSEDAQSKAALTDWLRAKASFVIEGLKEADKDEFCRCELKLQKWYGDLRGKPFAIEAENSILDISGFSKQYNCAFIWQKDGVKKLNLYLIINYFKGGKLRFKKIKPEAFEANRFYTVINKKSGEIVPMEVNFNFDDPNLIILPLAFGKRQGREFIWNDLLSLETGSLKLANGRVIEKTLYNRRTRQDEPALFVALTFERREVLDSSNIKPMNLIGVDRGENIPAVIALTDPEGCPLSRFKDSLGNPTHILRIGESYKEKQRTIQAKKEVEQRRAGGYSRKYASKAKNLADDMVRNTARDLLYYAVTQDAMLIFENLSRGFGRQGKRTFMAERQYTRMEDWLTAKLAYEGLPSKTYLSKTLAQYTSKTCSNCGFTITSADYDRVLEKLKKTATGWMTTINGKELKVEGQITYYNRYKRQNVVKDLSVELDRLSEESVNNDISSWTKGRSGEALSLLKKRFSHRPVQEKFVCLNCGFETHADEQAALNIARSWLFLRSQEYKKYQTNKTTGNTDKRAFVETWQSFYRKKLKEVWKPAV

SEQ ID NO: 40050 - protein, 978 aa, synthetic construct
  REGION 1..978: note = engineered CasX variant
QEIKRINKIRRRLVKDSNTKKAGKTGPMKTLLVRVMTPDLRERLENLRKKPENIPQPISNTSRANLNKLLTDYTEMKKAILHVYWEEFQKDPVGLMSRVAQPASKKIDQNKLKPEMDEKGNLTTAGFACSQCGQPLFVYKLEQVSEKGKAYTNYFGRCNVAEHEKLILLAQLKPEKDSDEAVTYSLGKFGQRALDFYSIHVTKESTHPVKPLAQIAGNRYASGPVGKALRDACMGTIASFLSKYQDIIIEHQKVVKGNQKRLESLRELAGKENLEYPSVTLPPQPHTKEGLDAYNEVIARVRMWVNLNLWQKLKLSRDDAKPLLRLKGFPSFPLVERQANEVDWWDMVCNVKKLINEKKEDGKVFWQNLAGYKRQEALRPYLSSEEDRKKGKKFARYQLGDLLLHLEKKHGEDWGKVYDEAWERIDKKVEGLSKHIKLEEERRSEDAQSKAALTDWLRAKASFVIEGLKEADKDEFCRCELKLQKWYGDLRGKPFAIEAENSILDISGFSKQYNCAFIWQKDGVKKLNLYLIINYFKGGKLRFKKIKPEAFEANRFYTVINKKSGEIVPMEVNFNFDDPNLIILPLAFGKRQGREFIWNDLLSLETGSLKLANGRVIEKTLYNRRTRQDEPALFVALTFERREVLDSSNIKPMNLIGVDRGENIPAVIALTDPEGCPLSRFKDSLGNPTHILRIGESYKEKQRTIQAKKEVEQRRAGGYSRKYASKAKNLADDMVRNTARDLLYYAVTQDAMLIFENLSRGFGRQGKRTFMAERQYTRMEDWLTAKLAYEGLASKTYLSKTLAQYTSKTCSNCGFTITSADYDRVLEKLKKTATGWMTTINGKELKVEGQITYYNRYKRQNVVKDLSVELDRLSEESVNNDISSWTKGRSGEALSLLKKRFSHRPVQEKFVCLNCGFETHADEQAALNIARSWLFLRSQEYKKYQTNKTTGNTDKRAFVETWQSFYRKKLKEVWKPAV

SEQ ID NO: 40051 - protein, 978 aa, synthetic construct
  REGION 1..978: note = engineered CasX variant
QEIKRINKIRRRLVKDSNTKKAGKTGPMKTLLVRVMTPDLRERLENLRKKPENIPQPISNTSRANLNKLLTDYTEMKKAILHVYWEEFQKDPVGLMSRVAQPASKKIDQNKLKPEMDEKGNLTTAGFACSQCGQPLFVYKLEQVSEKGKAYTNYFGRCNVAEHEKLILLAQLKPEKDSDEAVTYSLGKFGQRALDFYSIHVTKESTHPVKPLAQIAGNRYASGPVGKALRDACMGTIASFLSKYQDIIIEHQKVVKGNQKRLESLRELAGKENLEYPSVTLPPQPHTKEGLDAYNEVIARVRMWVNLNLWQKLKLSRDDAKPLLRLKGFPSFPLVERQANEVDWWDMVCNVKKLINEKKEDGKVFWQNLAGYKRQEALRPYLSSEEDRKKGKKFARYQLGDLLLHLEKKHGEDWGKVYDEAWERIDKKVEGLSKHIKLEEERRSEDAQSKAALTDWLRAKASFVIEGLKEADKDEFCRCELKLQKWYGDLRGKPFAIEAENSILDISGFSKQYNCAFIWQKDGVKKLNLYLIINYFKGGKLRFKKIKPEAFEANRFYTVINKKSGEIVPMEVNFNFDDPNLIILPLAFGKRQGREFIWNDLLSLETGSLKLANGRVIEKTLYNRRTRQDEPALFVALTFERREVLDSSNIKPMNLIGVDRGENIPAVIALTDPEGCPLSRFKDSLGNPTHILRIGESYKEKQRTIQAKKEVEQRRAGGYSRKYASKAKNLADDMVRNTARDLLYYAVTQDAMLIFENLSRGFGRQGKRTFMAERQYTRMEDWLTAKLAYEGLPSKVYLSKTLAQYTSKTCSNCGFTITSADYDRVLEKLKKTATGWMTTINGKELKVEGQITYYNRYKRQNVVKDLSVELDRLSEESVNNDISSWTKGRSGEALSLLKKRFSHRPVQEKFVCLNCGFETHADEQAALNIARSWLFLRSQEYKKYQTNKTTGNTDKRAFVETWQSFYRKKLKEVWKPAV

SEQ ID NO: 40052 - protein, 979 aa, synthetic construct
  REGION 1..979: note = engineered CasX variant
QEIKRINKIRRRLVKDSNTKKAGKTGPMKTLLVRVMTPDLRERLENLRKKPENIPQPISNTSRANLNKLLTDYTEMKKAILHVYWEEFQKDPVGLMSRVAQPASKKIDQNKLKPEMDEKGNLTTAGFACSQCGQPLFVYKLEQVSEKGKAYTNYFGRCNVAEHEKLILLAQLKPEKDSDEAVTYSLGKFGQRALDFYSIHVTKESTHPVKPLAQIAGNRYASGPVGKALRDACMGTIASFLSKYQDIIIEHQKVVKGNQKRLESLRELAGKENLEYPSVTLPPQPHTKEGLDAYNEVIARVRMWVNLNLWQKLKLSRDDAKPLLRLKGFPSFPLVERQANEVDWWDMVCNVKKLINEKKEDGKVFWQNLAGYKRQEALRPYLSSEEDRKKGKKFARYQLGDLLLHLEKKHGEDWGKVYDEAWERIDKKVEGLSKHIKLEEERRSEDAQSKAALTDWLRAKASFVIEGLKEADKDEFCRCELKLQKWYGDLRGKPFAIEAENSILDISGFSKQYNCAFIWQKDGVKKLNLYLIINYFKGGKLRFKKIKPEAFEANRFYTVINKKSGEIVPMEVNFNFDDPNLIILPLAFGKRQGREFIWNDLLSLETGSLKLANGRVIEKTLYNRRTRQDEPALFVALTFERREVLDSSNIKPMNLIGVDRGENIPAVIALTDPEGCPLSRFKDSLGNPTHILRIGESYKEKQRTIQAKKEVEQRRAGGYSRKYASKAKNLADDMVRNTARDLLYYAVTQDAMLIFENLSRGFGRQGKRTFMAERQYTRMEDWLTAKLAYEGPLPSKTYLSKTLAQYTSKTCSNCGFTITSADYDRVLEKLKKTATGWMTTINGKELKVEGQITYYNRYKRQNVVKDLSVELDRLSEESVNNDISSWTKGRSGEALSLLKKRFSHRPVQEKFVCLNCGFETHADEQAALNIARSWLFLRSQEYKKYQTNKTTGNTDKRAFVETWQSFYRKKLKEVWKPAV

SEQ ID NO: 40053 - protein, 979 aa, synthetic construct
  REGION 1..979: note = engineered CasX variant
QEIKRINKIRRRLVKDSNTKKAGKTGPMKTLLVRVMTPDLRERLENLRKKPENIPQPISNTSRANLNKLLTDYTEMKKAILHVYWEEFQKDPVGLMSRVAQPASKKIDQNKLKPEMDEKGNLTTAGFACSQCGQPLFVYKLEQVSEKGKAYTNYFGRCNVAEHEKLILLAQLKPEKDSDEAVTYSLGKFGQRALDFYSIHVTKESTHPVKPLAQIAGNRYASGPVGKALRDACMGTIASFLSKYQDIIIEHQKVVKGNQKRLESLRELAGKENLEYPSVTLPPQPHTKEGLDAYNEVIARVRMWVNLNLWQKLKLSRDDAKPLLRLKGFPSFPLVERQANEVDWWDMVCNVKKLINEKKEDGKVFWQNLAGYKRQEALRPYLSSEEDVRKKGKKFARYQLGDLLLHLEKKHGEDWGKVYDEAWERIDKKVEGLSKHIKLEEERRSEDAQSKAALTDWLRAKASFVIEGLKEADKDEFCRCELKLQKWYGDLRGKPFAIEAENSILDISGFSKQYNCAFIWQKDGVKKLNLYLIINYFKGGKLRFKKIKPEAFEANRFYTVINKKSGEIVPMEVNFNFDDPNLIILPLAFGKRQGREFIWNDLLSLETGSLKLANGRVIEKTLYNRRTRQDEPALFVALTFERREVLDSSNIKPMNLIGVDRGENIPAVIALTDPEGCPLSRFKDSLGNPTHILRIGESYKEKQRTIQAKKEVEQRRAGGYSRKYASKAKNLADDMVRNTARDLLYYAVTQDAMLIFENLSRGFGRQGKRTFMAERQYTRMEDWLTAKLAYEGLPSKTYLSKTLAQYTSKTCSNCGFTITSADYDRVLEKLKKTATGWMTTINGKELKVEGQITYYNRYKRQNVVKDLSVELDRLSEESVNNDISSWTKGRSGEALSLLKKRFSHRPVQEKFVCLNCGFETHADEQAALNIARSWLFLRSQEYKKYQTNKTTGNTDKRAFVETWQSFYRKKLKEVWKPAV

SEQ ID NO: 40054 - protein, 978 aa, synthetic construct
  REGION 1..978: note = engineered CasX variant
QEIKRINKIRRRLVKDSNTKKAGKTGPMKTLLVRVMTPDLRERLENLRKKPENIPQPISNTSRANLNKLLTDYTEMKKAILHVYWEEFQKDPVGLMSRVAQPASKKIDQNKLKPEMDEKGNLTTAGFACSQCGQPLFVYKLEQVSEKGKAYTNYFGRCNVAEHEKLILLAQLKPEKDSDEAVTYSLGKFGQRALDFYSIHVTKESTHPVKPLAQIAGNRYASGPVGKALRDACMGTIASFLSKYQDIIIEHQKVVKGNQKRLESLRELAGKENLEYPSVTLPPQPHTKEGLDAYNEVIARVRMWVNLNLWQKLKLSRDDAKPLLRLKGFPSFPLVERQANEVDWWDMVCNVKKLINEKKEDGKVFWQNLAGYKRQEALRPYLSSEEDRKKGKKFARYQLGDLLLHLEKKHGEDWGKVYDEAWERIDKKVEGLSKHIKLEEERRSEDAQSKAALTDWLRAKASFVIEGLKEADKDEFCRCELKLQKWYGDLRGKPFAIEAENSILDISGFSKQYNCAFIWQKDGVKKLNLYLIINYFKGGKLRFKKIKPEAFEANRFYTVINKKSGEIVPMEVNFNFDDPNLIILPLAFGKRQGREFIWNDLLSLETGSLKLANGRVIEKTLYNRRTRQDEPALFVALTFERREVLDSSNIKPMNLIGVDRGENIPAVIALTDPEGCPLSRFKDSLGNPTHILRIGESYKEKQRTIQAKKEVEQRRAGGYSRKYASKAKNLADDMVRNTARDLLYYAVTQDAMLIFENLSRGFGRQGKRTFMAERQYTRMEDWLTAKLAYEGLPSKTYLSKTLAQYTSKTCSNCGFTITSADYDRMLEKLKKTATGWMTTINGKELKVEGQITYYNRYKRQNVVKDLSVELDRLSEESVNNDISSWTKGRSGEALSLLKKRFSHRPVQEKFVCLNCGFETHADEQAALNIARSWLFLRSQEYKKYQTNKTTGNTDKRAFVETWQSFYRKKLKEVWKPAV

SEQ ID NO: 40055 - protein, 978 aa, synthetic construct
  REGION 1..978: note = engineered CasX variant
QEIKRINKIRRRLVKDSNTKKAGKTGPMKTLLVRVMTPDLRERLENLRKKPENIPQPISNTSRANLNKLLTDYTEMKKAILHVYWEEFQKDPVGLMSRVAQPASKKIDQNKLKPEMDEKGNLTTAGFACSQCGQPLFVYKLEQVSEKGKAYTNYFGRCNVAEHEKLILLAQLKPEKDSDEAVTYSLGKFGQRALDFYSIHVTKESTHPVKPLAQIAGNRYASGPVGKALRDACMGTIASFLSKYQDIIIEHQKVVKGNQKRLESLRELAGKENLEYPSVTLPPQPHTKEGLDAYNEVIARVRMWVNLNLWQKLKLSRDDAKPLLRLKGFPSFPLVERQANEVDWWDMVCNVKKLINEKKEDGKVFWQNLAGYKRQEALRPYLSSEEDRKKGKKFARYQLGDLLLHLEKKHGEDWGKVYDEAWERIDKKVEGLSKHIKLEEERRSEDAQSKAALTDWLRAKASFVIEGLKEADKDEFCRCELKLQKWYGDLRGKPFAIEAENSILDISGFSKQYNCAFIWQKDGVKKLNLYLIINYFKGGKLRFKKIKPEAFEANRFYTVINKKSGEIVPMEVNFNFDDPNLIILPLAFGKRQGREFIWNDLLSLETGSLKLANGRVIEKTLYNRRTRQDEPALFVALTFERREVLDSSNIKPMNLIGVDRGENIPAVIALTDPEGCPLSRFKDSLGNPTHILRIGESYKEKQRTIQAKKEVEQRRAGGYSRKYASKAKNLADDMVRNTARDLLYYAVTQDAMLIFENLSRGFGRQGKRTFMAERQYTRMEDWLTAKLAYEGLPSKTYLSKTLAQYTSKTCSNCGFTITSADYDRVLEKLKKTATGWMTTINGKELKVEGQITYYNRYKRQNVVKDLSVELDRLSEESVNNDISSWTKGRQGEALSLLKKRFSHRPVQEKFVCLNCGFETHADEQAALNIARSWLFLRSQEYKKYQTNKTTGNTDKRAFVETWQSFYRKKLKEVWKPAV

SEQ ID NO: 40056 - protein, 978 aa, synthetic construct
  REGION 1..978: note = engineered CasX variant
QEIKRINKIRRRLVKDSNTKKAGKTGPMKTLLVRVMTPDLRERLENLRKKPENIPQPISNTSRANLNKLLTDYTEMKKAILHVYWEEFQKDPVGLMSRVAQPASKKIDQNKLKPEMDEKGNLTTAGFACSQCGQPLFVYKLEQVSEKGKAYTNYFGRCNVAEHEKLILLAQLKPEKDSDEAVTYSLGKFGQRALDFYSIHVTKESTHPVKPLAQIAGNRYASGPVGKALRDACMGTIASFLSKYQDIIIEHQKVVKGNQKRLESLRELAGKENLEYPSVTLPPQPHTKEGLDAYNEVIARVRMWVNLNLWQKLKLSRDDAKPLLRLKGFPSFPLVERQANEVDWWDMVCNVKKLINEKKEDGKVFWQNLAGYKRQEALRPYLSSEEDRKKGKKFARYQLGDLLLHLEKKHGEDWGKVYDEAWERIDKKVEGLSKHIKLEEERRSEDAQSKAALTDWLRAKASFVIEGLKEADKDEFCRCELKLQKWYGDLRGKPFAIEAENSILDISGFSKQYNCAFIWQKDGVKKLNLYLIINYFKGGKLRFKKIKPEAFEANRFYTVINKKSGEIVPMEVNFNFDDPNLIILPLAFGKRQGREFIWNDLLSLETGSLKLANGRVIEKTLYNRRTRQDEPALFVALTFERREVLDSSNIKPMNLIGVDRGENIPAVIALTDPEGCPLSRFKDSLGNPTHILRIGESYKEKQRTIQAKKEVEQRRAGGYSRKYASKAKNLADDMVRNTARDLLYYAVTQDAMLIFENLSRGFGRQGKRTFMAERQYTRMEDWLTAKLAYEGLPSKTYLSKTLAQYTSKTCSNCGFTITSADYDRVLEKLKKTATGWMTTINGKELKVEGQITYYNRYKRQNVVKDLSVELDRLSEESVNNDISSWTKGRSGEALSLLKKRFSHRPVQEKFVCLNCEFETHADEQAALNIARSWLFLRSQEYKKYQTNKTTGNTDKRAFVETWQSFYRKKLKEVWKPAV

SEQ ID NO: 40057 - protein, 979 aa, synthetic construct
  REGION 1..979: note = engineered CasX variant
QEIKRINKIRRRLVKDSNTKKAGKTGPMKTLLVRVMTPDLRERLENLRKKPENIPQPISNTSRANLNKLLTDYTEMKKAILHVYWEEFQKDPVGLMSRVAQPASKKIDQNKLKPEMDEKGNLTTAGFACSQCGQPLFVYKLEQVSEKGKAYTNYFGRCNVAEHEKLILLAQLKPEKDSDEAVTYSLGKFGQRALDFYSIHVTKESTHPVKPLAQIAGNRYASGPVGKALRDACMGTIASFLSKYQDIIIEHQKVVKGNQKRLESLRELAGKENLEYPSVTLPPQPHTKEGLDAYNEVIARVRMWVNLNLWQKLKLSRDDAKPLLRLKGFPSFPLVERQANEVDWWDMVCNVKKLINEKKEDGKVFWQNLAGYKRQEALRPYLSSEEDRKKGKKFARYQLGDLLLHLEKKHGEDWGKVYDEAWERIDKKVEGLSKHIKLEEERRSEDAQSKAALTDWLRAKASFVIEGLKEADKDEFCRCELKLQKWYGDLRGKPFAIEAENSILDISGFSKQYNCAFIWQKDGVKKLNLYLIINYFKGGKLRFKKIKPEAFEANRFYTVINKKSGEIVPMEVNFNFDDPNLIILPLAFGKRQGREFIWNDLLSLETGSLKLANGRVIEKTLYNRRTRQDEPALFVALTFERREVLDSSNIKPMNLIGVDRGENIPAVIALTDPEGCPLSRFKDSLGNPTHILRIGESYKEKQRTIQAKKEVEQRRAGGYSRKYASKAKNLADDMVRNTARDLLYYAVTQDAMLIFENLSRGFGRQGKRTFMAERQYTRMEDWLTAKLAYEGLPSKTYLSKTLAQYTSKTCSNCGFTITSADYDRVLEKLKKTATGWMTTINGKELKVEGQITYYNRYKRQNVVKDLSVELDRLSEESVNNDISSWTKGRSGEALSLLKKRFSHRPVQEKFVCLNCGFETHADEQAALNIARSWLFLRSQEYKKYQTNKTSTGNTDKRAFVETWQSFYRKKLKEVWKPAV

SEQ ID NO: 40058 - protein, 979 aa, synthetic construct
  REGION 1..979: note = engineered CasX variant
QEIKRINKIRRRLVKDSNTKKAGKTGPMKTLLVRVMTPDLRERLENLRKKPENIPQPISNTSRANLNKLLTDYTEMKKAILHVYWEEFQKDPVGLMSRVAQPASKKIDQNKLKPEMDEKGNLTTAGFACSQCGQPLFVYKLEQVSEKGKAYTNYFGRCNVAEHEKLILLAQLKPEKDSDEAVTYSLGKFGQRALDFYSIHVTKESTHPVKPLAQIAGNRYASGPVGKALRDACMGTIASFLSKYQDIIIEHQKVVKGNQKRLESLRELAGKENLEYPSVTLPPQPHTKEGLDAYNEVIARVRMWVNLNLWQKLKLSRDDAKPLLRLKGFPSFPLVERQANEVDWWDMVCNVKKLINEKKEDGKVFWQNLAGYKRQEALRPYLSSEEDRKKGKKFARYQLGDLLLHLEKKHGEDWGKVYDEAWERIDKKVEGLSKHIKLEEERRSEDAQSKAALTDWLRAKASFVIEGLKEADKDEFCRCELKLQKWYGDLRGKPFAIEAENSILDISGFSKQYNCAFIWQKDGVKKLNLYLIINYFKGGKLRFKKIKPEAFEANRFYTVINKKSGEIVPMEVNFNFDDPNLIILPLAFGKRQGREFIWNDLLSLETGSLKLANGRVIEKTLYNRRTRQDEPALFVALTFERREVLDSSNIKPMNLIGVDRGENIPAVIALTDPEGCPLSRFKDSLGNPTHILRIGESYKEKQRTIQAKKEVEQRRAGGYSRKYASKAKNLADDMVRNTARDLLYYAVTQDAMLIFENLSRGFGRQGKRTFMAERQYTRMEDWLTAKLAYEGLPSKTYLSKTLAQYTSKTCSNCGFTITSADYDRVLEKLKKTATGWMTTINGKELKVEGQITYYNRYKRQNVVKDLSVELDRLSEESVNNDISSWTKGRSGEALSLLKKRFSHRPVQEKFVCLNCGFETHADEQAALNIARSWLFLRSQEYKKYQTNKTTGKNTDKRAFVETWQSFYRKKLKEVWKPAV

SEQ ID NO: 40059 - protein, 978 aa, synthetic construct
  REGION 1..978: note = engineered CasX variant
QEIKRINKIRRRLVKDSNTKKAGKTGPMKTLLVRVMTPDLRERLENLRKKPENIPQPISNTSRANLNKLLTDYTEMKKAILHVYWEEFQKDPVGLMSRVAQPASKKIDQNKLKPEMDEKGNLTTAGFACSQCGQPLFVYKLEQVSEKGKAYTNYFGRCNVAEHEKLILLAQLKPEKDSDEAVTYSLGKFGQRALDFYSIHVTKESTHPVKPLAQIAGNRYASGPVGKALRDACMGTIASFLSKYQDIIIEHQKVVKGNQKRLESLRELAGKENLEYPSVTLPPQPHTKEGLDAYNEVIARVRMWVNLNLWQKLKLSRDDAKPLLRLKKFPSFPLVERQANEVDWWDMVCNVKKLINEKKEDGKVFWQNLAGYKRQEALRPYLSSEEDRKKGKKFARYQLGDLLLHLEKKHGEDWGKVYDEAWERIDKKVEGLSKHIKLEEERRSEDAQSKAALTDWLRAKASFVIEGLKEADKDEFCRCELKLQKWYGDLRGKPFAIEAENSILDISGFSKQYNCAFIWQKDGVKKLNLYLIINYFKGGKLRFKKIKPEAFEANRFYTVINKKSGEIVPMEVNFNFDDPNLIILPLAFGKRQGREFIWNDLLSLETGSLKLANGRVIEKTLYNRRTRQDEPALFVALTFERREVLDSSNIKPMNLIGVDRGENIPAVIALTDPEGCPLSRFKDSLGNPTHILRIGESYKEKQRTIQAKKEVEQRRAGGYSRKYASKAKNLADDMVRNTARDLLYYAVTQDAMLIFENLSRGFGRQGKRTFMAERQYTRMEDWLTAKLAYEGLPSKTYLSKTLAQYTSKTCSNCGFTITSADYDRVLEKLKKTATGWMTTINGKELKVEGQITYYNRYKRQNVVKDLSVELDRLSEESVNNDISSWTKGRSGEALSLLKKRFSHRPVQEKFVCLNCGFETHADEQAALNIARSWLFLRSQEYKKYQTNKTTGNTDKRAFVETWQSFYRKKLKEVWKPAV

SEQ ID NO: 40060 - protein, 978 aa, synthetic construct
  REGION 1..978: note = engineered CasX variant
QEIKRINKIRRRLVKDSNTKKAGKTGPMKTLLVRVMTPDLRERLENLRKKPENIPQPISNTSRANLNKLLTDYTEMKKAILHVYWEEFQKDPVGLMSRVAQPASKKIDQNKLKPEMDEKGNLTTAGFACSQCGQPLFVYKLEQVSEKGKAYTNYFGRCNVAEHEKLILLAQLKPEKDSDEAVTYSLGKFGQRALDFYSIHVTKESTHPVKPLAQIAGNRYASGPVGKALRDACMGTIASFLSKYQDIIIEHQKVVKGNQKRLESLRELAGKENLEYPSVTLPPQPHTKEGLDAYNEVIARVRMWVNLNLWQKLKLSRDDAKPLLRLKGFPSFPLVERQANEVDWWDMVCNVKKLINEKKEDGKVFWQNLAGYKRQEALRPYLSSEEDRKKGKKFARYQLGDLLLHLEKKHGEDWGKVYDEAWERIDKKVEGLSKHIKLEEERRSEDAQSKAALTDWLRAKASFVIEGLKEADKDEFCRCELKLQKWYGDLRGKPFAIEAENSILDISGFSKQYNCAFIWQKDGVKKLNLYLIINYFKGGKLRFKKIKPEAFEANRFYTVINKKSGEIVPMEVNFNFDDPNLIILPLAFGKRQGREFIWNDLLSLETGSLKLANGRVIEKTLYNRRTRQDEPALFVALTFERREVLDSSNIKPMNLIGVDRGENIPAVIALTDPEGCPLSRFKDSLGNPTHILRIGERYKEKQRTIQAKKEVEQRRAGGYSRKYASKAKNLADDMVRNTARDLLYYAVTQDAMLIFENLSRGFGRQGKRTFMAERQYTRMEDWLTAKLAYEGLPSKTYLSKTLAQYTSKTCSNCGFTITSADYDRVLEKLKKTATGWMTTINGKELKVEGQITYYNRYKRQNVVKDLSVELDRLSEESVNNDISSWTKGRSGEALSLLKKRFSHRPVQEKFVCLNCGFETHADEQAALNIARSWLFLRSQEYKKYQTNKTTGNTDKRAFVETWQSFYRKKLKEVWKPAV

SEQ ID NO: 40061 - protein, 978 aa, synthetic construct
  REGION 1..978: note = engineered CasX variant
QEIKRINKIRRRLVKDSNTKKAGKTGPMKTLLVRVMTPDLRERLENLRKKPENIPQPISNTSRANLNKLLTDYTEMKKAILHVYWEEFQKDPVGLMSRVAQPASKKIDQNKLKPEMDEKGNLTTAGFACSQCGQPLFVYKLEQVSEKGKAYTNYFGRCNVAEHEKLILLAQLKPEKDSDEAVTYSLGKFGQRALDFYSIHVTKESTHPVKPLAQIAGNRYASGPVGKALRDACMGTIASFLSKYQDIIIEHQKVVKGNQKRLESLRELAGKENLEYPSVTLPPQPHTKEGLDAYNEVIARVRMWVNLNLWQKLKLSRDDAKPLLRLKGFPSFPLVERQANEVDWWDMVCNVKKLINEKKEDGKVFWQNLAGYKRQEALRPYLSSEEDRKKGKKFARYQLGDLLLHLEKKHGEDWGKVYDEAWERIDKKVEGLSKHIKLEEERRSEDAQSKAALTDWLRAKASFVIEGLKEADKDEFCRCELKLQKWYGDLRGKPFAIEAENSILDISGFSKQYNCAFIWQKDGVKKLNLYLIINYFKGGKLRFKKIKPEAFEANRFYTVINKKSGEIVPMEVNFNFDDPNLIILPLAFGKRQGREFIWNDLLSLETGSLQLANGRVIEKTLYNRRTRQDEPALFVALTFERREVLDSSNIKPMNLIGVDRGENIPAVIALTDPEGCPLSRFKDSLGNPTHILRIGESYKEKQRTIQAKKEVEQRRAGGYSRKYASKAKNLADDMVRNTARDLLYYAVTQDAMLIFENLSRGFGRQGKRTFMAERQYTRMEDWLTAKLAYEGLPSKTYLSKTLAQYTSKTCSNCGFTITSADYDRVLEKLKKTATGWMTTINGKELKVEGQITYYNRYKRQNVVKDLSVELDRLSEESVNNDISSWTKGRSGEALSLLKKRFSHRPVQEKFVCLNCGFETHADEQAALNIARSWLFLRSQEYKKYQTNKTTGNTDKRAFVETWQSFYRKKLKEVWKPAV

SEQ ID NO: 40062 - protein, 979 aa, synthetic construct
  REGION 1..979: note = engineered CasX variant
QEIKRINKIRRRLVKDSNTKKAGKTGPMKTLLVRVMTPDLRERLENLRKKPENIPQPISNTSRANLNKLLTDYTEMKKAILHVYWEEFQKDPVGLMSRVAQPASKKIDQNKLKPEMDEKGNLTTAGFACSQCGQPLFVYKLEQVSEKGKAYTNYFGRCNVAEHEKLILLAQLKPEKDSDEAVTYSLGKFGQRALDFYSIHVTKESTHPVKPLAQIAGNRYASGPVGKALRDACMGTIASFLSKYQDIIIEHQKVVKGNQKRLESLRELAGKENLEYPSVTLPPQPHTKEGVDAYNEVIARVRTWWVNLNLWQKLKLSRDDAKPLLRLKGFPSFPLVERQANEVDWWDMVCNVKKLINEKKEDGKVFWQNLAGYKRQEALRPYLSSEEDRKKGKKFARYQLGDLLLHLEKKHGEDWGKVYDEAWERIDKKVEGLSKHIKLEEERRSEDAQSKAALTDWLRAKASFVIEGLKEADKDEFCRCELKLQKWYGDLRGKPFAIEAENSILDISGFSKQYNCAFIWQKDGVKKLNLYLIINYFKGGKLRFKKIKPEAFEANRFYTVINKKSGEIVPMEVNFNFDDPNLIILPLAFGKRQGREFIWNDLLSLETGSLKLANGRVIEKTLYNRRTRQDEPALFVALTFERREVLDSSNIKPMNLIGVDRGENIPAVIALTDPEGCPLSRFKDSLGNPTHILRIGESYKEKQRTIQAKKEVEQRRAGGYSRKYASKAKNLADDMVRNTARDLLYYAVTQDAMLIFENLSRGFGRQGKRTFMAERQYTRMEDWLTAKLAYEGLPSKTYLSKTLAQYTSKTCSNCGFTITSADYDRVLEKLKKTATGWMTTINGKELKVEGQITYYNRYKRQNVVKDLSVELDRLSEESVNNDISSWTKGRSGEALSLLKKRFSHRPVQEKFVCLNCGFETHADEQAALNIARSWLFLRSQEYKKYQTNKTTGNTDKRAFVETWQSFYRKKLKEVWKPAV

SEQ ID NO: 40063 - protein, 979 aa, synthetic construct
  REGION 1..979: note = engineered CasX variant
QEIKRINKIRRRLVKDSNTKKAGKTGPMKTLLVRVMTPDLRERLENLRKKPENIPQPISNTSRANLNKLLTDYTEMKKAILHVYWEEFQKDPVGLMSRVAQPASKKIDQNKLKPEMDEKGNLTTAGFACSQCGQPLFVYKLEQVSEKGKAYTNYFGRCNVAEHEKLILLAQLKPEKDSDEAVTYSLGKFGQRALDFYSIHVTKESTHPVKPLAQIAGNRYASGPVGKALRDACMGTIASFLSKYQDIIIEHQKVVKGNQKRLESLRELAGKENLEYPSVTLPPQPHTKEGVDAYNEVIARVRTWVNLNLWQKLKLSRDDAKPLLRLKGFPSFPLVERQQANEVDWWDMVCNVKKLINEKKEDGKVFWQNLAGYKRQEALRPYLSSEEDRKKGKKFARYQLGDLLLHLEKKHGEDWGKVYDEAWERIDKKVEGLSKHIKLEEERRSEDAQSKAALTDWLRAKASFVIEGLKEADKDEFCRCELKLQKWYGDLRGKPFAIEAENSILDISGFSKQYNCAFIWQKDGVKKLNLYLIINYFKGGKLRFKKIKPEAFEANRFYTVINKKSGEIVPMEVNFNFDDPNLIILPLAFGKRQGREFIWNDLLSLETGSLKLANGRVIEKTLYNRRTRQDEPALFVALTFERREVLDSSNIKPMNLIGVDRGENIPAVIALTDPEGCPLSRFKDSLGNPTHILRIGESYKEKQRTIQAKKEVEQRRAGGYSRKYASKAKNLADDMVRNTARDLLYYAVTQDAMLIFENLSRGFGRQGKRTFMAERQYTRMEDWLTAKLAYEGLPSKTYLSKTLAQYTSKTCSNCGFTITSADYDRVLEKLKKTATGWMTTINGKELKVEGQITYYNRYKRQNVVKDLSVELDRLSEESVNNDISSWTKGRSGEALSLLKKRFSHRPVQEKFVCLNCGFETHADEQAALNIARSWLFLRSQEYKKYQTNKTTGNTDKRAFVETWQSFYRKKLKEVWKPAV

SEQ ID NO: 40064 - protein, 979 aa, synthetic construct
  REGION 1..979: note = engineered CasX variant
QEIKRINKIRRRLVKDSNTKKAGKTGPMKTLLVRVMTPDLRERLENLRKKPENIPQPISNTSRANLNKLLTDYTEMKKAILHVYWEEFQKDPVGLMSRVAQPASKKIDQNKLKPEMDEKGNLTTAGFACSQCGQPLFVYKLEQVSEKGKAYTNYFGRCNVAEHEKLILLAQLKPEKDSDEAVTYSLGKFGQRALDFYSIHVTKESTHPVKPLAQIAGNRYASGPVGKALRDACMGTIASFLSKYQDIIIEHQKVVKGNQKRLESLRELAGKENLEYPSVTLPPQPHTKEGVDAYNEVIARVRTWVNLNLWQKLKLSRDDAKPLLRLKGFPSFPLVERQANAEVDWWDMVCNVKKLINEKKEDGKVFWQNLAGYKRQEALRPYLSSEEDRKKGKKFARYQLGDLLLHLEKKHGEDWGKVYDEAWERIDKKVEGLSKHIKLEEERRSEDAQSKAALTDWLRAKASFVIEGLKEADKDEFCRCELKLQKWYGDLRGKPFAIEAENSILDISGFSKQYNCAFIWQKDGVKKLNLYLIINYFKGGKLRFKKIKPEAFEANRFYTVINKKSGEIVPMEVNFNFDDPNLIILPLAFGKRQGREFIWNDLLSLETGSLKLANGRVIEKTLYNRRTRQDEPALFVALTFERREVLDSSNIKPMNLIGVDRGENIPAVIALTDPEGCPLSRFKDSLGNPTHILRIGESYKEKQRTIQAKKEVEQRRAGGYSRKYASKAKNLADDMVRNTARDLLYYAVTQDAMLIFENLSRGFGRQGKRTFMAERQYTRMEDWLTAKLAYEGLPSKTYLSKTLAQYTSKTCSNCGFTITSADYDRVLEKLKKTATGWMTTINGKELKVEGQITYYNRYKRQNVVKDLSVELDRLSEESVNNDISSWTKGRSGEALSLLKKRFSHRPVQEKFVCLNCGFETHADEQAALNIARSWLFLRSQEYKKYQTNKTTGNTDKRAFVETWQSFYRKKLKEVWKPAV

SEQ ID NO: 40065 - protein, 978 aa, synthetic construct
  REGION 1..978: note = engineered CasX variant
QEIKRINKIRRRLVKDSNTKKAGKTGPMKTLLVRVMTPDLRERLENLRKKPENIPQPISNTSRANLNKLLTDYTEMKKAILHVYWEEFQKDPVGLMSRVAQPASKKIDQNKLKPEMDEKGNLTTAGFACSQCGQPLFVYKLEQVSEKGKAYTNYFGRCNVAEHEKLILLAQLKPEKDSDEAVTYSLGKFGQRALDFYSIHVTKESTHPVKPLAQIAGNRYASGPVGKALRDACMGTIASFLSKYQDIIIEHQKVVKGNQKRLESLRELAGKENLEYPSVTLPPQPHTKEGVDAYNEVIARVRTWVNLNLWQKLKLSRDDAKPLLRLKGFPSFPLVERQANEVDWWDMVCNVKKLINEKKEDGKVFWQNLAGYKRQEALRPYLSSEEDRKKGKKFARTQLGDLLLHLEKKHGEDWGKVYDEAWERIDKKVEGLSKHIKLEEERRSEDAQSKAALTDWLRAKASFVIEGLKEADKDEFCRCELKLQKWYGDLRGKPFAIEAENSILDISGFSKQYNCAFIWQKDGVKKLNLYLIINYFKGGKLRFKKIKPEAFEANRFYTVINKKSGEIVPMEVNFNFDDPNLIILPLAFGKRQGREFIWNDLLSLETGSLKLANGRVIEKTLYNRRTRQDEPALFVALTFERREVLDSSNIKPMNLIGVDRGENIPAVIALTDPEGCPLSRFKDSLGNPTHILRIGESYKEKQRTIQAKKEVEQRRAGGYSRKYASKAKNLADDMVRNTARDLLYYAVTQDAMLIFENLSRGFGRQGKRTFMAERQYTRMEDWLTAKLAYEGLPSKTYLSKTLAQYTSKTCSNCGFTITSADYDRVLEKLKKTATGWMTTINGKELKVEGQITYYNRYKRQNVVKDLSVELDRLSEESVNNDISSWTKGRSGEALSLLKKRFSHRPVQEKFVCLNCGFETHADEQAALNIARSWLFLRSQEYKKYQTNKTTGNTDKRAFVETWQSFYRKKLKEVWKPAV

SEQ ID NO: 40066 - protein, 979 aa, synthetic construct
  REGION 1..979: note = engineered CasX variant
QEIKRINKIRRRLVKDSNTKKAGKTGPMKTLLVRVMTPDLRERLENLRKKPENIPQPISNTSRANLNKLLTDYTEMKKAILHVYWEEFQKDPVGLMSRVAQPASKKIDQNKLKPEMDEKGNLTTAGFACSQCGQPLFVYKLEQVSEKGKAYTNYFGRCNVAEHEKLILLAQLKPEKDSDEAVTYSLGKFGQRALDFYSIHVTKESTHPVKPLAQIAGNRYASGPVGKALRDACMGTIASFLSKYQDIIIEHQKVVKGNQKRLESLRELAGKENLEYPSVTLPPQPHTKEGVDAYNEVIARVRTWVNLNLWQKLKLSRDDAKPLLRLKGFPSFPLVERQANEVDWWDMVCNVKKLINEKKEDGKVFWQNLAGYKRQEALRPYLSSEEDRKKGKKFARYQLGDLLLHLEKKHEGEDWGKVYDEAWERIDKKVEGLSKHIKLEEERRSEDAQSKAALTDWLRAKASFVIEGLKEADKDEFCRCELKLQKWYGDLRGKPFAIEAENSILDISGFSKQYNCAFIWQKDGVKKLNLYLIINYFKGGKLRFKKIKPEAFEANRFYTVINKKSGEIVPMEVNFNFDDPNLIILPLAFGKRQGREFIWNDLLSLETGSLKLANGRVIEKTLYNRRTRQDEPALFVALTFERREVLDSSNIKPMNLIGVDRGENIPAVIALTDPEGCPLSRFKDSLGNPTHILRIGESYKEKQRTIQAKKEVEQRRAGGYSRKYASKAKNLADDMVRNTARDLLYYAVTQDAMLIFENLSRGFGRQGKRTFMAERQYTRMEDWLTAKLAYEGLPSKTYLSKTLAQYTSKTCSNCGFTITSADYDRVLEKLKKTATGWMTTINGKELKVEGQITYYNRYKRQNVVKDLSVELDRLSEESVNNDISSWTKGRSGEALSLLKKRFSHRPVQEKFVCLNCGFETHADEQAALNIARSWLFLRSQEYKKYQTNKTTGNTDKRAFVETWQSFYRKKLKEVWKPAV

SEQ ID NO: 40067 - protein, 978 aa, synthetic construct
  REGION 1..978: note = engineered CasX variant
QEIKRINKIRRRLVKDSNTKKAGKTGPMKTLLVRVMTPDLRERLENLRKKPENIPQPISNTSRANLNKLLTDYTEMKKAILHVYWEEFQKDPVGLMSRVAQPASKKIDQNKLKPEMDEKGNLTTAGFACSQCGQPLFVYKLEQVSEKGKAYTNYFGRCNVAEHEKLILLAQLKPEKDSDEAVTYSLGKFGQRALDFYSIHVTKESTHPVKPLAQIAGNRYASGPVGKALRDACMGTIASFLSKYQDIIIEHQKVVKGNQKRLESLRELAGKENLEYPSVTLPPQPHTKEGVDAYNEVIARVRTWVNLNLWQKLKLSRDDAKPLLRLKGFPSFPLVERQANEVDWWDMVCNVKKLINEKKEDGKVFWQNLAGYKRQEALRPYLSSEEDRKKGKKFARYQLGDLLLHLEKKHGEDWGKVYDEAWERIDKKVEGLSKHIKLEEERRSEDAQSKAALTDWLRAKASFVIEGLKEADKDEFCRCDLKLQKWYGDLRGKPFAIEAENSILDISGFSKQYNCAFIWQKDGVKKLNLYLIINYFKGGKLRFKKIKPEAFEANRFYTVINKKSGEIVPMEVNFNFDDPNLIILPLAFGKRQGREFIWNDLLSLETGSLKLANGRVIEKTLYNRRTRQDEPALFVALTFERREVLDSSNIKPMNLIGVDRGENIPAVIALTDPEGCPLSRFKDSLGNPTHILRIGESYKEKQRTIQAKKEVEQRRAGGYSRKYASKAKNLADDMVRNTARDLLYYAVTQDAMLIFENLSRGFGRQGKRTFMAERQYTRMEDWLTAKLAYEGLPSKTYLSKTLAQYTSKTCSNCGFTITSADYDRVLEKLKKTATGWMTTINGKELKVEGQITYYNRYKRQNVVKDLSVELDRLSEESVNNDISSWTKGRSGEALSLLKKRFSHRPVQEKFVCLNCGFETHADEQAALNIARSWLFLRSQEYKKYQTNKTTGNTDKRAFVETWQSFYRKKLKEVWKPAV

SEQ ID NO: 40068 - protein, 978 aa, synthetic construct
  REGION 1..978: note = engineered CasX variant
QEIKRINKIRRRLVKDSNTKKAGKTGPMKTLLVRVMTPDLRERLENLRKKPENIPQPISNTSRANLNKLLTDYTEMKKAILHVYWEEFQKDPVGLMSRVAQPASKKIDQNKLKPEMDEKGNLTTAGFACSQCGQPLFVYKLEQVSEKGKAYTNYFGRCNVAEHEKLILLAQLKPEKDSDEAVTYSLGKFGQRALDFYSIHVTKESTHPVKPLAQIAGNRYASGPVGKALRDACMGTIASFLSKYQDIIIEHQKVVKGNQKRLESLRELAGKENLEYPSVTLPPQPHTKEGVDAYNEVIARVRTWVNLNLWQKLKLSRDDAKPLLRLKGFPSFPLVERQANEVDWWDMVCNVKKLINEKKEDGKVFWQNLAGYKRQEALRPYLSSEEDRKKGKKFARYQLGDLLLHLEKKHGEDWGKVYDEAWERIDKKVEGLSKHIKLEEERRSEDAQSKAALTDWLRAKASFVIEGLKEADKDEFCRCELKLQKWYGDLRGKPFAIEAENSILDISGFSKQYNCAFIWQKDGVKKLNLYLIINYFKGGKLRFKKIKPEAFEANRFYTVINKKSGEIVPMEVNFNFDDPNLIILPLAFGKRFGREFIWNDLLSLETGSLKLANGRVIEKTLYNRRTRQDEPALFVALTFERREVLDSSNIKPMNLIGVDRGENIPAVIALTDPEGCPLSRFKDSLGNPTHILRIGESYKEKQRTIQAKKEVEQRRAGGYSRKYASKAKNLADDMVRNTARDLLYYAVTQDAMLIFENLSRGFGRQGKRTFMAERQYTRMEDWLTAKLAYEGLPSKTYLSKTLAQYTSKTCSNCGFTITSADYDRVLEKLKKTATGWMTTINGKELKVEGQITYYNRYKRQNVVKDLSVELDRLSEESVNNDISSWTKGRSGEALSLLKKRFSHRPVQEKFVCLNCGFETHADEQAALNIARSWLFLRSQEYKKYQTNKTTGNTDKRAFVETWQSFYRKKLKEVWKPAV

SEQ ID NO: 40069 - protein, 978 aa, synthetic construct
  REGION 1..978: note = engineered CasX variant
QEIKRINKIRRRLVKDSNTKKAGKTGPMKTLLVRVMTPDLRERLENLRKKPENIPQPISNTSRANLNKLLTDYTEMKKAILHVYWEEFQKDPVGLMSRVAQPASKKIDQNKLKPEMDEKGNLTTAGFACSQCGQPLFVYKLEQVSEKGKAYTNYFGRCNVAEHEKLILLAQLKPEKDSDEAVTYSLGKFGQRALDFYSIHVTKESTHPVKPLAQIAGNRYASGPVGKALRDACMGTIASFLSKYQDIIIEHQKVVKGNQKRLESLRELAGKENLEYPSVTLPPQPHTKEGVDAYNEVIARVRTWVNLNLWQKLKLSRDDAKPLLRLKGFPSFPLVERQANEVDWWDMVCNVKKLINEKKEDGKVFWQNLAGYKRQEALRPYLSSEEDRKKGKKFARYQLGDLLLHLEKKHGEDWGKVYDEAWERIDKKVEGLSKHIKLEEERRSEDAQSKAALTDWLRAKASFVIEGLKEADKDEFCRCELKLQKWYGDLRGKPFAIEAENSILDISGFSKQYNCAFIWQKDGVKKLNLYLIINYFKGGKLRFKKIKPEAFEANRFYTVINKKSGEIVPMEVNFNFDDPNLIILPLAFGKRVGREFIWNDLLSLETGSLKLANGRVIEKTLYNRRTRQDEPALFVALTFERREVLDSSNIKPMNLIGVDRGENIPAVIALTDPEGCPLSRFKDSLGNPTHILRIGESYKEKQRTIQAKKEVEQRRAGGYSRKYASKAKNLADDMVRNTARDLLYYAVTQDAMLIFENLSRGFGRQGKRTFMAERQYTRMEDWLTAKLAYEGLPSKTYLSKTLAQYTSKTCSNCGFTITSADYDRVLEKLKKTATGWMTTINGKELKVEGQITYYNRYKRQNVVKDLSVELDRLSEESVNNDISSWTKGRSGEALSLLKKRFSHRPVQEKFVCLNCGFETHADEQAALNIARSWLFLRSQEYKKYQTNKTTGNTDKRAFVETWQSFYRKKLKEVWKPAV

SEQ ID NO: 40070 - protein, 979 aa, synthetic construct
  REGION 1..979: note = engineered CasX variant
QEIKRINKIRRRLVKDSNTKKAGKTGPMKTLLVRVMTPDLRERLENLRKKPENIPQPISNTSRANLNKLLTDYTEMKKAILHVYWEEFQKDPVGLMSRVAQPASKKIDQNKLKPEMDEKGNLTTAGFACSQCGQPLFVYKLEQVSEKGKAYTNYFGRCNVAEHEKLILLAQLKPEKDSDEAVTYSLGKFGQRALDFYSIHVTKESTHPVKPLAQIAGNRYASGPVGKALRDACMGTIASFLSKYQDIIIEHQKVVKGNQKRLESLRELAGKENLEYPSVTLPPQPHTKEGVDAYNEVIARVRTWVNLNLWQKLKLSRDDAKPLLRLKGFPSFPLVERQANEVDWWDMVCNVKKLINEKKEDGKVFWQNLAGYKRQEALRPYLSSEEDRKKGKKFARYQLGDLLLHLEKKHGEDWGKVYDEAWERIDKKVEGLSKHIKLEEERRSEDAQSKAALTDWLRAKASFVIEGLKEADKDEFCRCELKLQKWYGDLRGKPFAIEAENSILDISGFSKQYNCAFIWQKDGVKKLNLYLIINYFKGGKLRFKKIKPEAFEANRFYTVINKKSGEIVPMEVNFNFDDPNLIILPLAFGKRQGREFIWNDLLSLETGSLKLANGRVIEKTLYNRRTRQDEPALFVALTFERREVLDSSNIKTPMNLIGVDRGENIPAVIALTDPEGCPLSRFKDSLGNPTHILRIGESYKEKQRTIQAKKEVEQRRAGGYSRKYASKAKNLADDMVRNTARDLLYYAVTQDAMLIFENLSRGFGRQGKRTFMAERQYTRMEDWLTAKLAYEGLPSKTYLSKTLAQYTSKTCSNCGFTITSADYDRVLEKLKKTATGWMTTINGKELKVEGQITYYNRYKRQNVVKDLSVELDRLSEESVNNDISSWTKGRSGEALSLLKKRFSHRPVQEKFVCLNCGFETHADEQAALNIARSWLFLRSQEYKKYQTNKTTGNTDKRAFVETWQSFYRKKLKEVWKPAV

SEQ ID NO: 40071 - protein, 979 aa, synthetic construct
  REGION 1..979: note = engineered CasX variant
QEIKRINKIRRRLVKDSNTKKAGKTGPMKTLLVRVMTPDLRERLENLRKKPENIPQPISNTSRANLNKLLTDYTEMKKAILHVYWEEFQKDPVGLMSRVAQPASKKIDQNKLKPEMDEKGNLTTAGFACSQCGQPLFVYKLEQVSEKGKAYTNYFGRCNVAEHEKLILLAQLKPEKDSDEAVTYSLGKFGQRALDFYSIHVTKESTHPVKPLAQIAGNRYASGPVGKALRDACMGTIASFLSKYQDIIIEHQKVVKGNQKRLESLRELAGKENLEYPSVTLPPQPHTKEGVDAYNEVIARVRTWVNLNLWQKLKLSRDDAKPLLRLKGFPSFPLVERQANEVDWWDMVCNVKKLINEKKEDGKVFWQNLAGYKRQEALRPYLSSEEDRKKGKKFARYQLGDLLLHLEKKHGEDWGKVYDEAWERIDKKVEGLSKHIKLEEERRSEDAQSKAALTDWLRAKASFVIEGLKEADKDEFCRCELKLQKWYGDLRGKPFAIEAENSILDISGFSKQYNCAFIWQKDGVKKLNLYLIINYFKGGKLRFKKIKPEAFEANRFYTVINKKSGEIVPMEVNFNFDDPNLIILPLAFGKRQGREFIWNDLLSLETGSLKLANGRVIEKTLYNRRTRQDEPALFVALTFERREVLDSSNIKPMSNLIGVDRGENIPAVIALTDPEGCPLSRFKDSLGNPTHILRIGESYKEKQRTIQAKKEVEQRRAGGYSRKYASKAKNLADDMVRNTARDLLYYAVTQDAMLIFENLSRGFGRQGKRTFMAERQYTRMEDWLTAKLAYEGLPSKTYLSKTLAQYTSKTCSNCGFTITSADYDRVLEKLKKTATGWMTTINGKELKVEGQITYYNRYKRQNVVKDLSVELDRLSEESVNNDISSWTKGRSGEALSLLKKRFSHRPVQEKFVCLNCGFETHADEQAALNIARSWLFLRSQEYKKYQTNKTTGNTDKRAFVETWQSFYRKKLKEVWKPAV

SEQ ID NO: 40072 - protein, 978 aa, synthetic construct
  REGION 1..978: note = engineered CasX variant
QEIKRINKIRRRLVKDSNTKKAGKTGPMKTLLVRVMTPDLRERLENLRKKPENIPQPISNTSRANLNKLLTDYTEMKKAILHVYWEEFQKDPVGLMSRVAQPASKKIDQNKLKPEMDEKGNLTTAGFACSQCGQPLFVYKLEQVSEKGKAYTNYFGRCNVAEHEKLILLAQLKPEKDSDEAVTYSLGKFGQRALDFYSIHVTKESTHPVKPLAQIAGNRYASGPVGKALRDACMGTIASFLSKYQDIIIEHQKVVKGNQKRLESLRELAGKENLEYPSVTLPPQPHTKEGVDAYNEVIARVRTWVNLNLWQKLKLSRDDAKPLLRLKGFPSFPLVERQANEVDWWDMVCNVKKLINEKKEDGKVFWQNLAGYKRQEALRPYLSSEEDRKKGKKFARYQLGDLLLHLEKKHGEDWGKVYDEAWERIDKKVEGLSKHIKLEEERRSEDAQSKAALTDWLRAKASFVIEGLKEADKDEFCRCELKLQKWYGDLRGKPFAIEAENSILDISGFSKQYNCAFIWQKDGVKKLNLYLIINYFKGGKLRFKKIKPEAFEANRFYTVINKKSGEIVPMEVNFNFDDPNLIILPLAFGKRQGREFIWNDLLSLETGSLKLANGRVIEKTLYNRRTRQDEPALFVALTFERREVLDSSNIKPMNLIGVDRGENIPAVIALTDPEGCPLSRFKDSLGNPTHILRIRESYKEKQRTIQAKKEVEQRRAGGYSRKYASKAKNLADDMVRNTARDLLYYAVTQDAMLIFENLSRGFGRQGKRTFMAERQYTRMEDWLTAKLAYEGLPSKTYLSKTLAQYTSKTCSNCGFTITSADYDRVLEKLKKTATGWMTTINGKELKVEGQITYYNRYKRQNVVKDLSVELDRLSEESVNNDISSWTKGRSGEALSLLKKRFSHRPVQEKFVCLNCGFETHADEQAALNIARSWLFLRSQEYKKYQTNKTTGNTDKRAFVETWQSFYRKKLKEVWKPAV

SEQ ID NO: 40073 - protein, 978 aa, synthetic construct
  REGION 1..978: note = engineered CasX variant
QEIKRINKIRRRLVKDSNTKKAGKTGPMKTLLVRVMTPDLRERLENLRKKPENIPQPISNTSRANLNKLLTDYTEMKKAILHVYWEEFQKDPVGLMSRVAQPASKKIDQNKLKPEMDEKGNLTTAGFACSQCGQPLFVYKLEQVSEKGKAYTNYFGRCNVAEHEKLILLAQLKPEKDSDEAVTYSLGKFGQRALDFYSIHVTKESTHPVKPLAQIAGNRYASGPVGKALRDACMGTIASFLSKYQDIIIEHQKVVKGNQKRLESLRELAGKENLEYPSVTLPPQPHTKEGVDAYNEVIARVRTWVNLNLWQKLKLSRDDAKPLLRLKGFPSFPLVERQANEVDWWDMVCNVKKLINEKKEDGKVFWQNLAGYKRQEALRPYLSSEEDRKKGKKFARYQLGDLLLHLEKKHGEDWGKVYDEAWERIDKKVEGLSKHIKLEEERRSEDAQSKAALTDWLRAKASFVIEGLKEADKDEFCRCELKLQKWYGDLRGKPFAIEAENSILDISGFSKQYNCAFIWQKDGVKKLNLYLIINYFKGGKLRFKKIKPEAFEANRFYTVINKKSGEIVPMEVNFNFDDPNLIILPLAFGKRQGREFIWNDLLSLETGSLKLANGRVIEKTLYNRRTRQDEPALFVALTFERREVLDSSNIKPMNLIGVDRGENIPAVIALTDPEGCPLSRFKDSLGNPTHILRIGESYKEKQRTIQAKKEVEQRRAGGYSRKYASKAKNLADDMVRNTARDLLYYAVTQDAMLIFENLSRGFGRQGKRTFSAERQYTRMEDWLTAKLAYEGLPSKTYLSKTLAQYTSKTCSNCGFTITSADYDRVLEKLKKTATGWMTTINGKELKVEGQITYYNRYKRQNVVKDLSVELDRLSEESVNNDISSWTKGRSGEALSLLKKRFSHRPVQEKFVCLNCGFETHADEQAALNIARSWLFLRSQEYKKYQTNKTTGNTDKRAFVETWQSFYRKKLKEVWKPAV

SEQ ID NO: 40074 - protein, 978 aa, synthetic construct
  REGION 1..978: note = engineered CasX variant
QEIKRINKIRRRLVKDSNTKKAGKTGPMKTLLVRVMTPDLRERLENLRKKPENIPQPISNTSRANLNKLLTDYTEMKKAILHVYWEEFQKDPVGLMSRVAQPASKKIDQNKLKPEMDEKGNLTTAGFACSQCGQPLFVYKLEQVSEKGKAYTNYFGRCNVAEHEKLILLAQLKPEKDSDEAVTYSLGKFGQRALDFYSIHVTKESTHPVKPLAQIAGNRYASGPVGKALRDACMGTIASFLSKYQDIIIEHQKVVKGNQKRLESLRELAGKENLEYPSVTLPPQPHTKEGVDAYNEVIARVRTWVNLNLWQKLKLSRDDAKPLLRLKGFPSFPLVERQANEVDWWDMVCNVKKLINEKKEDGKVFWQNLAGYKRQEALRPYLSSEEDRKKGKKFARYQLGDLLLHLEKKHGEDWGKVYDEAWERIDKKVEGLSKHIKLEEERRSEDAQSKAALTDWLRAKASFVIEGLKEADKDEFCRCELKLQKWYGDLRGKPFAIEAENSILDISGFSKQYNCAFIWQKDGVKKLNLYLIINYFKGGKLRFKKIKPEAFEANRFYTVINKKSGEIVPMEVNFNFDDPNLIILPLAFGKRQGREFIWNDLLSLETGSLKLANGRVIEKTLYNRRTRQDEPALFVALTFERREVLDSSNIKPMNLIGVDRGENIPAVIALTDPEGCPLSRFKDSLGNPTHILRIGESYKEKQRTIQAKKEVEQRRAGGYSRKYASKAKNLADDMVRNTARDLLYYAVTQDAMLIFENLSRGFGRQGKRTFMAERQYTRMEDWLTAKLAYEGLPSKTYLSKTLAQYTSKTCSNCGFTITSADYDRVLEKLKKTATGWMTTINGKELKVEGQITYYNRYKRQNVVKDLSVELDRLSEESVNNDISSWDKGRSGEALSLLKKRFSHRPVQEKFVCLNCGFETHADEQAALNIARSWLFLRSQEYKKYQTNKTTGNTDKRAFVETWQSFYRKKLKEVWKPAV

SEQ ID NO: 40075 - protein, 978 aa, synthetic construct
  REGION 1..978: note = engineered CasX variant
QEIKRINKIRRRLVKDSNTKKAGKTGPMKTLLVRVMTPDLRERLENLRKKPENIPQPISNTSRANLNKLLTDYTEMKKAILHVYWEEFQVDPVGLMSRVAQPASKKIDQNKLKPEMDEKGNLTTAGFACSQCGQPLFVYKLEQVSEKGKAYTNYFGRCNVAEHEKLILLAQLKPEKDSDEAVTYSLGKFGQRALDFYSIHVTKESTHPVKPLAQIAGNRYASGPVGKALRDACMGTIASFLSKYQDIIIEHQKVVKGNQKRLESLRELAGKENLEYPSVTLPPQPHTKEGVDAYNEVIARVRTWVNLNLWQKLKLSRDDAKPLLRLKGFPSFPLVERQANEVDWWDMVCNVKKLINEKKEDGKVFWQNLAGYKRQEALRPYLSSEEDRKKGKKFARYQLGDLLLHLEKKHGEDWGKVYDEAWERIDKKVEGLSKHIKLEEERRSEDAQSKAALTDWLRAKASFVIEGLKEADKDEFCRCELKLQKWYGDLRGKPFAIEAENSILDISGFSKQYNCAFIWQKDGVKKLNLYLIINYFKGGKLRFKKIKPEAFEANRFYTVINKKSGEIVPMEVNFNFDDPNLIILPLAFGKRQGREFIWNDLLSLETGSLKLANGRVIEKTLYNRRTRQDEPALFVALTFERREVLDSSNIKPMNLIGVDRGENIPAVIALTDPEGCPLSRFKDSLGNPTHILRIGESYKEKQRTIQAKKEVEQRRAGGYSRKYASKAKNLADDMVRNTARDLLYYAVTQDAMLIFENLSRGFGRQGKRTFMAERQYTRMEDWLTAKLAYEGLPSKTYLSKTLAQYTSKTCSNCGFTITSADYDRVLEKLKKTATGWMTTINGKELKVEGQITYYNRYKRQNVVKDLSVELDRLSEESVNNDISSWTKGRSGEALSLLKKRFSHRPVQEKFVCLNCGFETHADEQAALNIARSWLFLRSQEYKKYQTNKTTGNTDKRAFVETWQSFYRKKLKEVWKPAV

SEQ ID NO: 40076 - protein, 978 aa, synthetic construct
  REGION 1..978: note = engineered CasX variant
QEIKRLNKIRRRLVKDSNTKKAGKTGPMKTLLVRVMTPDLRERLENLRKKPENIPQPISNTSRANLNKLLTDYTEMKKAILHVYWEEFQKDPVGLMSRVAQPASKKIDQNKLKPEMDEKGNLTTAGFACSQCGQPLFVYKLEQVSEKGKAYTNYFGRCNVAEHEKLILLAQLKPEKDSDEAVTYSLGKFGQRALDFYSIHVTKESTHPVKPLAQIAGNRYASGPVGKALRDACMGTIASFLSKYQDIIIEHQKVVKGNQKRLESLRELAGKENLEYPSVTLPPQPHTKEGVDAYNEVIARVRTWVNLNLWQKLKLSRDDAKPLLRLKGFPSFPLVERQANEVDWWDMVCNVKKLINEKKEDGKVFWQNLAGYKRQEALRPYLSSEEDRKKGKKFARYQLGDLLLHLEKKHGEDWGKVYDEAWERIDKKVEGLSKHIKLEEERRSEDAQSKAALTDWLRAKASFVIEGLKEADKDEFCRCELKLQKWYGDLRGKPFAIEAENSILDISGFSKQYNCAFIWQKDGVKKLNLYLIINYFKGGKLRFKKIKPEAFEANRFYTVINKKSGEIVPMEVNFNFDDPNLIILPLAFGKRQGREFIWNDLLSLETGSLKLANGRVIEKTLYNRRTRQDEPALFVALTFERREVLDSSNIKPMNLIGVDRGENIPAVIALTDPEGCPLSRFKDSLGNPTHILRIGESYKEKQRTIQAKKEVEQRRAGGYSRKYASKAKNLADDMVRNTARDLLYYAVTQDAMLIFENLSRGFGRQGKRTFMAERQYTRMEDWLTAKLAYEGLPSKTYLSKTLAQYTSKTCSNCGFTITSADYDRVLEKLKKTATGWMTTINGKELKVEGQITYYNRYKRQNVVKDLSVELDRLSEESVNNDISSWTKGRSGEALSLLKKRFSHRPVQEKFVCLNCGFETHADEQAALNIARSWLFLRSQEYKKYQTNKTTGNTDKRAFVETWQSFYRKKLKEVWKPAV

SEQ ID NO: 40077 - protein, 978 aa, synthetic construct
  REGION 1..978: note = engineered CasX variant
QEIKRINKIRRRLVKDSNTKKAGKTGPMKTLLVRVMTPDLRERLENLRKKPENIPQPISNTSRANLNKLLTDYTEMKKAILHVYWEEFQKDPVGLMSRVAQPASKKIDQNKLKPEMDEKGNLTTAGFACSQCGQPLFVYKLEQVSEKGKAYTNYVGRCNVAEHEKLILLAQLKPEKDSDEAVTYSLGKFGQRALDFYSIHVTKESTHPVKPLAQIAGNRYASGPVGKALRDACMGTIASFLSKYQDIIIEHQKVVKGNQKRLESLRELAGKENLEYPSVTLPPQPHTKEGVDAYNEVIARVRTWVNLNLWQKLKLSRDDAKPLLRLKGFPSFPLVERQANEVDWWDMVCNVKKLINEKKEDGKVFWQNLAGYKRQEALRPYLSSEEDRKKGKKFARYQLGDLLLHLEKKHGEDWGKVYDEAWERIDKKVEGLSKHIKLEEERRSEDAQSKAALTDWLRAKASFVIEGLKEADKDEFCRCELKLQKWYGDLRGKPFAIEAENSILDISGFSKQYNCAFIWQKDGVKKLNLYLIINYFKGGKLRFKKIKPEAFEANRFYTVINKKSGEIVPMEVNFNFDDPNLIILPLAFGKRQGREFIWNDLLSLETGSLKLANGRVIEKTLYNRRTRQDEPALFVALTFERREVLDSSNIKPMNLIGVDRGENIPAVIALTDPEGCPLSRFKDSLGNPTHILRIGESYKEKQRTIQAKKEVEQRRAGGYSRKYASKAKNLADDMVRNTARDLLYYAVTQDAMLIFENLSRGFGRQGKRTFMAERQYTRMEDWLTAKLAYEGLPSKTYLSKTLAQYTSKTCSNCGFTITSADYDRVLEKLKKTATGWMTTINGKELKVEGQITYYNRYKRQNVVKDLSVELDRLSEESVNNDISSWTKGRSGEALSLLKKRFSHRPVQEKFVCLNCGFETHADEQAALNIARSWLFLRSQEYKKYQTNKTTGNTDKRAFVETWQSFYRKKLKEVWKPAV

SEQ ID NO: 40078 - protein, 978 aa, synthetic construct
  REGION 1..978: note = engineered CasX variant
QEIKRINKIRRRLVKDSNTKKAGKTGPMKTLLVRVMTPDLRERLENLRKKPENIPQPISNTSRANLNKLLTDYTEMKKAILHVYWEEFQKDPVGLMSRVAQPASKKIDQNKLKPEMDEKGNLTTAGFACSQCGQPLFVYKLEQVSEKGKAYTNYFGRCNVAEHEKLILLAQLKPEKDSDEAVTYSLGKFGQRALDFYSIHVTKESTHPVKPLAQIAGNRYASGPVGKALRDACMGTIASFLSKYQDIIIEHQKVVKGNQKRLESLRELAGKENLEYPSVTLPPQPHTKEGVDAYNEVIARVRTWVNLNLWQKLKLSRDDAKPLLRLKGFPSFPLVERQANEVDWWDMVCNVKKLINEKKEDGKVFWQNLAGYKRQEALRPYLSSEEDRKKGKKFARYQLGDLLLHLEKKHGEDWGKVYDEAWERIDKKVEGLSKHIKLEEERRSEDAQSKAALTDWLRAKASFVIEGLKEADKDEFCRCELKLQKWYGDLRGKPFAIEAENSILDISGFSKQYNCAFIWQKDGVKKLNLYLIINYFKGGKLRFKKIKPEAFEANRFYTVINKKSGEIVPMEVNFNFDDPNLIILPLAFGKRQGREFIWNDLLSLETGSLKLANGRVIEKTLYNRRTRQDEPALFVALTFERREVLDSSNIKPMNLIGVDRGENIPAVIALTDPEGCPLSRFKDSLGNPTHILRIGESYKEKQRTIQAKKEVEQRRAGGYSRKYASKAKNLADDMVRNTARDLLYYAVTQDAMLIFENLSRGFGRQGKRTFMAERQYTRMEDWLTAKLAYEGLASKTYLSKTLAQYTSKTCSNCGFTITSADYDRVLEKLKKTATGWMTTINGKELKVEGQITYYNRYKRQNVVKDLSVELDRLSEESVNNDISSWTKGRSGEALSLLKKRFSHRPVQEKFVCLNCGFETHADEQAALNIARSWLFLRSQEYKKYQTNKTTGNTDKRAFVETWQSFYRKKLKEVWKPAV

SEQ ID NO: 40079 - protein, 978 aa, synthetic construct
  REGION 1..978: note = engineered CasX variant
QEIKRINKIRRRLVKDSNTKKAGKTGPMKTLLVRVMTPDLRERLENLRKKPENIPQPISNTSRANLNKLLTDYTEMKKAILHVYWEEFQKDPVGLMSRVAQPASKKIDQNKLKPEMDEKGNLTTAGFACSQCGQPLFVYKLEQVSEKGKAYTNYFGRCNVAEHEKLILLAQLKPEKDSDEAVTYSLGKFGQRALDFYSIHVTKESTHPVKPLAQIAGNRYASGPVGKALRDACMGTIASFLSKYQDIIIEHQKVVKGNQKRLESLRELAGKENLEYPSVTLPPQPHTKEGVDAYNEVIARVRTWVNLNLWQKLKLSRDDAKPLLRLKGFPSFPLVERQANEVDWWDMVCNVKKLINEKKEDGKVFWQNLAGYKRQEALRPYLSSEEDRKKGKKFARYQLGDLLLHLEKKHGEDWGKVYDEAWERIDKKVEGLSKHIKLEEERRSEDAQSKAALTDWLRAKASFVIEGLKEADKDEFCRCELKLQKWYGDLRGKPFAIEAENSILDISGFSKQYNCAFIWQKDGVKKLNLYLIINYFKGGKLRFKKIKPEAFEANRFYTVINKKSGEIVPMEVNFNFDDPNLIILPLAFGKRQGREFIWNDLLSLETGSLKLANGRVIEKTLYNRRTRQDEPALFVALTFERREVLDSSNIKPMNLIGVDRGENIPAVIALTDPEGCPLSRFKDSLGNPTHILRIGESYKEKQRTIQAKKEVEQRRAGGYSRKYASKAKNLADDMVRNTARDLLYYAVTQDAMLIFENLSRGFGRQGKRTFMAERQYTRMEDWLTAKLAYEGLPSKVYLSKTLAQYTSKTCSNCGFTITSADYDRVLEKLKKTATGWMTTINGKELKVEGQITYYNRYKRQNVVKDLSVELDRLSEESVNNDISSWTKGRSGEALSLLKKRFSHRPVQEKFVCLNCGFETHADEQAALNIARSWLFLRSQEYKKYQTNKTTGNTDKRAFVETWQSFYRKKLKEVWKPAV

SEQ ID NO: 40080 - protein, 979 aa, synthetic construct
  REGION 1..979: note = engineered CasX variant
QEIKRINKIRRRLVKDSNTKKAGKTGPMKTLLVRVMTPDLRERLENLRKKPENIPQPISNTSRANLNKLLTDYTEMKKAILHVYWEEFQKDPVGLMSRVAQPASKKIDQNKLKPEMDEKGNLTTAGFACSQCGQPLFVYKLEQVSEKGKAYTNYFGRCNVAEHEKLILLAQLKPEKDSDEAVTYSLGKFGQRALDFYSIHVTKESTHPVKPLAQIAGNRYASGPVGKALRDACMGTIASFLSKYQDIIIEHQKVVKGNQKRLESLRELAGKENLEYPSVTLPPQPHTKEGVDAYNEVIARVRTWVNLNLWQKLKLSRDDAKPLLRLKGFPSFPLVERQANEVDWWDMVCNVKKLINEKKEDGKVFWQNLAGYKRQEALRPYLSSEEDRKKGKKFARYQLGDLLLHLEKKHGEDWGKVYDEAWERIDKKVEGLSKHIKLEEERRSEDAQSKAALTDWLRAKASFVIEGLKEADKDEFCRCELKLQKWYGDLRGKPFAIEAENSILDISGFSKQYNCAFIWQKDGVKKLNLYLIINYFKGGKLRFKKIKPEAFEANRFYTVINKKSGEIVPMEVNFNFDDPNLIILPLAFGKRQGREFIWNDLLSLETGSLKLANGRVIEKTLYNRRTRQDEPALFVALTFERREVLDSSNIKPMNLIGVDRGENIPAVIALTDPEGCPLSRFKDSLGNPTHILRIGESYKEKQRTIQAKKEVEQRRAGGYSRKYASKAKNLADDMVRNTARDLLYYAVTQDAMLIFENLSRGFGRQGKRTFMAERQYTRMEDWLTAKLAYEGPLPSKTYLSKTLAQYTSKTCSNCGFTITSADYDRVLEKLKKTATGWMTTINGKELKVEGQITYYNRYKRQNVVKDLSVELDRLSEESVNNDISSWTKGRSGEALSLLKKRFSHRPVQEKFVCLNCGFETHADEQAALNIARSWLFLRSQEYKKYQTNKTTGNTDKRAFVETWQSFYRKKLKEVWKPAV

SEQ ID NO: 40081 - protein, 979 aa, synthetic construct
  REGION 1..979: note = engineered CasX variant
QEIKRINKIRRRLVKDSNTKKAGKTGPMKTLLVRVMTPDLRERLENLRKKPENIPQPISNTSRANLNKLLTDYTEMKKAILHVYWEEFQKDPVGLMSRVAQPASKKIDQNKLKPEMDEKGNLTTAGFACSQCGQPLFVYKLEQVSEKGKAYTNYFGRCNVAEHEKLILLAQLKPEKDSDEAVTYSLGKFGQRALDFYSIHVTKESTHPVKPLAQIAGNRYASGPVGKALRDACMGTIASFLSKYQDIIIEHQKVVKGNQKRLESLRELAGKENLEYPSVTLPPQPHTKEGVDAYNEVIARVRTWVNLNLWQKLKLSRDDAKPLLRLKGFPSFPLVERQANEVDWWDMVCNVKKLINEKKEDGKVFWQNLAGYKRQEALRPYLSSEEDVRKKGKKFARYQLGDLLLHLEKKHGEDWGKVYDEAWERIDKKVEGLSKHIKLEEERRSEDAQSKAALTDWLRAKASFVIEGLKEADKDEFCRCELKLQKWYGDLRGKPFAIEAENSILDISGFSKQYNCAFIWQKDGVKKLNLYLIINYFKGGKLRFKKIKPEAFEANRFYTVINKKSGEIVPMEVNFNFDDPNLIILPLAFGKRQGREFIWNDLLSLETGSLKLANGRVIEKTLYNRRTRQDEPALFVALTFERREVLDSSNIKPMNLIGVDRGENIPAVIALTDPEGCPLSRFKDSLGNPTHILRIGESYKEKQRTIQAKKEVEQRRAGGYSRKYASKAKNLADDMVRNTARDLLYYAVTQDAMLIFENLSRGFGRQGKRTFMAERQYTRMEDWLTAKLAYEGLPSKTYLSKTLAQYTSKTCSNCGFTITSADYDRVLEKLKKTATGWMTTINGKELKVEGQITYYNRYKRQNVVKDLSVELDRLSEESVNNDISSWTKGRSGEALSLLKKRFSHRPVQEKFVCLNCGFETHADEQAALNIARSWLFLRSQEYKKYQTNKTTGNTDKRAFVETWQSFYRKKLKEVWKPAV

SEQ ID NO: 40082 - protein, 978 aa, synthetic construct
  REGION 1..978: note = engineered CasX variant
QEIKRINKIRRRLVKDSNTKKAGKTGPMKTLLVRVMTPDLRERLENLRKKPENIPQPISNTSRANLNKLLTDYTEMKKAILHVYWEEFQKDPVGLMSRVAQPASKKIDQNKLKPEMDEKGNLTTAGFACSQCGQPLFVYKLEQVSEKGKAYTNYFGRCNVAEHEKLILLAQLKPEKDSDEAVTYSLGKFGQRALDFYSIHVTKESTHPVKPLAQIAGNRYASGPVGKALRDACMGTIASFLSKYQDIIIEHQKVVKGNQKRLESLRELAGKENLEYPSVTLPPQPHTKEGVDAYNEVIARVRTWVNLNLWQKLKLSRDDAKPLLRLKGFPSFPLVERQANEVDWWDMVCNVKKLINEKKEDGKVFWQNLAGYKRQEALRPYLSSEEDRKKGKKFARYQLGDLLLHLEKKHGEDWGKVYDEAWERIDKKVEGLSKHIKLEEERRSEDAQSKAALTDWLRAKASFVIEGLKEADKDEFCRCELKLQKWYGDLRGKPFAIEAENSILDISGFSKQYNCAFIWQKDGVKKLNLYLIINYFKGGKLRFKKIKPEAFEANRFYTVINKKSGEIVPMEVNFNFDDPNLIILPLAFGKRQGREFIWNDLLSLETGSLKLANGRVIEKTLYNRRTRQDEPALFVALTFERREVLDSSNIKPMNLIGVDRGENIPAVIALTDPEGCPLSRFKDSLGNPTHILRIGESYKEKQRTIQAKKEVEQRRAGGYSRKYASKAKNLADDMVRNTARDLLYYAVTQDAMLIFENLSRGFGRQGKRTFMAERQYTRMEDWLTAKLAYEGLPSKTYLSKTLAQYTSKTCSNCGFTITSADYDRMLEKLKKTATGWMTTINGKELKVEGQITYYNRYKRQNVVKDLSVELDRLSEESVNNDISSWTKGRSGEALSLLKKRFSHRPVQEKFVCLNCGFETHADEQAALNIARSWLFLRSQEYKKYQTNKTTGNTDKRAFVETWQSFYRKKLKEVWKPAV

SEQ ID NO: 40083 - protein, 978 aa, synthetic construct
  REGION 1..978: note = engineered CasX variant
QEIKRINKIRRRLVKDSNTKKAGKTGPMKTLLVRVMTPDLRERLENLRKKPENIPQPISNTSRANLNKLLTDYTEMKKAILHVYWEEFQKDPVGLMSRVAQPASKKIDQNKLKPEMDEKGNLTTAGFACSQCGQPLFVYKLEQVSEKGKAYTNYFGRCNVAEHEKLILLAQLKPEKDSDEAVTYSLGKFGQRALDFYSIHVTKESTHPVKPLAQIAGNRYASGPVGKALRDACMGTIASFLSKYQDIIIEHQKVVKGNQKRLESLRELAGKENLEYPSVTLPPQPHTKEGVDAYNEVIARVRTWVNLNLWQKLKLSRDDAKPLLRLKGFPSFPLVERQANEVDWWDMVCNVKKLINEKKEDGKVFWQNLAGYKRQEALRPYLSSEEDRKKGKKFARYQLGDLLLHLEKKHGEDWGKVYDEAWERIDKKVEGLSKHIKLEEERRSEDAQSKAALTDWLRAKASFVIEGLKEADKDEFCRCELKLQKWYGDLRGKPFAIEAENSILDISGFSKQYNCAFIWQKDGVKKLNLYLIINYFKGGKLRFKKIKPEAFEANRFYTVINKKSGEIVPMEVNFNFDDPNLIILPLAFGKRQGREFIWNDLLSLETGSLKLANGRVIEKTLYNRRTRQDEPALFVALTFERREVLDSSNIKPMNLIGVDRGENIPAVIALTDPEGCPLSRFKDSLGNPTHILRIGESYKEKQRTIQAKKEVEQRRAGGYSRKYASKAKNLADDMVRNTARDLLYYAVTQDAMLIFENLSRGFGRQGKRTFMAERQYTRMEDWLTAKLAYEGLPSKTYLSKTLAQYTSKTCSNCGFTITSADYDRVLEKLKKTATGWMTTINGKELKVEGQITYYNRYKRQNVVKDLSVELDRLSEESVNNDISSWTKGRQGEALSLLKKRFSHRPVQEKFVCLNCGFETHADEQAALNIARSWLFLRSQEYKKYQTNKTTGNTDKRAFVETWQSFYRKKLKEVWKPAV

SEQ ID NO: 40084 - protein, 978 aa, synthetic construct
  REGION 1..978: note = engineered CasX variant
QEIKRINKIRRRLVKDSNTKKAGKTGPMKTLLVRVMTPDLRERLENLRKKPENIPQPISNTSRANLNKLLTDYTEMKKAILHVYWEEFQKDPVGLMSRVAQPASKKIDQNKLKPEMDEKGNLTTAGFACSQCGQPLFVYKLEQVSEKGKAYTNYFGRCNVAEHEKLILLAQLKPEKDSDEAVTYSLGKFGQRALDFYSIHVTKESTHPVKPLAQIAGNRYASGPVGKALRDACMGTIASFLSKYQDIIIEHQKVVKGNQKRLESLRELAGKENLEYPSVTLPPQPHTKEGVDAYNEVIARVRTWVNLNLWQKLKLSRDDAKPLLRLKGFPSFPLVERQANEVDWWDMVCNVKKLINEKKEDGKVFWQNLAGYKRQEALRPYLSSEEDRKKGKKFARYQLGDLLLHLEKKHGEDWGKVYDEAWERIDKKVEGLSKHIKLEEERRSEDAQSKAALTDWLRAKASFVIEGLKEADKDEFCRCELKLQKWYGDLRGKPFAIEAENSILDISGFSKQYNCAFIWQKDGVKKLNLYLIINYFKGGKLRFKKIKPEAFEANRFYTVINKKSGEIVPMEVNFNFDDPNLIILPLAFGKRQGREFIWNDLLSLETGSLKLANGRVIEKTLYNRRTRQDEPALFVALTFERREVLDSSNIKPMNLIGVDRGENIPAVIALTDPEGCPLSRFKDSLGNPTHILRIGESYKEKQRTIQAKKEVEQRRAGGYSRKYASKAKNLADDMVRNTARDLLYYAVTQDAMLIFENLSRGFGRQGKRTFMAERQYTRMEDWLTAKLAYEGLPSKTYLSKTLAQYTSKTCSNCGFTITSADYDRVLEKLKKTATGWMTTINGKELKVEGQITYYNRYKRQNVVKDLSVELDRLSEESVNNDISSWTKGRSGEALSLLKKRFSHRPVQEKFVCLNCEFETHADEQAALNIARSWLFLRSQEYKKYQTNKTTGNTDKRAFVETWQSFYRKKLKEVWKPAV

SEQ ID NO: 40085 - protein, 979 aa, synthetic construct
  REGION 1..979: note = engineered CasX variant
QEIKRINKIRRRLVKDSNTKKAGKTGPMKTLLVRVMTPDLRERLENLRKKPENIPQPISNTSRANLNKLLTDYTEMKKAILHVYWEEFQKDPVGLMSRVAQPASKKIDQNKLKPEMDEKGNLTTAGFACSQCGQPLFVYKLEQVSEKGKAYTNYFGRCNVAEHEKLILLAQLKPEKDSDEAVTYSLGKFGQRALDFYSIHVTKESTHPVKPLAQIAGNRYASGPVGKALRDACMGTIASFLSKYQDIIIEHQKVVKGNQKRLESLRELAGKENLEYPSVTLPPQPHTKEGVDAYNEVIARVRTWVNLNLWQKLKLSRDDAKPLLRLKGFPSFPLVERQANEVDWWDMVCNVKKLINEKKEDGKVFWQNLAGYKRQEALRPYLSSEEDRKKGKKFARYQLGDLLLHLEKKHGEDWGKVYDEAWERIDKKVEGLSKHIKLEEERRSEDAQSKAALTDWLRAKASFVIEGLKEADKDEFCRCELKLQKWYGDLRGKPFAIEAENSILDISGFSKQYNCAFIWQKDGVKKLNLYLIINYFKGGKLRFKKIKPEAFEANRFYTVINKKSGEIVPMEVNFNFDDPNLIILPLAFGKRQGREFIWNDLLSLETGSLKLANGRVIEKTLYNRRTRQDEPALFVALTFERREVLDSSNIKPMNLIGVDRGENIPAVIALTDPEGCPLSRFKDSLGNPTHILRIGESYKEKQRTIQAKKEVEQRRAGGYSRKYASKAKNLADDMVRNTARDLLYYAVTQDAMLIFENLSRGFGRQGKRTFMAERQYTRMEDWLTAKLAYEGLPSKTYLSKTLAQYTSKTCSNCGFTITSADYDRVLEKLKKTATGWMTTINGKELKVEGQITYYNRYKRQNVVKDLSVELDRLSEESVNNDISSWTKGRSGEALSLLKKRFSHRPVQEKFVCLNCGFETHADEQAALNIARSWLFLRSQEYKKYQTNKTSTGNTDKRAFVETWQSFYRKKLKEVWKPAV

SEQ ID NO: 40086 - protein, 979 aa, synthetic construct
  REGION 1..979: note = engineered CasX variant
QEIKRINKIRRRLVKDSNTKKAGKTGPMKTLLVRVMTPDLRERLENLRKKPENIPQPISNTSRANLNKLLTDYTEMKKAILHVYWEEFQKDPVGLMSRVAQPASKKIDQNKLKPEMDEKGNLTTAGFACSQCGQPLFVYKLEQVSEKGKAYTNYFGRCNVAEHEKLILLAQLKPEKDSDEAVTYSLGKFGQRALDFYSIHVTKESTHPVKPLAQIAGNRYASGPVGKALRDACMGTIASFLSKYQDIIIEHQKVVKGNQKRLESLRELAGKENLEYPSVTLPPQPHTKEGVDAYNEVIARVRTWVNLNLWQKLKLSRDDAKPLLRLKGFPSFPLVERQANEVDWWDMVCNVKKLINEKKEDGKVFWQNLAGYKRQEALRPYLSSEEDRKKGKKFARYQLGDLLLHLEKKHGEDWGKVYDEAWERIDKKVEGLSKHIKLEEERRSEDAQSKAALTDWLRAKASFVIEGLKEADKDEFCRCELKLQKWYGDLRGKPFAIEAENSILDISGFSKQYNCAFIWQKDGVKKLNLYLIINYFKGGKLRFKKIKPEAFEANRFYTVINKKSGEIVPMEVNFNFDDPNLIILPLAFGKRQGREFIWNDLLSLETGSLKLANGRVIEKTLYNRRTRQDEPALFVALTFERREVLDSSNIKPMNLIGVDRGENIPAVIALTDPEGCPLSRFKDSLGNPTHILRIGESYKEKQRTIQAKKEVEQRRAGGYSRKYASKAKNLADDMVRNTARDLLYYAVTQDAMLIFENLSRGFGRQGKRTFMAERQYTRMEDWLTAKLAYEGLPSKTYLSKTLAQYTSKTCSNCGFTITSADYDRVLEKLKKTATGWMTTINGKELKVEGQITYYNRYKRQNVVKDLSVELDRLSEESVNNDISSWTKGRSGEALSLLKKRFSHRPVQEKFVCLNCGFETHADEQAALNIARSWLFLRSQEYKKYQTNKTTGKNTDKRAFVETWQSFYRKKLKEVWKPAV

SEQ ID NO: 40087 - protein, 978 aa, synthetic construct
  REGION 1..978: note = engineered CasX variant
QEIKRINKIRRRLVKDSNTKKAGKTGPMKTLLVRVMTPDLRERLENLRKKPENIPQPISNTSRANLNKLLTDYTEMKKAILHVYWEEFQKDPVGLMSRVAQPASKKIDQNKLKPEMDEKGNLTTAGFACSQCGQPLFVYKLEQVSEKGKAYTNYFGRCNVAEHEKLILLAQLKPEKDSDEAVTYSLGKFGQRALDFYSIHVTKESTHPVKPLAQIAGNRYASGPVGKALRDACMGTIASFLSKYQDIIIEHQKVVKGNQKRLESLRELAGKENLEYPSVTLPPQPHTKEGVDAYNEVIARVRTWVNLNLWQKLKLSRDDAKPLLRLKKFPSFPLVERQANEVDWWDMVCNVKKLINEKKEDGKVFWQNLAGYKRQEALRPYLSSEEDRKKGKKFARYQLGDLLLHLEKKHGEDWGKVYDEAWERIDKKVEGLSKHIKLEEERRSEDAQSKAALTDWLRAKASFVIEGLKEADKDEFCRCELKLQKWYGDLRGKPFAIEAENSILDISGFSKQYNCAFIWQKDGVKKLNLYLIINYFKGGKLRFKKIKPEAFEANRFYTVINKKSGEIVPMEVNFNFDDPNLIILPLAFGKRQGREFIWNDLLSLETGSLKLANGRVIEKTLYNRRTRQDEPALFVALTFERREVLDSSNIKPMNLIGVDRGENIPAVIALTDPEGCPLSRFKDSLGNPTHILRIGESYKEKQRTIQAKKEVEQRRAGGYSRKYASKAKNLADDMVRNTARDLLYYAVTQDAMLIFENLSRGFGRQGKRTFMAERQYTRMEDWLTAKLAYEGLPSKTYLSKTLAQYTSKTCSNCGFTITSADYDRVLEKLKKTATGWMTTINGKELKVEGQITYYNRYKRQNVVKDLSVELDRLSEESVNNDISSWTKGRSGEALSLLKKRFSHRPVQEKFVCLNCGFETHADEQAALNIARSWLFLRSQEYKKYQTNKTTGNTDKRAFVETWQSFYRKKLKEVWKPAV

SEQ ID NO: 40088 - protein, 978 aa, synthetic construct
  REGION 1..978: note = engineered CasX variant
QEIKRINKIRRRLVKDSNTKKAGKTGPMKTLLVRVMTPDLRERLENLRKKPENIPQPISNTSRANLNKLLTDYTEMKKAILHVYWEEFQKDPVGLMSRVAQPASKKIDQNKLKPEMDEKGNLTTAGFACSQCGQPLFVYKLEQVSEKGKAYTNYFGRCNVAEHEKLILLAQLKPEKDSDEAVTYSLGKFGQRALDFYSIHVTKESTHPVKPLAQIAGNRYASGPVGKALRDACMGTIASFLSKYQDIIIEHQKVVKGNQKRLESLRELAGKENLEYPSVTLPPQPHTKEGVDAYNEVIARVRTWVNLNLWQKLKLSRDDAKPLLRLKGFPSFPLVERQANEVDWWDMVCNVKKLINEKKEDGKVFWQNLAGYKRQEALRPYLSSEEDRKKGKKFARYQLGDLLLHLEKKHGEDWGKVYDEAWERIDKKVEGLSKHIKLEEERRSEDAQSKAALTDWLRAKASFVIEGLKEADKDEFCRCELKLQKWYGDLRGKPFAIEAENSILDISGFSKQYNCAFIWQKDGVKKLNLYLIINYFKGGKLRFKKIKPEAFEANRFYTVINKKSGEIVPMEVNFNFDDPNLIILPLAFGKRQGREFIWNDLLSLETGSLKLANGRVIEKTLYNRRTRQDEPALFVALTFERREVLDSSNIKPMNLIGVDRGENIPAVIALTDPEGCPLSRFKDSLGNPTHILRIGERYKEKQRTIQAKKEVEQRRAGGYSRKYASKAKNLADDMVRNTARDLLYYAVTQDAMLIFENLSRGFGRQGKRTFMAERQYTRMEDWLTAKLAYEGLPSKTYLSKTLAQYTSKTCSNCGFTITSADYDRVLEKLKKTATGWMTTINGKELKVEGQITYYNRYKRQNVVKDLSVELDRLSEESVNNDISSWTKGRSGEALSLLKKRFSHRPVQEKFVCLNCGFETHADEQAALNIARSWLFLRSQEYKKYQTNKTTGNTDKRAFVETWQSFYRKKLKEVWKPAV

SEQ ID NO: 40089 - protein, 978 aa, synthetic construct
  REGION 1..978: note = engineered CasX variant
QEIKRINKIRRRLVKDSNTKKAGKTGPMKTLLVRVMTPDLRERLENLRKKPENIPQPISNTSRANLNKLLTDYTEMKKAILHVYWEEFQKDPVGLMSRVAQPASKKIDQNKLKPEMDEKGNLTTAGFACSQCGQPLFVYKLEQVSEKGKAYTNYFGRCNVAEHEKLILLAQLKPEKDSDEAVTYSLGKFGQRALDFYSIHVTKESTHPVKPLAQIAGNRYASGPVGKALRDACMGTIASFLSKYQDIIIEHQKVVKGNQKRLESLRELAGKENLEYPSVTLPPQPHTKEGVDAYNEVIARVRTWVNLNLWQKLKLSRDDAKPLLRLKGFPSFPLVERQANEVDWWDMVCNVKKLINEKKEDGKVFWQNLAGYKRQEALRPYLSSEEDRKKGKKFARYQLGDLLLHLEKKHGEDWGKVYDEAWERIDKKVEGLSKHIKLEEERRSEDAQSKAALTDWLRAKASFVIEGLKEADKDEFCRCELKLQKWYGDLRGKPFAIEAENSILDISGFSKQYNCAFIWQKDGVKKLNLYLIINYFKGGKLRFKKIKPEAFEANRFYTVINKKSGEIVPMEVNFNFDDPNLIILPLAFGKRQGREFIWNDLLSLETGSLQLANGRVIEKTLYNRRTRQDEPALFVALTFERREVLDSSNIKPMNLIGVDRGENIPAVIALTDPEGCPLSRFKDSLGNPTHILRIGESYKEKQRTIQAKKEVEQRRAGGYSRKYASKAKNLADDMVRNTARDLLYYAVTQDAMLIFENLSRGFGRQGKRTFMAERQYTRMEDWLTAKLAYEGLPSKTYLSKTLAQYTSKTCSNCGFTITSADYDRVLEKLKKTATGWMTTINGKELKVEGQITYYNRYKRQNVVKDLSVELDRLSEESVNNDISSWTKGRSGEALSLLKKRFSHRPVQEKFVCLNCGFETHADEQAALNIARSWLFLRSQEYKKYQTNKTTGNTDKRAFVETWQSFYRKKLKEVWKPAV

SEQ ID NO: 40090 - protein, 979 aa, synthetic construct
  REGION 1..979: note = engineered CasX variant
QEIKRINKIRRRLVKDSNTKKAGKTGPMKTLLVRVMTPDLRERLENLRKKPENIPQPISNTSRANLNKLLTDYTEMKKAILHVYWEEFQKDPVGLMSRVAQPASKKIDQNKLKPEMDEKGNLTTAGFACSQCGQPLFVYKLEQVSEKGKAYTNYFGRCNVAEHEKLILLAQLKPEKDSDEAVTYSLGKFGQRALDFYSIHVTKESTHPVKPLAQIAGNRYASGPVGKALRDACMGTIASFLSKYQDIIIEHQKVVKGNQKRLESLRELAGKENLEYPSVTLPPQPHTKEGVDAYNEVIARVRWTWVNLNLWQKLKLSRDDAKPLLRLKGFPSFPLVERQANEVDWWDMVCNVKKLINEKKEDGKVFWQNLAGYKRQEALRPYLSSEEDRKKGKKFARYQLGDLLLHLEKKHGEDWGKVYDEAWERIDKKVEGLSKHIKLEEERRSEDAQSKAALTDWLRAKASFVIEGLKEADKDEFCRCELKLQKWYGDLRGKPFAIEAENSILDISGFSKQYNCAFIWQKDGVKKLNLYLIINYFKGGKLRFKKIKPEAFEANRFYTVINKKSGEIVPMEVNFNFDDPNLIILPLAFGKRQGREFIWNDLLSLETGSLKLANGRVIEKTLYNRRTRQDEPALFVALTFERREVLDSSNIKPMNLIGVDRGENIPAVIALTDPEGCPLSRFKDSLGNPTHILRIGESYKEKQRTIQAKKEVEQRRAGGYSRKYASKAKNLADDMVRNTARDLLYYAVTQDAMLIFENLSRGFGRQGKRTFMAERQYTRMEDWLTAKLAYEGLPSKTYLSKTLAQYTSKTCSNCGFTITSADYDRVLEKLKKTATGWMTTINGKELKVEGQITYYNRYKRQNVVKDLSVELDRLSEESVNNDISSWTKGRSGEALSLLKKRFSHRPVQEKFVCLNCGFETHADEQAALNIARSWLFLRSQEYKKYQTNKTTGNTDKRAFVETWQSFYRKKLKEVWKPAV

SEQ ID NO: 40091 - protein, 979 aa, synthetic construct
  REGION 1..979: note = engineered CasX variant
QEIKRINKIRRRLVKDSNTKKAGKTGPMKTLLVRVMTPDLRERLENLRKKPENIPQPISNTSRANLNKLLTDYTEMKKAILHVYWEEFQKDPVGLMSRVAQPASKKIDQNKLKPEMDEKGNLTTAGFACSQCGQPLFVYKLEQVSEKGKAYTNYFGRCNVAEHEKLILLAQLKPEKDSDEAVTYSLGKFGQRALDFYSIHVTKESTHPVKPLAQIAGNRYASGPVGKALRDACMGTIASFLSKYQDIIIEHQKVVKGNQKRLESLRELAGKENLEYPSVTLPPQPHTKEGVDAYNEVIARVRWWVNLNLWQKLKLSRDDAKPLLRLKGFPSFPLVERQQANEVDWWDMVCNVKKLINEKKEDGKVFWQNLAGYKRQEALRPYLSSEEDRKKGKKFARYQLGDLLLHLEKKHGEDWGKVYDEAWERIDKKVEGLSKHIKLEEERRSEDAQSKAALTDWLRAKASFVIEGLKEADKDEFCRCELKLQKWYGDLRGKPFAIEAENSILDISGFSKQYNCAFIWQKDGVKKLNLYLIINYFKGGKLRFKKIKPEAFEANRFYTVINKKSGEIVPMEVNFNFDDPNLIILPLAFGKRQGREFIWNDLLSLETGSLKLANGRVIEKTLYNRRTRQDEPALFVALTFERREVLDSSNIKPMNLIGVDRGENIPAVIALTDPEGCPLSRFKDSLGNPTHILRIGESYKEKQRTIQAKKEVEQRRAGGYSRKYASKAKNLADDMVRNTARDLLYYAVTQDAMLIFENLSRGFGRQGKRTFMAERQYTRMEDWLTAKLAYEGLPSKTYLSKTLAQYTSKTCSNCGFTITSADYDRVLEKLKKTATGWMTTINGKELKVEGQITYYNRYKRQNVVKDLSVELDRLSEESVNNDISSWTKGRSGEALSLLKKRFSHRPVQEKFVCLNCGFETHADEQAALNIARSWLFLRSQEYKKYQTNKTTGNTDKRAFVETWQSFYRKKLKEVWKPAV

SEQ ID NO: 40092 - protein, 979 aa, synthetic construct
  REGION 1..979: note = engineered CasX variant
QEIKRINKIRRRLVKDSNTKKAGKTGPMKTLLVRVMTPDLRERLENLRKKPENIPQPISNTSRANLNKLLTDYTEMKKAILHVYWEEFQKDPVGLMSRVAQPASKKIDQNKLKPEMDEKGNLTTAGFACSQCGQPLFVYKLEQVSEKGKAYTNYFGRCNVAEHEKLILLAQLKPEKDSDEAVTYSLGKFGQRALDFYSIHVTKESTHPVKPLAQIAGNRYASGPVGKALRDACMGTIASFLSKYQDIIIEHQKVVKGNQKRLESLRELAGKENLEYPSVTLPPQPHTKEGVDAYNEVIARVRWWVNLNLWQKLKLSRDDAKPLLRLKGFPSFPLVERQANAEVDWWDMVCNVKKLINEKKEDGKVFWQNLAGYKRQEALRPYLSSEEDRKKGKKFARYQLGDLLLHLEKKHGEDWGKVYDEAWERIDKKVEGLSKHIKLEEERRSEDAQSKAALTDWLRAKASFVIEGLKEADKDEFCRCELKLQKWYGDLRGKPFAIEAENSILDISGFSKQYNCAFIWQKDGVKKLNLYLIINYFKGGKLRFKKIKPEAFEANRFYTVINKKSGEIVPMEVNFNFDDPNLIILPLAFGKRQGREFIWNDLLSLETGSLKLANGRVIEKTLYNRRTRQDEPALFVALTFERREVLDSSNIKPMNLIGVDRGENIPAVIALTDPEGCPLSRFKDSLGNPTHILRIGESYKEKQRTIQAKKEVEQRRAGGYSRKYASKAKNLADDMVRNTARDLLYYAVTQDAMLIFENLSRGFGRQGKRTFMAERQYTRMEDWLTAKLAYEGLPSKTYLSKTLAQYTSKTCSNCGFTITSADYDRVLEKLKKTATGWMTTINGKELKVEGQITYYNRYKRQNVVKDLSVELDRLSEESVNNDISSWTKGRSGEALSLLKKRFSHRPVQEKFVCLNCGFETHADEQAALNIARSWLFLRSQEYKKYQTNKTTGNTDKRAFVETWQSFYRKKLKEVWKPAV

SEQ ID NO: 40093 - protein, 978 aa, synthetic construct
  REGION 1..978: note = engineered CasX variant
QEIKRINKIRRRLVKDSNTKKAGKTGPMKTLLVRVMTPDLRERLENLRKKPENIPQPISNTSRANLNKLLTDYTEMKKAILHVYWEEFQKDPVGLMSRVAQPASKKIDQNKLKPEMDEKGNLTTAGFACSQCGQPLFVYKLEQVSEKGKAYTNYFGRCNVAEHEKLILLAQLKPEKDSDEAVTYSLGKFGQRALDFYSIHVTKESTHPVKPLAQIAGNRYASGPVGKALRDACMGTIASFLSKYQDIIIEHQKVVKGNQKRLESLRELAGKENLEYPSVTLPPQPHTKEGVDAYNEVIARVRWWVNLNLWQKLKLSRDDAKPLLRLKGFPSFPLVERQANEVDWWDMVCNVKKLINEKKEDGKVFWQNLAGYKRQEALRPYLSSEEDRKKGKKFARTQLGDLLLHLEKKHGEDWGKVYDEAWERIDKKVEGLSKHIKLEEERRSEDAQSKAALTDWLRAKASFVIEGLKEADKDEFCRCELKLQKWYGDLRGKPFAIEAENSILDISGFSKQYNCAFIWQKDGVKKLNLYLIINYFKGGKLRFKKIKPEAFEANRFYTVINKKSGEIVPMEVNFNFDDPNLIILPLAFGKRQGREFIWNDLLSLETGSLKLANGRVIEKTLYNRRTRQDEPALFVALTFERREVLDSSNIKPMNLIGVDRGENIPAVIALTDPEGCPLSRFKDSLGNPTHILRIGESYKEKQRTIQAKKEVEQRRAGGYSRKYASKAKNLADDMVRNTARDLLYYAVTQDAMLIFENLSRGFGRQGKRTFMAERQYTRMEDWLTAKLAYEGLPSKTYLSKTLAQYTSKTCSNCGFTITSADYDRVLEKLKKTATGWMTTINGKELKVEGQITYYNRYKRQNVVKDLSVELDRLSEESVNNDISSWTKGRSGEALSLLKKRFSHRPVQEKFVCLNCGFETHADEQAALNIARSWLFLRSQEYKKYQTNKTTGNTDKRAFVETWQSFYRKKLKEVWKPAV

SEQ ID NO: 40094 - protein, 979 aa, synthetic construct
  REGION 1..979: note = engineered CasX variant
QEIKRINKIRRRLVKDSNTKKAGKTGPMKTLLVRVMTPDLRERLENLRKKPENIPQPISNTSRANLNKLLTDYTEMKKAILHVYWEEFQKDPVGLMSRVAQPASKKIDQNKLKPEMDEKGNLTTAGFACSQCGQPLFVYKLEQVSEKGKAYTNYFGRCNVAEHEKLILLAQLKPEKDSDEAVTYSLGKFGQRALDFYSIHVTKESTHPVKPLAQIAGNRYASGPVGKALRDACMGTIASFLSKYQDIIIEHQKVVKGNQKRLESLRELAGKENLEYPSVTLPPQPHTKEGVDAYNEVIARVRWWVNLNLWQKLKLSRDDAKPLLRLKGFPSFPLVERQANEVDWWDMVCNVKKLINEKKEDGKVFWQNLAGYKRQEALRPYLSSEEDRKKGKKFARYQLGDLLLHLEKKHEGEDWGKVYDEAWERIDKKVEGLSKHIKLEEERRSEDAQSKAALTDWLRAKASFVIEGLKEADKDEFCRCELKLQKWYGDLRGKPFAIEAENSILDISGFSKQYNCAFIWQKDGVKKLNLYLIINYFKGGKLRFKKIKPEAFEANRFYTVINKKSGEIVPMEVNFNFDDPNLIILPLAFGKRQGREFIWNDLLSLETGSLKLANGRVIEKTLYNRRTRQDEPALFVALTFERREVLDSSNIKPMNLIGVDRGENIPAVIALTDPEGCPLSRFKDSLGNPTHILRIGESYKEKQRTIQAKKEVEQRRAGGYSRKYASKAKNLADDMVRNTARDLLYYAVTQDAMLIFENLSRGFGRQGKRTFMAERQYTRMEDWLTAKLAYEGLPSKTYLSKTLAQYTSKTCSNCGFTITSADYDRVLEKLKKTATGWMTTINGKELKVEGQITYYNRYKRQNVVKDLSVELDRLSEESVNNDISSWTKGRSGEALSLLKKRFSHRPVQEKFVCLNCGFETHADEQAALNIARSWLFLRSQEYKKYQTNKTTGNTDKRAFVETWQSFYRKKLKEVWKPAV

SEQ ID NO: 40095 - protein, 978 aa, synthetic construct
  REGION 1..978: note = engineered CasX variant
QEIKRINKIRRRLVKDSNTKKAGKTGPMKTLLVRVMTPDLRERLENLRKKPENIPQPISNTSRANLNKLLTDYTEMKKAILHVYWEEFQKDPVGLMSRVAQPASKKIDQNKLKPEMDEKGNLTTAGFACSQCGQPLFVYKLEQVSEKGKAYTNYFGRCNVAEHEKLILLAQLKPEKDSDEAVTYSLGKFGQRALDFYSIHVTKESTHPVKPLAQIAGNRYASGPVGKALRDACMGTIASFLSKYQDIIIEHQKVVKGNQKRLESLRELAGKENLEYPSVTLPPQPHTKEGVDAYNEVIARVRWWVNLNLWQKLKLSRDDAKPLLRLKGFPSFPLVERQANEVDWWDMVCNVKKLINEKKEDGKVFWQNLAGYKRQEALRPYLSSEEDRKKGKKFARYQLGDLLLHLEKKHGEDWGKVYDEAWERIDKKVEGLSKHIKLEEERRSEDAQSKAALTDWLRAKASFVIEGLKEADKDEFCRCDLKLQKWYGDLRGKPFAIEAENSILDISGFSKQYNCAFIWQKDGVKKLNLYLIINYFKGGKLRFKKIKPEAFEANRFYTVINKKSGEIVPMEVNFNFDDPNLIILPLAFGKRQGREFIWNDLLSLETGSLKLANGRVIEKTLYNRRTRQDEPALFVALTFERREVLDSSNIKPMNLIGVDRGENIPAVIALTDPEGCPLSRFKDSLGNPTHILRIGESYKEKQRTIQAKKEVEQRRAGGYSRKYASKAKNLADDMVRNTARDLLYYAVTQDAMLIFENLSRGFGRQGKRTFMAERQYTRMEDWLTAKLAYEGLPSKTYLSKTLAQYTSKTCSNCGFTITSADYDRVLEKLKKTATGWMTTINGKELKVEGQITYYNRYKRQNVVKDLSVELDRLSEESVNNDISSWTKGRSGEALSLLKKRFSHRPVQEKFVCLNCGFETHADEQAALNIARSWLFLRSQEYKKYQTNKTTGNTDKRAFVETWQSFYRKKLKEVWKPAV

SEQ ID NO: 40096 - protein, 978 aa, synthetic construct
  REGION 1..978: note = engineered CasX variant
QEIKRINKIRRRLVKDSNTKKAGKTGPMKTLLVRVMTPDLRERLENLRKKPENIPQPISNTSRANLNKLLTDYTEMKKAILHVYWEEFQKDPVGLMSRVAQPASKKIDQNKLKPEMDEKGNLTTAGFACSQCGQPLFVYKLEQVSEKGKAYTNYFGRCNVAEHEKLILLAQLKPEKDSDEAVTYSLGKFGQRALDFYSIHVTKESTHPVKPLAQIAGNRYASGPVGKALRDACMGTIASFLSKYQDIIIEHQKVVKGNQKRLESLRELAGKENLEYPSVTLPPQPHTKEGVDAYNEVIARVRWWVNLNLWQKLKLSRDDAKPLLRLKGFPSFPLVERQANEVDWWDMVCNVKKLINEKKEDGKVFWQNLAGYKRQEALRPYLSSEEDRKKGKKFARYQLGDLLLHLEKKHGEDWGKVYDEAWERIDKKVEGLSKHIKLEEERRSEDAQSKAALTDWLRAKASFVIEGLKEADKDEFCRCELKLQKWYGDLRGKPFAIEAENSILDISGFSKQYNCAFIWQKDGVKKLNLYLIINYFKGGKLRFKKIKPEAFEANRFYTVINKKSGEIVPMEVNFNFDDPNLIILPLAFGKRFGREFIWNDLLSLETGSLKLANGRVIEKTLYNRRTRQDEPALFVALTFERREVLDSSNIKPMNLIGVDRGENIPAVIALTDPEGCPLSRFKDSLGNPTHILRIGESYKEKQRTIQAKKEVEQRRAGGYSRKYASKAKNLADDMVRNTARDLLYYAVTQDAMLIFENLSRGFGRQGKRTFMAERQYTRMEDWLTAKLAYEGLPSKTYLSKTLAQYTSKTCSNCGFTITSADYDRVLEKLKKTATGWMTTINGKELKVEGQITYYNRYKRQNVVKDLSVELDRLSEESVNNDISSWTKGRSGEALSLLKKRFSHRPVQEKFVCLNCGFETHADEQAALNIARSWLFLRSQEYKKYQTNKTTGNTDKRAFVETWQSFYRKKLKEVWKPAV

SEQ ID NO: 40097 - protein, 978 aa, synthetic construct
  REGION 1..978: note = engineered CasX variant
QEIKRINKIRRRLVKDSNTKKAGKTGPMKTLLVRVMTPDLRERLENLRKKPENIPQPISNTSRANLNKLLTDYTEMKKAILHVYWEEFQKDPVGLMSRVAQPASKKIDQNKLKPEMDEKGNLTTAGFACSQCGQPLFVYKLEQVSEKGKAYTNYFGRCNVAEHEKLILLAQLKPEKDSDEAVTYSLGKFGQRALDFYSIHVTKESTHPVKPLAQIAGNRYASGPVGKALRDACMGTIASFLSKYQDIIIEHQKVVKGNQKRLESLRELAGKENLEYPSVTLPPQPHTKEGVDAYNEVIARVRWWVNLNLWQKLKLSRDDAKPLLRLKGFPSFPLVERQANEVDWWDMVCNVKKLINEKKEDGKVFWQNLAGYKRQEALRPYLSSEEDRKKGKKFARYQLGDLLLHLEKKHGEDWGKVYDEAWERIDKKVEGLSKHIKLEEERRSEDAQSKAALTDWLRAKASFVIEGLKEADKDEFCRCELKLQKWYGDLRGKPFAIEAENSILDISGFSKQYNCAFIWQKDGVKKLNLYLIINYFKGGKLRFKKIKPEAFEANRFYTVINKKSGEIVPMEVNFNFDDPNLIILPLAFGKRVGREFIWNDLLSLETGSLKLANGRVIEKTLYNRRTRQDEPALFVALTFERREVLDSSNIKPMNLIGVDRGENIPAVIALTDPEGCPLSRFKDSLGNPTHILRIGESYKEKQRTIQAKKEVEQRRAGGYSRKYASKAKNLADDMVRNTARDLLYYAVTQDAMLIFENLSRGFGRQGKRTFMAERQYTRMEDWLTAKLAYEGLPSKTYLSKTLAQYTSKTCSNCGFTITSADYDRVLEKLKKTATGWMTTINGKELKVEGQITYYNRYKRQNVVKDLSVELDRLSEESVNNDISSWTKGRSGEALSLLKKRFSHRPVQEKFVCLNCGFETHADEQAALNIARSWLFLRSQEYKKYQTNKTTGNTDKRAFVETWQSFYRKKLKEVWKPAV

SEQ ID NO: 40098 - protein, 979 aa, synthetic construct
  REGION 1..979: note = engineered CasX variant
QEIKRINKIRRRLVKDSNTKKAGKTGPMKTLLVRVMTPDLRERLENLRKKPENIPQPISNTSRANLNKLLTDYTEMKKAILHVYWEEFQKDPVGLMSRVAQPASKKIDQNKLKPEMDEKGNLTTAGFACSQCGQPLFVYKLEQVSEKGKAYTNYFGRCNVAEHEKLILLAQLKPEKDSDEAVTYSLGKFGQRALDFYSIHVTKESTHPVKPLAQIAGNRYASGPVGKALRDACMGTIASFLSKYQDIIIEHQKVVKGNQKRLESLRELAGKENLEYPSVTLPPQPHTKEGVDAYNEVIARVRWWVNLNLWQKLKLSRDDAKPLLRLKGFPSFPLVERQANEVDWWDMVCNVKKLINEKKEDGKVFWQNLAGYKRQEALRPYLSSEEDRKKGKKFARYQLGDLLLHLEKKHGEDWGKVYDEAWERIDKKVEGLSKHIKLEEERRSEDAQSKAALTDWLRAKASFVIEGLKEADKDEFCRCELKLQKWYGDLRGKPFAIEAENSILDISGFSKQYNCAFIWQKDGVKKLNLYLIINYFKGGKLRFKKIKPEAFEANRFYTVINKKSGEIVPMEVNFNFDDPNLIILPLAFGKRQGREFIWNDLLSLETGSLKLANGRVIEKTLYNRRTRQDEPALFVALTFERREVLDSSNIKTPMNLIGVDRGENIPAVIALTDPEGCPLSRFKDSLGNPTHILRIGESYKEKQRTIQAKKEVEQRRAGGYSRKYASKAKNLADDMVRNTARDLLYYAVTQDAMLIFENLSRGFGRQGKRTFMAERQYTRMEDWLTAKLAYEGLPSKTYLSKTLAQYTSKTCSNCGFTITSADYDRVLEKLKKTATGWMTTINGKELKVEGQITYYNRYKRQNVVKDLSVELDRLSEESVNNDISSWTKGRSGEALSLLKKRFSHRPVQEKFVCLNCGFETHADEQAALNIARSWLFLRSQEYKKYQTNKTTGNTDKRAFVETWQSFYRKKLKEVWKPAV

SEQ ID NO: 40099 - protein, 979 aa, synthetic construct
  REGION 1..979: note = engineered CasX variant
QEIKRINKIRRRLVKDSNTKKAGKTGPMKTLLVRVMTPDLRERLENLRKKPENIPQPISNTSRANLNKLLTDYTEMKKAILHVYWEEFQKDPVGLMSRVAQPASKKIDQNKLKPEMDEKGNLTTAGFACSQCGQPLFVYKLEQVSEKGKAYTNYFGRCNVAEHEKLILLAQLKPEKDSDEAVTYSLGKFGQRALDFYSIHVTKESTHPVKPLAQIAGNRYASGPVGKALRDACMGTIASFLSKYQDIIIEHQKVVKGNQKRLESLRELAGKENLEYPSVTLPPQPHTKEGVDAYNEVIARVRWWVNLNLWQKLKLSRDDAKPLLRLKGFPSFPLVERQANEVDWWDMVCNVKKLINEKKEDGKVFWQNLAGYKRQEALRPYLSSEEDRKKGKKFARYQLGDLLLHLEKKHGEDWGKVYDEAWERIDKKVEGLSKHIKLEEERRSEDAQSKAALTDWLRAKASFVIEGLKEADKDEFCRCELKLQKWYGDLRGKPFAIEAENSILDISGFSKQYNCAFIWQKDGVKKLNLYLIINYFKGGKLRFKKIKPEAFEANRFYTVINKKSGEIVPMEVNFNFDDPNLIILPLAFGKRQGREFIWNDLLSLETGSLKLANGRVIEKTLYNRRTRQDEPALFVALTFERREVLDSSNIKPMSNLIGVDRGENIPAVIALTDPEGCPLSRFKDSLGNPTHILRIGESYKEKQRTIQAKKEVEQRRAGGYSRKYASKAKNLADDMVRNTARDLLYYAVTQDAMLIFENLSRGFGRQGKRTFMAERQYTRMEDWLTAKLAYEGLPSKTYLSKTLAQYTSKTCSNCGFTITSADYDRVLEKLKKTATGWMTTINGKELKVEGQITYYNRYKRQNVVKDLSVELDRLSEESVNNDISSWTKGRSGEALSLLKKRFSHRPVQEKFVCLNCGFETHADEQAALNIARSWLFLRSQEYKKYQTNKTTGNTDKRAFVETWQSFYRKKLKEVWKPAV

SEQ ID NO: 40100 - protein, 978 aa, synthetic construct
  REGION 1..978: note = engineered CasX variant
QEIKRINKIRRRLVKDSNTKKAGKTGPMKTLLVRVMTPDLRERLENLRKKPENIPQPISNTSRANLNKLLTDYTEMKKAILHVYWEEFQKDPVGLMSRVAQPASKKIDQNKLKPEMDEKGNLTTAGFACSQCGQPLFVYKLEQVSEKGKAYTNYFGRCNVAEHEKLILLAQLKPEKDSDEAVTYSLGKFGQRALDFYSIHVTKESTHPVKPLAQIAGNRYASGPVGKALRDACMGTIASFLSKYQDIIIEHQKVVKGNQKRLESLRELAGKENLEYPSVTLPPQPHTKEGVDAYNEVIARVRWWVNLNLWQKLKLSRDDAKPLLRLKGFPSFPLVERQANEVDWWDMVCNVKKLINEKKEDGKVFWQNLAGYKRQEALRPYLSSEEDRKKGKKFARYQLGDLLLHLEKKHGEDWGKVYDEAWERIDKKVEGLSKHIKLEEERRSEDAQSKAALTDWLRAKASFVIEGLKEADKDEFCRCELKLQKWYGDLRGKPFAIEAENSILDISGFSKQYNCAFIWQKDGVKKLNLYLIINYFKGGKLRFKKIKPEAFEANRFYTVINKKSGEIVPMEVNFNFDDPNLIILPLAFGKRQGREFIWNDLLSLETGSLKLANGRVIEKTLYNRRTRQDEPALFVALTFERREVLDSSNIKPMNLIGVDRGENIPAVIALTDPEGCPLSRFKDSLGNPTHILRIRESYKEKQRTIQAKKEVEQRRAGGYSRKYASKAKNLADDMVRNTARDLLYYAVTQDAMLIFENLSRGFGRQGKRTFMAERQYTRMEDWLTAKLAYEGLPSKTYLSKTLAQYTSKTCSNCGFTITSADYDRVLEKLKKTATGWMTTINGKELKVEGQITYYNRYKRQNVVKDLSVELDRLSEESVNNDISSWTKGRSGEALSLLKKRFSHRPVQEKFVCLNCGFETHADEQAALNIARSWLFLRSQEYKKYQTNKTTGNTDKRAFVETWQSFYRKKLKEVWKPAV

SEQ ID NO: 40101 - protein, 978 aa, synthetic construct
  REGION 1..978: note = engineered CasX variant
QEIKRINKIRRRLVKDSNTKKAGKTGPMKTLLVRVMTPDLRERLENLRKKPENIPQPISNTSRANLNKLLTDYTEMKKAILHVYWEEFQKDPVGLMSRVAQPASKKIDQNKLKPEMDEKGNLTTAGFACSQCGQPLFVYKLEQVSEKGKAYTNYFGRCNVAEHEKLILLAQLKPEKDSDEAVTYSLGKFGQRALDFYSIHVTKESTHPVKPLAQIAGNRYASGPVGKALRDACMGTIASFLSKYQDIIIEHQKVVKGNQKRLESLRELAGKENLEYPSVTLPPQPHTKEGVDAYNEVIARVRWWVNLNLWQKLKLSRDDAKPLLRLKGFPSFPLVERQANEVDWWDMVCNVKKLINEKKEDGKVFWQNLAGYKRQEALRPYLSSEEDRKKGKKFARYQLGDLLLHLEKKHGEDWGKVYDEAWERIDKKVEGLSKHIKLEEERRSEDAQSKAALTDWLRAKASFVIEGLKEADKDEFCRCELKLQKWYGDLRGKPFAIEAENSILDISGFSKQYNCAFIWQKDGVKKLNLYLIINYFKGGKLRFKKIKPEAFEANRFYTVINKKSGEIVPMEVNFNFDDPNLIILPLAFGKRQGREFIWNDLLSLETGSLKLANGRVIEKTLYNRRTRQDEPALFVALTFERREVLDSSNIKPMNLIGVDRGENIPAVIALTDPEGCPLSRFKDSLGNPTHILRIGESYKEKQRTIQAKKEVEQRRAGGYSRKYASKAKNLADDMVRNTARDLLYYAVTQDAMLIFENLSRGFGRQGKRTFSAERQYTRMEDWLTAKLAYEGLPSKTYLSKTLAQYTSKTCSNCGFTITSADYDRVLEKLKKTATGWMTTINGKELKVEGQITYYNRYKRQNVVKDLSVELDRLSEESVNNDISSWTKGRSGEALSLLKKRFSHRPVQEKFVCLNCGFETHADEQAALNIARSWLFLRSQEYKKYQTNKTTGNTDKRAFVETWQSFYRKKLKEVWKPAV

SEQ ID NO: 40102 - protein, 978 aa, synthetic construct
  REGION 1..978: note = engineered CasX variant
QEIKRINKIRRRLVKDSNTKKAGKTGPMKTLLVRVMTPDLRERLENLRKKPENIPQPISNTSRANLNKLLTDYTEMKKAILHVYWEEFQKDPVGLMSRVAQPASKKIDQNKLKPEMDEKGNLTTAGFACSQCGQPLFVYKLEQVSEKGKAYTNYFGRCNVAEHEKLILLAQLKPEKDSDEAVTYSLGKFGQRALDFYSIHVTKESTHPVKPLAQIAGNRYASGPVGKALRDACMGTIASFLSKYQDIIIEHQKVVKGNQKRLESLRELAGKENLEYPSVTLPPQPHTKEGVDAYNEVIARVRWWVNLNLWQKLKLSRDDAKPLLRLKGFPSFPLVERQANEVDWWDMVCNVKKLINEKKEDGKVFWQNLAGYKRQEALRPYLSSEEDRKKGKKFARYQLGDLLLHLEKKHGEDWGKVYDEAWERIDKKVEGLSKHIKLEEERRSEDAQSKAALTDWLRAKASFVIEGLKEADKDEFCRCELKLQKWYGDLRGKPFAIEAENSILDISGFSKQYNCAFIWQKDGVKKLNLYLIINYFKGGKLRFKKIKPEAFEANRFYTVINKKSGEIVPMEVNFNFDDPNLIILPLAFGKRQGREFIWNDLLSLETGSLKLANGRVIEKTLYNRRTRQDEPALFVALTFERREVLDSSNIKPMNLIGVDRGENIPAVIALTDPEGCPLSRFKDSLGNPTHILRIGESYKEKQRTIQAKKEVEQRRAGGYSRKYASKAKNLADDMVRNTARDLLYYAVTQDAMLIFENLSRGFGRQGKRTFMAERQYTRMEDWLTAKLAYEGLPSKTYLSKTLAQYTSKTCSNCGFTITSADYDRVLEKLKKTATGWMTTINGKELKVEGQITYYNRYKRQNVVKDLSVELDRLSEESVNNDISSWDKGRSGEALSLLKKRFSHRPVQEKFVCLNCGFETHADEQAALNIARSWLFLRSQEYKKYQTNKTTGNTDKRAFVETWQSFYRKKLKEVWKPAV

SEQ ID NO: 40103 - protein, 978 aa, synthetic construct
  REGION 1..978: note = engineered CasX variant
QEIKRINKIRRRLVKDSNTKKAGKTGPMKTLLVRVMTPDLRERLENLRKKPENIPQPISNTSRANLNKLLTDYTEMKKAILHVYWEEFQVDPVGLMSRVAQPASKKIDQNKLKPEMDEKGNLTTAGFACSQCGQPLFVYKLEQVSEKGKAYTNYFGRCNVAEHEKLILLAQLKPEKDSDEAVTYSLGKFGQRALDFYSIHVTKESTHPVKPLAQIAGNRYASGPVGKALRDACMGTIASFLSKYQDIIIEHQKVVKGNQKRLESLRELAGKENLEYPSVTLPPQPHTKEGVDAYNEVIARVRWWVNLNLWQKLKLSRDDAKPLLRLKGFPSFPLVERQANEVDWWDMVCNVKKLINEKKEDGKVFWQNLAGYKRQEALRPYLSSEEDRKKGKKFARYQLGDLLLHLEKKHGEDWGKVYDEAWERIDKKVEGLSKHIKLEEERRSEDAQSKAALTDWLRAKASFVIEGLKEADKDEFCRCELKLQKWYGDLRGKPFAIEAENSILDISGFSKQYNCAFIWQKDGVKKLNLYLIINYFKGGKLRFKKIKPEAFEANRFYTVINKKSGEIVPMEVNFNFDDPNLIILPLAFGKRQGREFIWNDLLSLETGSLKLANGRVIEKTLYNRRTRQDEPALFVALTFERREVLDSSNIKPMNLIGVDRGENIPAVIALTDPEGCPLSRFKDSLGNPTHILRIGESYKEKQRTIQAKKEVEQRRAGGYSRKYASKAKNLADDMVRNTARDLLYYAVTQDAMLIFENLSRGFGRQGKRTFMAERQYTRMEDWLTAKLAYEGLPSKTYLSKTLAQYTSKTCSNCGFTITSADYDRVLEKLKKTATGWMTTINGKELKVEGQITYYNRYKRQNVVKDLSVELDRLSEESVNNDISSWTKGRSGEALSLLKKRFSHRPVQEKFVCLNCGFETHADEQAALNIARSWLFLRSQEYKKYQTNKTTGNTDKRAFVETWQSFYRKKLKEVWKPAV

SEQ ID NO: 40104 - protein, 978 aa, synthetic construct
  REGION 1..978: note = engineered CasX variant
QEIKRLNKIRRRLVKDSNTKKAGKTGPMKTLLVRVMTPDLRERLENLRKKPENIPQPISNTSRANLNKLLTDYTEMKKAILHVYWEEFQKDPVGLMSRVAQPASKKIDQNKLKPEMDEKGNLTTAGFACSQCGQPLFVYKLEQVSEKGKAYTNYFGRCNVAEHEKLILLAQLKPEKDSDEAVTYSLGKFGQRALDFYSIHVTKESTHPVKPLAQIAGNRYASGPVGKALRDACMGTIASFLSKYQDIIIEHQKVVKGNQKRLESLRELAGKENLEYPSVTLPPQPHTKEGVDAYNEVIARVRWWVNLNLWQKLKLSRDDAKPLLRLKGFPSFPLVERQANEVDWWDMVCNVKKLINEKKEDGKVFWQNLAGYKRQEALRPYLSSEEDRKKGKKFARYQLGDLLLHLEKKHGEDWGKVYDEAWERIDKKVEGLSKHIKLEEERRSEDAQSKAALTDWLRAKASFVIEGLKEADKDEFCRCELKLQKWYGDLRGKPFAIEAENSILDISGFSKQYNCAFIWQKDGVKKLNLYLIINYFKGGKLRFKKIKPEAFEANRFYTVINKKSGEIVPMEVNFNFDDPNLIILPLAFGKRQGREFIWNDLLSLETGSLKLANGRVIEKTLYNRRTRQDEPALFVALTFERREVLDSSNIKPMNLIGVDRGENIPAVIALTDPEGCPLSRFKDSLGNPTHILRIGESYKEKQRTIQAKKEVEQRRAGGYSRKYASKAKNLADDMVRNTARDLLYYAVTQDAMLIFENLSRGFGRQGKRTFMAERQYTRMEDWLTAKLAYEGLPSKTYLSKTLAQYTSKTCSNCGFTITSADYDRVLEKLKKTATGWMTTINGKELKVEGQITYYNRYKRQNVVKDLSVELDRLSEESVNNDISSWTKGRSGEALSLLKKRFSHRPVQEKFVCLNCGFETHADEQAALNIARSWLFLRSQEYKKYQTNKTTGNTDKRAFVETWQSFYRKKLKEVWKPAV

SEQ ID NO: 40105 - protein, 978 aa, synthetic construct
  REGION 1..978: note = engineered CasX variant
QEIKRINKIRRRLVKDSNTKKAGKTGPMKTLLVRVMTPDLRERLENLRKKPENIPQPISNTSRANLNKLLTDYTEMKKAILHVYWEEFQKDPVGLMSRVAQPASKKIDQNKLKPEMDEKGNLTTAGFACSQCGQPLFVYKLEQVSEKGKAYTNYVGRCNVAEHEKLILLAQLKPEKDSDEAVTYSLGKFGQRALDFYSIHVTKESTHPVKPLAQIAGNRYASGPVGKALRDACMGTIASFLSKYQDIIIEHQKVVKGNQKRLESLRELAGKENLEYPSVTLPPQPHTKEGVDAYNEVIARVRWWVNLNLWQKLKLSRDDAKPLLRLKGFPSFPLVERQANEVDWWDMVCNVKKLINEKKEDGKVFWQNLAGYKRQEALRPYLSSEEDRKKGKKFARYQLGDLLLHLEKKHGEDWGKVYDEAWERIDKKVEGLSKHIKLEEERRSEDAQSKAALTDWLRAKASFVIEGLKEADKDEFCRCELKLQKWYGDLRGKPFAIEAENSILDISGFSKQYNCAFIWQKDGVKKLNLYLIINYFKGGKLRFKKIKPEAFEANRFYTVINKKSGEIVPMEVNFNFDDPNLIILPLAFGKRQGREFIWNDLLSLETGSLKLANGRVIEKTLYNRRTRQDEPALFVALTFERREVLDSSNIKPMNLIGVDRGENIPAVIALTDPEGCPLSRFKDSLGNPTHILRIGESYKEKQRTIQAKKEVEQRRAGGYSRKYASKAKNLADDMVRNTARDLLYYAVTQDAMLIFENLSRGFGRQGKRTFMAERQYTRMEDWLTAKLAYEGLPSKTYLSKTLAQYTSKTCSNCGFTITSADYDRVLEKLKKTATGWMTTINGKELKVEGQITYYNRYKRQNVVKDLSVELDRLSEESVNNDISSWTKGRSGEALSLLKKRFSHRPVQEKFVCLNCGFETHADEQAALNIARSWLFLRSQEYKKYQTNKTTGNTDKRAFVETWQSFYRKKLKEVWKPAV

SEQ ID NO: 40106 - protein, 978 aa, synthetic construct
  REGION 1..978: note = engineered CasX variant
QEIKRINKIRRRLVKDSNTKKAGKTGPMKTLLVRVMTPDLRERLENLRKKPENIPQPISNTSRANLNKLLTDYTEMKKAILHVYWEEFQKDPVGLMSRVAQPASKKIDQNKLKPEMDEKGNLTTAGFACSQCGQPLFVYKLEQVSEKGKAYTNYFGRCNVAEHEKLILLAQLKPEKDSDEAVTYSLGKFGQRALDFYSIHVTKESTHPVKPLAQIAGNRYASGPVGKALRDACMGTIASFLSKYQDIIIEHQKVVKGNQKRLESLRELAGKENLEYPSVTLPPQPHTKEGVDAYNEVIARVRWWVNLNLWQKLKLSRDDAKPLLRLKGFPSFPLVERQANEVDWWDMVCNVKKLINEKKEDGKVFWQNLAGYKRQEALRPYLSSEEDRKKGKKFARYQLGDLLLHLEKKHGEDWGKVYDEAWERIDKKVEGLSKHIKLEEERRSEDAQSKAALTDWLRAKASFVIEGLKEADKDEFCRCELKLQKWYGDLRGKPFAIEAENSILDISGFSKQYNCAFIWQKDGVKKLNLYLIINYFKGGKLRFKKIKPEAFEANRFYTVINKKSGEIVPMEVNFNFDDPNLIILPLAFGKRQGREFIWNDLLSLETGSLKLANGRVIEKTLYNRRTRQDEPALFVALTFERREVLDSSNIKPMNLIGVDRGENIPAVIALTDPEGCPLSRFKDSLGNPTHILRIGESYKEKQRTIQAKKEVEQRRAGGYSRKYASKAKNLADDMVRNTARDLLYYAVTQDAMLIFENLSRGFGRQGKRTFMAERQYTRMEDWLTAKLAYEGLASKTYLSKTLAQYTSKTCSNCGFTITSADYDRVLEKLKKTATGWMTTINGKELKVEGQITYYNRYKRQNVVKDLSVELDRLSEESVNNDISSWTKGRSGEALSLLKKRFSHRPVQEKFVCLNCGFETHADEQAALNIARSWLFLRSQEYKKYQTNKTTGNTDKRAFVETWQSFYRKKLKEVWKPAV

SEQ ID NO: 40107 - protein, 978 aa, synthetic construct
  REGION 1..978: note = engineered CasX variant
QEIKRINKIRRRLVKDSNTKKAGKTGPMKTLLVRVMTPDLRERLENLRKKPENIPQPISNTSRANLNKLLTDYTEMKKAILHVYWEEFQKDPVGLMSRVAQPASKKIDQNKLKPEMDEKGNLTTAGFACSQCGQPLFVYKLEQVSEKGKAYTNYFGRCNVAEHEKLILLAQLKPEKDSDEAVTYSLGKFGQRALDFYSIHVTKESTHPVKPLAQIAGNRYASGPVGKALRDACMGTIASFLSKYQDIIIEHQKVVKGNQKRLESLRELAGKENLEYPSVTLPPQPHTKEGVDAYNEVIARVRWWVNLNLWQKLKLSRDDAKPLLRLKGFPSFPLVERQANEVDWWDMVCNVKKLINEKKEDGKVFWQNLAGYKRQEALRPYLSSEEDRKKGKKFARYQLGDLLLHLEKKHGEDWGKVYDEAWERIDKKVEGLSKHIKLEEERRSEDAQSKAALTDWLRAKASFVIEGLKEADKDEFCRCELKLQKWYGDLRGKPFAIEAENSILDISGFSKQYNCAFIWQKDGVKKLNLYLIINYFKGGKLRFKKIKPEAFEANRFYTVINKKSGEIVPMEVNFNFDDPNLIILPLAFGKRQGREFIWNDLLSLETGSLKLANGRVIEKTLYNRRTRQDEPALFVALTFERREVLDSSNIKPMNLIGVDRGENIPAVIALTDPEGCPLSRFKDSLGNPTHILRIGESYKEKQRTIQAKKEVEQRRAGGYSRKYASKAKNLADDMVRNTARDLLYYAVTQDAMLIFENLSRGFGRQGKRTFMAERQYTRMEDWLTAKLAYEGLPSKVYLSKTLAQYTSKTCSNCGFTITSADYDRVLEKLKKTATGWMTTINGKELKVEGQITYYNRYKRQNVVKDLSVELDRLSEESVNNDISSWTKGRSGEALSLLKKRFSHRPVQEKFVCLNCGFETHADEQAALNIARSWLFLRSQEYKKYQTNKTTGNTDKRAFVETWQSFYRKKLKEVWKPAV

SEQ ID NO: 40108 - protein, 979 aa, synthetic construct
  REGION 1..979: note = engineered CasX variant
QEIKRINKIRRRLVKDSNTKKAGKTGPMKTLLVRVMTPDLRERLENLRKKPENIPQPISNTSRANLNKLLTDYTEMKKAILHVYWEEFQKDPVGLMSRVAQPASKKIDQNKLKPEMDEKGNLTTAGFACSQCGQPLFVYKLEQVSEKGKAYTNYFGRCNVAEHEKLILLAQLKPEKDSDEAVTYSLGKFGQRALDFYSIHVTKESTHPVKPLAQIAGNRYASGPVGKALRDACMGTIASFLSKYQDIIIEHQKVVKGNQKRLESLRELAGKENLEYPSVTLPPQPHTKEGVDAYNEVIARVRWWVNLNLWQKLKLSRDDAKPLLRLKGFPSFPLVERQANEVDWWDMVCNVKKLINEKKEDGKVFWQNLAGYKRQEALRPYLSSEEDRKKGKKFARYQLGDLLLHLEKKHGEDWGKVYDEAWERIDKKVEGLSKHIKLEEERRSEDAQSKAALTDWLRAKASFVIEGLKEADKDEFCRCELKLQKWYGDLRGKPFAIEAENSILDISGFSKQYNCAFIWQKDGVKKLNLYLIINYFKGGKLRFKKIKPEAFEANRFYTVINKKSGEIVPMEVNFNFDDPNLIILPLAFGKRQGREFIWNDLLSLETGSLKLANGRVIEKTLYNRRTRQDEPALFVALTFERREVLDSSNIKPMNLIGVDRGENIPAVIALTDPEGCPLSRFKDSLGNPTHILRIGESYKEKQRTIQAKKEVEQRRAGGYSRKYASKAKNLADDMVRNTARDLLYYAVTQDAMLIFENLSRGFGRQGKRTFMAERQYTRMEDWLTAKLAYEGPLPSKTYLSKTLAQYTSKTCSNCGFTITSADYDRVLEKLKKTATGWMTTINGKELKVEGQITYYNRYKRQNVVKDLSVELDRLSEESVNNDISSWTKGRSGEALSLLKKRFSHRPVQEKFVCLNCGFETHADEQAALNIARSWLFLRSQEYKKYQTNKTTGNTDKRAFVETWQSFYRKKLKEVWKPAV

SEQ ID NO: 40109 - protein, 979 aa, synthetic construct
  REGION 1..979: note = engineered CasX variant
QEIKRINKIRRRLVKDSNTKKAGKTGPMKTLLVRVMTPDLRERLENLRKKPENIPQPISNTSRANLNKLLTDYTEMKKAILHVYWEEFQKDPVGLMSRVAQPASKKIDQNKLKPEMDEKGNLTTAGFACSQCGQPLFVYKLEQVSEKGKAYTNYFGRCNVAEHEKLILLAQLKPEKDSDEAVTYSLGKFGQRALDFYSIHVTKESTHPVKPLAQIAGNRYASGPVGKALRDACMGTIASFLSKYQDIIIEHQKVVKGNQKRLESLRELAGKENLEYPSVTLPPQPHTKEGVDAYNEVIARVRWWVNLNLWQKLKLSRDDAKPLLRLKGFPSFPLVERQANEVDWWDMVCNVKKLINEKKEDGKVFWQNLAGYKRQEALRPYLSSEEDVRKKGKKFARYQLGDLLLHLEKKHGEDWGKVYDEAWERIDKKVEGLSKHIKLEEERRSEDAQSKAALTDWLRAKASFVIEGLKEADKDEFCRCELKLQKWYGDLRGKPFAIEAENSILDISGFSKQYNCAFIWQKDGVKKLNLYLIINYFKGGKLRFKKIKPEAFEANRFYTVINKKSGEIVPMEVNFNFDDPNLIILPLAFGKRQGREFIWNDLLSLETGSLKLANGRVIEKTLYNRRTRQDEPALFVALTFERREVLDSSNIKPMNLIGVDRGENIPAVIALTDPEGCPLSRFKDSLGNPTHILRIGESYKEKQRTIQAKKEVEQRRAGGYSRKYASKAKNLADDMVRNTARDLLYYAVTQDAMLIFENLSRGFGRQGKRTFMAERQYTRMEDWLTAKLAYEGLPSKTYLSKTLAQYTSKTCSNCGFTITSADYDRVLEKLKKTATGWMTTINGKELKVEGQITYYNRYKRQNVVKDLSVELDRLSEESVNNDISSWTKGRSGEALSLLKKRFSHRPVQEKFVCLNCGFETHADEQAALNIARSWLFLRSQEYKKYQTNKTTGNTDKRAFVETWQSFYRKKLKEVWKPAV

SEQ ID NO: 40110 - protein, 978 aa, synthetic construct
  REGION 1..978: note = engineered CasX variant
QEIKRINKIRRRLVKDSNTKKAGKTGPMKTLLVRVMTPDLRERLENLRKKPENIPQPISNTSRANLNKLLTDYTEMKKAILHVYWEEFQKDPVGLMSRVAQPASKKIDQNKLKPEMDEKGNLTTAGFACSQCGQPLFVYKLEQVSEKGKAYTNYFGRCNVAEHEKLILLAQLKPEKDSDEAVTYSLGKFGQRALDFYSIHVTKESTHPVKPLAQIAGNRYASGPVGKALRDACMGTIASFLSKYQDIIIEHQKVVKGNQKRLESLRELAGKENLEYPSVTLPPQPHTKEGVDAYNEVIARVRWWVNLNLWQKLKLSRDDAKPLLRLKGFPSFPLVERQANEVDWWDMVCNVKKLINEKKEDGKVFWQNLAGYKRQEALRPYLSSEEDRKKGKKFARYQLGDLLLHLEKKHGEDWGKVYDEAWERIDKKVEGLSKHIKLEEERRSEDAQSKAALTDWLRAKASFVIEGLKEADKDEFCRCELKLQKWYGDLRGKPFAIEAENSILDISGFSKQYNCAFIWQKDGVKKLNLYLIINYFKGGKLRFKKIKPEAFEANRFYTVINKKSGEIVPMEVNFNFDDPNLIILPLAFGKRQGREFIWNDLLSLETGSLKLANGRVIEKTLYNRRTRQDEPALFVALTFERREVLDSSNIKPMNLIGVDRGENIPAVIALTDPEGCPLSRFKDSLGNPTHILRIGESYKEKQRTIQAKKEVEQRRAGGYSRKYASKAKNLADDMVRNTARDLLYYAVTQDAMLIFENLSRGFGRQGKRTFMAERQYTRMEDWLTAKLAYEGLPSKTYLSKTLAQYTSKTCSNCGFTITSADYDRMLEKLKKTATGWMTTINGKELKVEGQITYYNRYKRQNVVKDLSVELDRLSEESVNNDISSWTKGRSGEALSLLKKRFSHRPVQEKFVCLNCGFETHADEQAALNIARSWLFLRSQEYKKYQTNKTTGNTDKRAFVETWQSFYRKKLKEVWKPAV

SEQ ID NO: 40111 - protein, 978 aa, synthetic construct
  REGION 1..978: note = engineered CasX variant
QEIKRINKIRRRLVKDSNTKKAGKTGPMKTLLVRVMTPDLRERLENLRKKPENIPQPISNTSRANLNKLLTDYTEMKKAILHVYWEEFQKDPVGLMSRVAQPASKKIDQNKLKPEMDEKGNLTTAGFACSQCGQPLFVYKLEQVSEKGKAYTNYFGRCNVAEHEKLILLAQLKPEKDSDEAVTYSLGKFGQRALDFYSIHVTKESTHPVKPLAQIAGNRYASGPVGKALRDACMGTIASFLSKYQDIIIEHQKVVKGNQKRLESLRELAGKENLEYPSVTLPPQPHTKEGVDAYNEVIARVRWWVNLNLWQKLKLSRDDAKPLLRLKGFPSFPLVERQANEVDWWDMVCNVKKLINEKKEDGKVFWQNLAGYKRQEALRPYLSSEEDRKKGKKFARYQLGDLLLHLEKKHGEDWGKVYDEAWERIDKKVEGLSKHIKLEEERRSEDAQSKAALTDWLRAKASFVIEGLKEADKDEFCRCELKLQKWYGDLRGKPFAIEAENSILDISGFSKQYNCAFIWQKDGVKKLNLYLIINYFKGGKLRFKKIKPEAFEANRFYTVINKKSGEIVPMEVNFNFDDPNLIILPLAFGKRQGREFIWNDLLSLETGSLKLANGRVIEKTLYNRRTRQDEPALFVALTFERREVLDSSNIKPMNLIGVDRGENIPAVIALTDPEGCPLSRFKDSLGNPTHILRIGESYKEKQRTIQAKKEVEQRRAGGYSRKYASKAKNLADDMVRNTARDLLYYAVTQDAMLIFENLSRGFGRQGKRTFMAERQYTRMEDWLTAKLAYEGLPSKTYLSKTLAQYTSKTCSNCGFTITSADYDRVLEKLKKTATGWMTTINGKELKVEGQITYYNRYKRQNVVKDLSVELDRLSEESVNNDISSWTKGRQGEALSLLKKRFSHRPVQEKFVCLNCGFETHADEQAALNIARSWLFLRSQEYKKYQTNKTTGNTDKRAFVETWQSFYRKKLKEVWKPAV

SEQ ID NO: 40112 - protein, 978 aa, synthetic construct
  REGION 1..978: note = engineered CasX variant
QEIKRINKIRRRLVKDSNTKKAGKTGPMKTLLVRVMTPDLRERLENLRKKPENIPQPISNTSRANLNKLLTDYTEMKKAILHVYWEEFQKDPVGLMSRVAQPASKKIDQNKLKPEMDEKGNLTTAGFACSQCGQPLFVYKLEQVSEKGKAYTNYFGRCNVAEHEKLILLAQLKPEKDSDEAVTYSLGKFGQRALDFYSIHVTKESTHPVKPLAQIAGNRYASGPVGKALRDACMGTIASFLSKYQDIIIEHQKVVKGNQKRLESLRELAGKENLEYPSVTLPPQPHTKEGVDAYNEVIARVRWWVNLNLWQKLKLSRDDAKPLLRLKGFPSFPLVERQANEVDWWDMVCNVKKLINEKKEDGKVFWQNLAGYKRQEALRPYLSSEEDRKKGKKFARYQLGDLLLHLEKKHGEDWGKVYDEAWERIDKKVEGLSKHIKLEEERRSEDAQSKAALTDWLRAKASFVIEGLKEADKDEFCRCELKLQKWYGDLRGKPFAIEAENSILDISGFSKQYNCAFIWQKDGVKKLNLYLIINYFKGGKLRFKKIKPEAFEANRFYTVINKKSGEIVPMEVNFNFDDPNLIILPLAFGKRQGREFIWNDLLSLETGSLKLANGRVIEKTLYNRRTRQDEPALFVALTFERREVLDSSNIKPMNLIGVDRGENIPAVIALTDPEGCPLSRFKDSLGNPTHILRIGESYKEKQRTIQAKKEVEQRRAGGYSRKYASKAKNLADDMVRNTARDLLYYAVTQDAMLIFENLSRGFGRQGKRTFMAERQYTRMEDWLTAKLAYEGLPSKTYLSKTLAQYTSKTCSNCGFTITSADYDRVLEKLKKTATGWMTTINGKELKVEGQITYYNRYKRQNVVKDLSVELDRLSEESVNNDISSWTKGRSGEALSLLKKRFSHRPVQEKFVCLNCEFETHADEQAALNIARSWLFLRSQEYKKYQTNKTTGNTDKRAFVETWQSFYRKKLKEVWKPAV

SEQ ID NO: 40113 - protein, 979 aa, synthetic construct
  REGION 1..979: note = engineered CasX variant
QEIKRINKIRRRLVKDSNTKKAGKTGPMKTLLVRVMTPDLRERLENLRKKPENIPQPISNTSRANLNKLLTDYTEMKKAILHVYWEEFQKDPVGLMSRVAQPASKKIDQNKLKPEMDEKGNLTTAGFACSQCGQPLFVYKLEQVSEKGKAYTNYFGRCNVAEHEKLILLAQLKPEKDSDEAVTYSLGKFGQRALDFYSIHVTKESTHPVKPLAQIAGNRYASGPVGKALRDACMGTIASFLSKYQDIIIEHQKVVKGNQKRLESLRELAGKENLEYPSVTLPPQPHTKEGVDAYNEVIARVRWWVNLNLWQKLKLSRDDAKPLLRLKGFPSFPLVERQANEVDWWDMVCNVKKLINEKKEDGKVFWQNLAGYKRQEALRPYLSSEEDRKKGKKFARYQLGDLLLHLEKKHGEDWGKVYDEAWERIDKKVEGLSKHIKLEEERRSEDAQSKAALTDWLRAKASFVIEGLKEADKDEFCRCELKLQKWYGDLRGKPFAIEAENSILDISGFSKQYNCAFIWQKDGVKKLNLYLIINYFKGGKLRFKKIKPEAFEANRFYTVINKKSGEIVPMEVNFNFDDPNLIILPLAFGKRQGREFIWNDLLSLETGSLKLANGRVIEKTLYNRRTRQDEPALFVALTFERREVLDSSNIKPMNLIGVDRGENIPAVIALTDPEGCPLSRFKDSLGNPTHILRIGESYKEKQRTIQAKKEVEQRRAGGYSRKYASKAKNLADDMVRNTARDLLYYAVTQDAMLIFENLSRGFGRQGKRTFMAERQYTRMEDWLTAKLAYEGLPSKTYLSKTLAQYTSKTCSNCGFTITSADYDRVLEKLKKTATGWMTTINGKELKVEGQITYYNRYKRQNVVKDLSVELDRLSEESVNNDISSWTKGRSGEALSLLKKRFSHRPVQEKFVCLNCGFETHADEQAALNIARSWLFLRSQEYKKYQTNKTSTGNTDKRAFVETWQSFYRKKLKEVWKPAV

SEQ ID NO: 40114 - protein, 979 aa, synthetic construct
  REGION 1..979: note = engineered CasX variant
QEIKRINKIRRRLVKDSNTKKAGKTGPMKTLLVRVMTPDLRERLENLRKKPENIPQPISNTSRANLNKLLTDYTEMKKAILHVYWEEFQKDPVGLMSRVAQPASKKIDQNKLKPEMDEKGNLTTAGFACSQCGQPLFVYKLEQVSEKGKAYTNYFGRCNVAEHEKLILLAQLKPEKDSDEAVTYSLGKFGQRALDFYSIHVTKESTHPVKPLAQIAGNRYASGPVGKALRDACMGTIASFLSKYQDIIIEHQKVVKGNQKRLESLRELAGKENLEYPSVTLPPQPHTKEGVDAYNEVIARVRWWVNLNLWQKLKLSRDDAKPLLRLKGFPSFPLVERQANEVDWWDMVCNVKKLINEKKEDGKVFWQNLAGYKRQEALRPYLSSEEDRKKGKKFARYQLGDLLLHLEKKHGEDWGKVYDEAWERIDKKVEGLSKHIKLEEERRSEDAQSKAALTDWLRAKASFVIEGLKEADKDEFCRCELKLQKWYGDLRGKPFAIEAENSILDISGFSKQYNCAFIWQKDGVKKLNLYLIINYFKGGKLRFKKIKPEAFEANRFYTVINKKSGEIVPMEVNFNFDDPNLIILPLAFGKRQGREFIWNDLLSLETGSLKLANGRVIEKTLYNRRTRQDEPALFVALTFERREVLDSSNIKPMNLIGVDRGENIPAVIALTDPEGCPLSRFKDSLGNPTHILRIGESYKEKQRTIQAKKEVEQRRAGGYSRKYASKAKNLADDMVRNTARDLLYYAVTQDAMLIFENLSRGFGRQGKRTFMAERQYTRMEDWLTAKLAYEGLPSKTYLSKTLAQYTSKTCSNCGFTITSADYDRVLEKLKKTATGWMTTINGKELKVEGQITYYNRYKRQNVVKDLSVELDRLSEESVNNDISSWTKGRSGEALSLLKKRFSHRPVQEKFVCLNCGFETHADEQAALNIARSWLFLRSQEYKKYQTNKTTGKNTDKRAFVETWQSFYRKKLKEVWKPAV

SEQ ID NO: 40115 - protein, 978 aa, synthetic construct
  REGION 1..978: note = engineered CasX variant
QEIKRINKIRRRLVKDSNTKKAGKTGPMKTLLVRVMTPDLRERLENLRKKPENIPQPISNTSRANLNKLLTDYTEMKKAILHVYWEEFQKDPVGLMSRVAQPASKKIDQNKLKPEMDEKGNLTTAGFACSQCGQPLFVYKLEQVSEKGKAYTNYFGRCNVAEHEKLILLAQLKPEKDSDEAVTYSLGKFGQRALDFYSIHVTKESTHPVKPLAQIAGNRYASGPVGKALRDACMGTIASFLSKYQDIIIEHQKVVKGNQKRLESLRELAGKENLEYPSVTLPPQPHTKEGVDAYNEVIARVRWWVNLNLWQKLKLSRDDAKPLLRLKKFPSFPLVERQANEVDWWDMVCNVKKLINEKKEDGKVFWQNLAGYKRQEALRPYLSSEEDRKKGKKFARYQLGDLLLHLEKKHGEDWGKVYDEAWERIDKKVEGLSKHIKLEEERRSEDAQSKAALTDWLRAKASFVIEGLKEADKDEFCRCELKLQKWYGDLRGKPFAIEAENSILDISGFSKQYNCAFIWQKDGVKKLNLYLIINYFKGGKLRFKKIKPEAFEANRFYTVINKKSGEIVPMEVNFNFDDPNLIILPLAFGKRQGREFIWNDLLSLETGSLKLANGRVIEKTLYNRRTRQDEPALFVALTFERREVLDSSNIKPMNLIGVDRGENIPAVIALTDPEGCPLSRFKDSLGNPTHILRIGESYKEKQRTIQAKKEVEQRRAGGYSRKYASKAKNLADDMVRNTARDLLYYAVTQDAMLIFENLSRGFGRQGKRTFMAERQYTRMEDWLTAKLAYEGLPSKTYLSKTLAQYTSKTCSNCGFTITSADYDRVLEKLKKTATGWMTTINGKELKVEGQITYYNRYKRQNVVKDLSVELDRLSEESVNNDISSWTKGRSGEALSLLKKRFSHRPVQEKFVCLNCGFETHADEQAALNIARSWLFLRSQEYKKYQTNKTTGNTDKRAFVETWQSFYRKKLKEVWKPAV

SEQ ID NO: 40116 - protein, 978 aa, synthetic construct
  REGION 1..978: note = engineered CasX variant
QEIKRINKIRRRLVKDSNTKKAGKTGPMKTLLVRVMTPDLRERLENLRKKPENIPQPISNTSRANLNKLLTDYTEMKKAILHVYWEEFQKDPVGLMSRVAQPASKKIDQNKLKPEMDEKGNLTTAGFACSQCGQPLFVYKLEQVSEKGKAYTNYFGRCNVAEHEKLILLAQLKPEKDSDEAVTYSLGKFGQRALDFYSIHVTKESTHPVKPLAQIAGNRYASGPVGKALRDACMGTIASFLSKYQDIIIEHQKVVKGNQKRLESLRELAGKENLEYPSVTLPPQPHTKEGVDAYNEVIARVRWWVNLNLWQKLKLSRDDAKPLLRLKGFPSFPLVERQANEVDWWDMVCNVKKLINEKKEDGKVFWQNLAGYKRQEALRPYLSSEEDRKKGKKFARYQLGDLLLHLEKKHGEDWGKVYDEAWERIDKKVEGLSKHIKLEEERRSEDAQSKAALTDWLRAKASFVIEGLKEADKDEFCRCELKLQKWYGDLRGKPFAIEAENSILDISGFSKQYNCAFIWQKDGVKKLNLYLIINYFKGGKLRFKKIKPEAFEANRFYTVINKKSGEIVPMEVNFNFDDPNLIILPLAFGKRQGREFIWNDLLSLETGSLKLANGRVIEKTLYNRRTRQDEPALFVALTFERREVLDSSNIKPMNLIGVDRGENIPAVIALTDPEGCPLSRFKDSLGNPTHILRIGERYKEKQRTIQAKKEVEQRRAGGYSRKYASKAKNLADDMVRNTARDLLYYAVTQDAMLIFENLSRGFGRQGKRTFMAERQYTRMEDWLTAKLAYEGLPSKTYLSKTLAQYTSKTCSNCGFTITSADYDRVLEKLKKTATGWMTTINGKELKVEGQITYYNRYKRQNVVKDLSVELDRLSEESVNNDISSWTKGRSGEALSLLKKRFSHRPVQEKFVCLNCGFETHADEQAALNIARSWLFLRSQEYKKYQTNKTTGNTDKRAFVETWQSFYRKKLKEVWKPAV

SEQ ID NO: 40117 - protein, 978 aa, synthetic construct
  REGION 1..978: note = engineered CasX variant
QEIKRINKIRRRLVKDSNTKKAGKTGPMKTLLVRVMTPDLRERLENLRKKPENIPQPISNTSRANLNKLLTDYTEMKKAILHVYWEEFQKDPVGLMSRVAQPASKKIDQNKLKPEMDEKGNLTTAGFACSQCGQPLFVYKLEQVSEKGKAYTNYFGRCNVAEHEKLILLAQLKPEKDSDEAVTYSLGKFGQRALDFYSIHVTKESTHPVKPLAQIAGNRYASGPVGKALRDACMGTIASFLSKYQDIIIEHQKVVKGNQKRLESLRELAGKENLEYPSVTLPPQPHTKEGVDAYNEVIARVRWWVNLNLWQKLKLSRDDAKPLLRLKGFPSFPLVERQANEVDWWDMVCNVKKLINEKKEDGKVFWQNLAGYKRQEALRPYLSSEEDRKKGKKFARYQLGDLLLHLEKKHGEDWGKVYDEAWERIDKKVEGLSKHIKLEEERRSEDAQSKAALTDWLRAKASFVIEGLKEADKDEFCRCELKLQKWYGDLRGKPFAIEAENSILDISGFSKQYNCAFIWQKDGVKKLNLYLIINYFKGGKLRFKKIKPEAFEANRFYTVINKKSGEIVPMEVNFNFDDPNLIILPLAFGKRQGREFIWNDLLSLETGSLQLANGRVIEKTLYNRRTRQDEPALFVALTFERREVLDSSNIKPMNLIGVDRGENIPAVIALTDPEGCPLSRFKDSLGNPTHILRIGESYKEKQRTIQAKKEVEQRRAGGYSRKYASKAKNLADDMVRNTARDLLYYAVTQDAMLIFENLSRGFGRQGKRTFMAERQYTRMEDWLTAKLAYEGLPSKTYLSKTLAQYTSKTCSNCGFTITSADYDRVLEKLKKTATGWMTTINGKELKVEGQITYYNRYKRQNVVKDLSVELDRLSEESVNNDISSWTKGRSGEALSLLKKRFSHRPVQEKFVCLNCGFETHADEQAALNIARSWLFLRSQEYKKYQTNKTTGNTDKRAFVETWQSFYRKKLKEVWKPAV

SEQ ID NO: 40118 - protein, 980 aa, synthetic construct
  REGION 1..980: note = engineered CasX variant
QEIKRINKIRRRLVKDSNTKKAGKTGPMKTLLVRVMTPDLRERLENLRKKPENIPQPISNTSRANLNKLLTDYTEMKKAILHVYWEEFQKDPVGLMSRVAQPASKKIDQNKLKPEMDEKGNLTTAGFACSQCGQPLFVYKLEQVSEKGKAYTNYFGRCNVAEHEKLILLAQLKPEKDSDEAVTYSLGKFGQRALDFYSIHVTKESTHPVKPLAQIAGNRYASGPVGKALRDACMGTIASFLSKYQDIIIEHQKVVKGNQKRLESLRELAGKENLEYPSVTLPPQPHTKEGVDAYNEVIARVRMWVNLNLWQKLKLSRDDAKPLLRLKGFPSFPLVERQQANAEVDWWDMVCNVKKLINEKKEDGKVFWQNLAGYKRQEALRPYLSSEEDRKKGKKFARYQLGDLLLHLEKKHGEDWGKVYDEAWERIDKKVEGLSKHIKLEEERRSEDAQSKAALTDWLRAKASFVIEGLKEADKDEFCRCELKLQKWYGDLRGKPFAIEAENSILDISGFSKQYNCAFIWQKDGVKKLNLYLIINYFKGGKLRFKKIKPEAFEANRFYTVINKKSGEIVPMEVNFNFDDPNLIILPLAFGKRQGREFIWNDLLSLETGSLKLANGRVIEKTLYNRRTRQDEPALFVALTFERREVLDSSNIKPMNLIGVDRGENIPAVIALTDPEGCPLSRFKDSLGNPTHILRIGESYKEKQRTIQAKKEVEQRRAGGYSRKYASKAKNLADDMVRNTARDLLYYAVTQDAMLIFENLSRGFGRQGKRTFMAERQYTRMEDWLTAKLAYEGLPSKTYLSKTLAQYTSKTCSNCGFTITSADYDRVLEKLKKTATGWMTTINGKELKVEGQITYYNRYKRQNVVKDLSVELDRLSEESVNNDISSWTKGRSGEALSLLKKRFSHRPVQEKFVCLNCGFETHADEQAALNIARSWLFLRSQEYKKYQTNKTTGNTDKRAFVETWQSFYRKKLKEVWKPAV

SEQ ID NO: 40119 - protein, 979 aa, synthetic construct
  REGION 1..979: note = engineered CasX variant
QEIKRINKIRRRLVKDSNTKKAGKTGPMKTLLVRVMTPDLRERLENLRKKPENIPQPISNTSRANLNKLLTDYTEMKKAILHVYWEEFQKDPVGLMSRVAQPASKKIDQNKLKPEMDEKGNLTTAGFACSQCGQPLFVYKLEQVSEKGKAYTNYFGRCNVAEHEKLILLAQLKPEKDSDEAVTYSLGKFGQRALDFYSIHVTKESTHPVKPLAQIAGNRYASGPVGKALRDACMGTIASFLSKYQDIIIEHQKVVKGNQKRLESLRELAGKENLEYPSVTLPPQPHTKEGVDAYNEVIARVRMWVNLNLWQKLKLSRDDAKPLLRLKGFPSFPLVERQQANEVDWWDMVCNVKKLINEKKEDGKVFWQNLAGYKRQEALRPYLSSEEDRKKGKKFARTQLGDLLLHLEKKHGEDWGKVYDEAWERIDKKVEGLSKHIKLEEERRSEDAQSKAALTDWLRAKASFVIEGLKEADKDEFCRCELKLQKWYGDLRGKPFAIEAENSILDISGFSKQYNCAFIWQKDGVKKLNLYLIINYFKGGKLRFKKIKPEAFEANRFYTVINKKSGEIVPMEVNFNFDDPNLIILPLAFGKRQGREFIWNDLLSLETGSLKLANGRVIEKTLYNRRTRQDEPALFVALTFERREVLDSSNIKPMNLIGVDRGENIPAVIALTDPEGCPLSRFKDSLGNPTHILRIGESYKEKQRTIQAKKEVEQRRAGGYSRKYASKAKNLADDMVRNTARDLLYYAVTQDAMLIFENLSRGFGRQGKRTFMAERQYTRMEDWLTAKLAYEGLPSKTYLSKTLAQYTSKTCSNCGFTITSADYDRVLEKLKKTATGWMTTINGKELKVEGQITYYNRYKRQNVVKDLSVELDRLSEESVNNDISSWTKGRSGEALSLLKKRFSHRPVQEKFVCLNCGFETHADEQAALNIARSWLFLRSQEYKKYQTNKTTGNTDKRAFVETWQSFYRKKLKEVWKPAV

SEQ ID NO: 40120 - protein, 980 aa, synthetic construct
  REGION 1..980: note = engineered CasX variant
QEIKRINKIRRRLVKDSNTKKAGKTGPMKTLLVRVMTPDLRERLENLRKKPENIPQPISNTSRANLNKLLTDYTEMKKAILHVYWEEFQKDPVGLMSRVAQPASKKIDQNKLKPEMDEKGNLTTAGFACSQCGQPLFVYKLEQVSEKGKAYTNYFGRCNVAEHEKLILLAQLKPEKDSDEAVTYSLGKFGQRALDFYSIHVTKESTHPVKPLAQIAGNRYASGPVGKALRDACMGTIASFLSKYQDIIIEHQKVVKGNQKRLESLRELAGKENLEYPSVTLPPQPHTKEGVDAYNEVIARVRMWVNLNLWQKLKLSRDDAKPLLRLKGFPSFPLVERQQANEVDWWDMVCNVKKLINEKKEDGKVFWQNLAGYKRQEALRPYLSSEEDRKKGKKFARYQLGDLLLHLEKKHEGEDWGKVYDEAWERIDKKVEGLSKHIKLEEERRSEDAQSKAALTDWLRAKASFVIEGLKEADKDEFCRCELKLQKWYGDLRGKPFAIEAENSILDISGFSKQYNCAFIWQKDGVKKLNLYLIINYFKGGKLRFKKIKPEAFEANRFYTVINKKSGEIVPMEVNFNFDDPNLIILPLAFGKRQGREFIWNDLLSLETGSLKLANGRVIEKTLYNRRTRQDEPALFVALTFERREVLDSSNIKPMNLIGVDRGENIPAVIALTDPEGCPLSRFKDSLGNPTHILRIGESYKEKQRTIQAKKEVEQRRAGGYSRKYASKAKNLADDMVRNTARDLLYYAVTQDAMLIFENLSRGFGRQGKRTFMAERQYTRMEDWLTAKLAYEGLPSKTYLSKTLAQYTSKTCSNCGFTITSADYDRVLEKLKKTATGWMTTINGKELKVEGQITYYNRYKRQNVVKDLSVELDRLSEESVNNDISSWTKGRSGEALSLLKKRFSHRPVQEKFVCLNCGFETHADEQAALNIARSWLFLRSQEYKKYQTNKTTGNTDKRAFVETWQSFYRKKLKEVWKPAV

SEQ ID NO: 40121 - protein, 979 aa, synthetic construct
  REGION 1..979: note = engineered CasX variant
QEIKRINKIRRRLVKDSNTKKAGKTGPMKTLLVRVMTPDLRERLENLRKKPENIPQPISNTSRANLNKLLTDYTEMKKAILHVYWEEFQKDPVGLMSRVAQPASKKIDQNKLKPEMDEKGNLTTAGFACSQCGQPLFVYKLEQVSEKGKAYTNYFGRCNVAEHEKLILLAQLKPEKDSDEAVTYSLGKFGQRALDFYSIHVTKESTHPVKPLAQIAGNRYASGPVGKALRDACMGTIASFLSKYQDIIIEHQKVVKGNQKRLESLRELAGKENLEYPSVTLPPQPHTKEGVDAYNEVIARVRMWVNLNLWQKLKLSRDDAKPLLRLKGFPSFPLVERQQANEVDWWDMVCNVKKLINEKKEDGKVFWQNLAGYKRQEALRPYLSSEEDRKKGKKFARYQLGDLLLHLEKKHGEDWGKVYDEAWERIDKKVEGLSKHIKLEEERRSEDAQSKAALTDWLRAKASFVIEGLKEADKDEFCRCDLKLQKWYGDLRGKPFAIEAENSILDISGFSKQYNCAFIWQKDGVKKLNLYLIINYFKGGKLRFKKIKPEAFEANRFYTVINKKSGEIVPMEVNFNFDDPNLIILPLAFGKRQGREFIWNDLLSLETGSLKLANGRVIEKTLYNRRTRQDEPALFVALTFERREVLDSSNIKPMNLIGVDRGENIPAVIALTDPEGCPLSRFKDSLGNPTHILRIGESYKEKQRTIQAKKEVEQRRAGGYSRKYASKAKNLADDMVRNTARDLLYYAVTQDAMLIFENLSRGFGRQGKRTFMAERQYTRMEDWLTAKLAYEGLPSKTYLSKTLAQYTSKTCSNCGFTITSADYDRVLEKLKKTATGWMTTINGKELKVEGQITYYNRYKRQNVVKDLSVELDRLSEESVNNDISSWTKGRSGEALSLLKKRFSHRPVQEKFVCLNCGFETHADEQAALNIARSWLFLRSQEYKKYQTNKTTGNTDKRAFVETWQSFYRKKLKEVWKPAV

SEQ ID NO: 40122 - protein, 979 aa, synthetic construct
  REGION 1..979: note = engineered CasX variant
QEIKRINKIRRRLVKDSNTKKAGKTGPMKTLLVRVMTPDLRERLENLRKKPENIPQPISNTSRANLNKLLTDYTEMKKAILHVYWEEFQKDPVGLMSRVAQPASKKIDQNKLKPEMDEKGNLTTAGFACSQCGQPLFVYKLEQVSEKGKAYTNYFGRCNVAEHEKLILLAQLKPEKDSDEAVTYSLGKFGQRALDFYSIHVTKESTHPVKPLAQIAGNRYASGPVGKALRDACMGTIASFLSKYQDIIIEHQKVVKGNQKRLESLRELAGKENLEYPSVTLPPQPHTKEGVDAYNEVIARVRMWVNLNLWQKLKLSRDDAKPLLRLKGFPSFPLVERQQANEVDWWDMVCNVKKLINEKKEDGKVFWQNLAGYKRQEALRPYLSSEEDRKKGKKFARYQLGDLLLHLEKKHGEDWGKVYDEAWERIDKKVEGLSKHIKLEEERRSEDAQSKAALTDWLRAKASFVIEGLKEADKDEFCRCELKLQKWYGDLRGKPFAIEAENSILDISGFSKQYNCAFIWQKDGVKKLNLYLIINYFKGGKLRFKKIKPEAFEANRFYTVINKKSGEIVPMEVNFNFDDPNLIILPLAFGKRFGREFIWNDLLSLETGSLKLANGRVIEKTLYNRRTRQDEPALFVALTFERREVLDSSNIKPMNLIGVDRGENIPAVIALTDPEGCPLSRFKDSLGNPTHILRIGESYKEKQRTIQAKKEVEQRRAGGYSRKYASKAKNLADDMVRNTARDLLYYAVTQDAMLIFENLSRGFGRQGKRTFMAERQYTRMEDWLTAKLAYEGLPSKTYLSKTLAQYTSKTCSNCGFTITSADYDRVLEKLKKTATGWMTTINGKELKVEGQITYYNRYKRQNVVKDLSVELDRLSEESVNNDISSWTKGRSGEALSLLKKRFSHRPVQEKFVCLNCGFETHADEQAALNIARSWLFLRSQEYKKYQTNKTTGNTDKRAFVETWQSFYRKKLKEVWKPAV

SEQ ID NO: 40123 - protein, 979 aa, synthetic construct
  REGION 1..979: note = engineered CasX variant
QEIKRINKIRRRLVKDSNTKKAGKTGPMKTLLVRVMTPDLRERLENLRKKPENIPQPISNTSRANLNKLLTDYTEMKKAILHVYWEEFQKDPVGLMSRVAQPASKKIDQNKLKPEMDEKGNLTTAGFACSQCGQPLFVYKLEQVSEKGKAYTNYFGRCNVAEHEKLILLAQLKPEKDSDEAVTYSLGKFGQRALDFYSIHVTKESTHPVKPLAQIAGNRYASGPVGKALRDACMGTIASFLSKYQDIIIEHQKVVKGNQKRLESLRELAGKENLEYPSVTLPPQPHTKEGVDAYNEVIARVRMWVNLNLWQKLKLSRDDAKPLLRLKGFPSFPLVERQQANEVDWWDMVCNVKKLINEKKEDGKVFWQNLAGYKRQEALRPYLSSEEDRKKGKKFARYQLGDLLLHLEKKHGEDWGKVYDEAWERIDKKVEGLSKHIKLEEERRSEDAQSKAALTDWLRAKASFVIEGLKEADKDEFCRCELKLQKWYGDLRGKPFAIEAENSILDISGFSKQYNCAFIWQKDGVKKLNLYLIINYFKGGKLRFKKIKPEAFEANRFYTVINKKSGEIVPMEVNFNFDDPNLIILPLAFGKRVGREFIWNDLLSLETGSLKLANGRVIEKTLYNRRTRQDEPALFVALTFERREVLDSSNIKPMNLIGVDRGENIPAVIALTDPEGCPLSRFKDSLGNPTHILRIGESYKEKQRTIQAKKEVEQRRAGGYSRKYASKAKNLADDMVRNTARDLLYYAVTQDAMLIFENLSRGFGRQGKRTFMAERQYTRMEDWLTAKLAYEGLPSKTYLSKTLAQYTSKTCSNCGFTITSADYDRVLEKLKKTATGWMTTINGKELKVEGQITYYNRYKRQNVVKDLSVELDRLSEESVNNDISSWTKGRSGEALSLLKKRFSHRPVQEKFVCLNCGFETHADEQAALNIARSWLFLRSQEYKKYQTNKTTGNTDKRAFVETWQSFYRKKLKEVWKPAV

SEQ ID NO: 40124 - protein, 980 aa, synthetic construct
  REGION 1..980: note = engineered CasX variant
QEIKRINKIRRRLVKDSNTKKAGKTGPMKTLLVRVMTPDLRERLENLRKKPENIPQPISNTSRANLNKLLTDYTEMKKAILHVYWEEFQKDPVGLMSRVAQPASKKIDQNKLKPEMDEKGNLTTAGFACSQCGQPLFVYKLEQVSEKGKAYTNYFGRCNVAEHEKLILLAQLKPEKDSDEAVTYSLGKFGQRALDFYSIHVTKESTHPVKPLAQIAGNRYASGPVGKALRDACMGTIASFLSKYQDIIIEHQKVVKGNQKRLESLRELAGKENLEYPSVTLPPQPHTKEGVDAYNEVIARVRMWVNLNLWQKLKLSRDDAKPLLRLKGFPSFPLVERQQANEVDWWDMVCNVKKLINEKKEDGKVFWQNLAGYKRQEALRPYLSSEEDRKKGKKFARYQLGDLLLHLEKKHGEDWGKVYDEAWERIDKKVEGLSKHIKLEEERRSEDAQSKAALTDWLRAKASFVIEGLKEADKDEFCRCELKLQKWYGDLRGKPFAIEAENSILDISGFSKQYNCAFIWQKDGVKKLNLYLIINYFKGGKLRFKKIKPEAFEANRFYTVINKKSGEIVPMEVNFNFDDPNLIILPLAFGKRQGREFIWNDLLSLETGSLKLANGRVIEKTLYNRRTRQDEPALFVALTFERREVLDSSNIKTPMNLIGVDRGENIPAVIALTDPEGCPLSRFKDSLGNPTHILRIGESYKEKQRTIQAKKEVEQRRAGGYSRKYASKAKNLADDMVRNTARDLLYYAVTQDAMLIFENLSRGFGRQGKRTFMAERQYTRMEDWLTAKLAYEGLPSKTYLSKTLAQYTSKTCSNCGFTITSADYDRVLEKLKKTATGWMTTINGKELKVEGQITYYNRYKRQNVVKDLSVELDRLSEESVNNDISSWTKGRSGEALSLLKKRFSHRPVQEKFVCLNCGFETHADEQAALNIARSWLFLRSQEYKKYQTNKTTGNTDKRAFVETWQSFYRKKLKEVWKPAV

SEQ ID NO: 40125 - protein, 980 aa, synthetic construct
  REGION 1..980: note = engineered CasX variant
QEIKRINKIRRRLVKDSNTKKAGKTGPMKTLLVRVMTPDLRERLENLRKKPENIPQPISNTSRANLNKLLTDYTEMKKAILHVYWEEFQKDPVGLMSRVAQPASKKIDQNKLKPEMDEKGNLTTAGFACSQCGQPLFVYKLEQVSEKGKAYTNYFGRCNVAEHEKLILLAQLKPEKDSDEAVTYSLGKFGQRALDFYSIHVTKESTHPVKPLAQIAGNRYASGPVGKALRDACMGTIASFLSKYQDIIIEHQKVVKGNQKRLESLRELAGKENLEYPSVTLPPQPHTKEGVDAYNEVIARVRMWVNLNLWQKLKLSRDDAKPLLRLKGFPSFPLVERQQANEVDWWDMVCNVKKLINEKKEDGKVFWQNLAGYKRQEALRPYLSSEEDRKKGKKFARYQLGDLLLHLEKKHGEDWGKVYDEAWERIDKKVEGLSKHIKLEEERRSEDAQSKAALTDWLRAKASFVIEGLKEADKDEFCRCELKLQKWYGDLRGKPFAIEAENSILDISGFSKQYNCAFIWQKDGVKKLNLYLIINYFKGGKLRFKKIKPEAFEANRFYTVINKKSGEIVPMEVNFNFDDPNLIILPLAFGKRQGREFIWNDLLSLETGSLKLANGRVIEKTLYNRRTRQDEPALFVALTFERREVLDSSNIKPMSNLIGVDRGENIPAVIALTDPEGCPLSRFKDSLGNPTHILRIGESYKEKQRTIQAKKEVEQRRAGGYSRKYASKAKNLADDMVRNTARDLLYYAVTQDAMLIFENLSRGFGRQGKRTFMAERQYTRMEDWLTAKLAYEGLPSKTYLSKTLAQYTSKTCSNCGFTITSADYDRVLEKLKKTATGWMTTINGKELKVEGQITYYNRYKRQNVVKDLSVELDRLSEESVNNDISSWTKGRSGEALSLLKKRFSHRPVQEKFVCLNCGFETHADEQAALNIARSWLFLRSQEYKKYQTNKTTGNTDKRAFVETWQSFYRKKLKEVWKPAV

SEQ ID NO: 40126 - protein, 979 aa, synthetic construct
  REGION 1..979: note = engineered CasX variant
QEIKRINKIRRRLVKDSNTKKAGKTGPMKTLLVRVMTPDLRERLENLRKKPENIPQPISNTSRANLNKLLTDYTEMKKAILHVYWEEFQKDPVGLMSRVAQPASKKIDQNKLKPEMDEKGNLTTAGFACSQCGQPLFVYKLEQVSEKGKAYTNYFGRCNVAEHEKLILLAQLKPEKDSDEAVTYSLGKFGQRALDFYSIHVTKESTHPVKPLAQIAGNRYASGPVGKALRDACMGTIASFLSKYQDIIIEHQKVVKGNQKRLESLRELAGKENLEYPSVTLPPQPHTKEGVDAYNEVIARVRMWVNLNLWQKLKLSRDDAKPLLRLKGFPSFPLVERQQANEVDWWDMVCNVKKLINEKKEDGKVFWQNLAGYKRQEALRPYLSSEEDRKKGKKFARYQLGDLLLHLEKKHGEDWGKVYDEAWERIDKKVEGLSKHIKLEEERRSEDAQSKAALTDWLRAKASFVIEGLKEADKDEFCRCELKLQKWYGDLRGKPFAIEAENSILDISGFSKQYNCAFIWQKDGVKKLNLYLIINYFKGGKLRFKKIKPEAFEANRFYTVINKKSGEIVPMEVNFNFDDPNLIILPLAFGKRQGREFIWNDLLSLETGSLKLANGRVIEKTLYNRRTRQDEPALFVALTFERREVLDSSNIKPMNLIGVDRGENIPAVIALTDPEGCPLSRFKDSLGNPTHILRIRESYKEKQRTIQAKKEVEQRRAGGYSRKYASKAKNLADDMVRNTARDLLYYAVTQDAMLIFENLSRGFGRQGKRTFMAERQYTRMEDWLTAKLAYEGLPSKTYLSKTLAQYTSKTCSNCGFTITSADYDRVLEKLKKTATGWMTTINGKELKVEGQITYYNRYKRQNVVKDLSVELDRLSEESVNNDISSWTKGRSGEALSLLKKRFSHRPVQEKFVCLNCGFETHADEQAALNIARSWLFLRSQEYKKYQTNKTTGNTDKRAFVETWQSFYRKKLKEVWKPAV

SEQ ID NO: 40127 - protein, 979 aa, synthetic construct
  REGION 1..979: note = engineered CasX variant
QEIKRINKIRRRLVKDSNTKKAGKTGPMKTLLVRVMTPDLRERLENLRKKPENIPQPISNTSRANLNKLLTDYTEMKKAILHVYWEEFQKDPVGLMSRVAQPASKKIDQNKLKPEMDEKGNLTTAGFACSQCGQPLFVYKLEQVSEKGKAYTNYFGRCNVAEHEKLILLAQLKPEKDSDEAVTYSLGKFGQRALDFYSIHVTKESTHPVKPLAQIAGNRYASGPVGKALRDACMGTIASFLSKYQDIIIEHQKVVKGNQKRLESLRELAGKENLEYPSVTLPPQPHTKEGVDAYNEVIARVRMWVNLNLWQKLKLSRDDAKPLLRLKGFPSFPLVERQQANEVDWWDMVCNVKKLINEKKEDGKVFWQNLAGYKRQEALRPYLSSEEDRKKGKKFARYQLGDLLLHLEKKHGEDWGKVYDEAWERIDKKVEGLSKHIKLEEERRSEDAQSKAALTDWLRAKASFVIEGLKEADKDEFCRCELKLQKWYGDLRGKPFAIEAENSILDISGFSKQYNCAFIWQKDGVKKLNLYLIINYFKGGKLRFKKIKPEAFEANRFYTVINKKSGEIVPMEVNFNFDDPNLIILPLAFGKRQGREFIWNDLLSLETGSLKLANGRVIEKTLYNRRTRQDEPALFVALTFERREVLDSSNIKPMNLIGVDRGENIPAVIALTDPEGCPLSRFKDSLGNPTHILRIGESYKEKQRTIQAKKEVEQRRAGGYSRKYASKAKNLADDMVRNTARDLLYYAVTQDAMLIFENLSRGFGRQGKRTFSAERQYTRMEDWLTAKLAYEGLPSKTYLSKTLAQYTSKTCSNCGFTITSADYDRVLEKLKKTATGWMTTINGKELKVEGQITYYNRYKRQNVVKDLSVELDRLSEESVNNDISSWTKGRSGEALSLLKKRFSHRPVQEKFVCLNCGFETHADEQAALNIARSWLFLRSQEYKKYQTNKTTGNTDKRAFVETWQSFYRKKLKEVWKPAV

SEQ ID NO: 40128 - protein, 979 aa, synthetic construct
  REGION 1..979: note = engineered CasX variant
QEIKRINKIRRRLVKDSNTKKAGKTGPMKTLLVRVMTPDLRERLENLRKKPENIPQPISNTSRANLNKLLTDYTEMKKAILHVYWEEFQKDPVGLMSRVAQPASKKIDQNKLKPEMDEKGNLTTAGFACSQCGQPLFVYKLEQVSEKGKAYTNYFGRCNVAEHEKLILLAQLKPEKDSDEAVTYSLGKFGQRALDFYSIHVTKESTHPVKPLAQIAGNRYASGPVGKALRDACMGTIASFLSKYQDIIIEHQKVVKGNQKRLESLRELAGKENLEYPSVTLPPQPHTKEGVDAYNEVIARVRMWVNLNLWQKLKLSRDDAKPLLRLKGFPSFPLVERQQANEVDWWDMVCNVKKLINEKKEDGKVFWQNLAGYKRQEALRPYLSSEEDRKKGKKFARYQLGDLLLHLEKKHGEDWGKVYDEAWERIDKKVEGLSKHIKLEEERRSEDAQSKAALTDWLRAKASFVIEGLKEADKDEFCRCELKLQKWYGDLRGKPFAIEAENSILDISGFSKQYNCAFIWQKDGVKKLNLYLIINYFKGGKLRFKKIKPEAFEANRFYTVINKKSGEIVPMEVNFNFDDPNLIILPLAFGKRQGREFIWNDLLSLETGSLKLANGRVIEKTLYNRRTRQDEPALFVALTFERREVLDSSNIKPMNLIGVDRGENIPAVIALTDPEGCPLSRFKDSLGNPTHILRIGESYKEKQRTIQAKKEVEQRRAGGYSRKYASKAKNLADDMVRNTARDLLYYAVTQDAMLIFENLSRGFGRQGKRTFMAERQYTRMEDWLTAKLAYEGLPSKTYLSKTLAQYTSKTCSNCGFTITSADYDRVLEKLKKTATGWMTTINGKELKVEGQITYYNRYKRQNVVKDLSVELDRLSEESVNNDISSWDKGRSGEALSLLKKRFSHRPVQEKFVCLNCGFETHADEQAALNIARSWLFLRSQEYKKYQTNKTTGNTDKRAFVETWQSFYRKKLKEVWKPAV

SEQ ID NO: 40129 - protein, 979 aa, synthetic construct
  REGION 1..979: note = engineered CasX variant
QEIKRINKIRRRLVKDSNTKKAGKTGPMKTLLVRVMTPDLRERLENLRKKPENIPQPISNTSRANLNKLLTDYTEMKKAILHVYWEEFQVDPVGLMSRVAQPASKKIDQNKLKPEMDEKGNLTTAGFACSQCGQPLFVYKLEQVSEKGKAYTNYFGRCNVAEHEKLILLAQLKPEKDSDEAVTYSLGKFGQRALDFYSIHVTKESTHPVKPLAQIAGNRYASGPVGKALRDACMGTIASFLSKYQDIIIEHQKVVKGNQKRLESLRELAGKENLEYPSVTLPPQPHTKEGVDAYNEVIARVRMWVNLNLWQKLKLSRDDAKPLLRLKGFPSFPLVERQQANEVDWWDMVCNVKKLINEKKEDGKVFWQNLAGYKRQEALRPYLSSEEDRKKGKKFARYQLGDLLLHLEKKHGEDWGKVYDEAWERIDKKVEGLSKHIKLEEERRSEDAQSKAALTDWLRAKASFVIEGLKEADKDEFCRCELKLQKWYGDLRGKPFAIEAENSILDISGFSKQYNCAFIWQKDGVKKLNLYLIINYFKGGKLRFKKIKPEAFEANRFYTVINKKSGEIVPMEVNFNFDDPNLIILPLAFGKRQGREFIWNDLLSLETGSLKLANGRVIEKTLYNRRTRQDEPALFVALTFERREVLDSSNIKPMNLIGVDRGENIPAVIALTDPEGCPLSRFKDSLGNPTHILRIGESYKEKQRTIQAKKEVEQRRAGGYSRKYASKAKNLADDMVRNTARDLLYYAVTQDAMLIFENLSRGFGRQGKRTFMAERQYTRMEDWLTAKLAYEGLPSKTYLSKTLAQYTSKTCSNCGFTITSADYDRVLEKLKKTATGWMTTINGKELKVEGQITYYNRYKRQNVVKDLSVELDRLSEESVNNDISSWTKGRSGEALSLLKKRFSHRPVQEKFVCLNCGFETHADEQAALNIARSWLFLRSQEYKKYQTNKTTGNTDKRAFVETWQSFYRKKLKEVWKPAV

SEQ ID NO: 40130 - protein, 979 aa, synthetic construct
  REGION 1..979: note = engineered CasX variant
QEIKRLNKIRRRLVKDSNTKKAGKTGPMKTLLVRVMTPDLRERLENLRKKPENIPQPISNTSRANLNKLLTDYTEMKKAILHVYWEEFQKDPVGLMSRVAQPASKKIDQNKLKPEMDEKGNLTTAGFACSQCGQPLFVYKLEQVSEKGKAYTNYFGRCNVAEHEKLILLAQLKPEKDSDEAVTYSLGKFGQRALDFYSIHVTKESTHPVKPLAQIAGNRYASGPVGKALRDACMGTIASFLSKYQDIIIEHQKVVKGNQKRLESLRELAGKENLEYPSVTLPPQPHTKEGVDAYNEVIARVRMWVNLNLWQKLKLSRDDAKPLLRLKGFPSFPLVERQQANEVDWWDMVCNVKKLINEKKEDGKVFWQNLAGYKRQEALRPYLSSEEDRKKGKKFARYQLGDLLLHLEKKHGEDWGKVYDEAWERIDKKVEGLSKHIKLEEERRSEDAQSKAALTDWLRAKASFVIEGLKEADKDEFCRCELKLQKWYGDLRGKPFAIEAENSILDISGFSKQYNCAFIWQKDGVKKLNLYLIINYFKGGKLRFKKIKPEAFEANRFYTVINKKSGEIVPMEVNFNFDDPNLIILPLAFGKRQGREFIWNDLLSLETGSLKLANGRVIEKTLYNRRTRQDEPALFVALTFERREVLDSSNIKPMNLIGVDRGENIPAVIALTDPEGCPLSRFKDSLGNPTHILRIGESYKEKQRTIQAKKEVEQRRAGGYSRKYASKAKNLADDMVRNTARDLLYYAVTQDAMLIFENLSRGFGRQGKRTFMAERQYTRMEDWLTAKLAYEGLPSKTYLSKTLAQYTSKTCSNCGFTITSADYDRVLEKLKKTATGWMTTINGKELKVEGQITYYNRYKRQNVVKDLSVELDRLSEESVNNDISSWTKGRSGEALSLLKKRFSHRPVQEKFVCLNCGFETHADEQAALNIARSWLFLRSQEYKKYQTNKTTGNTDKRAFVETWQSFYRKKLKEVWKPAV

SEQ ID NO: 40131 - protein, 979 aa, synthetic construct
  REGION 1..979: note = engineered CasX variant
QEIKRINKIRRRLVKDSNTKKAGKTGPMKTLLVRVMTPDLRERLENLRKKPENIPQPISNTSRANLNKLLTDYTEMKKAILHVYWEEFQKDPVGLMSRVAQPASKKIDQNKLKPEMDEKGNLTTAGFACSQCGQPLFVYKLEQVSEKGKAYTNYVGRCNVAEHEKLILLAQLKPEKDSDEAVTYSLGKFGQRALDFYSIHVTKESTHPVKPLAQIAGNRYASGPVGKALRDACMGTIASFLSKYQDIIIEHQKVVKGNQKRLESLRELAGKENLEYPSVTLPPQPHTKEGVDAYNEVIARVRMWVNLNLWQKLKLSRDDAKPLLRLKGFPSFPLVERQQANEVDWWDMVCNVKKLINEKKEDGKVFWQNLAGYKRQEALRPYLSSEEDRKKGKKFARYQLGDLLLHLEKKHGEDWGKVYDEAWERIDKKVEGLSKHIKLEEERRSEDAQSKAALTDWLRAKASFVIEGLKEADKDEFCRCELKLQKWYGDLRGKPFAIEAENSILDISGFSKQYNCAFIWQKDGVKKLNLYLIINYFKGGKLRFKKIKPEAFEANRFYTVINKKSGEIVPMEVNFNFDDPNLIILPLAFGKRQGREFIWNDLLSLETGSLKLANGRVIEKTLYNRRTRQDEPALFVALTFERREVLDSSNIKPMNLIGVDRGENIPAVIALTDPEGCPLSRFKDSLGNPTHILRIGESYKEKQRTIQAKKEVEQRRAGGYSRKYASKAKNLADDMVRNTARDLLYYAVTQDAMLIFENLSRGFGRQGKRTFMAERQYTRMEDWLTAKLAYEGLPSKTYLSKTLAQYTSKTCSNCGFTITSADYDRVLEKLKKTATGWMTTINGKELKVEGQITYYNRYKRQNVVKDLSVELDRLSEESVNNDISSWTKGRSGEALSLLKKRFSHRPVQEKFVCLNCGFETHADEQAALNIARSWLFLRSQEYKKYQTNKTTGNTDKRAFVETWQSFYRKKLKEVWKPAV

SEQ ID NO: 40132 - protein, 979 aa, synthetic construct
  REGION 1..979: note = engineered CasX variant
QEIKRINKIRRRLVKDSNTKKAGKTGPMKTLLVRVMTPDLRERLENLRKKPENIPQPISNTSRANLNKLLTDYTEMKKAILHVYWEEFQKDPVGLMSRVAQPASKKIDQNKLKPEMDEKGNLTTAGFACSQCGQPLFVYKLEQVSEKGKAYTNYFGRCNVAEHEKLILLAQLKPEKDSDEAVTYSLGKFGQRALDFYSIHVTKESTHPVKPLAQIAGNRYASGPVGKALRDACMGTIASFLSKYQDIIIEHQKVVKGNQKRLESLRELAGKENLEYPSVTLPPQPHTKEGVDAYNEVIARVRMWVNLNLWQKLKLSRDDAKPLLRLKGFPSFPLVERQQANEVDWWDMVCNVKKLINEKKEDGKVFWQNLAGYKRQEALRPYLSSEEDRKKGKKFARYQLGDLLLHLEKKHGEDWGKVYDEAWERIDKKVEGLSKHIKLEEERRSEDAQSKAALTDWLRAKASFVIEGLKEADKDEFCRCELKLQKWYGDLRGKPFAIEAENSILDISGFSKQYNCAFIWQKDGVKKLNLYLIINYFKGGKLRFKKIKPEAFEANRFYTVINKKSGEIVPMEVNFNFDDPNLIILPLAFGKRQGREFIWNDLLSLETGSLKLANGRVIEKTLYNRRTRQDEPALFVALTFERREVLDSSNIKPMNLIGVDRGENIPAVIALTDPEGCPLSRFKDSLGNPTHILRIGESYKEKQRTIQAKKEVEQRRAGGYSRKYASKAKNLADDMVRNTARDLLYYAVTQDAMLIFENLSRGFGRQGKRTFMAERQYTRMEDWLTAKLAYEGLASKTYLSKTLAQYTSKTCSNCGFTITSADYDRVLEKLKKTATGWMTTINGKELKVEGQITYYNRYKRQNVVKDLSVELDRLSEESVNNDISSWTKGRSGEALSLLKKRFSHRPVQEKFVCLNCGFETHADEQAALNIARSWLFLRSQEYKKYQTNKTTGNTDKRAFVETWQSFYRKKLKEVWKPAV

SEQ ID NO: 40133 - protein, 979 aa, synthetic construct
  REGION 1..979: note = engineered CasX variant
QEIKRINKIRRRLVKDSNTKKAGKTGPMKTLLVRVMTPDLRERLENLRKKPENIPQPISNTSRANLNKLLTDYTEMKKAILHVYWEEFQKDPVGLMSRVAQPASKKIDQNKLKPEMDEKGNLTTAGFACSQCGQPLFVYKLEQVSEKGKAYTNYFGRCNVAEHEKLILLAQLKPEKDSDEAVTYSLGKFGQRALDFYSIHVTKESTHPVKPLAQIAGNRYASGPVGKALRDACMGTIASFLSKYQDIIIEHQKVVKGNQKRLESLRELAGKENLEYPSVTLPPQPHTKEGVDAYNEVIARVRMWVNLNLWQKLKLSRDDAKPLLRLKGFPSFPLVERQQANEVDWWDMVCNVKKLINEKKEDGKVFWQNLAGYKRQEALRPYLSSEEDRKKGKKFARYQLGDLLLHLEKKHGEDWGKVYDEAWERIDKKVEGLSKHIKLEEERRSEDAQSKAALTDWLRAKASFVIEGLKEADKDEFCRCELKLQKWYGDLRGKPFAIEAENSILDISGFSKQYNCAFIWQKDGVKKLNLYLIINYFKGGKLRFKKIKPEAFEANRFYTVINKKSGEIVPMEVNFNFDDPNLIILPLAFGKRQGREFIWNDLLSLETGSLKLANGRVIEKTLYNRRTRQDEPALFVALTFERREVLDSSNIKPMNLIGVDRGENIPAVIALTDPEGCPLSRFKDSLGNPTHILRIGESYKEKQRTIQAKKEVEQRRAGGYSRKYASKAKNLADDMVRNTARDLLYYAVTQDAMLIFENLSRGFGRQGKRTFMAERQYTRMEDWLTAKLAYEGLPSKVYLSKTLAQYTSKTCSNCGFTITSADYDRVLEKLKKTATGWMTTINGKELKVEGQITYYNRYKRQNVVKDLSVELDRLSEESVNNDISSWTKGRSGEALSLLKKRFSHRPVQEKFVCLNCGFETHADEQAALNIARSWLFLRSQEYKKYQTNKTTGNTDKRAFVETWQSFYRKKLKEVWKPAV

SEQ ID NO: 40134 - protein, 980 aa, synthetic construct
  REGION 1..980: note = engineered CasX variant
QEIKRINKIRRRLVKDSNTKKAGKTGPMKTLLVRVMTPDLRERLENLRKKPENIPQPISNTSRANLNKLLTDYTEMKKAILHVYWEEFQKDPVGLMSRVAQPASKKIDQNKLKPEMDEKGNLTTAGFACSQCGQPLFVYKLEQVSEKGKAYTNYFGRCNVAEHEKLILLAQLKPEKDSDEAVTYSLGKFGQRALDFYSIHVTKESTHPVKPLAQIAGNRYASGPVGKALRDACMGTIASFLSKYQDIIIEHQKVVKGNQKRLESLRELAGKENLEYPSVTLPPQPHTKEGVDAYNEVIARVRMWVNLNLWQKLKLSRDDAKPLLRLKGFPSFPLVERQQANEVDWWDMVCNVKKLINEKKEDGKVFWQNLAGYKRQEALRPYLSSEEDRKKGKKFARYQLGDLLLHLEKKHGEDWGKVYDEAWERIDKKVEGLSKHIKLEEERRSEDAQSKAALTDWLRAKASFVIEGLKEADKDEFCRCELKLQKWYGDLRGKPFAIEAENSILDISGFSKQYNCAFIWQKDGVKKLNLYLIINYFKGGKLRFKKIKPEAFEANRFYTVINKKSGEIVPMEVNFNFDDPNLIILPLAFGKRQGREFIWNDLLSLETGSLKLANGRVIEKTLYNRRTRQDEPALFVALTFERREVLDSSNIKPMNLIGVDRGENIPAVIALTDPEGCPLSRFKDSLGNPTHILRIGESYKEKQRTIQAKKEVEQRRAGGYSRKYASKAKNLADDMVRNTARDLLYYAVTQDAMLIFENLSRGFGRQGKRTFMAERQYTRMEDWLTAKLAYEGPLPSKTYLSKTLAQYTSKTCSNCGFTITSADYDRVLEKLKKTATGWMTTINGKELKVEGQITYYNRYKRQNVVKDLSVELDRLSEESVNNDISSWTKGRSGEALSLLKKRFSHRPVQEKFVCLNCGFETHADEQAALNIARSWLFLRSQEYKKYQTNKTTGNTDKRAFVETWQSFYRKKLKEVWKPAV

SEQ ID NO: 40135 - protein, 980 aa, synthetic construct
  REGION 1..980: note = engineered CasX variant
QEIKRINKIRRRLVKDSNTKKAGKTGPMKTLLVRVMTPDLRERLENLRKKPENIPQPISNTSRANLNKLLTDYTEMKKAILHVYWEEFQKDPVGLMSRVAQPASKKIDQNKLKPEMDEKGNLTTAGFACSQCGQPLFVYKLEQVSEKGKAYTNYFGRCNVAEHEKLILLAQLKPEKDSDEAVTYSLGKFGQRALDFYSIHVTKESTHPVKPLAQIAGNRYASGPVGKALRDACMGTIASFLSKYQDIIIEHQKVVKGNQKRLESLRELAGKENLEYPSVTLPPQPHTKEGVDAYNEVIARVRMWVNLNLWQKLKLSRDDAKPLLRLKGFPSFPLVERQQANEVDWWDMVCNVKKLINEKKEDGKVFWQNLAGYKRQEALRPYLSSEEDVRKKGKKFARYQLGDLLLHLEKKHGEDWGKVYDEAWERIDKKVEGLSKHIKLEEERRSEDAQSKAALTDWLRAKASFVIEGLKEADKDEFCRCELKLQKWYGDLRGKPFAIEAENSILDISGFSKQYNCAFIWQKDGVKKLNLYLIINYFKGGKLRFKKIKPEAFEANRFYTVINKKSGEIVPMEVNFNFDDPNLIILPLAFGKRQGREFIWNDLLSLETGSLKLANGRVIEKTLYNRRTRQDEPALFVALTFERREVLDSSNIKPMNLIGVDRGENIPAVIALTDPEGCPLSRFKDSLGNPTHILRIGESYKEKQRTIQAKKEVEQRRAGGYSRKYASKAKNLADDMVRNTARDLLYYAVTQDAMLIFENLSRGFGRQGKRTFMAERQYTRMEDWLTAKLAYEGLPSKTYLSKTLAQYTSKTCSNCGFTITSADYDRVLEKLKKTATGWMTTINGKELKVEGQITYYNRYKRQNVVKDLSVELDRLSEESVNNDISSWTKGRSGEALSLLKKRFSHRPVQEKFVCLNCGFETHADEQAALNIARSWLFLRSQEYKKYQTNKTTGNTDKRAFVETWQSFYRKKLKEVWKPAV

SEQ ID NO: 40136 - protein, 979 aa, synthetic construct
  REGION 1..979: note = engineered CasX variant
QEIKRINKIRRRLVKDSNTKKAGKTGPMKTLLVRVMTPDLRERLENLRKKPENIPQPISNTSRANLNKLLTDYTEMKKAILHVYWEEFQKDPVGLMSRVAQPASKKIDQNKLKPEMDEKGNLTTAGFACSQCGQPLFVYKLEQVSEKGKAYTNYFGRCNVAEHEKLILLAQLKPEKDSDEAVTYSLGKFGQRALDFYSIHVTKESTHPVKPLAQIAGNRYASGPVGKALRDACMGTIASFLSKYQDIIIEHQKVVKGNQKRLESLRELAGKENLEYPSVTLPPQPHTKEGVDAYNEVIARVRMWVNLNLWQKLKLSRDDAKPLLRLKGFPSFPLVERQQANEVDWWDMVCNVKKLINEKKEDGKVFWQNLAGYKRQEALRPYLSSEEDRKKGKKFARYQLGDLLLHLEKKHGEDWGKVYDEAWERIDKKVEGLSKHIKLEEERRSEDAQSKAALTDWLRAKASFVIEGLKEADKDEFCRCELKLQKWYGDLRGKPFAIEAENSILDISGFSKQYNCAFIWQKDGVKKLNLYLIINYFKGGKLRFKKIKPEAFEANRFYTVINKKSGEIVPMEVNFNFDDPNLIILPLAFGKRQGREFIWNDLLSLETGSLKLANGRVIEKTLYNRRTRQDEPALFVALTFERREVLDSSNIKPMNLIGVDRGENIPAVIALTDPEGCPLSRFKDSLGNPTHILRIGESYKEKQRTIQAKKEVEQRRAGGYSRKYASKAKNLADDMVRNTARDLLYYAVTQDAMLIFENLSRGFGRQGKRTFMAERQYTRMEDWLTAKLAYEGLPSKTYLSKTLAQYTSKTCSNCGFTITSADYDRMLEKLKKTATGWMTTINGKELKVEGQITYYNRYKRQNVVKDLSVELDRLSEESVNNDISSWTKGRSGEALSLLKKRFSHRPVQEKFVCLNCGFETHADEQAALNIARSWLFLRSQEYKKYQTNKTTGNTDKRAFVETWQSFYRKKLKEVWKPAV

SEQ ID NO: 40137 - protein, 979 aa, synthetic construct
  REGION 1..979: note = engineered CasX variant
QEIKRINKIRRRLVKDSNTKKAGKTGPMKTLLVRVMTPDLRERLENLRKKPENIPQPISNTSRANLNKLLTDYTEMKKAILHVYWEEFQKDPVGLMSRVAQPASKKIDQNKLKPEMDEKGNLTTAGFACSQCGQPLFVYKLEQVSEKGKAYTNYFGRCNVAEHEKLILLAQLKPEKDSDEAVTYSLGKFGQRALDFYSIHVTKESTHPVKPLAQIAGNRYASGPVGKALRDACMGTIASFLSKYQDIIIEHQKVVKGNQKRLESLRELAGKENLEYPSVTLPPQPHTKEGVDAYNEVIARVRMWVNLNLWQKLKLSRDDAKPLLRLKGFPSFPLVERQQANEVDWWDMVCNVKKLINEKKEDGKVFWQNLAGYKRQEALRPYLSSEEDRKKGKKFARYQLGDLLLHLEKKHGEDWGKVYDEAWERIDKKVEGLSKHIKLEEERRSEDAQSKAALTDWLRAKASFVIEGLKEADKDEFCRCELKLQKWYGDLRGKPFAIEAENSILDISGFSKQYNCAFIWQKDGVKKLNLYLIINYFKGGKLRFKKIKPEAFEANRFYTVINKKSGEIVPMEVNFNFDDPNLIILPLAFGKRQGREFIWNDLLSLETGSLKLANGRVIEKTLYNRRTRQDEPALFVALTFERREVLDSSNIKPMNLIGVDRGENIPAVIALTDPEGCPLSRFKDSLGNPTHILRIGESYKEKQRTIQAKKEVEQRRAGGYSRKYASKAKNLADDMVRNTARDLLYYAVTQDAMLIFENLSRGFGRQGKRTFMAERQYTRMEDWLTAKLAYEGLPSKTYLSKTLAQYTSKTCSNCGFTITSADYDRVLEKLKKTATGWMTTINGKELKVEGQITYYNRYKRQNVVKDLSVELDRLSEESVNNDISSWTKGRQGEALSLLKKRFSHRPVQEKFVCLNCGFETHADEQAALNIARSWLFLRSQEYKKYQTNKTTGNTDKRAFVETWQSFYRKKLKEVWKPAV

SEQ ID NO: 40138 - protein, 979 aa, synthetic construct
  REGION 1..979: note = engineered CasX variant
QEIKRINKIRRRLVKDSNTKKAGKTGPMKTLLVRVMTPDLRERLENLRKKPENIPQPISNTSRANLNKLLTDYTEMKKAILHVYWEEFQKDPVGLMSRVAQPASKKIDQNKLKPEMDEKGNLTTAGFACSQCGQPLFVYKLEQVSEKGKAYTNYFGRCNVAEHEKLILLAQLKPEKDSDEAVTYSLGKFGQRALDFYSIHVTKESTHPVKPLAQIAGNRYASGPVGKALRDACMGTIASFLSKYQDIIIEHQKVVKGNQKRLESLRELAGKENLEYPSVTLPPQPHTKEGVDAYNEVIARVRMWVNLNLWQKLKLSRDDAKPLLRLKGFPSFPLVERQQANEVDWWDMVCNVKKLINEKKEDGKVFWQNLAGYKRQEALRPYLSSEEDRKKGKKFARYQLGDLLLHLEKKHGEDWGKVYDEAWERIDKKVEGLSKHIKLEEERRSEDAQSKAALTDWLRAKASFVIEGLKEADKDEFCRCELKLQKWYGDLRGKPFAIEAENSILDISGFSKQYNCAFIWQKDGVKKLNLYLIINYFKGGKLRFKKIKPEAFEANRFYTVINKKSGEIVPMEVNFNFDDPNLIILPLAFGKRQGREFIWNDLLSLETGSLKLANGRVIEKTLYNRRTRQDEPALFVALTFERREVLDSSNIKPMNLIGVDRGENIPAVIALTDPEGCPLSRFKDSLGNPTHILRIGESYKEKQRTIQAKKEVEQRRAGGYSRKYASKAKNLADDMVRNTARDLLYYAVTQDAMLIFENLSRGFGRQGKRTFMAERQYTRMEDWLTAKLAYEGLPSKTYLSKTLAQYTSKTCSNCGFTITSADYDRVLEKLKKTATGWMTTINGKELKVEGQITYYNRYKRQNVVKDLSVELDRLSEESVNNDISSWTKGRSGEALSLLKKRFSHRPVQEKFVCLNCEFETHADEQAALNIARSWLFLRSQEYKKYQTNKTTGNTDKRAFVETWQSFYRKKLKEVWKPAV

SEQ ID NO: 40139 - protein, 980 aa, synthetic construct
  REGION 1..980: note = engineered CasX variant
QEIKRINKIRRRLVKDSNTKKAGKTGPMKTLLVRVMTPDLRERLENLRKKPENIPQPISNTSRANLNKLLTDYTEMKKAILHVYWEEFQKDPVGLMSRVAQPASKKIDQNKLKPEMDEKGNLTTAGFACSQCGQPLFVYKLEQVSEKGKAYTNYFGRCNVAEHEKLILLAQLKPEKDSDEAVTYSLGKFGQRALDFYSIHVTKESTHPVKPLAQIAGNRYASGPVGKALRDACMGTIASFLSKYQDIIIEHQKVVKGNQKRLESLRELAGKENLEYPSVTLPPQPHTKEGVDAYNEVIARVRMWVNLNLWQKLKLSRDDAKPLLRLKGFPSFPLVERQQANEVDWWDMVCNVKKLINEKKEDGKVFWQNLAGYKRQEALRPYLSSEEDRKKGKKFARYQLGDLLLHLEKKHGEDWGKVYDEAWERIDKKVEGLSKHIKLEEERRSEDAQSKAALTDWLRAKASFVIEGLKEADKDEFCRCELKLQKWYGDLRGKPFAIEAENSILDISGFSKQYNCAFIWQKDGVKKLNLYLIINYFKGGKLRFKKIKPEAFEANRFYTVINKKSGEIVPMEVNFNFDDPNLIILPLAFGKRQGREFIWNDLLSLETGSLKLANGRVIEKTLYNRRTRQDEPALFVALTFERREVLDSSNIKPMNLIGVDRGENIPAVIALTDPEGCPLSRFKDSLGNPTHILRIGESYKEKQRTIQAKKEVEQRRAGGYSRKYASKAKNLADDMVRNTARDLLYYAVTQDAMLIFENLSRGFGRQGKRTFMAERQYTRMEDWLTAKLAYEGLPSKTYLSKTLAQYTSKTCSNCGFTITSADYDRVLEKLKKTATGWMTTINGKELKVEGQITYYNRYKRQNVVKDLSVELDRLSEESVNNDISSWTKGRSGEALSLLKKRFSHRPVQEKFVCLNCGFETHADEQAALNIARSWLFLRSQEYKKYQTNKTSTGNTDKRAFVETWQSFYRKKLKEVWKPAV

SEQ ID NO: 40140 - protein, 980 aa, synthetic construct
  REGION 1..980: note = engineered CasX variant
QEIKRINKIRRRLVKDSNTKKAGKTGPMKTLLVRVMTPDLRERLENLRKKPENIPQPISNTSRANLNKLLTDYTEMKKAILHVYWEEFQKDPVGLMSRVAQPASKKIDQNKLKPEMDEKGNLTTAGFACSQCGQPLFVYKLEQVSEKGKAYTNYFGRCNVAEHEKLILLAQLKPEKDSDEAVTYSLGKFGQRALDFYSIHVTKESTHPVKPLAQIAGNRYASGPVGKALRDACMGTIASFLSKYQDIIIEHQKVVKGNQKRLESLRELAGKENLEYPSVTLPPQPHTKEGVDAYNEVIARVRMWVNLNLWQKLKLSRDDAKPLLRLKGFPSFPLVERQQANEVDWWDMVCNVKKLINEKKEDGKVFWQNLAGYKRQEALRPYLSSEEDRKKGKKFARYQLGDLLLHLEKKHGEDWGKVYDEAWERIDKKVEGLSKHIKLEEERRSEDAQSKAALTDWLRAKASFVIEGLKEADKDEFCRCELKLQKWYGDLRGKPFAIEAENSILDISGFSKQYNCAFIWQKDGVKKLNLYLIINYFKGGKLRFKKIKPEAFEANRFYTVINKKSGEIVPMEVNFNFDDPNLIILPLAFGKRQGREFIWNDLLSLETGSLKLANGRVIEKTLYNRRTRQDEPALFVALTFERREVLDSSNIKPMNLIGVDRGENIPAVIALTDPEGCPLSRFKDSLGNPTHILRIGESYKEKQRTIQAKKEVEQRRAGGYSRKYASKAKNLADDMVRNTARDLLYYAVTQDAMLIFENLSRGFGRQGKRTFMAERQYTRMEDWLTAKLAYEGLPSKTYLSKTLAQYTSKTCSNCGFTITSADYDRVLEKLKKTATGWMTTINGKELKVEGQITYYNRYKRQNVVKDLSVELDRLSEESVNNDISSWTKGRSGEALSLLKKRFSHRPVQEKFVCLNCGFETHADEQAALNIARSWLFLRSQEYKKYQTNKTTGKNTDKRAFVETWQSFYRKKLKEVWKPAV

SEQ ID NO: 40141 - protein, 979 aa, synthetic construct
  REGION 1..979: note = engineered CasX variant
QEIKRINKIRRRLVKDSNTKKAGKTGPMKTLLVRVMTPDLRERLENLRKKPENIPQPISNTSRANLNKLLTDYTEMKKAILHVYWEEFQKDPVGLMSRVAQPASKKIDQNKLKPEMDEKGNLTTAGFACSQCGQPLFVYKLEQVSEKGKAYTNYFGRCNVAEHEKLILLAQLKPEKDSDEAVTYSLGKFGQRALDFYSIHVTKESTHPVKPLAQIAGNRYASGPVGKALRDACMGTIASFLSKYQDIIIEHQKVVKGNQKRLESLRELAGKENLEYPSVTLPPQPHTKEGVDAYNEVIARVRMWVNLNLWQKLKLSRDDAKPLLRLKKFPSFPLVERQQANEVDWWDMVCNVKKLINEKKEDGKVFWQNLAGYKRQEALRPYLSSEEDRKKGKKFARYQLGDLLLHLEKKHGEDWGKVYDEAWERIDKKVEGLSKHIKLEEERRSEDAQSKAALTDWLRAKASFVIEGLKEADKDEFCRCELKLQKWYGDLRGKPFAIEAENSILDISGFSKQYNCAFIWQKDGVKKLNLYLIINYFKGGKLRFKKIKPEAFEANRFYTVINKKSGEIVPMEVNFNFDDPNLIILPLAFGKRQGREFIWNDLLSLETGSLKLANGRVIEKTLYNRRTRQDEPALFVALTFERREVLDSSNIKPMNLIGVDRGENIPAVIALTDPEGCPLSRFKDSLGNPTHILRIGESYKEKQRTIQAKKEVEQRRAGGYSRKYASKAKNLADDMVRNTARDLLYYAVTQDAMLIFENLSRGFGRQGKRTFMAERQYTRMEDWLTAKLAYEGLPSKTYLSKTLAQYTSKTCSNCGFTITSADYDRVLEKLKKTATGWMTTINGKELKVEGQITYYNRYKRQNVVKDLSVELDRLSEESVNNDISSWTKGRSGEALSLLKKRFSHRPVQEKFVCLNCGFETHADEQAALNIARSWLFLRSQEYKKYQTNKTTGNTDKRAFVETWQSFYRKKLKEVWKPAV

SEQ ID NO: 40142 - protein, 979 aa, synthetic construct
  REGION 1..979: note = engineered CasX variant
QEIKRINKIRRRLVKDSNTKKAGKTGPMKTLLVRVMTPDLRERLENLRKKPENIPQPISNTSRANLNKLLTDYTEMKKAILHVYWEEFQKDPVGLMSRVAQPASKKIDQNKLKPEMDEKGNLTTAGFACSQCGQPLFVYKLEQVSEKGKAYTNYFGRCNVAEHEKLILLAQLKPEKDSDEAVTYSLGKFGQRALDFYSIHVTKESTHPVKPLAQIAGNRYASGPVGKALRDACMGTIASFLSKYQDIIIEHQKVVKGNQKRLESLRELAGKENLEYPSVTLPPQPHTKEGVDAYNEVIARVRMWVNLNLWQKLKLSRDDAKPLLRLKGFPSFPLVERQQANEVDWWDMVCNVKKLINEKKEDGKVFWQNLAGYKRQEALRPYLSSEEDRKKGKKFARYQLGDLLLHLEKKHGEDWGKVYDEAWERIDKKVEGLSKHIKLEEERRSEDAQSKAALTDWLRAKASFVIEGLKEADKDEFCRCELKLQKWYGDLRGKPFAIEAENSILDISGFSKQYNCAFIWQKDGVKKLNLYLIINYFKGGKLRFKKIKPEAFEANRFYTVINKKSGEIVPMEVNFNFDDPNLIILPLAFGKRQGREFIWNDLLSLETGSLKLANGRVIEKTLYNRRTRQDEPALFVALTFERREVLDSSNIKPMNLIGVDRGENIPAVIALTDPEGCPLSRFKDSLGNPTHILRIGERYKEKQRTIQAKKEVEQRRAGGYSRKYASKAKNLADDMVRNTARDLLYYAVTQDAMLIFENLSRGFGRQGKRTFMAERQYTRMEDWLTAKLAYEGLPSKTYLSKTLAQYTSKTCSNCGFTITSADYDRVLEKLKKTATGWMTTINGKELKVEGQITYYNRYKRQNVVKDLSVELDRLSEESVNNDISSWTKGRSGEALSLLKKRFSHRPVQEKFVCLNCGFETHADEQAALNIARSWLFLRSQEYKKYQTNKTTGNTDKRAFVETWQSFYRKKLKEVWKPAV

SEQ ID NO: 40143 - protein, 979 aa, synthetic construct
  REGION 1..979: note = engineered CasX variant
QEIKRINKIRRRLVKDSNTKKAGKTGPMKTLLVRVMTPDLRERLENLRKKPENIPQPISNTSRANLNKLLTDYTEMKKAILHVYWEEFQKDPVGLMSRVAQPASKKIDQNKLKPEMDEKGNLTTAGFACSQCGQPLFVYKLEQVSEKGKAYTNYFGRCNVAEHEKLILLAQLKPEKDSDEAVTYSLGKFGQRALDFYSIHVTKESTHPVKPLAQIAGNRYASGPVGKALRDACMGTIASFLSKYQDIIIEHQKVVKGNQKRLESLRELAGKENLEYPSVTLPPQPHTKEGVDAYNEVIARVRMWVNLNLWQKLKLSRDDAKPLLRLKGFPSFPLVERQQANEVDWWDMVCNVKKLINEKKEDGKVFWQNLAGYKRQEALRPYLSSEEDRKKGKKFARYQLGDLLLHLEKKHGEDWGKVYDEAWERIDKKVEGLSKHIKLEEERRSEDAQSKAALTDWLRAKASFVIEGLKEADKDEFCRCELKLQKWYGDLRGKPFAIEAENSILDISGFSKQYNCAFIWQKDGVKKLNLYLIINYFKGGKLRFKKIKPEAFEANRFYTVINKKSGEIVPMEVNFNFDDPNLIILPLAFGKRQGREFIWNDLLSLETGSLQLANGRVIEKTLYNRRTRQDEPALFVALTFERREVLDSSNIKPMNLIGVDRGENIPAVIALTDPEGCPLSRFKDSLGNPTHILRIGESYKEKQRTIQAKKEVEQRRAGGYSRKYASKAKNLADDMVRNTARDLLYYAVTQDAMLIFENLSRGFGRQGKRTFMAERQYTRMEDWLTAKLAYEGLPSKTYLSKTLAQYTSKTCSNCGFTITSADYDRVLEKLKKTATGWMTTINGKELKVEGQITYYNRYKRQNVVKDLSVELDRLSEESVNNDISSWTKGRSGEALSLLKKRFSHRPVQEKFVCLNCGFETHADEQAALNIARSWLFLRSQEYKKYQTNKTTGNTDKRAFVETWQSFYRKKLKEVWKPAV

SEQ ID NO: 40144 - protein, 979 aa, synthetic construct
  REGION 1..979: note = engineered CasX variant
QEIKRINKIRRRLVKDSNTKKAGKTGPMKTLLVRVMTPDLRERLENLRKKPENIPQPISNTSRANLNKLLTDYTEMKKAILHVYWEEFQKDPVGLMSRVAQPASKKIDQNKLKPEMDEKGNLTTAGFACSQCGQPLFVYKLEQVSEKGKAYTNYFGRCNVAEHEKLILLAQLKPEKDSDEAVTYSLGKFGQRALDFYSIHVTKESTHPVKPLAQIAGNRYASGPVGKALRDACMGTIASFLSKYQDIIIEHQKVVKGNQKRLESLRELAGKENLEYPSVTLPPQPHTKEGVDAYNEVIARVRMWVNLNLWQKLKLSRDDAKPLLRLKGFPSFPLVERQANAEVDWWDMVCNVKKLINEKKEDGKVFWQNLAGYKRQEALRPYLSSEEDRKKGKKFARTQLGDLLLHLEKKHGEDWGKVYDEAWERIDKKVEGLSKHIKLEEERRSEDAQSKAALTDWLRAKASFVIEGLKEADKDEFCRCELKLQKWYGDLRGKPFAIEAENSILDISGFSKQYNCAFIWQKDGVKKLNLYLIINYFKGGKLRFKKIKPEAFEANRFYTVINKKSGEIVPMEVNFNFDDPNLIILPLAFGKRQGREFIWNDLLSLETGSLKLANGRVIEKTLYNRRTRQDEPALFVALTFERREVLDSSNIKPMNLIGVDRGENIPAVIALTDPEGCPLSRFKDSLGNPTHILRIGESYKEKQRTIQAKKEVEQRRAGGYSRKYASKAKNLADDMVRNTARDLLYYAVTQDAMLIFENLSRGFGRQGKRTFMAERQYTRMEDWLTAKLAYEGLPSKTYLSKTLAQYTSKTCSNCGFTITSADYDRVLEKLKKTATGWMTTINGKELKVEGQITYYNRYKRQNVVKDLSVELDRLSEESVNNDISSWTKGRSGEALSLLKKRFSHRPVQEKFVCLNCGFETHADEQAALNIARSWLFLRSQEYKKYQTNKTTGNTDKRAFVETWQSFYRKKLKEVWKPAV

SEQ ID NO: 40145 - protein, 980 aa, synthetic construct
  REGION 1..980: note = engineered CasX variant
QEIKRINKIRRRLVKDSNTKKAGKTGPMKTLLVRVMTPDLRERLENLRKKPENIPQPISNTSRANLNKLLTDYTEMKKAILHVYWEEFQKDPVGLMSRVAQPASKKIDQNKLKPEMDEKGNLTTAGFACSQCGQPLFVYKLEQVSEKGKAYTNYFGRCNVAEHEKLILLAQLKPEKDSDEAVTYSLGKFGQRALDFYSIHVTKESTHPVKPLAQIAGNRYASGPVGKALRDACMGTIASFLSKYQDIIIEHQKVVKGNQKRLESLRELAGKENLEYPSVTLPPQPHTKEGVDAYNEVIARVRMWVNLNLWQKLKLSRDDAKPLLRLKGFPSFPLVERQANAEVDWWDMVCNVKKLINEKKEDGKVFWQNLAGYKRQEALRPYLSSEEDRKKGKKFARYQLGDLLLHLEKKHEGEDWGKVYDEAWERIDKKVEGLSKHIKLEEERRSEDAQSKAALTDWLRAKASFVIEGLKEADKDEFCRCELKLQKWYGDLRGKPFAIEAENSILDISGFSKQYNCAFIWQKDGVKKLNLYLIINYFKGGKLRFKKIKPEAFEANRFYTVINKKSGEIVPMEVNFNFDDPNLIILPLAFGKRQGREFIWNDLLSLETGSLKLANGRVIEKTLYNRRTRQDEPALFVALTFERREVLDSSNIKPMNLIGVDRGENIPAVIALTDPEGCPLSRFKDSLGNPTHILRIGESYKEKQRTIQAKKEVEQRRAGGYSRKYASKAKNLADDMVRNTARDLLYYAVTQDAMLIFENLSRGFGRQGKRTFMAERQYTRMEDWLTAKLAYEGLPSKTYLSKTLAQYTSKTCSNCGFTITSADYDRVLEKLKKTATGWMTTINGKELKVEGQITYYNRYKRQNVVKDLSVELDRLSEESVNNDISSWTKGRSGEALSLLKKRFSHRPVQEKFVCLNCGFETHADEQAALNIARSWLFLRSQEYKKYQTNKTTGNTDKRAFVETWQSFYRKKLKEVWKPAV

SEQ ID NO: 40146 - protein, 979 aa, synthetic construct
  REGION 1..979: note = engineered CasX variant
QEIKRINKIRRRLVKDSNTKKAGKTGPMKTLLVRVMTPDLRERLENLRKKPENIPQPISNTSRANLNKLLTDYTEMKKAILHVYWEEFQKDPVGLMSRVAQPASKKIDQNKLKPEMDEKGNLTTAGFACSQCGQPLFVYKLEQVSEKGKAYTNYFGRCNVAEHEKLILLAQLKPEKDSDEAVTYSLGKFGQRALDFYSIHVTKESTHPVKPLAQIAGNRYASGPVGKALRDACMGTIASFLSKYQDIIIEHQKVVKGNQKRLESLRELAGKENLEYPSVTLPPQPHTKEGVDAYNEVIARVRMWVNLNLWQKLKLSRDDAKPLLRLKGFPSFPLVERQANAEVDWWDMVCNVKKLINEKKEDGKVFWQNLAGYKRQEALRPYLSSEEDRKKGKKFARYQLGDLLLHLEKKHGEDWGKVYDEAWERIDKKVEGLSKHIKLEEERRSEDAQSKAALTDWLRAKASFVIEGLKEADKDEFCRCDLKLQKWYGDLRGKPFAIEAENSILDISGFSKQYNCAFIWQKDGVKKLNLYLIINYFKGGKLRFKKIKPEAFEANRFYTVINKKSGEIVPMEVNFNFDDPNLIILPLAFGKRQGREFIWNDLLSLETGSLKLANGRVIEKTLYNRRTRQDEPALFVALTFERREVLDSSNIKPMNLIGVDRGENIPAVIALTDPEGCPLSRFKDSLGNPTHILRIGESYKEKQRTIQAKKEVEQRRAGGYSRKYASKAKNLADDMVRNTARDLLYYAVTQDAMLIFENLSRGFGRQGKRTFMAERQYTRMEDWLTAKLAYEGLPSKTYLSKTLAQYTSKTCSNCGFTITSADYDRVLEKLKKTATGWMTTINGKELKVEGQITYYNRYKRQNVVKDLSVELDRLSEESVNNDISSWTKGRSGEALSLLKKRFSHRPVQEKFVCLNCGFETHADEQAALNIARSWLFLRSQEYKKYQTNKTTGNTDKRAFVETWQSFYRKKLKEVWKPAV

SEQ ID NO: 40147 - protein, 979 aa, synthetic construct
  REGION 1..979: note = engineered CasX variant
QEIKRINKIRRRLVKDSNTKKAGKTGPMKTLLVRVMTPDLRERLENLRKKPENIPQPISNTSRANLNKLLTDYTEMKKAILHVYWEEFQKDPVGLMSRVAQPASKKIDQNKLKPEMDEKGNLTTAGFACSQCGQPLFVYKLEQVSEKGKAYTNYFGRCNVAEHEKLILLAQLKPEKDSDEAVTYSLGKFGQRALDFYSIHVTKESTHPVKPLAQIAGNRYASGPVGKALRDACMGTIASFLSKYQDIIIEHQKVVKGNQKRLESLRELAGKENLEYPSVTLPPQPHTKEGVDAYNEVIARVRMWVNLNLWQKLKLSRDDAKPLLRLKGFPSFPLVERQANAEVDWWDMVCNVKKLINEKKEDGKVFWQNLAGYKRQEALRPYLSSEEDRKKGKKFARYQLGDLLLHLEKKHGEDWGKVYDEAWERIDKKVEGLSKHIKLEEERRSEDAQSKAALTDWLRAKASFVIEGLKEADKDEFCRCELKLQKWYGDLRGKPFAIEAENSILDISGFSKQYNCAFIWQKDGVKKLNLYLIINYFKGGKLRFKKIKPEAFEANRFYTVINKKSGEIVPMEVNFNFDDPNLIILPLAFGKRFGREFIWNDLLSLETGSLKLANGRVIEKTLYNRRTRQDEPALFVALTFERREVLDSSNIKPMNLIGVDRGENIPAVIALTDPEGCPLSRFKDSLGNPTHILRIGESYKEKQRTIQAKKEVEQRRAGGYSRKYASKAKNLADDMVRNTARDLLYYAVTQDAMLIFENLSRGFGRQGKRTFMAERQYTRMEDWLTAKLAYEGLPSKTYLSKTLAQYTSKTCSNCGFTITSADYDRVLEKLKKTATGWMTTINGKELKVEGQITYYNRYKRQNVVKDLSVELDRLSEESVNNDISSWTKGRSGEALSLLKKRFSHRPVQEKFVCLNCGFETHADEQAALNIARSWLFLRSQEYKKYQTNKTTGNTDKRAFVETWQSFYRKKLKEVWKPAV

SEQ ID NO: 40148 - protein, 979 aa, synthetic construct
  REGION 1..979: note = engineered CasX variant
QEIKRINKIRRRLVKDSNTKKAGKTGPMKTLLVRVMTPDLRERLENLRKKPENIPQPISNTSRANLNKLLTDYTEMKKAILHVYWEEFQKDPVGLMSRVAQPASKKIDQNKLKPEMDEKGNLTTAGFACSQCGQPLFVYKLEQVSEKGKAYTNYFGRCNVAEHEKLILLAQLKPEKDSDEAVTYSLGKFGQRALDFYSIHVTKESTHPVKPLAQIAGNRYASGPVGKALRDACMGTIASFLSKYQDIIIEHQKVVKGNQKRLESLRELAGKENLEYPSVTLPPQPHTKEGVDAYNEVIARVRMWVNLNLWQKLKLSRDDAKPLLRLKGFPSFPLVERQANAEVDWWDMVCNVKKLINEKKEDGKVFWQNLAGYKRQEALRPYLSSEEDRKKGKKFARYQLGDLLLHLEKKHGEDWGKVYDEAWERIDKKVEGLSKHIKLEEERRSEDAQSKAALTDWLRAKASFVIEGLKEADKDEFCRCELKLQKWYGDLRGKPFAIEAENSILDISGFSKQYNCAFIWQKDGVKKLNLYLIINYFKGGKLRFKKIKPEAFEANRFYTVINKKSGEIVPMEVNFNFDDPNLIILPLAFGKRVGREFIWNDLLSLETGSLKLANGRVIEKTLYNRRTRQDEPALFVALTFERREVLDSSNIKPMNLIGVDRGENIPAVIALTDPEGCPLSRFKDSLGNPTHILRIGESYKEKQRTIQAKKEVEQRRAGGYSRKYASKAKNLADDMVRNTARDLLYYAVTQDAMLIFENLSRGFGRQGKRTFMAERQYTRMEDWLTAKLAYEGLPSKTYLSKTLAQYTSKTCSNCGFTITSADYDRVLEKLKKTATGWMTTINGKELKVEGQITYYNRYKRQNVVKDLSVELDRLSEESVNNDISSWTKGRSGEALSLLKKRFSHRPVQEKFVCLNCGFETHADEQAALNIARSWLFLRSQEYKKYQTNKTTGNTDKRAFVETWQSFYRKKLKEVWKPAV

SEQ ID NO: 40149 - protein, 980 aa, synthetic construct
  REGION 1..980: note = engineered CasX variant
QEIKRINKIRRRLVKDSNTKKAGKTGPMKTLLVRVMTPDLRERLENLRKKPENIPQPISNTSRANLNKLLTDYTEMKKAILHVYWEEFQKDPVGLMSRVAQPASKKIDQNKLKPEMDEKGNLTTAGFACSQCGQPLFVYKLEQVSEKGKAYTNYFGRCNVAEHEKLILLAQLKPEKDSDEAVTYSLGKFGQRALDFYSIHVTKESTHPVKPLAQIAGNRYASGPVGKALRDACMGTIASFLSKYQDIIIEHQKVVKGNQKRLESLRELAGKENLEYPSVTLPPQPHTKEGVDAYNEVIARVRMWVNLNLWQKLKLSRDDAKPLLRLKGFPSFPLVERQANAEVDWWDMVCNVKKLINEKKEDGKVFWQNLAGYKRQEALRPYLSSEEDRKKGKKFARYQLGDLLLHLEKKHGEDWGKVYDEAWERIDKKVEGLSKHIKLEEERRSEDAQSKAALTDWLRAKASFVIEGLKEADKDEFCRCELKLQKWYGDLRGKPFAIEAENSILDISGFSKQYNCAFIWQKDGVKKLNLYLIINYFKGGKLRFKKIKPEAFEANRFYTVINKKSGEIVPMEVNFNFDDPNLIILPLAFGKRQGREFIWNDLLSLETGSLKLANGRVIEKTLYNRRTRQDEPALFVALTFERREVLDSSNIKTPMNLIGVDRGENIPAVIALTDPEGCPLSRFKDSLGNPTHILRIGESYKEKQRTIQAKKEVEQRRAGGYSRKYASKAKNLADDMVRNTARDLLYYAVTQDAMLIFENLSRGFGRQGKRTFMAERQYTRMEDWLTAKLAYEGLPSKTYLSKTLAQYTSKTCSNCGFTITSADYDRVLEKLKKTATGWMTTINGKELKVEGQITYYNRYKRQNVVKDLSVELDRLSEESVNNDISSWTKGRSGEALSLLKKRFSHRPVQEKFVCLNCGFETHADEQAALNIARSWLFLRSQEYKKYQTNKTTGNTDKRAFVETWQSFYRKKLKEVWKPAV

SEQ ID NO: 40150 - protein, 980 aa, synthetic construct
  REGION 1..980: note = engineered CasX variant
QEIKRINKIRRRLVKDSNTKKAGKTGPMKTLLVRVMTPDLRERLENLRKKPENIPQPISNTSRANLNKLLTDYTEMKKAILHVYWEEFQKDPVGLMSRVAQPASKKIDQNKLKPEMDEKGNLTTAGFACSQCGQPLFVYKLEQVSEKGKAYTNYFGRCNVAEHEKLILLAQLKPEKDSDEAVTYSLGKFGQRALDFYSIHVTKESTHPVKPLAQIAGNRYASGPVGKALRDACMGTIASFLSKYQDIIIEHQKVVKGNQKRLESLRELAGKENLEYPSVTLPPQPHTKEGVDAYNEVIARVRMWVNLNLWQKLKLSRDDAKPLLRLKGFPSFPLVERQANAEVDWWDMVCNVKKLINEKKEDGKVFWQNLAGYKRQEALRPYLSSEEDRKKGKKFARYQLGDLLLHLEKKHGEDWGKVYDEAWERIDKKVEGLSKHIKLEEERRSEDAQSKAALTDWLRAKASFVIEGLKEADKDEFCRCELKLQKWYGDLRGKPFAIEAENSILDISGFSKQYNCAFIWQKDGVKKLNLYLIINYFKGGKLRFKKIKPEAFEANRFYTVINKKSGEIVPMEVNFNFDDPNLIILPLAFGKRQGREFIWNDLLSLETGSLKLANGRVIEKTLYNRRTRQDEPALFVALTFERREVLDSSNIKPMSNLIGVDRGENIPAVIALTDPEGCPLSRFKDSLGNPTHILRIGESYKEKQRTIQAKKEVEQRRAGGYSRKYASKAKNLADDMVRNTARDLLYYAVTQDAMLIFENLSRGFGRQGKRTFMAERQYTRMEDWLTAKLAYEGLPSKTYLSKTLAQYTSKTCSNCGFTITSADYDRVLEKLKKTATGWMTTINGKELKVEGQITYYNRYKRQNVVKDLSVELDRLSEESVNNDISSWTKGRSGEALSLLKKRFSHRPVQEKFVCLNCGFETHADEQAALNIARSWLFLRSQEYKKYQTNKTTGNTDKRAFVETWQSFYRKKLKEVWKPAV

SEQ ID NO: 40151 - protein, 979 aa, synthetic construct
  REGION 1..979: note = engineered CasX variant
QEIKRINKIRRRLVKDSNTKKAGKTGPMKTLLVRVMTPDLRERLENLRKKPENIPQPISNTSRANLNKLLTDYTEMKKAILHVYWEEFQKDPVGLMSRVAQPASKKIDQNKLKPEMDEKGNLTTAGFACSQCGQPLFVYKLEQVSEKGKAYTNYFGRCNVAEHEKLILLAQLKPEKDSDEAVTYSLGKFGQRALDFYSIHVTKESTHPVKPLAQIAGNRYASGPVGKALRDACMGTIASFLSKYQDIIIEHQKVVKGNQKRLESLRELAGKENLEYPSVTLPPQPHTKEGVDAYNEVIARVRMWVNLNLWQKLKLSRDDAKPLLRLKGFPSFPLVERQANAEVDWWDMVCNVKKLINEKKEDGKVFWQNLAGYKRQEALRPYLSSEEDRKKGKKFARYQLGDLLLHLEKKHGEDWGKVYDEAWERIDKKVEGLSKHIKLEEERRSEDAQSKAALTDWLRAKASFVIEGLKEADKDEFCRCELKLQKWYGDLRGKPFAIEAENSILDISGFSKQYNCAFIWQKDGVKKLNLYLIINYFKGGKLRFKKIKPEAFEANRFYTVINKKSGEIVPMEVNFNFDDPNLIILPLAFGKRQGREFIWNDLLSLETGSLKLANGRVIEKTLYNRRTRQDEPALFVALTFERREVLDSSNIKPMNLIGVDRGENIPAVIALTDPEGCPLSRFKDSLGNPTHILRIRESYKEKQRTIQAKKEVEQRRAGGYSRKYASKAKNLADDMVRNTARDLLYYAVTQDAMLIFENLSRGFGRQGKRTFMAERQYTRMEDWLTAKLAYEGLPSKTYLSKTLAQYTSKTCSNCGFTITSADYDRVLEKLKKTATGWMTTINGKELKVEGQITYYNRYKRQNVVKDLSVELDRLSEESVNNDISSWTKGRSGEALSLLKKRFSHRPVQEKFVCLNCGFETHADEQAALNIARSWLFLRSQEYKKYQTNKTTGNTDKRAFVETWQSFYRKKLKEVWKPAV

SEQ ID NO: 40152 - protein, 979 aa, synthetic construct
  REGION 1..979: note = engineered CasX variant
QEIKRINKIRRRLVKDSNTKKAGKTGPMKTLLVRVMTPDLRERLENLRKKPENIPQPISNTSRANLNKLLTDYTEMKKAILHVYWEEFQKDPVGLMSRVAQPASKKIDQNKLKPEMDEKGNLTTAGFACSQCGQPLFVYKLEQVSEKGKAYTNYFGRCNVAEHEKLILLAQLKPEKDSDEAVTYSLGKFGQRALDFYSIHVTKESTHPVKPLAQIAGNRYASGPVGKALRDACMGTIASFLSKYQDIIIEHQKVVKGNQKRLESLRELAGKENLEYPSVTLPPQPHTKEGVDAYNEVIARVRMWVNLNLWQKLKLSRDDAKPLLRLKGFPSFPLVERQANAEVDWWDMVCNVKKLINEKKEDGKVFWQNLAGYKRQEALRPYLSSEEDRKKGKKFARYQLGDLLLHLEKKHGEDWGKVYDEAWERIDKKVEGLSKHIKLEEERRSEDAQSKAALTDWLRAKASFVIEGLKEADKDEFCRCELKLQKWYGDLRGKPFAIEAENSILDISGFSKQYNCAFIWQKDGVKKLNLYLIINYFKGGKLRFKKIKPEAFEANRFYTVINKKSGEIVPMEVNFNFDDPNLIILPLAFGKRQGREFIWNDLLSLETGSLKLANGRVIEKTLYNRRTRQDEPALFVALTFERREVLDSSNIKPMNLIGVDRGENIPAVIALTDPEGCPLSRFKDSLGNPTHILRIGESYKEKQRTIQAKKEVEQRRAGGYSRKYASKAKNLADDMVRNTARDLLYYAVTQDAMLIFENLSRGFGRQGKRTFSAERQYTRMEDWLTAKLAYEGLPSKTYLSKTLAQYTSKTCSNCGFTITSADYDRVLEKLKKTATGWMTTINGKELKVEGQITYYNRYKRQNVVKDLSVELDRLSEESVNNDISSWTKGRSGEALSLLKKRFSHRPVQEKFVCLNCGFETHADEQAALNIARSWLFLRSQEYKKYQTNKTTGNTDKRAFVETWQSFYRKKLKEVWKPAV

SEQ ID NO: 40153 - protein, 979 aa, synthetic construct
  REGION 1..979: note = engineered CasX variant
QEIKRINKIRRRLVKDSNTKKAGKTGPMKTLLVRVMTPDLRERLENLRKKPENIPQPISNTSRANLNKLLTDYTEMKKAILHVYWEEFQKDPVGLMSRVAQPASKKIDQNKLKPEMDEKGNLTTAGFACSQCGQPLFVYKLEQVSEKGKAYTNYFGRCNVAEHEKLILLAQLKPEKDSDEAVTYSLGKFGQRALDFYSIHVTKESTHPVKPLAQIAGNRYASGPVGKALRDACMGTIASFLSKYQDIIIEHQKVVKGNQKRLESLRELAGKENLEYPSVTLPPQPHTKEGVDAYNEVIARVRMWVNLNLWQKLKLSRDDAKPLLRLKGFPSFPLVERQANAEVDWWDMVCNVKKLINEKKEDGKVFWQNLAGYKRQEALRPYLSSEEDRKKGKKFARYQLGDLLLHLEKKHGEDWGKVYDEAWERIDKKVEGLSKHIKLEEERRSEDAQSKAALTDWLRAKASFVIEGLKEADKDEFCRCELKLQKWYGDLRGKPFAIEAENSILDISGFSKQYNCAFIWQKDGVKKLNLYLIINYFKGGKLRFKKIKPEAFEANRFYTVINKKSGEIVPMEVNFNFDDPNLIILPLAFGKRQGREFIWNDLLSLETGSLKLANGRVIEKTLYNRRTRQDEPALFVALTFERREVLDSSNIKPMNLIGVDRGENIPAVIALTDPEGCPLSRFKDSLGNPTHILRIGESYKEKQRTIQAKKEVEQRRAGGYSRKYASKAKNLADDMVRNTARDLLYYAVTQDAMLIFENLSRGFGRQGKRTFMAERQYTRMEDWLTAKLAYEGLPSKTYLSKTLAQYTSKTCSNCGFTITSADYDRVLEKLKKTATGWMTTINGKELKVEGQITYYNRYKRQNVVKDLSVELDRLSEESVNNDISSWDKGRSGEALSLLKKRFSHRPVQEKFVCLNCGFETHADEQAALNIARSWLFLRSQEYKKYQTNKTTGNTDKRAFVETWQSFYRKKLKEVWKPAV

SEQ ID NO: 40154 - protein, 979 aa, synthetic construct
  REGION 1..979: note = engineered CasX variant
QEIKRINKIRRRLVKDSNTKKAGKTGPMKTLLVRVMTPDLRERLENLRKKPENIPQPISNTSRANLNKLLTDYTEMKKAILHVYWEEFQVDPVGLMSRVAQPASKKIDQNKLKPEMDEKGNLTTAGFACSQCGQPLFVYKLEQVSEKGKAYTNYFGRCNVAEHEKLILLAQLKPEKDSDEAVTYSLGKFGQRALDFYSIHVTKESTHPVKPLAQIAGNRYASGPVGKALRDACMGTIASFLSKYQDIIIEHQKVVKGNQKRLESLRELAGKENLEYPSVTLPPQPHTKEGVDAYNEVIARVRMWVNLNLWQKLKLSRDDAKPLLRLKGFPSFPLVERQANAEVDWWDMVCNVKKLINEKKEDGKVFWQNLAGYKRQEALRPYLSSEEDRKKGKKFARYQLGDLLLHLEKKHGEDWGKVYDEAWERIDKKVEGLSKHIKLEEERRSEDAQSKAALTDWLRAKASFVIEGLKEADKDEFCRCELKLQKWYGDLRGKPFAIEAENSILDISGFSKQYNCAFIWQKDGVKKLNLYLIINYFKGGKLRFKKIKPEAFEANRFYTVINKKSGEIVPMEVNFNFDDPNLIILPLAFGKRQGREFIWNDLLSLETGSLKLANGRVIEKTLYNRRTRQDEPALFVALTFERREVLDSSNIKPMNLIGVDRGENIPAVIALTDPEGCPLSRFKDSLGNPTHILRIGESYKEKQRTIQAKKEVEQRRAGGYSRKYASKAKNLADDMVRNTARDLLYYAVTQDAMLIFENLSRGFGRQGKRTFMAERQYTRMEDWLTAKLAYEGLPSKTYLSKTLAQYTSKTCSNCGFTITSADYDRVLEKLKKTATGWMTTINGKELKVEGQITYYNRYKRQNVVKDLSVELDRLSEESVNNDISSWTKGRSGEALSLLKKRFSHRPVQEKFVCLNCGFETHADEQAALNIARSWLFLRSQEYKKYQTNKTTGNTDKRAFVETWQSFYRKKLKEVWKPAV

SEQ ID NO: 40155 - protein, 979 aa, synthetic construct
  REGION 1..979: note = engineered CasX variant
QEIKRLNKIRRRLVKDSNTKKAGKTGPMKTLLVRVMTPDLRERLENLRKKPENIPQPISNTSRANLNKLLTDYTEMKKAILHVYWEEFQKDPVGLMSRVAQPASKKIDQNKLKPEMDEKGNLTTAGFACSQCGQPLFVYKLEQVSEKGKAYTNYFGRCNVAEHEKLILLAQLKPEKDSDEAVTYSLGKFGQRALDFYSIHVTKESTHPVKPLAQIAGNRYASGPVGKALRDACMGTIASFLSKYQDIIIEHQKVVKGNQKRLESLRELAGKENLEYPSVTLPPQPHTKEGVDAYNEVIARVRMWVNLNLWQKLKLSRDDAKPLLRLKGFPSFPLVERQANAEVDWWDMVCNVKKLINEKKEDGKVFWQNLAGYKRQEALRPYLSSEEDRKKGKKFARYQLGDLLLHLEKKHGEDWGKVYDEAWERIDKKVEGLSKHIKLEEERRSEDAQSKAALTDWLRAKASFVIEGLKEADKDEFCRCELKLQKWYGDLRGKPFAIEAENSILDISGFSKQYNCAFIWQKDGVKKLNLYLIINYFKGGKLRFKKIKPEAFEANRFYTVINKKSGEIVPMEVNFNFDDPNLIILPLAFGKRQGREFIWNDLLSLETGSLKLANGRVIEKTLYNRRTRQDEPALFVALTFERREVLDSSNIKPMNLIGVDRGENIPAVIALTDPEGCPLSRFKDSLGNPTHILRIGESYKEKQRTIQAKKEVEQRRAGGYSRKYASKAKNLADDMVRNTARDLLYYAVTQDAMLIFENLSRGFGRQGKRTFMAERQYTRMEDWLTAKLAYEGLPSKTYLSKTLAQYTSKTCSNCGFTITSADYDRVLEKLKKTATGWMTTINGKELKVEGQITYYNRYKRQNVVKDLSVELDRLSEESVNNDISSWTKGRSGEALSLLKKRFSHRPVQEKFVCLNCGFETHADEQAALNIARSWLFLRSQEYKKYQTNKTTGNTDKRAFVETWQSFYRKKLKEVWKPAV

SEQ ID NO: 40156 - protein, 979 aa, synthetic construct
  REGION 1..979: note = engineered CasX variant
QEIKRINKIRRRLVKDSNTKKAGKTGPMKTLLVRVMTPDLRERLENLRKKPENIPQPISNTSRANLNKLLTDYTEMKKAILHVYWEEFQKDPVGLMSRVAQPASKKIDQNKLKPEMDEKGNLTTAGFACSQCGQPLFVYKLEQVSEKGKAYTNYVGRCNVAEHEKLILLAQLKPEKDSDEAVTYSLGKFGQRALDFYSIHVTKESTHPVKPLAQIAGNRYASGPVGKALRDACMGTIASFLSKYQDIIIEHQKVVKGNQKRLESLRELAGKENLEYPSVTLPPQPHTKEGVDAYNEVIARVRMWVNLNLWQKLKLSRDDAKPLLRLKGFPSFPLVERQANAEVDWWDMVCNVKKLINEKKEDGKVFWQNLAGYKRQEALRPYLSSEEDRKKGKKFARYQLGDLLLHLEKKHGEDWGKVYDEAWERIDKKVEGLSKHIKLEEERRSEDAQSKAALTDWLRAKASFVIEGLKEADKDEFCRCELKLQKWYGDLRGKPFAIEAENSILDISGFSKQYNCAFIWQKDGVKKLNLYLIINYFKGGKLRFKKIKPEAFEANRFYTVINKKSGEIVPMEVNFNFDDPNLIILPLAFGKRQGREFIWNDLLSLETGSLKLANGRVIEKTLYNRRTRQDEPALFVALTFERREVLDSSNIKPMNLIGVDRGENIPAVIALTDPEGCPLSRFKDSLGNPTHILRIGESYKEKQRTIQAKKEVEQRRAGGYSRKYASKAKNLADDMVRNTARDLLYYAVTQDAMLIFENLSRGFGRQGKRTFMAERQYTRMEDWLTAKLAYEGLPSKTYLSKTLAQYTSKTCSNCGFTITSADYDRVLEKLKKTATGWMTTINGKELKVEGQITYYNRYKRQNVVKDLSVELDRLSEESVNNDISSWTKGRSGEALSLLKKRFSHRPVQEKFVCLNCGFETHADEQAALNIARSWLFLRSQEYKKYQTNKTTGNTDKRAFVETWQSFYRKKLKEVWKPAV

SEQ ID NO: 40157 - protein, 979 aa, synthetic construct
  REGION 1..979: note = engineered CasX variant
QEIKRINKIRRRLVKDSNTKKAGKTGPMKTLLVRVMTPDLRERLENLRKKPENIPQPISNTSRANLNKLLTDYTEMKKAILHVYWEEFQKDPVGLMSRVAQPASKKIDQNKLKPEMDEKGNLTTAGFACSQCGQPLFVYKLEQVSEKGKAYTNYFGRCNVAEHEKLILLAQLKPEKDSDEAVTYSLGKFGQRALDFYSIHVTKESTHPVKPLAQIAGNRYASGPVGKALRDACMGTIASFLSKYQDIIIEHQKVVKGNQKRLESLRELAGKENLEYPSVTLPPQPHTKEGVDAYNEVIARVRMWVNLNLWQKLKLSRDDAKPLLRLKGFPSFPLVERQANAEVDWWDMVCNVKKLINEKKEDGKVFWQNLAGYKRQEALRPYLSSEEDRKKGKKFARYQLGDLLLHLEKKHGEDWGKVYDEAWERIDKKVEGLSKHIKLEEERRSEDAQSKAALTDWLRAKASFVIEGLKEADKDEFCRCELKLQKWYGDLRGKPFAIEAENSILDISGFSKQYNCAFIWQKDGVKKLNLYLIINYFKGGKLRFKKIKPEAFEANRFYTVINKKSGEIVPMEVNFNFDDPNLIILPLAFGKRQGREFIWNDLLSLETGSLKLANGRVIEKTLYNRRTRQDEPALFVALTFERREVLDSSNIKPMNLIGVDRGENIPAVIALTDPEGCPLSRFKDSLGNPTHILRIGESYKEKQRTIQAKKEVEQRRAGGYSRKYASKAKNLADDMVRNTARDLLYYAVTQDAMLIFENLSRGFGRQGKRTFMAERQYTRMEDWLTAKLAYEGLASKTYLSKTLAQYTSKTCSNCGFTITSADYDRVLEKLKKTATGWMTTINGKELKVEGQITYYNRYKRQNVVKDLSVELDRLSEESVNNDISSWTKGRSGEALSLLKKRFSHRPVQEKFVCLNCGFETHADEQAALNIARSWLFLRSQEYKKYQTNKTTGNTDKRAFVETWQSFYRKKLKEVWKPAV

SEQ ID NO: 40158 - protein, 979 aa, synthetic construct
  REGION 1..979: note = engineered CasX variant
QEIKRINKIRRRLVKDSNTKKAGKTGPMKTLLVRVMTPDLRERLENLRKKPENIPQPISNTSRANLNKLLTDYTEMKKAILHVYWEEFQKDPVGLMSRVAQPASKKIDQNKLKPEMDEKGNLTTAGFACSQCGQPLFVYKLEQVSEKGKAYTNYFGRCNVAEHEKLILLAQLKPEKDSDEAVTYSLGKFGQRALDFYSIHVTKESTHPVKPLAQIAGNRYASGPVGKALRDACMGTIASFLSKYQDIIIEHQKVVKGNQKRLESLRELAGKENLEYPSVTLPPQPHTKEGVDAYNEVIARVRMWVNLNLWQKLKLSRDDAKPLLRLKGFPSFPLVERQANAEVDWWDMVCNVKKLINEKKEDGKVFWQNLAGYKRQEALRPYLSSEEDRKKGKKFARYQLGDLLLHLEKKHGEDWGKVYDEAWERIDKKVEGLSKHIKLEEERRSEDAQSKAALTDWLRAKASFVIEGLKEADKDEFCRCELKLQKWYGDLRGKPFAIEAENSILDISGFSKQYNCAFIWQKDGVKKLNLYLIINYFKGGKLRFKKIKPEAFEANRFYTVINKKSGEIVPMEVNFNFDDPNLIILPLAFGKRQGREFIWNDLLSLETGSLKLANGRVIEKTLYNRRTRQDEPALFVALTFERREVLDSSNIKPMNLIGVDRGENIPAVIALTDPEGCPLSRFKDSLGNPTHILRIGESYKEKQRTIQAKKEVEQRRAGGYSRKYASKAKNLADDMVRNTARDLLYYAVTQDAMLIFENLSRGFGRQGKRTFMAERQYTRMEDWLTAKLAYEGLPSKVYLSKTLAQYTSKTCSNCGFTITSADYDRVLEKLKKTATGWMTTINGKELKVEGQITYYNRYKRQNVVKDLSVELDRLSEESVNNDISSWTKGRSGEALSLLKKRFSHRPVQEKFVCLNCGFETHADEQAALNIARSWLFLRSQEYKKYQTNKTTGNTDKRAFVETWQSFYRKKLKEVWKPAV

SEQ ID NO: 40159 - protein, 980 aa, synthetic construct
  REGION 1..980: note = engineered CasX variant
QEIKRINKIRRRLVKDSNTKKAGKTGPMKTLLVRVMTPDLRERLENLRKKPENIPQPISNTSRANLNKLLTDYTEMKKAILHVYWEEFQKDPVGLMSRVAQPASKKIDQNKLKPEMDEKGNLTTAGFACSQCGQPLFVYKLEQVSEKGKAYTNYFGRCNVAEHEKLILLAQLKPEKDSDEAVTYSLGKFGQRALDFYSIHVTKESTHPVKPLAQIAGNRYASGPVGKALRDACMGTIASFLSKYQDIIIEHQKVVKGNQKRLESLRELAGKENLEYPSVTLPPQPHTKEGVDAYNEVIARVRMWVNLNLWQKLKLSRDDAKPLLRLKGFPSFPLVERQANAEVDWWDMVCNVKKLINEKKEDGKVFWQNLAGYKRQEALRPYLSSEEDRKKGKKFARYQLGDLLLHLEKKHGEDWGKVYDEAWERIDKKVEGLSKHIKLEEERRSEDAQSKAALTDWLRAKASFVIEGLKEADKDEFCRCELKLQKWYGDLRGKPFAIEAENSILDISGFSKQYNCAFIWQKDGVKKLNLYLIINYFKGGKLRFKKIKPEAFEANRFYTVINKKSGEIVPMEVNFNFDDPNLIILPLAFGKRQGREFIWNDLLSLETGSLKLANGRVIEKTLYNRRTRQDEPALFVALTFERREVLDSSNIKPMNLIGVDRGENIPAVIALTDPEGCPLSRFKDSLGNPTHILRIGESYKEKQRTIQAKKEVEQRRAGGYSRKYASKAKNLADDMVRNTARDLLYYAVTQDAMLIFENLSRGFGRQGKRTFMAERQYTRMEDWLTAKLAYEGPLPSKTYLSKTLAQYTSKTCSNCGFTITSADYDRVLEKLKKTATGWMTTINGKELKVEGQITYYNRYKRQNVVKDLSVELDRLSEESVNNDISSWTKGRSGEALSLLKKRFSHRPVQEKFVCLNCGFETHADEQAALNIARSWLFLRSQEYKKYQTNKTTGNTDKRAFVETWQSFYRKKLKEVWKPAV

SEQ ID NO: 40160 - protein, 980 aa, synthetic construct
  REGION 1..980: note = engineered CasX variant
QEIKRINKIRRRLVKDSNTKKAGKTGPMKTLLVRVMTPDLRERLENLRKKPENIPQPISNTSRANLNKLLTDYTEMKKAILHVYWEEFQKDPVGLMSRVAQPASKKIDQNKLKPEMDEKGNLTTAGFACSQCGQPLFVYKLEQVSEKGKAYTNYFGRCNVAEHEKLILLAQLKPEKDSDEAVTYSLGKFGQRALDFYSIHVTKESTHPVKPLAQIAGNRYASGPVGKALRDACMGTIASFLSKYQDIIIEHQKVVKGNQKRLESLRELAGKENLEYPSVTLPPQPHTKEGVDAYNEVIARVRMWVNLNLWQKLKLSRDDAKPLLRLKGFPSFPLVERQANAEVDWWDMVCNVKKLINEKKEDGKVFWQNLAGYKRQEALRPYLSSEEDVRKKGKKFARYQLGDLLLHLEKKHGEDWGKVYDEAWERIDKKVEGLSKHIKLEEERRSEDAQSKAALTDWLRAKASFVIEGLKEADKDEFCRCELKLQKWYGDLRGKPFAIEAENSILDISGFSKQYNCAFIWQKDGVKKLNLYLIINYFKGGKLRFKKIKPEAFEANRFYTVINKKSGEIVPMEVNFNFDDPNLIILPLAFGKRQGREFIWNDLLSLETGSLKLANGRVIEKTLYNRRTRQDEPALFVALTFERREVLDSSNIKPMNLIGVDRGENIPAVIALTDPEGCPLSRFKDSLGNPTHILRIGESYKEKQRTIQAKKEVEQRRAGGYSRKYASKAKNLADDMVRNTARDLLYYAVTQDAMLIFENLSRGFGRQGKRTFMAERQYTRMEDWLTAKLAYEGLPSKTYLSKTLAQYTSKTCSNCGFTITSADYDRVLEKLKKTATGWMTTINGKELKVEGQITYYNRYKRQNVVKDLSVELDRLSEESVNNDISSWTKGRSGEALSLLKKRFSHRPVQEKFVCLNCGFETHADEQAALNIARSWLFLRSQEYKKYQTNKTTGNTDKRAFVETWQSFYRKKLKEVWKPAV

SEQ ID NO: 40161 - protein, 979 aa, synthetic construct
  REGION 1..979: note = engineered CasX variant
QEIKRINKIRRRLVKDSNTKKAGKTGPMKTLLVRVMTPDLRERLENLRKKPENIPQPISNTSRANLNKLLTDYTEMKKAILHVYWEEFQKDPVGLMSRVAQPASKKIDQNKLKPEMDEKGNLTTAGFACSQCGQPLFVYKLEQVSEKGKAYTNYFGRCNVAEHEKLILLAQLKPEKDSDEAVTYSLGKFGQRALDFYSIHVTKESTHPVKPLAQIAGNRYASGPVGKALRDACMGTIASFLSKYQDIIIEHQKVVKGNQKRLESLRELAGKENLEYPSVTLPPQPHTKEGVDAYNEVIARVRMWVNLNLWQKLKLSRDDAKPLLRLKGFPSFPLVERQANAEVDWWDMVCNVKKLINEKKEDGKVFWQNLAGYKRQEALRPYLSSEEDRKKGKKFARYQLGDLLLHLEKKHGEDWGKVYDEAWERIDKKVEGLSKHIKLEEERRSEDAQSKAALTDWLRAKASFVIEGLKEADKDEFCRCELKLQKWYGDLRGKPFAIEAENSILDISGFSKQYNCAFIWQKDGVKKLNLYLIINYFKGGKLRFKKIKPEAFEANRFYTVINKKSGEIVPMEVNFNFDDPNLIILPLAFGKRQGREFIWNDLLSLETGSLKLANGRVIEKTLYNRRTRQDEPALFVALTFERREVLDSSNIKPMNLIGVDRGENIPAVIALTDPEGCPLSRFKDSLGNPTHILRIGESYKEKQRTIQAKKEVEQRRAGGYSRKYASKAKNLADDMVRNTARDLLYYAVTQDAMLIFENLSRGFGRQGKRTFMAERQYTRMEDWLTAKLAYEGLPSKTYLSKTLAQYTSKTCSNCGFTITSADYDRMLEKLKKTATGWMTTINGKELKVEGQITYYNRYKRQNVVKDLSVELDRLSEESVNNDISSWTKGRSGEALSLLKKRFSHRPVQEKFVCLNCGFETHADEQAALNIARSWLFLRSQEYKKYQTNKTTGNTDKRAFVETWQSFYRKKLKEVWKPAV

SEQ ID NO: 40162 - protein, 979 aa, synthetic construct
  REGION 1..979: note = engineered CasX variant
QEIKRINKIRRRLVKDSNTKKAGKTGPMKTLLVRVMTPDLRERLENLRKKPENIPQPISNTSRANLNKLLTDYTEMKKAILHVYWEEFQKDPVGLMSRVAQPASKKIDQNKLKPEMDEKGNLTTAGFACSQCGQPLFVYKLEQVSEKGKAYTNYFGRCNVAEHEKLILLAQLKPEKDSDEAVTYSLGKFGQRALDFYSIHVTKESTHPVKPLAQIAGNRYASGPVGKALRDACMGTIASFLSKYQDIIIEHQKVVKGNQKRLESLRELAGKENLEYPSVTLPPQPHTKEGVDAYNEVIARVRMWVNLNLWQKLKLSRDDAKPLLRLKGFPSFPLVERQANAEVDWWDMVCNVKKLINEKKEDGKVFWQNLAGYKRQEALRPYLSSEEDRKKGKKFARYQLGDLLLHLEKKHGEDWGKVYDEAWERIDKKVEGLSKHIKLEEERRSEDAQSKAALTDWLRAKASFVIEGLKEADKDEFCRCELKLQKWYGDLRGKPFAIEAENSILDISGFSKQYNCAFIWQKDGVKKLNLYLIINYFKGGKLRFKKIKPEAFEANRFYTVINKKSGEIVPMEVNFNFDDPNLIILPLAFGKRQGREFIWNDLLSLETGSLKLANGRVIEKTLYNRRTRQDEPALFVALTFERREVLDSSNIKPMNLIGVDRGENIPAVIALTDPEGCPLSRFKDSLGNPTHILRIGESYKEKQRTIQAKKEVEQRRAGGYSRKYASKAKNLADDMVRNTARDLLYYAVTQDAMLIFENLSRGFGRQGKRTFMAERQYTRMEDWLTAKLAYEGLPSKTYLSKTLAQYTSKTCSNCGFTITSADYDRVLEKLKKTATGWMTTINGKELKVEGQITYYNRYKRQNVVKDLSVELDRLSEESVNNDISSWTKGRQGEALSLLKKRFSHRPVQEKFVCLNCGFETHADEQAALNIARSWLFLRSQEYKKYQTNKTTGNTDKRAFVETWQSFYRKKLKEVWKPAV

SEQ ID NO: 40163 - protein, 979 aa, synthetic construct
  REGION 1..979: note = engineered CasX variant
QEIKRINKIRRRLVKDSNTKKAGKTGPMKTLLVRVMTPDLRERLENLRKKPENIPQPISNTSRANLNKLLTDYTEMKKAILHVYWEEFQKDPVGLMSRVAQPASKKIDQNKLKPEMDEKGNLTTAGFACSQCGQPLFVYKLEQVSEKGKAYTNYFGRCNVAEHEKLILLAQLKPEKDSDEAVTYSLGKFGQRALDFYSIHVTKESTHPVKPLAQIAGNRYASGPVGKALRDACMGTIASFLSKYQDIIIEHQKVVKGNQKRLESLRELAGKENLEYPSVTLPPQPHTKEGVDAYNEVIARVRMWVNLNLWQKLKLSRDDAKPLLRLKGFPSFPLVERQANAEVDWWDMVCNVKKLINEKKEDGKVFWQNLAGYKRQEALRPYLSSEEDRKKGKKFARYQLGDLLLHLEKKHGEDWGKVYDEAWERIDKKVEGLSKHIKLEEERRSEDAQSKAALTDWLRAKASFVIEGLKEADKDEFCRCELKLQKWYGDLRGKPFAIEAENSILDISGFSKQYNCAFIWQKDGVKKLNLYLIINYFKGGKLRFKKIKPEAFEANRFYTVINKKSGEIVPMEVNFNFDDPNLIILPLAFGKRQGREFIWNDLLSLETGSLKLANGRVIEKTLYNRRTRQDEPALFVALTFERREVLDSSNIKPMNLIGVDRGENIPAVIALTDPEGCPLSRFKDSLGNPTHILRIGESYKEKQRTIQAKKEVEQRRAGGYSRKYASKAKNLADDMVRNTARDLLYYAVTQDAMLIFENLSRGFGRQGKRTFMAERQYTRMEDWLTAKLAYEGLPSKTYLSKTLAQYTSKTCSNCGFTITSADYDRVLEKLKKTATGWMTTINGKELKVEGQITYYNRYKRQNVVKDLSVELDRLSEESVNNDISSWTKGRSGEALSLLKKRFSHRPVQEKFVCLNCEFETHADEQAALNIARSWLFLRSQEYKKYQTNKTTGNTDKRAFVETWQSFYRKKLKEVWKPAV

SEQ ID NO: 40164 - protein, 980 aa, synthetic construct
  REGION 1..980: note = engineered CasX variant
QEIKRINKIRRRLVKDSNTKKAGKTGPMKTLLVRVMTPDLRERLENLRKKPENIPQPISNTSRANLNKLLTDYTEMKKAILHVYWEEFQKDPVGLMSRVAQPASKKIDQNKLKPEMDEKGNLTTAGFACSQCGQPLFVYKLEQVSEKGKAYTNYFGRCNVAEHEKLILLAQLKPEKDSDEAVTYSLGKFGQRALDFYSIHVTKESTHPVKPLAQIAGNRYASGPVGKALRDACMGTIASFLSKYQDIIIEHQKVVKGNQKRLESLRELAGKENLEYPSVTLPPQPHTKEGVDAYNEVIARVRMWVNLNLWQKLKLSRDDAKPLLRLKGFPSFPLVERQANAEVDWWDMVCNVKKLINEKKEDGKVFWQNLAGYKRQEALRPYLSSEEDRKKGKKFARYQLGDLLLHLEKKHGEDWGKVYDEAWERIDKKVEGLSKHIKLEEERRSEDAQSKAALTDWLRAKASFVIEGLKEADKDEFCRCELKLQKWYGDLRGKPFAIEAENSILDISGFSKQYNCAFIWQKDGVKKLNLYLIINYFKGGKLRFKKIKPEAFEANRFYTVINKKSGEIVPMEVNFNFDDPNLIILPLAFGKRQGREFIWNDLLSLETGSLKLANGRVIEKTLYNRRTRQDEPALFVALTFERREVLDSSNIKPMNLIGVDRGENIPAVIALTDPEGCPLSRFKDSLGNPTHILRIGESYKEKQRTIQAKKEVEQRRAGGYSRKYASKAKNLADDMVRNTARDLLYYAVTQDAMLIFENLSRGFGRQGKRTFMAERQYTRMEDWLTAKLAYEGLPSKTYLSKTLAQYTSKTCSNCGFTITSADYDRVLEKLKKTATGWMTTINGKELKVEGQITYYNRYKRQNVVKDLSVELDRLSEESVNNDISSWTKGRSGEALSLLKKRFSHRPVQEKFVCLNCGFETHADEQAALNIARSWLFLRSQEYKKYQTNKTSTGNTDKRAFVETWQSFYRKKLKEVWKPAV

SEQ ID NO: 40165 - protein, 980 aa, synthetic construct
  REGION 1..980: note = engineered CasX variant
QEIKRINKIRRRLVKDSNTKKAGKTGPMKTLLVRVMTPDLRERLENLRKKPENIPQPISNTSRANLNKLLTDYTEMKKAILHVYWEEFQKDPVGLMSRVAQPASKKIDQNKLKPEMDEKGNLTTAGFACSQCGQPLFVYKLEQVSEKGKAYTNYFGRCNVAEHEKLILLAQLKPEKDSDEAVTYSLGKFGQRALDFYSIHVTKESTHPVKPLAQIAGNRYASGPVGKALRDACMGTIASFLSKYQDIIIEHQKVVKGNQKRLESLRELAGKENLEYPSVTLPPQPHTKEGVDAYNEVIARVRMWVNLNLWQKLKLSRDDAKPLLRLKGFPSFPLVERQANAEVDWWDMVCNVKKLINEKKEDGKVFWQNLAGYKRQEALRPYLSSEEDRKKGKKFARYQLGDLLLHLEKKHGEDWGKVYDEAWERIDKKVEGLSKHIKLEEERRSEDAQSKAALTDWLRAKASFVIEGLKEADKDEFCRCELKLQKWYGDLRGKPFAIEAENSILDISGFSKQYNCAFIWQKDGVKKLNLYLIINYFKGGKLRFKKIKPEAFEANRFYTVINKKSGEIVPMEVNFNFDDPNLIILPLAFGKRQGREFIWNDLLSLETGSLKLANGRVIEKTLYNRRTRQDEPALFVALTFERREVLDSSNIKPMNLIGVDRGENIPAVIALTDPEGCPLSRFKDSLGNPTHILRIGESYKEKQRTIQAKKEVEQRRAGGYSRKYASKAKNLADDMVRNTARDLLYYAVTQDAMLIFENLSRGFGRQGKRTFMAERQYTRMEDWLTAKLAYEGLPSKTYLSKTLAQYTSKTCSNCGFTITSADYDRVLEKLKKTATGWMTTINGKELKVEGQITYYNRYKRQNVVKDLSVELDRLSEESVNNDISSWTKGRSGEALSLLKKRFSHRPVQEKFVCLNCGFETHADEQAALNIARSWLFLRSQEYKKYQTNKTTGKNTDKRAFVETWQSFYRKKLKEVWKPAV

SEQ ID NO: 40166 - protein, 979 aa, synthetic construct
  REGION 1..979: note = engineered CasX variant
QEIKRINKIRRRLVKDSNTKKAGKTGPMKTLLVRVMTPDLRERLENLRKKPENIPQPISNTSRANLNKLLTDYTEMKKAILHVYWEEFQKDPVGLMSRVAQPASKKIDQNKLKPEMDEKGNLTTAGFACSQCGQPLFVYKLEQVSEKGKAYTNYFGRCNVAEHEKLILLAQLKPEKDSDEAVTYSLGKFGQRALDFYSIHVTKESTHPVKPLAQIAGNRYASGPVGKALRDACMGTIASFLSKYQDIIIEHQKVVKGNQKRLESLRELAGKENLEYPSVTLPPQPHTKEGVDAYNEVIARVRMWVNLNLWQKLKLSRDDAKPLLRLKKFPSFPLVERQANAEVDWWDMVCNVKKLINEKKEDGKVFWQNLAGYKRQEALRPYLSSEEDRKKGKKFARYQLGDLLLHLEKKHGEDWGKVYDEAWERIDKKVEGLSKHIKLEEERRSEDAQSKAALTDWLRAKASFVIEGLKEADKDEFCRCELKLQKWYGDLRGKPFAIEAENSILDISGFSKQYNCAFIWQKDGVKKLNLYLIINYFKGGKLRFKKIKPEAFEANRFYTVINKKSGEIVPMEVNFNFDDPNLIILPLAFGKRQGREFIWNDLLSLETGSLKLANGRVIEKTLYNRRTRQDEPALFVALTFERREVLDSSNIKPMNLIGVDRGENIPAVIALTDPEGCPLSRFKDSLGNPTHILRIGESYKEKQRTIQAKKEVEQRRAGGYSRKYASKAKNLADDMVRNTARDLLYYAVTQDAMLIFENLSRGFGRQGKRTFMAERQYTRMEDWLTAKLAYEGLPSKTYLSKTLAQYTSKTCSNCGFTITSADYDRVLEKLKKTATGWMTTINGKELKVEGQITYYNRYKRQNVVKDLSVELDRLSEESVNNDISSWTKGRSGEALSLLKKRFSHRPVQEKFVCLNCGFETHADEQAALNIARSWLFLRSQEYKKYQTNKTTGNTDKRAFVETWQSFYRKKLKEVWKPAV

SEQ ID NO: 40167 - protein, 979 aa, synthetic construct
  REGION 1..979: note = engineered CasX variant
QEIKRINKIRRRLVKDSNTKKAGKTGPMKTLLVRVMTPDLRERLENLRKKPENIPQPISNTSRANLNKLLTDYTEMKKAILHVYWEEFQKDPVGLMSRVAQPASKKIDQNKLKPEMDEKGNLTTAGFACSQCGQPLFVYKLEQVSEKGKAYTNYFGRCNVAEHEKLILLAQLKPEKDSDEAVTYSLGKFGQRALDFYSIHVTKESTHPVKPLAQIAGNRYASGPVGKALRDACMGTIASFLSKYQDIIIEHQKVVKGNQKRLESLRELAGKENLEYPSVTLPPQPHTKEGVDAYNEVIARVRMWVNLNLWQKLKLSRDDAKPLLRLKGFPSFPLVERQANAEVDWWDMVCNVKKLINEKKEDGKVFWQNLAGYKRQEALRPYLSSEEDRKKGKKFARYQLGDLLLHLEKKHGEDWGKVYDEAWERIDKKVEGLSKHIKLEEERRSEDAQSKAALTDWLRAKASFVIEGLKEADKDEFCRCELKLQKWYGDLRGKPFAIEAENSILDISGFSKQYNCAFIWQKDGVKKLNLYLIINYFKGGKLRFKKIKPEAFEANRFYTVINKKSGEIVPMEVNFNFDDPNLIILPLAFGKRQGREFIWNDLLSLETGSLKLANGRVIEKTLYNRRTRQDEPALFVALTFERREVLDSSNIKPMNLIGVDRGENIPAVIALTDPEGCPLSRFKDSLGNPTHILRIGERYKEKQRTIQAKKEVEQRRAGGYSRKYASKAKNLADDMVRNTARDLLYYAVTQDAMLIFENLSRGFGRQGKRTFMAERQYTRMEDWLTAKLAYEGLPSKTYLSKTLAQYTSKTCSNCGFTITSADYDRVLEKLKKTATGWMTTINGKELKVEGQITYYNRYKRQNVVKDLSVELDRLSEESVNNDISSWTKGRSGEALSLLKKRFSHRPVQEKFVCLNCGFETHADEQAALNIARSWLFLRSQEYKKYQTNKTTGNTDKRAFVETWQSFYRKKLKEVWKPAV

SEQ ID NO: 40168 - protein, 979 aa, synthetic construct
  REGION 1..979: note = engineered CasX variant
QEIKRINKIRRRLVKDSNTKKAGKTGPMKTLLVRVMTPDLRERLENLRKKPENIPQPISNTSRANLNKLLTDYTEMKKAILHVYWEEFQKDPVGLMSRVAQPASKKIDQNKLKPEMDEKGNLTTAGFACSQCGQPLFVYKLEQVSEKGKAYTNYFGRCNVAEHEKLILLAQLKPEKDSDEAVTYSLGKFGQRALDFYSIHVTKESTHPVKPLAQIAGNRYASGPVGKALRDACMGTIASFLSKYQDIIIEHQKVVKGNQKRLESLRELAGKENLEYPSVTLPPQPHTKEGVDAYNEVIARVRMWVNLNLWQKLKLSRDDAKPLLRLKGFPSFPLVERQANAEVDWWDMVCNVKKLINEKKEDGKVFWQNLAGYKRQEALRPYLSSEEDRKKGKKFARYQLGDLLLHLEKKHGEDWGKVYDEAWERIDKKVEGLSKHIKLEEERRSEDAQSKAALTDWLRAKASFVIEGLKEADKDEFCRCELKLQKWYGDLRGKPFAIEAENSILDISGFSKQYNCAFIWQKDGVKKLNLYLIINYFKGGKLRFKKIKPEAFEANRFYTVINKKSGEIVPMEVNFNFDDPNLIILPLAFGKRQGREFIWNDLLSLETGSLQLANGRVIEKTLYNRRTRQDEPALFVALTFERREVLDSSNIKPMNLIGVDRGENIPAVIALTDPEGCPLSRFKDSLGNPTHILRIGESYKEKQRTIQAKKEVEQRRAGGYSRKYASKAKNLADDMVRNTARDLLYYAVTQDAMLIFENLSRGFGRQGKRTFMAERQYTRMEDWLTAKLAYEGLPSKTYLSKTLAQYTSKTCSNCGFTITSADYDRVLEKLKKTATGWMTTINGKELKVEGQITYYNRYKRQNVVKDLSVELDRLSEESVNNDISSWTKGRSGEALSLLKKRFSHRPVQEKFVCLNCGFETHADEQAALNIARSWLFLRSQEYKKYQTNKTTGNTDKRAFVETWQSFYRKKLKEVWKPAV

SEQ ID NO: 40169 - protein, 979 aa, synthetic construct
  REGION 1..979: note = engineered CasX variant
QEIKRINKIRRRLVKDSNTKKAGKTGPMKTLLVRVMTPDLRERLENLRKKPENIPQPISNTSRANLNKLLTDYTEMKKAILHVYWEEFQKDPVGLMSRVAQPASKKIDQNKLKPEMDEKGNLTTAGFACSQCGQPLFVYKLEQVSEKGKAYTNYFGRCNVAEHEKLILLAQLKPEKDSDEAVTYSLGKFGQRALDFYSIHVTKESTHPVKPLAQIAGNRYASGPVGKALRDACMGTIASFLSKYQDIIIEHQKVVKGNQKRLESLRELAGKENLEYPSVTLPPQPHTKEGVDAYNEVIARVRMWVNLNLWQKLKLSRDDAKPLLRLKGFPSFPLVERQANEVDWWDMVCNVKKLINEKKEDGKVFWQNLAGYKRQEALRPYLSSEEDRKKGKKFARTQLGDLLLHLEKKHEGEDWGKVYDEAWERIDKKVEGLSKHIKLEEERRSEDAQSKAALTDWLRAKASFVIEGLKEADKDEFCRCELKLQKWYGDLRGKPFAIEAENSILDISGFSKQYNCAFIWQKDGVKKLNLYLIINYFKGGKLRFKKIKPEAFEANRFYTVINKKSGEIVPMEVNFNFDDPNLIILPLAFGKRQGREFIWNDLLSLETGSLKLANGRVIEKTLYNRRTRQDEPALFVALTFERREVLDSSNIKPMNLIGVDRGENIPAVIALTDPEGCPLSRFKDSLGNPTHILRIGESYKEKQRTIQAKKEVEQRRAGGYSRKYASKAKNLADDMVRNTARDLLYYAVTQDAMLIFENLSRGFGRQGKRTFMAERQYTRMEDWLTAKLAYEGLPSKTYLSKTLAQYTSKTCSNCGFTITSADYDRVLEKLKKTATGWMTTINGKELKVEGQITYYNRYKRQNVVKDLSVELDRLSEESVNNDISSWTKGRSGEALSLLKKRFSHRPVQEKFVCLNCGFETHADEQAALNIARSWLFLRSQEYKKYQTNKTTGNTDKRAFVETWQSFYRKKLKEVWKPAV

SEQ ID NO: 40170 - protein, 978 aa, synthetic construct
  REGION 1..978: note = engineered CasX variant
QEIKRINKIRRRLVKDSNTKKAGKTGPMKTLLVRVMTPDLRERLENLRKKPENIPQPISNTSRANLNKLLTDYTEMKKAILHVYWEEFQKDPVGLMSRVAQPASKKIDQNKLKPEMDEKGNLTTAGFACSQCGQPLFVYKLEQVSEKGKAYTNYFGRCNVAEHEKLILLAQLKPEKDSDEAVTYSLGKFGQRALDFYSIHVTKESTHPVKPLAQIAGNRYASGPVGKALRDACMGTIASFLSKYQDIIIEHQKVVKGNQKRLESLRELAGKENLEYPSVTLPPQPHTKEGVDAYNEVIARVRMWVNLNLWQKLKLSRDDAKPLLRLKGFPSFPLVERQANEVDWWDMVCNVKKLINEKKEDGKVFWQNLAGYKRQEALRPYLSSEEDRKKGKKFARTQLGDLLLHLEKKHGEDWGKVYDEAWERIDKKVEGLSKHIKLEEERRSEDAQSKAALTDWLRAKASFVIEGLKEADKDEFCRCDLKLQKWYGDLRGKPFAIEAENSILDISGFSKQYNCAFIWQKDGVKKLNLYLIINYFKGGKLRFKKIKPEAFEANRFYTVINKKSGEIVPMEVNFNFDDPNLIILPLAFGKRQGREFIWNDLLSLETGSLKLANGRVIEKTLYNRRTRQDEPALFVALTFERREVLDSSNIKPMNLIGVDRGENIPAVIALTDPEGCPLSRFKDSLGNPTHILRIGESYKEKQRTIQAKKEVEQRRAGGYSRKYASKAKNLADDMVRNTARDLLYYAVTQDAMLIFENLSRGFGRQGKRTFMAERQYTRMEDWLTAKLAYEGLPSKTYLSKTLAQYTSKTCSNCGFTITSADYDRVLEKLKKTATGWMTTINGKELKVEGQITYYNRYKRQNVVKDLSVELDRLSEESVNNDISSWTKGRSGEALSLLKKRFSHRPVQEKFVCLNCGFETHADEQAALNIARSWLFLRSQEYKKYQTNKTTGNTDKRAFVETWQSFYRKKLKEVWKPAV

SEQ ID NO: 40171 - protein, 978 aa, synthetic construct
  REGION 1..978: note = engineered CasX variant
QEIKRINKIRRRLVKDSNTKKAGKTGPMKTLLVRVMTPDLRERLENLRKKPENIPQPISNTSRANLNKLLTDYTEMKKAILHVYWEEFQKDPVGLMSRVAQPASKKIDQNKLKPEMDEKGNLTTAGFACSQCGQPLFVYKLEQVSEKGKAYTNYFGRCNVAEHEKLILLAQLKPEKDSDEAVTYSLGKFGQRALDFYSIHVTKESTHPVKPLAQIAGNRYASGPVGKALRDACMGTIASFLSKYQDIIIEHQKVVKGNQKRLESLRELAGKENLEYPSVTLPPQPHTKEGVDAYNEVIARVRMWVNLNLWQKLKLSRDDAKPLLRLKGFPSFPLVERQANEVDWWDMVCNVKKLINEKKEDGKVFWQNLAGYKRQEALRPYLSSEEDRKKGKKFARTQLGDLLLHLEKKHGEDWGKVYDEAWERIDKKVEGLSKHIKLEEERRSEDAQSKAALTDWLRAKASFVIEGLKEADKDEFCRCELKLQKWYGDLRGKPFAIEAENSILDISGFSKQYNCAFIWQKDGVKKLNLYLIINYFKGGKLRFKKIKPEAFEANRFYTVINKKSGEIVPMEVNFNFDDPNLIILPLAFGKRFGREFIWNDLLSLETGSLKLANGRVIEKTLYNRRTRQDEPALFVALTFERREVLDSSNIKPMNLIGVDRGENIPAVIALTDPEGCPLSRFKDSLGNPTHILRIGESYKEKQRTIQAKKEVEQRRAGGYSRKYASKAKNLADDMVRNTARDLLYYAVTQDAMLIFENLSRGFGRQGKRTFMAERQYTRMEDWLTAKLAYEGLPSKTYLSKTLAQYTSKTCSNCGFTITSADYDRVLEKLKKTATGWMTTINGKELKVEGQITYYNRYKRQNVVKDLSVELDRLSEESVNNDISSWTKGRSGEALSLLKKRFSHRPVQEKFVCLNCGFETHADEQAALNIARSWLFLRSQEYKKYQTNKTTGNTDKRAFVETWQSFYRKKLKEVWKPAV

SEQ ID NO: 40172 - protein, 978 aa, synthetic construct
  REGION 1..978: note = engineered CasX variant
QEIKRINKIRRRLVKDSNTKKAGKTGPMKTLLVRVMTPDLRERLENLRKKPENIPQPISNTSRANLNKLLTDYTEMKKAILHVYWEEFQKDPVGLMSRVAQPASKKIDQNKLKPEMDEKGNLTTAGFACSQCGQPLFVYKLEQVSEKGKAYTNYFGRCNVAEHEKLILLAQLKPEKDSDEAVTYSLGKFGQRALDFYSIHVTKESTHPVKPLAQIAGNRYASGPVGKALRDACMGTIASFLSKYQDIIIEHQKVVKGNQKRLESLRELAGKENLEYPSVTLPPQPHTKEGVDAYNEVIARVRMWVNLNLWQKLKLSRDDAKPLLRLKGFPSFPLVERQANEVDWWDMVCNVKKLINEKKEDGKVFWQNLAGYKRQEALRPYLSSEEDRKKGKKFARTQLGDLLLHLEKKHGEDWGKVYDEAWERIDKKVEGLSKHIKLEEERRSEDAQSKAALTDWLRAKASFVIEGLKEADKDEFCRCELKLQKWYGDLRGKPFAIEAENSILDISGFSKQYNCAFIWQKDGVKKLNLYLIINYFKGGKLRFKKIKPEAFEANRFYTVINKKSGEIVPMEVNFNFDDPNLIILPLAFGKRVGREFIWNDLLSLETGSLKLANGRVIEKTLYNRRTRQDEPALFVALTFERREVLDSSNIKPMNLIGVDRGENIPAVIALTDPEGCPLSRFKDSLGNPTHILRIGESYKEKQRTIQAKKEVEQRRAGGYSRKYASKAKNLADDMVRNTARDLLYYAVTQDAMLIFENLSRGFGRQGKRTFMAERQYTRMEDWLTAKLAYEGLPSKTYLSKTLAQYTSKTCSNCGFTITSADYDRVLEKLKKTATGWMTTINGKELKVEGQITYYNRYKRQNVVKDLSVELDRLSEESVNNDISSWTKGRSGEALSLLKKRFSHRPVQEKFVCLNCGFETHADEQAALNIARSWLFLRSQEYKKYQTNKTTGNTDKRAFVETWQSFYRKKLKEVWKPAV

SEQ ID NO: 40173 - protein, 979 aa, synthetic construct
  REGION 1..979: note = engineered CasX variant
QEIKRINKIRRRLVKDSNTKKAGKTGPMKTLLVRVMTPDLRERLENLRKKPENIPQPISNTSRANLNKLLTDYTEMKKAILHVYWEEFQKDPVGLMSRVAQPASKKIDQNKLKPEMDEKGNLTTAGFACSQCGQPLFVYKLEQVSEKGKAYTNYFGRCNVAEHEKLILLAQLKPEKDSDEAVTYSLGKFGQRALDFYSIHVTKESTHPVKPLAQIAGNRYASGPVGKALRDACMGTIASFLSKYQDIIIEHQKVVKGNQKRLESLRELAGKENLEYPSVTLPPQPHTKEGVDAYNEVIARVRMWVNLNLWQKLKLSRDDAKPLLRLKGFPSFPLVERQANEVDWWDMVCNVKKLINEKKEDGKVFWQNLAGYKRQEALRPYLSSEEDRKKGKKFARTQLGDLLLHLEKKHGEDWGKVYDEAWERIDKKVEGLSKHIKLEEERRSEDAQSKAALTDWLRAKASFVIEGLKEADKDEFCRCELKLQKWYGDLRGKPFAIEAENSILDISGFSKQYNCAFIWQKDGVKKLNLYLIINYFKGGKLRFKKIKPEAFEANRFYTVINKKSGEIVPMEVNFNFDDPNLIILPLAFGKRQGREFIWNDLLSLETGSLKLANGRVIEKTLYNRRTRQDEPALFVALTFERREVLDSSNIKTPMNLIGVDRGENIPAVIALTDPEGCPLSRFKDSLGNPTHILRIGESYKEKQRTIQAKKEVEQRRAGGYSRKYASKAKNLADDMVRNTARDLLYYAVTQDAMLIFENLSRGFGRQGKRTFMAERQYTRMEDWLTAKLAYEGLPSKTYLSKTLAQYTSKTCSNCGFTITSADYDRVLEKLKKTATGWMTTINGKELKVEGQITYYNRYKRQNVVKDLSVELDRLSEESVNNDISSWTKGRSGEALSLLKKRFSHRPVQEKFVCLNCGFETHADEQAALNIARSWLFLRSQEYKKYQTNKTTGNTDKRAFVETWQSFYRKKLKEVWKPAV

SEQ ID NO: 40174 - protein, 979 aa, synthetic construct
  REGION 1..979: note = engineered CasX variant
QEIKRINKIRRRLVKDSNTKKAGKTGPMKTLLVRVMTPDLRERLENLRKKPENIPQPISNTSRANLNKLLTDYTEMKKAILHVYWEEFQKDPVGLMSRVAQPASKKIDQNKLKPEMDEKGNLTTAGFACSQCGQPLFVYKLEQVSEKGKAYTNYFGRCNVAEHEKLILLAQLKPEKDSDEAVTYSLGKFGQRALDFYSIHVTKESTHPVKPLAQIAGNRYASGPVGKALRDACMGTIASFLSKYQDIIIEHQKVVKGNQKRLESLRELAGKENLEYPSVTLPPQPHTKEGVDAYNEVIARVRMWVNLNLWQKLKLSRDDAKPLLRLKGFPSFPLVERQANEVDWWDMVCNVKKLINEKKEDGKVFWQNLAGYKRQEALRPYLSSEEDRKKGKKFARTQLGDLLLHLEKKHGEDWGKVYDEAWERIDKKVEGLSKHIKLEEERRSEDAQSKAALTDWLRAKASFVIEGLKEADKDEFCRCELKLQKWYGDLRGKPFAIEAENSILDISGFSKQYNCAFIWQKDGVKKLNLYLIINYFKGGKLRFKKIKPEAFEANRFYTVINKKSGEIVPMEVNFNFDDPNLIILPLAFGKRQGREFIWNDLLSLETGSLKLANGRVIEKTLYNRRTRQDEPALFVALTFERREVLDSSNIKPMSNLIGVDRGENIPAVIALTDPEGCPLSRFKDSLGNPTHILRIGESYKEKQRTIQAKKEVEQRRAGGYSRKYASKAKNLADDMVRNTARDLLYYAVTQDAMLIFENLSRGFGRQGKRTFMAERQYTRMEDWLTAKLAYEGLPSKTYLSKTLAQYTSKTCSNCGFTITSADYDRVLEKLKKTATGWMTTINGKELKVEGQITYYNRYKRQNVVKDLSVELDRLSEESVNNDISSWTKGRSGEALSLLKKRFSHRPVQEKFVCLNCGFETHADEQAALNIARSWLFLRSQEYKKYQTNKTTGNTDKRAFVETWQSFYRKKLKEVWKPAV

SEQ ID NO: 40175 - protein, 978 aa, synthetic construct
  REGION 1..978: note = engineered CasX variant
QEIKRINKIRRRLVKDSNTKKAGKTGPMKTLLVRVMTPDLRERLENLRKKPENIPQPISNTSRANLNKLLTDYTEMKKAILHVYWEEFQKDPVGLMSRVAQPASKKIDQNKLKPEMDEKGNLTTAGFACSQCGQPLFVYKLEQVSEKGKAYTNYFGRCNVAEHEKLILLAQLKPEKDSDEAVTYSLGKFGQRALDFYSIHVTKESTHPVKPLAQIAGNRYASGPVGKALRDACMGTIASFLSKYQDIIIEHQKVVKGNQKRLESLRELAGKENLEYPSVTLPPQPHTKEGVDAYNEVIARVRMWVNLNLWQKLKLSRDDAKPLLRLKGFPSFPLVERQANEVDWWDMVCNVKKLINEKKEDGKVFWQNLAGYKRQEALRPYLSSEEDRKKGKKFARTQLGDLLLHLEKKHGEDWGKVYDEAWERIDKKVEGLSKHIKLEEERRSEDAQSKAALTDWLRAKASFVIEGLKEADKDEFCRCELKLQKWYGDLRGKPFAIEAENSILDISGFSKQYNCAFIWQKDGVKKLNLYLIINYFKGGKLRFKKIKPEAFEANRFYTVINKKSGEIVPMEVNFNFDDPNLIILPLAFGKRQGREFIWNDLLSLETGSLKLANGRVIEKTLYNRRTRQDEPALFVALTFERREVLDSSNIKPMNLIGVDRGENIPAVIALTDPEGCPLSRFKDSLGNPTHILRIRESYKEKQRTIQAKKEVEQRRAGGYSRKYASKAKNLADDMVRNTARDLLYYAVTQDAMLIFENLSRGFGRQGKRTFMAERQYTRMEDWLTAKLAYEGLPSKTYLSKTLAQYTSKTCSNCGFTITSADYDRVLEKLKKTATGWMTTINGKELKVEGQITYYNRYKRQNVVKDLSVELDRLSEESVNNDISSWTKGRSGEALSLLKKRFSHRPVQEKFVCLNCGFETHADEQAALNIARSWLFLRSQEYKKYQTNKTTGNTDKRAFVETWQSFYRKKLKEVWKPAV

SEQ ID NO: 40176 - protein, 978 aa, synthetic construct
  REGION 1..978: note = engineered CasX variant
QEIKRINKIRRRLVKDSNTKKAGKTGPMKTLLVRVMTPDLRERLENLRKKPENIPQPISNTSRANLNKLLTDYTEMKKAILHVYWEEFQKDPVGLMSRVAQPASKKIDQNKLKPEMDEKGNLTTAGFACSQCGQPLFVYKLEQVSEKGKAYTNYFGRCNVAEHEKLILLAQLKPEKDSDEAVTYSLGKFGQRALDFYSIHVTKESTHPVKPLAQIAGNRYASGPVGKALRDACMGTIASFLSKYQDIIIEHQKVVKGNQKRLESLRELAGKENLEYPSVTLPPQPHTKEGVDAYNEVIARVRMWVNLNLWQKLKLSRDDAKPLLRLKGFPSFPLVERQANEVDWWDMVCNVKKLINEKKEDGKVFWQNLAGYKRQEALRPYLSSEEDRKKGKKFARTQLGDLLLHLEKKHGEDWGKVYDEAWERIDKKVEGLSKHIKLEEERRSEDAQSKAALTDWLRAKASFVIEGLKEADKDEFCRCELKLQKWYGDLRGKPFAIEAENSILDISGFSKQYNCAFIWQKDGVKKLNLYLIINYFKGGKLRFKKIKPEAFEANRFYTVINKKSGEIVPMEVNFNFDDPNLIILPLAFGKRQGREFIWNDLLSLETGSLKLANGRVIEKTLYNRRTRQDEPALFVALTFERREVLDSSNIKPMNLIGVDRGENIPAVIALTDPEGCPLSRFKDSLGNPTHILRIGESYKEKQRTIQAKKEVEQRRAGGYSRKYASKAKNLADDMVRNTARDLLYYAVTQDAMLIFENLSRGFGRQGKRTFSAERQYTRMEDWLTAKLAYEGLPSKTYLSKTLAQYTSKTCSNCGFTITSADYDRVLEKLKKTATGWMTTINGKELKVEGQITYYNRYKRQNVVKDLSVELDRLSEESVNNDISSWTKGRSGEALSLLKKRFSHRPVQEKFVCLNCGFETHADEQAALNIARSWLFLRSQEYKKYQTNKTTGNTDKRAFVETWQSFYRKKLKEVWKPAV

SEQ ID NO: 40177 - protein, 978 aa, synthetic construct
  REGION 1..978: note = engineered CasX variant
QEIKRINKIRRRLVKDSNTKKAGKTGPMKTLLVRVMTPDLRERLENLRKKPENIPQPISNTSRANLNKLLTDYTEMKKAILHVYWEEFQKDPVGLMSRVAQPASKKIDQNKLKPEMDEKGNLTTAGFACSQCGQPLFVYKLEQVSEKGKAYTNYFGRCNVAEHEKLILLAQLKPEKDSDEAVTYSLGKFGQRALDFYSIHVTKESTHPVKPLAQIAGNRYASGPVGKALRDACMGTIASFLSKYQDIIIEHQKVVKGNQKRLESLRELAGKENLEYPSVTLPPQPHTKEGVDAYNEVIARVRMWVNLNLWQKLKLSRDDAKPLLRLKGFPSFPLVERQANEVDWWDMVCNVKKLINEKKEDGKVFWQNLAGYKRQEALRPYLSSEEDRKKGKKFARTQLGDLLLHLEKKHGEDWGKVYDEAWERIDKKVEGLSKHIKLEEERRSEDAQSKAALTDWLRAKASFVIEGLKEADKDEFCRCELKLQKWYGDLRGKPFAIEAENSILDISGFSKQYNCAFIWQKDGVKKLNLYLIINYFKGGKLRFKKIKPEAFEANRFYTVINKKSGEIVPMEVNFNFDDPNLIILPLAFGKRQGREFIWNDLLSLETGSLKLANGRVIEKTLYNRRTRQDEPALFVALTFERREVLDSSNIKPMNLIGVDRGENIPAVIALTDPEGCPLSRFKDSLGNPTHILRIGESYKEKQRTIQAKKEVEQRRAGGYSRKYASKAKNLADDMVRNTARDLLYYAVTQDAMLIFENLSRGFGRQGKRTFMAERQYTRMEDWLTAKLAYEGLPSKTYLSKTLAQYTSKTCSNCGFTITSADYDRVLEKLKKTATGWMTTINGKELKVEGQITYYNRYKRQNVVKDLSVELDRLSEESVNNDISSWDKGRSGEALSLLKKRFSHRPVQEKFVCLNCGFETHADEQAALNIARSWLFLRSQEYKKYQTNKTTGNTDKRAFVETWQSFYRKKLKEVWKPAV

SEQ ID NO: 40178 - protein, 978 aa, synthetic construct
  REGION 1..978: note = engineered CasX variant
QEIKRINKIRRRLVKDSNTKKAGKTGPMKTLLVRVMTPDLRERLENLRKKPENIPQPISNTSRANLNKLLTDYTEMKKAILHVYWEEFQVDPVGLMSRVAQPASKKIDQNKLKPEMDEKGNLTTAGFACSQCGQPLFVYKLEQVSEKGKAYTNYFGRCNVAEHEKLILLAQLKPEKDSDEAVTYSLGKFGQRALDFYSIHVTKESTHPVKPLAQIAGNRYASGPVGKALRDACMGTIASFLSKYQDIIIEHQKVVKGNQKRLESLRELAGKENLEYPSVTLPPQPHTKEGVDAYNEVIARVRMWVNLNLWQKLKLSRDDAKPLLRLKGFPSFPLVERQANEVDWWDMVCNVKKLINEKKEDGKVFWQNLAGYKRQEALRPYLSSEEDRKKGKKFARTQLGDLLLHLEKKHGEDWGKVYDEAWERIDKKVEGLSKHIKLEEERRSEDAQSKAALTDWLRAKASFVIEGLKEADKDEFCRCELKLQKWYGDLRGKPFAIEAENSILDISGFSKQYNCAFIWQKDGVKKLNLYLIINYFKGGKLRFKKIKPEAFEANRFYTVINKKSGEIVPMEVNFNFDDPNLIILPLAFGKRQGREFIWNDLLSLETGSLKLANGRVIEKTLYNRRTRQDEPALFVALTFERREVLDSSNIKPMNLIGVDRGENIPAVIALTDPEGCPLSRFKDSLGNPTHILRIGESYKEKQRTIQAKKEVEQRRAGGYSRKYASKAKNLADDMVRNTARDLLYYAVTQDAMLIFENLSRGFGRQGKRTFMAERQYTRMEDWLTAKLAYEGLPSKTYLSKTLAQYTSKTCSNCGFTITSADYDRVLEKLKKTATGWMTTINGKELKVEGQITYYNRYKRQNVVKDLSVELDRLSEESVNNDISSWTKGRSGEALSLLKKRFSHRPVQEKFVCLNCGFETHADEQAALNIARSWLFLRSQEYKKYQTNKTTGNTDKRAFVETWQSFYRKKLKEVWKPAV

SEQ ID NO: 40179 - protein, 978 aa, synthetic construct
  REGION 1..978: note = engineered CasX variant
QEIKRLNKIRRRLVKDSNTKKAGKTGPMKTLLVRVMTPDLRERLENLRKKPENIPQPISNTSRANLNKLLTDYTEMKKAILHVYWEEFQKDPVGLMSRVAQPASKKIDQNKLKPEMDEKGNLTTAGFACSQCGQPLFVYKLEQVSEKGKAYTNYFGRCNVAEHEKLILLAQLKPEKDSDEAVTYSLGKFGQRALDFYSIHVTKESTHPVKPLAQIAGNRYASGPVGKALRDACMGTIASFLSKYQDIIIEHQKVVKGNQKRLESLRELAGKENLEYPSVTLPPQPHTKEGVDAYNEVIARVRMWVNLNLWQKLKLSRDDAKPLLRLKGFPSFPLVERQANEVDWWDMVCNVKKLINEKKEDGKVFWQNLAGYKRQEALRPYLSSEEDRKKGKKFARTQLGDLLLHLEKKHGEDWGKVYDEAWERIDKKVEGLSKHIKLEEERRSEDAQSKAALTDWLRAKASFVIEGLKEADKDEFCRCELKLQKWYGDLRGKPFAIEAENSILDISGFSKQYNCAFIWQKDGVKKLNLYLIINYFKGGKLRFKKIKPEAFEANRFYTVINKKSGEIVPMEVNFNFDDPNLIILPLAFGKRQGREFIWNDLLSLETGSLKLANGRVIEKTLYNRRTRQDEPALFVALTFERREVLDSSNIKPMNLIGVDRGENIPAVIALTDPEGCPLSRFKDSLGNPTHILRIGESYKEKQRTIQAKKEVEQRRAGGYSRKYASKAKNLADDMVRNTARDLLYYAVTQDAMLIFENLSRGFGRQGKRTFMAERQYTRMEDWLTAKLAYEGLPSKTYLSKTLAQYTSKTCSNCGFTITSADYDRVLEKLKKTATGWMTTINGKELKVEGQITYYNRYKRQNVVKDLSVELDRLSEESVNNDISSWTKGRSGEALSLLKKRFSHRPVQEKFVCLNCGFETHADEQAALNIARSWLFLRSQEYKKYQTNKTTGNTDKRAFVETWQSFYRKKLKEVWKPAV

SEQ ID NO: 40180 - protein, 978 aa, synthetic construct
  REGION 1..978: note = engineered CasX variant
QEIKRINKIRRRLVKDSNTKKAGKTGPMKTLLVRVMTPDLRERLENLRKKPENIPQPISNTSRANLNKLLTDYTEMKKAILHVYWEEFQKDPVGLMSRVAQPASKKIDQNKLKPEMDEKGNLTTAGFACSQCGQPLFVYKLEQVSEKGKAYTNYVGRCNVAEHEKLILLAQLKPEKDSDEAVTYSLGKFGQRALDFYSIHVTKESTHPVKPLAQIAGNRYASGPVGKALRDACMGTIASFLSKYQDIIIEHQKVVKGNQKRLESLRELAGKENLEYPSVTLPPQPHTKEGVDAYNEVIARVRMWVNLNLWQKLKLSRDDAKPLLRLKGFPSFPLVERQANEVDWWDMVCNVKKLINEKKEDGKVFWQNLAGYKRQEALRPYLSSEEDRKKGKKFARTQLGDLLLHLEKKHGEDWGKVYDEAWERIDKKVEGLSKHIKLEEERRSEDAQSKAALTDWLRAKASFVIEGLKEADKDEFCRCELKLQKWYGDLRGKPFAIEAENSILDISGFSKQYNCAFIWQKDGVKKLNLYLIINYFKGGKLRFKKIKPEAFEANRFYTVINKKSGEIVPMEVNFNFDDPNLIILPLAFGKRQGREFIWNDLLSLETGSLKLANGRVIEKTLYNRRTRQDEPALFVALTFERREVLDSSNIKPMNLIGVDRGENIPAVIALTDPEGCPLSRFKDSLGNPTHILRIGESYKEKQRTIQAKKEVEQRRAGGYSRKYASKAKNLADDMVRNTARDLLYYAVTQDAMLIFENLSRGFGRQGKRTFMAERQYTRMEDWLTAKLAYEGLPSKTYLSKTLAQYTSKTCSNCGFTITSADYDRVLEKLKKTATGWMTTINGKELKVEGQITYYNRYKRQNVVKDLSVELDRLSEESVNNDISSWTKGRSGEALSLLKKRFSHRPVQEKFVCLNCGFETHADEQAALNIARSWLFLRSQEYKKYQTNKTTGNTDKRAFVETWQSFYRKKLKEVWKPAV

SEQ ID NO: 40181 - protein, 978 aa, synthetic construct
  REGION 1..978: note = engineered CasX variant
QEIKRINKIRRRLVKDSNTKKAGKTGPMKTLLVRVMTPDLRERLENLRKKPENIPQPISNTSRANLNKLLTDYTEMKKAILHVYWEEFQKDPVGLMSRVAQPASKKIDQNKLKPEMDEKGNLTTAGFACSQCGQPLFVYKLEQVSEKGKAYTNYFGRCNVAEHEKLILLAQLKPEKDSDEAVTYSLGKFGQRALDFYSIHVTKESTHPVKPLAQIAGNRYASGPVGKALRDACMGTIASFLSKYQDIIIEHQKVVKGNQKRLESLRELAGKENLEYPSVTLPPQPHTKEGVDAYNEVIARVRMWVNLNLWQKLKLSRDDAKPLLRLKGFPSFPLVERQANEVDWWDMVCNVKKLINEKKEDGKVFWQNLAGYKRQEALRPYLSSEEDRKKGKKFARTQLGDLLLHLEKKHGEDWGKVYDEAWERIDKKVEGLSKHIKLEEERRSEDAQSKAALTDWLRAKASFVIEGLKEADKDEFCRCELKLQKWYGDLRGKPFAIEAENSILDISGFSKQYNCAFIWQKDGVKKLNLYLIINYFKGGKLRFKKIKPEAFEANRFYTVINKKSGEIVPMEVNFNFDDPNLIILPLAFGKRQGREFIWNDLLSLETGSLKLANGRVIEKTLYNRRTRQDEPALFVALTFERREVLDSSNIKPMNLIGVDRGENIPAVIALTDPEGCPLSRFKDSLGNPTHILRIGESYKEKQRTIQAKKEVEQRRAGGYSRKYASKAKNLADDMVRNTARDLLYYAVTQDAMLIFENLSRGFGRQGKRTFMAERQYTRMEDWLTAKLAYEGLASKTYLSKTLAQYTSKTCSNCGFTITSADYDRVLEKLKKTATGWMTTINGKELKVEGQITYYNRYKRQNVVKDLSVELDRLSEESVNNDISSWTKGRSGEALSLLKKRFSHRPVQEKFVCLNCGFETHADEQAALNIARSWLFLRSQEYKKYQTNKTTGNTDKRAFVETWQSFYRKKLKEVWKPAV

SEQ ID NO: 40182 - protein, 978 aa, synthetic construct
  REGION 1..978: note = engineered CasX variant
QEIKRINKIRRRLVKDSNTKKAGKTGPMKTLLVRVMTPDLRERLENLRKKPENIPQPISNTSRANLNKLLTDYTEMKKAILHVYWEEFQKDPVGLMSRVAQPASKKIDQNKLKPEMDEKGNLTTAGFACSQCGQPLFVYKLEQVSEKGKAYTNYFGRCNVAEHEKLILLAQLKPEKDSDEAVTYSLGKFGQRALDFYSIHVTKESTHPVKPLAQIAGNRYASGPVGKALRDACMGTIASFLSKYQDIIIEHQKVVKGNQKRLESLRELAGKENLEYPSVTLPPQPHTKEGVDAYNEVIARVRMWVNLNLWQKLKLSRDDAKPLLRLKGFPSFPLVERQANEVDWWDMVCNVKKLINEKKEDGKVFWQNLAGYKRQEALRPYLSSEEDRKKGKKFARTQLGDLLLHLEKKHGEDWGKVYDEAWERIDKKVEGLSKHIKLEEERRSEDAQSKAALTDWLRAKASFVIEGLKEADKDEFCRCELKLQKWYGDLRGKPFAIEAENSILDISGFSKQYNCAFIWQKDGVKKLNLYLIINYFKGGKLRFKKIKPEAFEANRFYTVINKKSGEIVPMEVNFNFDDPNLIILPLAFGKRQGREFIWNDLLSLETGSLKLANGRVIEKTLYNRRTRQDEPALFVALTFERREVLDSSNIKPMNLIGVDRGENIPAVIALTDPEGCPLSRFKDSLGNPTHILRIGESYKEKQRTIQAKKEVEQRRAGGYSRKYASKAKNLADDMVRNTARDLLYYAVTQDAMLIFENLSRGFGRQGKRTFMAERQYTRMEDWLTAKLAYEGLPSKVYLSKTLAQYTSKTCSNCGFTITSADYDRVLEKLKKTATGWMTTINGKELKVEGQITYYNRYKRQNVVKDLSVELDRLSEESVNNDISSWTKGRSGEALSLLKKRFSHRPVQEKFVCLNCGFETHADEQAALNIARSWLFLRSQEYKKYQTNKTTGNTDKRAFVETWQSFYRKKLKEVWKPAV

SEQ ID NO: 40183 - protein, 979 aa, synthetic construct
  REGION 1..979: note = engineered CasX variant
QEIKRINKIRRRLVKDSNTKKAGKTGPMKTLLVRVMTPDLRERLENLRKKPENIPQPISNTSRANLNKLLTDYTEMKKAILHVYWEEFQKDPVGLMSRVAQPASKKIDQNKLKPEMDEKGNLTTAGFACSQCGQPLFVYKLEQVSEKGKAYTNYFGRCNVAEHEKLILLAQLKPEKDSDEAVTYSLGKFGQRALDFYSIHVTKESTHPVKPLAQIAGNRYASGPVGKALRDACMGTIASFLSKYQDIIIEHQKVVKGNQKRLESLRELAGKENLEYPSVTLPPQPHTKEGVDAYNEVIARVRMWVNLNLWQKLKLSRDDAKPLLRLKGFPSFPLVERQANEVDWWDMVCNVKKLINEKKEDGKVFWQNLAGYKRQEALRPYLSSEEDRKKGKKFARTQLGDLLLHLEKKHGEDWGKVYDEAWERIDKKVEGLSKHIKLEEERRSEDAQSKAALTDWLRAKASFVIEGLKEADKDEFCRCELKLQKWYGDLRGKPFAIEAENSILDISGFSKQYNCAFIWQKDGVKKLNLYLIINYFKGGKLRFKKIKPEAFEANRFYTVINKKSGEIVPMEVNFNFDDPNLIILPLAFGKRQGREFIWNDLLSLETGSLKLANGRVIEKTLYNRRTRQDEPALFVALTFERREVLDSSNIKPMNLIGVDRGENIPAVIALTDPEGCPLSRFKDSLGNPTHILRIGESYKEKQRTIQAKKEVEQRRAGGYSRKYASKAKNLADDMVRNTARDLLYYAVTQDAMLIFENLSRGFGRQGKRTFMAERQYTRMEDWLTAKLAYEGPLPSKTYLSKTLAQYTSKTCSNCGFTITSADYDRVLEKLKKTATGWMTTINGKELKVEGQITYYNRYKRQNVVKDLSVELDRLSEESVNNDISSWTKGRSGEALSLLKKRFSHRPVQEKFVCLNCGFETHADEQAALNIARSWLFLRSQEYKKYQTNKTTGNTDKRAFVETWQSFYRKKLKEVWKPAV

SEQ ID NO: 40184 - protein, 979 aa, synthetic construct
  REGION 1..979: note = engineered CasX variant
QEIKRINKIRRRLVKDSNTKKAGKTGPMKTLLVRVMTPDLRERLENLRKKPENIPQPISNTSRANLNKLLTDYTEMKKAILHVYWEEFQKDPVGLMSRVAQPASKKIDQNKLKPEMDEKGNLTTAGFACSQCGQPLFVYKLEQVSEKGKAYTNYFGRCNVAEHEKLILLAQLKPEKDSDEAVTYSLGKFGQRALDFYSIHVTKESTHPVKPLAQIAGNRYASGPVGKALRDACMGTIASFLSKYQDIIIEHQKVVKGNQKRLESLRELAGKENLEYPSVTLPPQPHTKEGVDAYNEVIARVRMWVNLNLWQKLKLSRDDAKPLLRLKGFPSFPLVERQANEVDWWDMVCNVKKLINEKKEDGKVFWQNLAGYKRQEALRPYLSSEEDVRKKGKKFARTQLGDLLLHLEKKHGEDWGKVYDEAWERIDKKVEGLSKHIKLEEERRSEDAQSKAALTDWLRAKASFVIEGLKEADKDEFCRCELKLQKWYGDLRGKPFAIEAENSILDISGFSKQYNCAFIWQKDGVKKLNLYLIINYFKGGKLRFKKIKPEAFEANRFYTVINKKSGEIVPMEVNFNFDDPNLIILPLAFGKRQGREFIWNDLLSLETGSLKLANGRVIEKTLYNRRTRQDEPALFVALTFERREVLDSSNIKPMNLIGVDRGENIPAVIALTDPEGCPLSRFKDSLGNPTHILRIGESYKEKQRTIQAKKEVEQRRAGGYSRKYASKAKNLADDMVRNTARDLLYYAVTQDAMLIFENLSRGFGRQGKRTFMAERQYTRMEDWLTAKLAYEGLPSKTYLSKTLAQYTSKTCSNCGFTITSADYDRVLEKLKKTATGWMTTINGKELKVEGQITYYNRYKRQNVVKDLSVELDRLSEESVNNDISSWTKGRSGEALSLLKKRFSHRPVQEKFVCLNCGFETHADEQAALNIARSWLFLRSQEYKKYQTNKTTGNTDKRAFVETWQSFYRKKLKEVWKPAV

SEQ ID NO: 40185 - protein, 978 aa, synthetic construct
  REGION 1..978: note = engineered CasX variant
QEIKRINKIRRRLVKDSNTKKAGKTGPMKTLLVRVMTPDLRERLENLRKKPENIPQPISNTSRANLNKLLTDYTEMKKAILHVYWEEFQKDPVGLMSRVAQPASKKIDQNKLKPEMDEKGNLTTAGFACSQCGQPLFVYKLEQVSEKGKAYTNYFGRCNVAEHEKLILLAQLKPEKDSDEAVTYSLGKFGQRALDFYSIHVTKESTHPVKPLAQIAGNRYASGPVGKALRDACMGTIASFLSKYQDIIIEHQKVVKGNQKRLESLRELAGKENLEYPSVTLPPQPHTKEGVDAYNEVIARVRMWVNLNLWQKLKLSRDDAKPLLRLKGFPSFPLVERQANEVDWWDMVCNVKKLINEKKEDGKVFWQNLAGYKRQEALRPYLSSEEDRKKGKKFARTQLGDLLLHLEKKHGEDWGKVYDEAWERIDKKVEGLSKHIKLEEERRSEDAQSKAALTDWLRAKASFVIEGLKEADKDEFCRCELKLQKWYGDLRGKPFAIEAENSILDISGFSKQYNCAFIWQKDGVKKLNLYLIINYFKGGKLRFKKIKPEAFEANRFYTVINKKSGEIVPMEVNFNFDDPNLIILPLAFGKRQGREFIWNDLLSLETGSLKLANGRVIEKTLYNRRTRQDEPALFVALTFERREVLDSSNIKPMNLIGVDRGENIPAVIALTDPEGCPLSRFKDSLGNPTHILRIGESYKEKQRTIQAKKEVEQRRAGGYSRKYASKAKNLADDMVRNTARDLLYYAVTQDAMLIFENLSRGFGRQGKRTFMAERQYTRMEDWLTAKLAYEGLPSKTYLSKTLAQYTSKTCSNCGFTITSADYDRMLEKLKKTATGWMTTINGKELKVEGQITYYNRYKRQNVVKDLSVELDRLSEESVNNDISSWTKGRSGEALSLLKKRFSHRPVQEKFVCLNCGFETHADEQAALNIARSWLFLRSQEYKKYQTNKTTGNTDKRAFVETWQSFYRKKLKEVWKPAV

SEQ ID NO: 40186 - protein, 978 aa, synthetic construct
  REGION 1..978: note = engineered CasX variant
QEIKRINKIRRRLVKDSNTKKAGKTGPMKTLLVRVMTPDLRERLENLRKKPENIPQPISNTSRANLNKLLTDYTEMKKAILHVYWEEFQKDPVGLMSRVAQPASKKIDQNKLKPEMDEKGNLTTAGFACSQCGQPLFVYKLEQVSEKGKAYTNYFGRCNVAEHEKLILLAQLKPEKDSDEAVTYSLGKFGQRALDFYSIHVTKESTHPVKPLAQIAGNRYASGPVGKALRDACMGTIASFLSKYQDIIIEHQKVVKGNQKRLESLRELAGKENLEYPSVTLPPQPHTKEGVDAYNEVIARVRMWVNLNLWQKLKLSRDDAKPLLRLKGFPSFPLVERQANEVDWWDMVCNVKKLINEKKEDGKVFWQNLAGYKRQEALRPYLSSEEDRKKGKKFARTQLGDLLLHLEKKHGEDWGKVYDEAWERIDKKVEGLSKHIKLEEERRSEDAQSKAALTDWLRAKASFVIEGLKEADKDEFCRCELKLQKWYGDLRGKPFAIEAENSILDISGFSKQYNCAFIWQKDGVKKLNLYLIINYFKGGKLRFKKIKPEAFEANRFYTVINKKSGEIVPMEVNFNFDDPNLIILPLAFGKRQGREFIWNDLLSLETGSLKLANGRVIEKTLYNRRTRQDEPALFVALTFERREVLDSSNIKPMNLIGVDRGENIPAVIALTDPEGCPLSRFKDSLGNPTHILRIGESYKEKQRTIQAKKEVEQRRAGGYSRKYASKAKNLADDMVRNTARDLLYYAVTQDAMLIFENLSRGFGRQGKRTFMAERQYTRMEDWLTAKLAYEGLPSKTYLSKTLAQYTSKTCSNCGFTITSADYDRVLEKLKKTATGWMTTINGKELKVEGQITYYNRYKRQNVVKDLSVELDRLSEESVNNDISSWTKGRQGEALSLLKKRFSHRPVQEKFVCLNCGFETHADEQAALNIARSWLFLRSQEYKKYQTNKTTGNTDKRAFVETWQSFYRKKLKEVWKPAV

SEQ ID NO: 40187 - protein, 978 aa, synthetic construct
  REGION 1..978: note = engineered CasX variant
QEIKRINKIRRRLVKDSNTKKAGKTGPMKTLLVRVMTPDLRERLENLRKKPENIPQPISNTSRANLNKLLTDYTEMKKAILHVYWEEFQKDPVGLMSRVAQPASKKIDQNKLKPEMDEKGNLTTAGFACSQCGQPLFVYKLEQVSEKGKAYTNYFGRCNVAEHEKLILLAQLKPEKDSDEAVTYSLGKFGQRALDFYSIHVTKESTHPVKPLAQIAGNRYASGPVGKALRDACMGTIASFLSKYQDIIIEHQKVVKGNQKRLESLRELAGKENLEYPSVTLPPQPHTKEGVDAYNEVIARVRMWVNLNLWQKLKLSRDDAKPLLRLKGFPSFPLVERQANEVDWWDMVCNVKKLINEKKEDGKVFWQNLAGYKRQEALRPYLSSEEDRKKGKKFARTQLGDLLLHLEKKHGEDWGKVYDEAWERIDKKVEGLSKHIKLEEERRSEDAQSKAALTDWLRAKASFVIEGLKEADKDEFCRCELKLQKWYGDLRGKPFAIEAENSILDISGFSKQYNCAFIWQKDGVKKLNLYLIINYFKGGKLRFKKIKPEAFEANRFYTVINKKSGEIVPMEVNFNFDDPNLIILPLAFGKRQGREFIWNDLLSLETGSLKLANGRVIEKTLYNRRTRQDEPALFVALTFERREVLDSSNIKPMNLIGVDRGENIPAVIALTDPEGCPLSRFKDSLGNPTHILRIGESYKEKQRTIQAKKEVEQRRAGGYSRKYASKAKNLADDMVRNTARDLLYYAVTQDAMLIFENLSRGFGRQGKRTFMAERQYTRMEDWLTAKLAYEGLPSKTYLSKTLAQYTSKTCSNCGFTITSADYDRVLEKLKKTATGWMTTINGKELKVEGQITYYNRYKRQNVVKDLSVELDRLSEESVNNDISSWTKGRSGEALSLLKKRFSHRPVQEKFVCLNCEFETHADEQAALNIARSWLFLRSQEYKKYQTNKTTGNTDKRAFVETWQSFYRKKLKEVWKPAV

SEQ ID NO: 40188 - protein, 979 aa, synthetic construct
  REGION 1..979: note = engineered CasX variant
QEIKRINKIRRRLVKDSNTKKAGKTGPMKTLLVRVMTPDLRERLENLRKKPENIPQPISNTSRANLNKLLTDYTEMKKAILHVYWEEFQKDPVGLMSRVAQPASKKIDQNKLKPEMDEKGNLTTAGFACSQCGQPLFVYKLEQVSEKGKAYTNYFGRCNVAEHEKLILLAQLKPEKDSDEAVTYSLGKFGQRALDFYSIHVTKESTHPVKPLAQIAGNRYASGPVGKALRDACMGTIASFLSKYQDIIIEHQKVVKGNQKRLESLRELAGKENLEYPSVTLPPQPHTKEGVDAYNEVIARVRMWVNLNLWQKLKLSRDDAKPLLRLKGFPSFPLVERQANEVDWWDMVCNVKKLINEKKEDGKVFWQNLAGYKRQEALRPYLSSEEDRKKGKKFARTQLGDLLLHLEKKHGEDWGKVYDEAWERIDKKVEGLSKHIKLEEERRSEDAQSKAALTDWLRAKASFVIEGLKEADKDEFCRCELKLQKWYGDLRGKPFAIEAENSILDISGFSKQYNCAFIWQKDGVKKLNLYLIINYFKGGKLRFKKIKPEAFEANRFYTVINKKSGEIVPMEVNFNFDDPNLIILPLAFGKRQGREFIWNDLLSLETGSLKLANGRVIEKTLYNRRTRQDEPALFVALTFERREVLDSSNIKPMNLIGVDRGENIPAVIALTDPEGCPLSRFKDSLGNPTHILRIGESYKEKQRTIQAKKEVEQRRAGGYSRKYASKAKNLADDMVRNTARDLLYYAVTQDAMLIFENLSRGFGRQGKRTFMAERQYTRMEDWLTAKLAYEGLPSKTYLSKTLAQYTSKTCSNCGFTITSADYDRVLEKLKKTATGWMTTINGKELKVEGQITYYNRYKRQNVVKDLSVELDRLSEESVNNDISSWTKGRSGEALSLLKKRFSHRPVQEKFVCLNCGFETHADEQAALNIARSWLFLRSQEYKKYQTNKTSTGNTDKRAFVETWQSFYRKKLKEVWKPAV

SEQ ID NO: 40189 - protein, 979 aa, synthetic construct
  REGION 1..979: note = engineered CasX variant
QEIKRINKIRRRLVKDSNTKKAGKTGPMKTLLVRVMTPDLRERLENLRKKPENIPQPISNTSRANLNKLLTDYTEMKKAILHVYWEEFQKDPVGLMSRVAQPASKKIDQNKLKPEMDEKGNLTTAGFACSQCGQPLFVYKLEQVSEKGKAYTNYFGRCNVAEHEKLILLAQLKPEKDSDEAVTYSLGKFGQRALDFYSIHVTKESTHPVKPLAQIAGNRYASGPVGKALRDACMGTIASFLSKYQDIIIEHQKVVKGNQKRLESLRELAGKENLEYPSVTLPPQPHTKEGVDAYNEVIARVRMWVNLNLWQKLKLSRDDAKPLLRLKGFPSFPLVERQANEVDWWDMVCNVKKLINEKKEDGKVFWQNLAGYKRQEALRPYLSSEEDRKKGKKFARTQLGDLLLHLEKKHGEDWGKVYDEAWERIDKKVEGLSKHIKLEEERRSEDAQSKAALTDWLRAKASFVIEGLKEADKDEFCRCELKLQKWYGDLRGKPFAIEAENSILDISGFSKQYNCAFIWQKDGVKKLNLYLIINYFKGGKLRFKKIKPEAFEANRFYTVINKKSGEIVPMEVNFNFDDPNLIILPLAFGKRQGREFIWNDLLSLETGSLKLANGRVIEKTLYNRRTRQDEPALFVALTFERREVLDSSNIKPMNLIGVDRGENIPAVIALTDPEGCPLSRFKDSLGNPTHILRIGESYKEKQRTIQAKKEVEQRRAGGYSRKYASKAKNLADDMVRNTARDLLYYAVTQDAMLIFENLSRGFGRQGKRTFMAERQYTRMEDWLTAKLAYEGLPSKTYLSKTLAQYTSKTCSNCGFTITSADYDRVLEKLKKTATGWMTTINGKELKVEGQITYYNRYKRQNVVKDLSVELDRLSEESVNNDISSWTKGRSGEALSLLKKRFSHRPVQEKFVCLNCGFETHADEQAALNIARSWLFLRSQEYKKYQTNKTTGKNTDKRAFVETWQSFYRKKLKEVWKPAV

SEQ ID NO: 40190 - protein, 978 aa, synthetic construct
  REGION 1..978: note = engineered CasX variant
QEIKRINKIRRRLVKDSNTKKAGKTGPMKTLLVRVMTPDLRERLENLRKKPENIPQPISNTSRANLNKLLTDYTEMKKAILHVYWEEFQKDPVGLMSRVAQPASKKIDQNKLKPEMDEKGNLTTAGFACSQCGQPLFVYKLEQVSEKGKAYTNYFGRCNVAEHEKLILLAQLKPEKDSDEAVTYSLGKFGQRALDFYSIHVTKESTHPVKPLAQIAGNRYASGPVGKALRDACMGTIASFLSKYQDIIIEHQKVVKGNQKRLESLRELAGKENLEYPSVTLPPQPHTKEGVDAYNEVIARVRMWVNLNLWQKLKLSRDDAKPLLRLKKFPSFPLVERQANEVDWWDMVCNVKKLINEKKEDGKVFWQNLAGYKRQEALRPYLSSEEDRKKGKKFARTQLGDLLLHLEKKHGEDWGKVYDEAWERIDKKVEGLSKHIKLEEERRSEDAQSKAALTDWLRAKASFVIEGLKEADKDEFCRCELKLQKWYGDLRGKPFAIEAENSILDISGFSKQYNCAFIWQKDGVKKLNLYLIINYFKGGKLRFKKIKPEAFEANRFYTVINKKSGEIVPMEVNFNFDDPNLIILPLAFGKRQGREFIWNDLLSLETGSLKLANGRVIEKTLYNRRTRQDEPALFVALTFERREVLDSSNIKPMNLIGVDRGENIPAVIALTDPEGCPLSRFKDSLGNPTHILRIGESYKEKQRTIQAKKEVEQRRAGGYSRKYASKAKNLADDMVRNTARDLLYYAVTQDAMLIFENLSRGFGRQGKRTFMAERQYTRMEDWLTAKLAYEGLPSKTYLSKTLAQYTSKTCSNCGFTITSADYDRVLEKLKKTATGWMTTINGKELKVEGQITYYNRYKRQNVVKDLSVELDRLSEESVNNDISSWTKGRSGEALSLLKKRFSHRPVQEKFVCLNCGFETHADEQAALNIARSWLFLRSQEYKKYQTNKTTGNTDKRAFVETWQSFYRKKLKEVWKPAV

SEQ ID NO: 40191 - protein, 978 aa, synthetic construct
  REGION 1..978: note = engineered CasX variant
QEIKRINKIRRRLVKDSNTKKAGKTGPMKTLLVRVMTPDLRERLENLRKKPENIPQPISNTSRANLNKLLTDYTEMKKAILHVYWEEFQKDPVGLMSRVAQPASKKIDQNKLKPEMDEKGNLTTAGFACSQCGQPLFVYKLEQVSEKGKAYTNYFGRCNVAEHEKLILLAQLKPEKDSDEAVTYSLGKFGQRALDFYSIHVTKESTHPVKPLAQIAGNRYASGPVGKALRDACMGTIASFLSKYQDIIIEHQKVVKGNQKRLESLRELAGKENLEYPSVTLPPQPHTKEGVDAYNEVIARVRMWVNLNLWQKLKLSRDDAKPLLRLKGFPSFPLVERQANEVDWWDMVCNVKKLINEKKEDGKVFWQNLAGYKRQEALRPYLSSEEDRKKGKKFARTQLGDLLLHLEKKHGEDWGKVYDEAWERIDKKVEGLSKHIKLEEERRSEDAQSKAALTDWLRAKASFVIEGLKEADKDEFCRCELKLQKWYGDLRGKPFAIEAENSILDISGFSKQYNCAFIWQKDGVKKLNLYLIINYFKGGKLRFKKIKPEAFEANRFYTVINKKSGEIVPMEVNFNFDDPNLIILPLAFGKRQGREFIWNDLLSLETGSLKLANGRVIEKTLYNRRTRQDEPALFVALTFERREVLDSSNIKPMNLIGVDRGENIPAVIALTDPEGCPLSRFKDSLGNPTHILRIGERYKEKQRTIQAKKEVEQRRAGGYSRKYASKAKNLADDMVRNTARDLLYYAVTQDAMLIFENLSRGFGRQGKRTFMAERQYTRMEDWLTAKLAYEGLPSKTYLSKTLAQYTSKTCSNCGFTITSADYDRVLEKLKKTATGWMTTINGKELKVEGQITYYNRYKRQNVVKDLSVELDRLSEESVNNDISSWTKGRSGEALSLLKKRFSHRPVQEKFVCLNCGFETHADEQAALNIARSWLFLRSQEYKKYQTNKTTGNTDKRAFVETWQSFYRKKLKEVWKPAV

SEQ ID NO: 40192 - protein, 978 aa, synthetic construct
  REGION 1..978: note = engineered CasX variant
QEIKRINKIRRRLVKDSNTKKAGKTGPMKTLLVRVMTPDLRERLENLRKKPENIPQPISNTSRANLNKLLTDYTEMKKAILHVYWEEFQKDPVGLMSRVAQPASKKIDQNKLKPEMDEKGNLTTAGFACSQCGQPLFVYKLEQVSEKGKAYTNYFGRCNVAEHEKLILLAQLKPEKDSDEAVTYSLGKFGQRALDFYSIHVTKESTHPVKPLAQIAGNRYASGPVGKALRDACMGTIASFLSKYQDIIIEHQKVVKGNQKRLESLRELAGKENLEYPSVTLPPQPHTKEGVDAYNEVIARVRMWVNLNLWQKLKLSRDDAKPLLRLKGFPSFPLVERQANEVDWWDMVCNVKKLINEKKEDGKVFWQNLAGYKRQEALRPYLSSEEDRKKGKKFARTQLGDLLLHLEKKHGEDWGKVYDEAWERIDKKVEGLSKHIKLEEERRSEDAQSKAALTDWLRAKASFVIEGLKEADKDEFCRCELKLQKWYGDLRGKPFAIEAENSILDISGFSKQYNCAFIWQKDGVKKLNLYLIINYFKGGKLRFKKIKPEAFEANRFYTVINKKSGEIVPMEVNFNFDDPNLIILPLAFGKRQGREFIWNDLLSLETGSLQLANGRVIEKTLYNRRTRQDEPALFVALTFERREVLDSSNIKPMNLIGVDRGENIPAVIALTDPEGCPLSRFKDSLGNPTHILRIGESYKEKQRTIQAKKEVEQRRAGGYSRKYASKAKNLADDMVRNTARDLLYYAVTQDAMLIFENLSRGFGRQGKRTFMAERQYTRMEDWLTAKLAYEGLPSKTYLSKTLAQYTSKTCSNCGFTITSADYDRVLEKLKKTATGWMTTINGKELKVEGQITYYNRYKRQNVVKDLSVELDRLSEESVNNDISSWTKGRSGEALSLLKKRFSHRPVQEKFVCLNCGFETHADEQAALNIARSWLFLRSQEYKKYQTNKTTGNTDKRAFVETWQSFYRKKLKEVWKPAV

SEQ ID NO: 40193 - protein, 979 aa, synthetic construct
  REGION 1..979: note = engineered CasX variant
QEIKRINKIRRRLVKDSNTKKAGKTGPMKTLLVRVMTPDLRERLENLRKKPENIPQPISNTSRANLNKLLTDYTEMKKAILHVYWEEFQKDPVGLMSRVAQPASKKIDQNKLKPEMDEKGNLTTAGFACSQCGQPLFVYKLEQVSEKGKAYTNYFGRCNVAEHEKLILLAQLKPEKDSDEAVTYSLGKFGQRALDFYSIHVTKESTHPVKPLAQIAGNRYASGPVGKALRDACMGTIASFLSKYQDIIIEHQKVVKGNQKRLESLRELAGKENLEYPSVTLPPQPHTKEGVDAYNEVIARVRMWVNLNLWQKLKLSRDDAKPLLRLKGFPSFPLVERQANEVDWWDMVCNVKKLINEKKEDGKVFWQNLAGYKRQEALRPYLSSEEDRKKGKKFARYQLGDLLLHLEKKHEGEDWGKVYDEAWERIDKKVEGLSKHIKLEEERRSEDAQSKAALTDWLRAKASFVIEGLKEADKDEFCRCDLKLQKWYGDLRGKPFAIEAENSILDISGFSKQYNCAFIWQKDGVKKLNLYLIINYFKGGKLRFKKIKPEAFEANRFYTVINKKSGEIVPMEVNFNFDDPNLIILPLAFGKRQGREFIWNDLLSLETGSLKLANGRVIEKTLYNRRTRQDEPALFVALTFERREVLDSSNIKPMNLIGVDRGENIPAVIALTDPEGCPLSRFKDSLGNPTHILRIGESYKEKQRTIQAKKEVEQRRAGGYSRKYASKAKNLADDMVRNTARDLLYYAVTQDAMLIFENLSRGFGRQGKRTFMAERQYTRMEDWLTAKLAYEGLPSKTYLSKTLAQYTSKTCSNCGFTITSADYDRVLEKLKKTATGWMTTINGKELKVEGQITYYNRYKRQNVVKDLSVELDRLSEESVNNDISSWTKGRSGEALSLLKKRFSHRPVQEKFVCLNCGFETHADEQAALNIARSWLFLRSQEYKKYQTNKTTGNTDKRAFVETWQSFYRKKLKEVWKPAV

SEQ ID NO: 40194 - protein, 979 aa, synthetic construct
  REGION 1..979: note = engineered CasX variant
QEIKRINKIRRRLVKDSNTKKAGKTGPMKTLLVRVMTPDLRERLENLRKKPENIPQPISNTSRANLNKLLTDYTEMKKAILHVYWEEFQKDPVGLMSRVAQPASKKIDQNKLKPEMDEKGNLTTAGFACSQCGQPLFVYKLEQVSEKGKAYTNYFGRCNVAEHEKLILLAQLKPEKDSDEAVTYSLGKFGQRALDFYSIHVTKESTHPVKPLAQIAGNRYASGPVGKALRDACMGTIASFLSKYQDIIIEHQKVVKGNQKRLESLRELAGKENLEYPSVTLPPQPHTKEGVDAYNEVIARVRMWVNLNLWQKLKLSRDDAKPLLRLKGFPSFPLVERQANEVDWWDMVCNVKKLINEKKEDGKVFWQNLAGYKRQEALRPYLSSEEDRKKGKKFARYQLGDLLLHLEKKHEGEDWGKVYDEAWERIDKKVEGLSKHIKLEEERRSEDAQSKAALTDWLRAKASFVIEGLKEADKDEFCRCELKLQKWYGDLRGKPFAIEAENSILDISGFSKQYNCAFIWQKDGVKKLNLYLIINYFKGGKLRFKKIKPEAFEANRFYTVINKKSGEIVPMEVNFNFDDPNLIILPLAFGKRFGREFIWNDLLSLETGSLKLANGRVIEKTLYNRRTRQDEPALFVALTFERREVLDSSNIKPMNLIGVDRGENIPAVIALTDPEGCPLSRFKDSLGNPTHILRIGESYKEKQRTIQAKKEVEQRRAGGYSRKYASKAKNLADDMVRNTARDLLYYAVTQDAMLIFENLSRGFGRQGKRTFMAERQYTRMEDWLTAKLAYEGLPSKTYLSKTLAQYTSKTCSNCGFTITSADYDRVLEKLKKTATGWMTTINGKELKVEGQITYYNRYKRQNVVKDLSVELDRLSEESVNNDISSWTKGRSGEALSLLKKRFSHRPVQEKFVCLNCGFETHADEQAALNIARSWLFLRSQEYKKYQTNKTTGNTDKRAFVETWQSFYRKKLKEVWKPAV

SEQ ID NO: 40195 - protein, 979 aa, synthetic construct
  REGION 1..979: note = engineered CasX variant
QEIKRINKIRRRLVKDSNTKKAGKTGPMKTLLVRVMTPDLRERLENLRKKPENIPQPISNTSRANLNKLLTDYTEMKKAILHVYWEEFQKDPVGLMSRVAQPASKKIDQNKLKPEMDEKGNLTTAGFACSQCGQPLFVYKLEQVSEKGKAYTNYFGRCNVAEHEKLILLAQLKPEKDSDEAVTYSLGKFGQRALDFYSIHVTKESTHPVKPLAQIAGNRYASGPVGKALRDACMGTIASFLSKYQDIIIEHQKVVKGNQKRLESLRELAGKENLEYPSVTLPPQPHTKEGVDAYNEVIARVRMWVNLNLWQKLKLSRDDAKPLLRLKGFPSFPLVERQANEVDWWDMVCNVKKLINEKKEDGKVFWQNLAGYKRQEALRPYLSSEEDRKKGKKFARYQLGDLLLHLEKKHEGEDWGKVYDEAWERIDKKVEGLSKHIKLEEERRSEDAQSKAALTDWLRAKASFVIEGLKEADKDEFCRCELKLQKWYGDLRGKPFAIEAENSILDISGFSKQYNCAFIWQKDGVKKLNLYLIINYFKGGKLRFKKIKPEAFEANRFYTVINKKSGEIVPMEVNFNFDDPNLIILPLAFGKRVGREFIWNDLLSLETGSLKLANGRVIEKTLYNRRTRQDEPALFVALTFERREVLDSSNIKPMNLIGVDRGENIPAVIALTDPEGCPLSRFKDSLGNPTHILRIGESYKEKQRTIQAKKEVEQRRAGGYSRKYASKAKNLADDMVRNTARDLLYYAVTQDAMLIFENLSRGFGRQGKRTFMAERQYTRMEDWLTAKLAYEGLPSKTYLSKTLAQYTSKTCSNCGFTITSADYDRVLEKLKKTATGWMTTINGKELKVEGQITYYNRYKRQNVVKDLSVELDRLSEESVNNDISSWTKGRSGEALSLLKKRFSHRPVQEKFVCLNCGFETHADEQAALNIARSWLFLRSQEYKKYQTNKTTGNTDKRAFVETWQSFYRKKLKEVWKPAV

SEQ ID NO: 40196 - protein, 980 aa, synthetic construct
  REGION 1..980: note = engineered CasX variant
QEIKRINKIRRRLVKDSNTKKAGKTGPMKTLLVRVMTPDLRERLENLRKKPENIPQPISNTSRANLNKLLTDYTEMKKAILHVYWEEFQKDPVGLMSRVAQPASKKIDQNKLKPEMDEKGNLTTAGFACSQCGQPLFVYKLEQVSEKGKAYTNYFGRCNVAEHEKLILLAQLKPEKDSDEAVTYSLGKFGQRALDFYSIHVTKESTHPVKPLAQIAGNRYASGPVGKALRDACMGTIASFLSKYQDIIIEHQKVVKGNQKRLESLRELAGKENLEYPSVTLPPQPHTKEGVDAYNEVIARVRMWVNLNLWQKLKLSRDDAKPLLRLKGFPSFPLVERQANEVDWWDMVCNVKKLINEKKEDGKVFWQNLAGYKRQEALRPYLSSEEDRKKGKKFARYQLGDLLLHLEKKHEGEDWGKVYDEAWERIDKKVEGLSKHIKLEEERRSEDAQSKAALTDWLRAKASFVIEGLKEADKDEFCRCELKLQKWYGDLRGKPFAIEAENSILDISGFSKQYNCAFIWQKDGVKKLNLYLIINYFKGGKLRFKKIKPEAFEANRFYTVINKKSGEIVPMEVNFNFDDPNLIILPLAFGKRQGREFIWNDLLSLETGSLKLANGRVIEKTLYNRRTRQDEPALFVALTFERREVLDSSNIKTPMNLIGVDRGENIPAVIALTDPEGCPLSRFKDSLGNPTHILRIGESYKEKQRTIQAKKEVEQRRAGGYSRKYASKAKNLADDMVRNTARDLLYYAVTQDAMLIFENLSRGFGRQGKRTFMAERQYTRMEDWLTAKLAYEGLPSKTYLSKTLAQYTSKTCSNCGFTITSADYDRVLEKLKKTATGWMTTINGKELKVEGQITYYNRYKRQNVVKDLSVELDRLSEESVNNDISSWTKGRSGEALSLLKKRFSHRPVQEKFVCLNCGFETHADEQAALNIARSWLFLRSQEYKKYQTNKTTGNTDKRAFVETWQSFYRKKLKEVWKPAV

SEQ ID NO: 40197 - protein, 980 aa, synthetic construct
  REGION 1..980: note = engineered CasX variant
QEIKRINKIRRRLVKDSNTKKAGKTGPMKTLLVRVMTPDLRERLENLRKKPENIPQPISNTSRANLNKLLTDYTEMKKAILHVYWEEFQKDPVGLMSRVAQPASKKIDQNKLKPEMDEKGNLTTAGFACSQCGQPLFVYKLEQVSEKGKAYTNYFGRCNVAEHEKLILLAQLKPEKDSDEAVTYSLGKFGQRALDFYSIHVTKESTHPVKPLAQIAGNRYASGPVGKALRDACMGTIASFLSKYQDIIIEHQKVVKGNQKRLESLRELAGKENLEYPSVTLPPQPHTKEGVDAYNEVIARVRMWVNLNLWQKLKLSRDDAKPLLRLKGFPSFPLVERQANEVDWWDMVCNVKKLINEKKEDGKVFWQNLAGYKRQEALRPYLSSEEDRKKGKKFARYQLGDLLLHLEKKHEGEDWGKVYDEAWERIDKKVEGLSKHIKLEEERRSEDAQSKAALTDWLRAKASFVIEGLKEADKDEFCRCELKLQKWYGDLRGKPFAIEAENSILDISGFSKQYNCAFIWQKDGVKKLNLYLIINYFKGGKLRFKKIKPEAFEANRFYTVINKKSGEIVPMEVNFNFDDPNLIILPLAFGKRQGREFIWNDLLSLETGSLKLANGRVIEKTLYNRRTRQDEPALFVALTFERREVLDSSNIKPMSNLIGVDRGENIPAVIALTDPEGCPLSRFKDSLGNPTHILRIGESYKEKQRTIQAKKEVEQRRAGGYSRKYASKAKNLADDMVRNTARDLLYYAVTQDAMLIFENLSRGFGRQGKRTFMAERQYTRMEDWLTAKLAYEGLPSKTYLSKTLAQYTSKTCSNCGFTITSADYDRVLEKLKKTATGWMTTINGKELKVEGQITYYNRYKRQNVVKDLSVELDRLSEESVNNDISSWTKGRSGEALSLLKKRFSHRPVQEKFVCLNCGFETHADEQAALNIARSWLFLRSQEYKKYQTNKTTGNTDKRAFVETWQSFYRKKLKEVWKPAV

SEQ ID NO: 40198 - protein, 979 aa, synthetic construct
  REGION 1..979: note = engineered CasX variant
QEIKRINKIRRRLVKDSNTKKAGKTGPMKTLLVRVMTPDLRERLENLRKKPENIPQPISNTSRANLNKLLTDYTEMKKAILHVYWEEFQKDPVGLMSRVAQPASKKIDQNKLKPEMDEKGNLTTAGFACSQCGQPLFVYKLEQVSEKGKAYTNYFGRCNVAEHEKLILLAQLKPEKDSDEAVTYSLGKFGQRALDFYSIHVTKESTHPVKPLAQIAGNRYASGPVGKALRDACMGTIASFLSKYQDIIIEHQKVVKGNQKRLESLRELAGKENLEYPSVTLPPQPHTKEGVDAYNEVIARVRMWVNLNLWQKLKLSRDDAKPLLRLKGFPSFPLVERQANEVDWWDMVCNVKKLINEKKEDGKVFWQNLAGYKRQEALRPYLSSEEDRKKGKKFARYQLGDLLLHLEKKHEGEDWGKVYDEAWERIDKKVEGLSKHIKLEEERRSEDAQSKAALTDWLRAKASFVIEGLKEADKDEFCRCELKLQKWYGDLRGKPFAIEAENSILDISGFSKQYNCAFIWQKDGVKKLNLYLIINYFKGGKLRFKKIKPEAFEANRFYTVINKKSGEIVPMEVNFNFDDPNLIILPLAFGKRQGREFIWNDLLSLETGSLKLANGRVIEKTLYNRRTRQDEPALFVALTFERREVLDSSNIKPMNLIGVDRGENIPAVIALTDPEGCPLSRFKDSLGNPTHILRIRESYKEKQRTIQAKKEVEQRRAGGYSRKYASKAKNLADDMVRNTARDLLYYAVTQDAMLIFENLSRGFGRQGKRTFMAERQYTRMEDWLTAKLAYEGLPSKTYLSKTLAQYTSKTCSNCGFTITSADYDRVLEKLKKTATGWMTTINGKELKVEGQITYYNRYKRQNVVKDLSVELDRLSEESVNNDISSWTKGRSGEALSLLKKRFSHRPVQEKFVCLNCGFETHADEQAALNIARSWLFLRSQEYKKYQTNKTTGNTDKRAFVETWQSFYRKKLKEVWKPAV

SEQ ID NO: 40199 - protein, 979 aa, synthetic construct
  REGION 1..979: note = engineered CasX variant
QEIKRINKIRRRLVKDSNTKKAGKTGPMKTLLVRVMTPDLRERLENLRKKPENIPQPISNTSRANLNKLLTDYTEMKKAILHVYWEEFQKDPVGLMSRVAQPASKKIDQNKLKPEMDEKGNLTTAGFACSQCGQPLFVYKLEQVSEKGKAYTNYFGRCNVAEHEKLILLAQLKPEKDSDEAVTYSLGKFGQRALDFYSIHVTKESTHPVKPLAQIAGNRYASGPVGKALRDACMGTIASFLSKYQDIIIEHQKVVKGNQKRLESLRELAGKENLEYPSVTLPPQPHTKEGVDAYNEVIARVRMWVNLNLWQKLKLSRDDAKPLLRLKGFPSFPLVERQANEVDWWDMVCNVKKLINEKKEDGKVFWQNLAGYKRQEALRPYLSSEEDRKKGKKFARYQLGDLLLHLEKKHEGEDWGKVYDEAWERIDKKVEGLSKHIKLEEERRSEDAQSKAALTDWLRAKASFVIEGLKEADKDEFCRCELKLQKWYGDLRGKPFAIEAENSILDISGFSKQYNCAFIWQKDGVKKLNLYLIINYFKGGKLRFKKIKPEAFEANRFYTVINKKSGEIVPMEVNFNFDDPNLIILPLAFGKRQGREFIWNDLLSLETGSLKLANGRVIEKTLYNRRTRQDEPALFVALTFERREVLDSSNIKPMNLIGVDRGENIPAVIALTDPEGCPLSRFKDSLGNPTHILRIGESYKEKQRTIQAKKEVEQRRAGGYSRKYASKAKNLADDMVRNTARDLLYYAVTQDAMLIFENLSRGFGRQGKRTFSAERQYTRMEDWLTAKLAYEGLPSKTYLSKTLAQYTSKTCSNCGFTITSADYDRVLEKLKKTATGWMTTINGKELKVEGQITYYNRYKRQNVVKDLSVELDRLSEESVNNDISSWTKGRSGEALSLLKKRFSHRPVQEKFVCLNCGFETHADEQAALNIARSWLFLRSQEYKKYQTNKTTGNTDKRAFVETWQSFYRKKLKEVWKPAV

SEQ ID NO: 40200 - protein, 979 aa, synthetic construct
  REGION 1..979: note = engineered CasX variant
QEIKRINKIRRRLVKDSNTKKAGKTGPMKTLLVRVMTPDLRERLENLRKKPENIPQPISNTSRANLNKLLTDYTEMKKAILHVYWEEFQKDPVGLMSRVAQPASKKIDQNKLKPEMDEKGNLTTAGFACSQCGQPLFVYKLEQVSEKGKAYTNYFGRCNVAEHEKLILLAQLKPEKDSDEAVTYSLGKFGQRALDFYSIHVTKESTHPVKPLAQIAGNRYASGPVGKALRDACMGTIASFLSKYQDIIIEHQKVVKGNQKRLESLRELAGKENLEYPSVTLPPQPHTKEGVDAYNEVIARVRMWVNLNLWQKLKLSRDDAKPLLRLKGFPSFPLVERQANEVDWWDMVCNVKKLINEKKEDGKVFWQNLAGYKRQEALRPYLSSEEDRKKGKKFARYQLGDLLLHLEKKHEGEDWGKVYDEAWERIDKKVEGLSKHIKLEEERRSEDAQSKAALTDWLRAKASFVIEGLKEADKDEFCRCELKLQKWYGDLRGKPFAIEAENSILDISGFSKQYNCAFIWQKDGVKKLNLYLIINYFKGGKLRFKKIKPEAFEANRFYTVINKKSGEIVPMEVNFNFDDPNLIILPLAFGKRQGREFIWNDLLSLETGSLKLANGRVIEKTLYNRRTRQDEPALFVALTFERREVLDSSNIKPMNLIGVDRGENIPAVIALTDPEGCPLSRFKDSLGNPTHILRIGESYKEKQRTIQAKKEVEQRRAGGYSRKYASKAKNLADDMVRNTARDLLYYAVTQDAMLIFENLSRGFGRQGKRTFMAERQYTRMEDWLTAKLAYEGLPSKTYLSKTLAQYTSKTCSNCGFTITSADYDRVLEKLKKTATGWMTTINGKELKVEGQITYYNRYKRQNVVKDLSVELDRLSEESVNNDISSWDKGRSGEALSLLKKRFSHRPVQEKFVCLNCGFETHADEQAALNIARSWLFLRSQEYKKYQTNKTTGNTDKRAFVETWQSFYRKKLKEVWKPAV

SEQ ID NO: 40201 - protein, 979 aa, synthetic construct
  REGION 1..979: note = engineered CasX variant
QEIKRINKIRRRLVKDSNTKKAGKTGPMKTLLVRVMTPDLRERLENLRKKPENIPQPISNTSRANLNKLLTDYTEMKKAILHVYWEEFQVDPVGLMSRVAQPASKKIDQNKLKPEMDEKGNLTTAGFACSQCGQPLFVYKLEQVSEKGKAYTNYFGRCNVAEHEKLILLAQLKPEKDSDEAVTYSLGKFGQRALDFYSIHVTKESTHPVKPLAQIAGNRYASGPVGKALRDACMGTIASFLSKYQDIIIEHQKVVKGNQKRLESLRELAGKENLEYPSVTLPPQPHTKEGVDAYNEVIARVRMWVNLNLWQKLKLSRDDAKPLLRLKGFPSFPLVERQANEVDWWDMVCNVKKLINEKKEDGKVFWQNLAGYKRQEALRPYLSSEEDRKKGKKFARYQLGDLLLHLEKKHEGEDWGKVYDEAWERIDKKVEGLSKHIKLEEERRSEDAQSKAALTDWLRAKASFVIEGLKEADKDEFCRCELKLQKWYGDLRGKPFAIEAENSILDISGFSKQYNCAFIWQKDGVKKLNLYLIINYFKGGKLRFKKIKPEAFEANRFYTVINKKSGEIVPMEVNFNFDDPNLIILPLAFGKRQGREFIWNDLLSLETGSLKLANGRVIEKTLYNRRTRQDEPALFVALTFERREVLDSSNIKPMNLIGVDRGENIPAVIALTDPEGCPLSRFKDSLGNPTHILRIGESYKEKQRTIQAKKEVEQRRAGGYSRKYASKAKNLADDMVRNTARDLLYYAVTQDAMLIFENLSRGFGRQGKRTFMAERQYTRMEDWLTAKLAYEGLPSKTYLSKTLAQYTSKTCSNCGFTITSADYDRVLEKLKKTATGWMTTINGKELKVEGQITYYNRYKRQNVVKDLSVELDRLSEESVNNDISSWTKGRSGEALSLLKKRFSHRPVQEKFVCLNCGFETHADEQAALNIARSWLFLRSQEYKKYQTNKTTGNTDKRAFVETWQSFYRKKLKEVWKPAV

SEQ ID NO: 40202 - protein, 979 aa, synthetic construct
  REGION 1..979: note = engineered CasX variant
QEIKRLNKIRRRLVKDSNTKKAGKTGPMKTLLVRVMTPDLRERLENLRKKPENIPQPISNTSRANLNKLLTDYTEMKKAILHVYWEEFQKDPVGLMSRVAQPASKKIDQNKLKPEMDEKGNLTTAGFACSQCGQPLFVYKLEQVSEKGKAYTNYFGRCNVAEHEKLILLAQLKPEKDSDEAVTYSLGKFGQRALDFYSIHVTKESTHPVKPLAQIAGNRYASGPVGKALRDACMGTIASFLSKYQDIIIEHQKVVKGNQKRLESLRELAGKENLEYPSVTLPPQPHTKEGVDAYNEVIARVRMWVNLNLWQKLKLSRDDAKPLLRLKGFPSFPLVERQANEVDWWDMVCNVKKLINEKKEDGKVFWQNLAGYKRQEALRPYLSSEEDRKKGKKFARYQLGDLLLHLEKKHEGEDWGKVYDEAWERIDKKVEGLSKHIKLEEERRSEDAQSKAALTDWLRAKASFVIEGLKEADKDEFCRCELKLQKWYGDLRGKPFAIEAENSILDISGFSKQYNCAFIWQKDGVKKLNLYLIINYFKGGKLRFKKIKPEAFEANRFYTVINKKSGEIVPMEVNFNFDDPNLIILPLAFGKRQGREFIWNDLLSLETGSLKLANGRVIEKTLYNRRTRQDEPALFVALTFERREVLDSSNIKPMNLIGVDRGENIPAVIALTDPEGCPLSRFKDSLGNPTHILRIGESYKEKQRTIQAKKEVEQRRAGGYSRKYASKAKNLADDMVRNTARDLLYYAVTQDAMLIFENLSRGFGRQGKRTFMAERQYTRMEDWLTAKLAYEGLPSKTYLSKTLAQYTSKTCSNCGFTITSADYDRVLEKLKKTATGWMTTINGKELKVEGQITYYNRYKRQNVVKDLSVELDRLSEESVNNDISSWTKGRSGEALSLLKKRFSHRPVQEKFVCLNCGFETHADEQAALNIARSWLFLRSQEYKKYQTNKTTGNTDKRAFVETWQSFYRKKLKEVWKPAV

SEQ ID NO: 40203 - protein, 979 aa, synthetic construct
  REGION 1..979: note = engineered CasX variant
QEIKRINKIRRRLVKDSNTKKAGKTGPMKTLLVRVMTPDLRERLENLRKKPENIPQPISNTSRANLNKLLTDYTEMKKAILHVYWEEFQKDPVGLMSRVAQPASKKIDQNKLKPEMDEKGNLTTAGFACSQCGQPLFVYKLEQVSEKGKAYTNYVGRCNVAEHEKLILLAQLKPEKDSDEAVTYSLGKFGQRALDFYSIHVTKESTHPVKPLAQIAGNRYASGPVGKALRDACMGTIASFLSKYQDIIIEHQKVVKGNQKRLESLRELAGKENLEYPSVTLPPQPHTKEGVDAYNEVIARVRMWVNLNLWQKLKLSRDDAKPLLRLKGFPSFPLVERQANEVDWWDMVCNVKKLINEKKEDGKVFWQNLAGYKRQEALRPYLSSEEDRKKGKKFARYQLGDLLLHLEKKHEGEDWGKVYDEAWERIDKKVEGLSKHIKLEEERRSEDAQSKAALTDWLRAKASFVIEGLKEADKDEFCRCELKLQKWYGDLRGKPFAIEAENSILDISGFSKQYNCAFIWQKDGVKKLNLYLIINYFKGGKLRFKKIKPEAFEANRFYTVINKKSGEIVPMEVNFNFDDPNLIILPLAFGKRQGREFIWNDLLSLETGSLKLANGRVIEKTLYNRRTRQDEPALFVALTFERREVLDSSNIKPMNLIGVDRGENIPAVIALTDPEGCPLSRFKDSLGNPTHILRIGESYKEKQRTIQAKKEVEQRRAGGYSRKYASKAKNLADDMVRNTARDLLYYAVTQDAMLIFENLSRGFGRQGKRTFMAERQYTRMEDWLTAKLAYEGLPSKTYLSKTLAQYTSKTCSNCGFTITSADYDRVLEKLKKTATGWMTTINGKELKVEGQITYYNRYKRQNVVKDLSVELDRLSEESVNNDISSWTKGRSGEALSLLKKRFSHRPVQEKFVCLNCGFETHADEQAALNIARSWLFLRSQEYKKYQTNKTTGNTDKRAFVETWQSFYRKKLKEVWKPAV

SEQ ID NO: 40204 - protein, 979 aa, synthetic construct
  REGION 1..979: note = engineered CasX variant
QEIKRINKIRRRLVKDSNTKKAGKTGPMKTLLVRVMTPDLRERLENLRKKPENIPQPISNTSRANLNKLLTDYTEMKKAILHVYWEEFQKDPVGLMSRVAQPASKKIDQNKLKPEMDEKGNLTTAGFACSQCGQPLFVYKLEQVSEKGKAYTNYFGRCNVAEHEKLILLAQLKPEKDSDEAVTYSLGKFGQRALDFYSIHVTKESTHPVKPLAQIAGNRYASGPVGKALRDACMGTIASFLSKYQDIIIEHQKVVKGNQKRLESLRELAGKENLEYPSVTLPPQPHTKEGVDAYNEVIARVRMWVNLNLWQKLKLSRDDAKPLLRLKGFPSFPLVERQANEVDWWDMVCNVKKLINEKKEDGKVFWQNLAGYKRQEALRPYLSSEEDRKKGKKFARYQLGDLLLHLEKKHEGEDWGKVYDEAWERIDKKVEGLSKHIKLEEERRSEDAQSKAALTDWLRAKASFVIEGLKEADKDEFCRCELKLQKWYGDLRGKPFAIEAENSILDISGFSKQYNCAFIWQKDGVKKLNLYLIINYFKGGKLRFKKIKPEAFEANRFYTVINKKSGEIVPMEVNFNFDDPNLIILPLAFGKRQGREFIWNDLLSLETGSLKLANGRVIEKTLYNRRTRQDEPALFVALTFERREVLDSSNIKPMNLIGVDRGENIPAVIALTDPEGCPLSRFKDSLGNPTHILRIGESYKEKQRTIQAKKEVEQRRAGGYSRKYASKAKNLADDMVRNTARDLLYYAVTQDAMLIFENLSRGFGRQGKRTFMAERQYTRMEDWLTAKLAYEGLASKTYLSKTLAQYTSKTCSNCGFTITSADYDRVLEKLKKTATGWMTTINGKELKVEGQITYYNRYKRQNVVKDLSVELDRLSEESVNNDISSWTKGRSGEALSLLKKRFSHRPVQEKFVCLNCGFETHADEQAALNIARSWLFLRSQEYKKYQTNKTTGNTDKRAFVETWQSFYRKKLKEVWKPAV

SEQ ID NO: 40205 - protein, 979 aa, synthetic construct
  REGION 1..979: note = engineered CasX variant
QEIKRINKIRRRLVKDSNTKKAGKTGPMKTLLVRVMTPDLRERLENLRKKPENIPQPISNTSRANLNKLLTDYTEMKKAILHVYWEEFQKDPVGLMSRVAQPASKKIDQNKLKPEMDEKGNLTTAGFACSQCGQPLFVYKLEQVSEKGKAYTNYFGRCNVAEHEKLILLAQLKPEKDSDEAVTYSLGKFGQRALDFYSIHVTKESTHPVKPLAQIAGNRYASGPVGKALRDACMGTIASFLSKYQDIIIEHQKVVKGNQKRLESLRELAGKENLEYPSVTLPPQPHTKEGVDAYNEVIARVRMWVNLNLWQKLKLSRDDAKPLLRLKGFPSFPLVERQANEVDWWDMVCNVKKLINEKKEDGKVFWQNLAGYKRQEALRPYLSSEEDRKKGKKFARYQLGDLLLHLEKKHEGEDWGKVYDEAWERIDKKVEGLSKHIKLEEERRSEDAQSKAALTDWLRAKASFVIEGLKEADKDEFCRCELKLQKWYGDLRGKPFAIEAENSILDISGFSKQYNCAFIWQKDGVKKLNLYLIINYFKGGKLRFKKIKPEAFEANRFYTVINKKSGEIVPMEVNFNFDDPNLIILPLAFGKRQGREFIWNDLLSLETGSLKLANGRVIEKTLYNRRTRQDEPALFVALTFERREVLDSSNIKPMNLIGVDRGENIPAVIALTDPEGCPLSRFKDSLGNPTHILRIGESYKEKQRTIQAKKEVEQRRAGGYSRKYASKAKNLADDMVRNTARDLLYYAVTQDAMLIFENLSRGFGRQGKRTFMAERQYTRMEDWLTAKLAYEGLPSKVYLSKTLAQYTSKTCSNCGFTITSADYDRVLEKLKKTATGWMTTINGKELKVEGQITYYNRYKRQNVVKDLSVELDRLSEESVNNDISSWTKGRSGEALSLLKKRFSHRPVQEKFVCLNCGFETHADEQAALNIARSWLFLRSQEYKKYQTNKTTGNTDKRAFVETWQSFYRKKLKEVWKPAV

SEQ ID NO: 40206 - protein, 980 aa, synthetic construct
  REGION 1..980: note = engineered CasX variant
QEIKRINKIRRRLVKDSNTKKAGKTGPMKTLLVRVMTPDLRERLENLRKKPENIPQPISNTSRANLNKLLTDYTEMKKAILHVYWEEFQKDPVGLMSRVAQPASKKIDQNKLKPEMDEKGNLTTAGFACSQCGQPLFVYKLEQVSEKGKAYTNYFGRCNVAEHEKLILLAQLKPEKDSDEAVTYSLGKFGQRALDFYSIHVTKESTHPVKPLAQIAGNRYASGPVGKALRDACMGTIASFLSKYQDIIIEHQKVVKGNQKRLESLRELAGKENLEYPSVTLPPQPHTKEGVDAYNEVIARVRMWVNLNLWQKLKLSRDDAKPLLRLKGFPSFPLVERQANEVDWWDMVCNVKKLINEKKEDGKVFWQNLAGYKRQEALRPYLSSEEDRKKGKKFARYQLGDLLLHLEKKHEGEDWGKVYDEAWERIDKKVEGLSKHIKLEEERRSEDAQSKAALTDWLRAKASFVIEGLKEADKDEFCRCELKLQKWYGDLRGKPFAIEAENSILDISGFSKQYNCAFIWQKDGVKKLNLYLIINYFKGGKLRFKKIKPEAFEANRFYTVINKKSGEIVPMEVNFNFDDPNLIILPLAFGKRQGREFIWNDLLSLETGSLKLANGRVIEKTLYNRRTRQDEPALFVALTFERREVLDSSNIKPMNLIGVDRGENIPAVIALTDPEGCPLSRFKDSLGNPTHILRIGESYKEKQRTIQAKKEVEQRRAGGYSRKYASKAKNLADDMVRNTARDLLYYAVTQDAMLIFENLSRGFGRQGKRTFMAERQYTRMEDWLTAKLAYEGPLPSKTYLSKTLAQYTSKTCSNCGFTITSADYDRVLEKLKKTATGWMTTINGKELKVEGQITYYNRYKRQNVVKDLSVELDRLSEESVNNDISSWTKGRSGEALSLLKKRFSHRPVQEKFVCLNCGFETHADEQAALNIARSWLFLRSQEYKKYQTNKTTGNTDKRAFVETWQSFYRKKLKEVWKPAV

SEQ ID NO: 40207 - protein, 980 aa, synthetic construct
  REGION 1..980: note = engineered CasX variant
QEIKRINKIRRRLVKDSNTKKAGKTGPMKTLLVRVMTPDLRERLENLRKKPENIPQPISNTSRANLNKLLTDYTEMKKAILHVYWEEFQKDPVGLMSRVAQPASKKIDQNKLKPEMDEKGNLTTAGFACSQCGQPLFVYKLEQVSEKGKAYTNYFGRCNVAEHEKLILLAQLKPEKDSDEAVTYSLGKFGQRALDFYSIHVTKESTHPVKPLAQIAGNRYASGPVGKALRDACMGTIASFLSKYQDIIIEHQKVVKGNQKRLESLRELAGKENLEYPSVTLPPQPHTKEGVDAYNEVIARVRMWVNLNLWQKLKLSRDDAKPLLRLKGFPSFPLVERQANEVDWWDMVCNVKKLINEKKEDGKVFWQNLAGYKRQEALRPYLSSEEDVRKKGKKFARYQLGDLLLHLEKKHEGEDWGKVYDEAWERIDKKVEGLSKHIKLEEERRSEDAQSKAALTDWLRAKASFVIEGLKEADKDEFCRCELKLQKWYGDLRGKPFAIEAENSILDISGFSKQYNCAFIWQKDGVKKLNLYLIINYFKGGKLRFKKIKPEAFEANRFYTVINKKSGEIVPMEVNFNFDDPNLIILPLAFGKRQGREFIWNDLLSLETGSLKLANGRVIEKTLYNRRTRQDEPALFVALTFERREVLDSSNIKPMNLIGVDRGENIPAVIALTDPEGCPLSRFKDSLGNPTHILRIGESYKEKQRTIQAKKEVEQRRAGGYSRKYASKAKNLADDMVRNTARDLLYYAVTQDAMLIFENLSRGFGRQGKRTFMAERQYTRMEDWLTAKLAYEGLPSKTYLSKTLAQYTSKTCSNCGFTITSADYDRVLEKLKKTATGWMTTINGKELKVEGQITYYNRYKRQNVVKDLSVELDRLSEESVNNDISSWTKGRSGEALSLLKKRFSHRPVQEKFVCLNCGFETHADEQAALNIARSWLFLRSQEYKKYQTNKTTGNTDKRAFVETWQSFYRKKLKEVWKPAV

SEQ ID NO: 40208 - protein, 979 aa, synthetic construct
  REGION 1..979: note = engineered CasX variant
QEIKRINKIRRRLVKDSNTKKAGKTGPMKTLLVRVMTPDLRERLENLRKKPENIPQPISNTSRANLNKLLTDYTEMKKAILHVYWEEFQKDPVGLMSRVAQPASKKIDQNKLKPEMDEKGNLTTAGFACSQCGQPLFVYKLEQVSEKGKAYTNYFGRCNVAEHEKLILLAQLKPEKDSDEAVTYSLGKFGQRALDFYSIHVTKESTHPVKPLAQIAGNRYASGPVGKALRDACMGTIASFLSKYQDIIIEHQKVVKGNQKRLESLRELAGKENLEYPSVTLPPQPHTKEGVDAYNEVIARVRMWVNLNLWQKLKLSRDDAKPLLRLKGFPSFPLVERQANEVDWWDMVCNVKKLINEKKEDGKVFWQNLAGYKRQEALRPYLSSEEDRKKGKKFARYQLGDLLLHLEKKHEGEDWGKVYDEAWERIDKKVEGLSKHIKLEEERRSEDAQSKAALTDWLRAKASFVIEGLKEADKDEFCRCELKLQKWYGDLRGKPFAIEAENSILDISGFSKQYNCAFIWQKDGVKKLNLYLIINYFKGGKLRFKKIKPEAFEANRFYTVINKKSGEIVPMEVNFNFDDPNLIILPLAFGKRQGREFIWNDLLSLETGSLKLANGRVIEKTLYNRRTRQDEPALFVALTFERREVLDSSNIKPMNLIGVDRGENIPAVIALTDPEGCPLSRFKDSLGNPTHILRIGESYKEKQRTIQAKKEVEQRRAGGYSRKYASKAKNLADDMVRNTARDLLYYAVTQDAMLIFENLSRGFGRQGKRTFMAERQYTRMEDWLTAKLAYEGLPSKTYLSKTLAQYTSKTCSNCGFTITSADYDRMLEKLKKTATGWMTTINGKELKVEGQITYYNRYKRQNVVKDLSVELDRLSEESVNNDISSWTKGRSGEALSLLKKRFSHRPVQEKFVCLNCGFETHADEQAALNIARSWLFLRSQEYKKYQTNKTTGNTDKRAFVETWQSFYRKKLKEVWKPAV

SEQ ID NO: 40209 - protein, 979 aa, synthetic construct
  REGION 1..979: note = engineered CasX variant
QEIKRINKIRRRLVKDSNTKKAGKTGPMKTLLVRVMTPDLRERLENLRKKPENIPQPISNTSRANLNKLLTDYTEMKKAILHVYWEEFQKDPVGLMSRVAQPASKKIDQNKLKPEMDEKGNLTTAGFACSQCGQPLFVYKLEQVSEKGKAYTNYFGRCNVAEHEKLILLAQLKPEKDSDEAVTYSLGKFGQRALDFYSIHVTKESTHPVKPLAQIAGNRYASGPVGKALRDACMGTIASFLSKYQDIIIEHQKVVKGNQKRLESLRELAGKENLEYPSVTLPPQPHTKEGVDAYNEVIARVRMWVNLNLWQKLKLSRDDAKPLLRLKGFPSFPLVERQANEVDWWDMVCNVKKLINEKKEDGKVFWQNLAGYKRQEALRPYLSSEEDRKKGKKFARYQLGDLLLHLEKKHEGEDWGKVYDEAWERIDKKVEGLSKHIKLEEERRSEDAQSKAALTDWLRAKASFVIEGLKEADKDEFCRCELKLQKWYGDLRGKPFAIEAENSILDISGFSKQYNCAFIWQKDGVKKLNLYLIINYFKGGKLRFKKIKPEAFEANRFYTVINKKSGEIVPMEVNFNFDDPNLIILPLAFGKRQGREFIWNDLLSLETGSLKLANGRVIEKTLYNRRTRQDEPALFVALTFERREVLDSSNIKPMNLIGVDRGENIPAVIALTDPEGCPLSRFKDSLGNPTHILRIGESYKEKQRTIQAKKEVEQRRAGGYSRKYASKAKNLADDMVRNTARDLLYYAVTQDAMLIFENLSRGFGRQGKRTFMAERQYTRMEDWLTAKLAYEGLPSKTYLSKTLAQYTSKTCSNCGFTITSADYDRVLEKLKKTATGWMTTINGKELKVEGQITYYNRYKRQNVVKDLSVELDRLSEESVNNDISSWTKGRQGEALSLLKKRFSHRPVQEKFVCLNCGFETHADEQAALNIARSWLFLRSQEYKKYQTNKTTGNTDKRAFVETWQSFYRKKLKEVWKPAV

SEQ ID NO: 40210 - protein, 979 aa, synthetic construct
  REGION 1..979: note = engineered CasX variant
QEIKRINKIRRRLVKDSNTKKAGKTGPMKTLLVRVMTPDLRERLENLRKKPENIPQPISNTSRANLNKLLTDYTEMKKAILHVYWEEFQKDPVGLMSRVAQPASKKIDQNKLKPEMDEKGNLTTAGFACSQCGQPLFVYKLEQVSEKGKAYTNYFGRCNVAEHEKLILLAQLKPEKDSDEAVTYSLGKFGQRALDFYSIHVTKESTHPVKPLAQIAGNRYASGPVGKALRDACMGTIASFLSKYQDIIIEHQKVVKGNQKRLESLRELAGKENLEYPSVTLPPQPHTKEGVDAYNEVIARVRMWVNLNLWQKLKLSRDDAKPLLRLKGFPSFPLVERQANEVDWWDMVCNVKKLINEKKEDGKVFWQNLAGYKRQEALRPYLSSEEDRKKGKKFARYQLGDLLLHLEKKHEGEDWGKVYDEAWERIDKKVEGLSKHIKLEEERRSEDAQSKAALTDWLRAKASFVIEGLKEADKDEFCRCELKLQKWYGDLRGKPFAIEAENSILDISGFSKQYNCAFIWQKDGVKKLNLYLIINYFKGGKLRFKKIKPEAFEANRFYTVINKKSGEIVPMEVNFNFDDPNLIILPLAFGKRQGREFIWNDLLSLETGSLKLANGRVIEKTLYNRRTRQDEPALFVALTFERREVLDSSNIKPMNLIGVDRGENIPAVIALTDPEGCPLSRFKDSLGNPTHILRIGESYKEKQRTIQAKKEVEQRRAGGYSRKYASKAKNLADDMVRNTARDLLYYAVTQDAMLIFENLSRGFGRQGKRTFMAERQYTRMEDWLTAKLAYEGLPSKTYLSKTLAQYTSKTCSNCGFTITSADYDRVLEKLKKTATGWMTTINGKELKVEGQITYYNRYKRQNVVKDLSVELDRLSEESVNNDISSWTKGRSGEALSLLKKRFSHRPVQEKFVCLNCEFETHADEQAALNIARSWLFLRSQEYKKYQTNKTTGNTDKRAFVETWQSFYRKKLKEVWKPAV

SEQ ID NO: 40211 - protein, 980 aa, synthetic construct
  REGION 1..980: note = engineered CasX variant
QEIKRINKIRRRLVKDSNTKKAGKTGPMKTLLVRVMTPDLRERLENLRKKPENIPQPISNTSRANLNKLLTDYTEMKKAILHVYWEEFQKDPVGLMSRVAQPASKKIDQNKLKPEMDEKGNLTTAGFACSQCGQPLFVYKLEQVSEKGKAYTNYFGRCNVAEHEKLILLAQLKPEKDSDEAVTYSLGKFGQRALDFYSIHVTKESTHPVKPLAQIAGNRYASGPVGKALRDACMGTIASFLSKYQDIIIEHQKVVKGNQKRLESLRELAGKENLEYPSVTLPPQPHTKEGVDAYNEVIARVRMWVNLNLWQKLKLSRDDAKPLLRLKGFPSFPLVERQANEVDWWDMVCNVKKLINEKKEDGKVFWQNLAGYKRQEALRPYLSSEEDRKKGKKFARYQLGDLLLHLEKKHEGEDWGKVYDEAWERIDKKVEGLSKHIKLEEERRSEDAQSKAALTDWLRAKASFVIEGLKEADKDEFCRCELKLQKWYGDLRGKPFAIEAENSILDISGFSKQYNCAFIWQKDGVKKLNLYLIINYFKGGKLRFKKIKPEAFEANRFYTVINKKSGEIVPMEVNFNFDDPNLIILPLAFGKRQGREFIWNDLLSLETGSLKLANGRVIEKTLYNRRTRQDEPALFVALTFERREVLDSSNIKPMNLIGVDRGENIPAVIALTDPEGCPLSRFKDSLGNPTHILRIGESYKEKQRTIQAKKEVEQRRAGGYSRKYASKAKNLADDMVRNTARDLLYYAVTQDAMLIFENLSRGFGRQGKRTFMAERQYTRMEDWLTAKLAYEGLPSKTYLSKTLAQYTSKTCSNCGFTITSADYDRVLEKLKKTATGWMTTINGKELKVEGQITYYNRYKRQNVVKDLSVELDRLSEESVNNDISSWTKGRSGEALSLLKKRFSHRPVQEKFVCLNCGFETHADEQAALNIARSWLFLRSQEYKKYQTNKTSTGNTDKRAFVETWQSFYRKKLKEVWKPAV

SEQ ID NO: 40212 - protein, 980 aa, synthetic construct
  REGION 1..980: note = engineered CasX variant
QEIKRINKIRRRLVKDSNTKKAGKTGPMKTLLVRVMTPDLRERLENLRKKPENIPQPISNTSRANLNKLLTDYTEMKKAILHVYWEEFQKDPVGLMSRVAQPASKKIDQNKLKPEMDEKGNLTTAGFACSQCGQPLFVYKLEQVSEKGKAYTNYFGRCNVAEHEKLILLAQLKPEKDSDEAVTYSLGKFGQRALDFYSIHVTKESTHPVKPLAQIAGNRYASGPVGKALRDACMGTIASFLSKYQDIIIEHQKVVKGNQKRLESLRELAGKENLEYPSVTLPPQPHTKEGVDAYNEVIARVRMWVNLNLWQKLKLSRDDAKPLLRLKGFPSFPLVERQANEVDWWDMVCNVKKLINEKKEDGKVFWQNLAGYKRQEALRPYLSSEEDRKKGKKFARYQLGDLLLHLEKKHEGEDWGKVYDEAWERIDKKVEGLSKHIKLEEERRSEDAQSKAALTDWLRAKASFVIEGLKEADKDEFCRCELKLQKWYGDLRGKPFAIEAENSILDISGFSKQYNCAFIWQKDGVKKLNLYLIINYFKGGKLRFKKIKPEAFEANRFYTVINKKSGEIVPMEVNFNFDDPNLIILPLAFGKRQGREFIWNDLLSLETGSLKLANGRVIEKTLYNRRTRQDEPALFVALTFERREVLDSSNIKPMNLIGVDRGENIPAVIALTDPEGCPLSRFKDSLGNPTHILRIGESYKEKQRTIQAKKEVEQRRAGGYSRKYASKAKNLADDMVRNTARDLLYYAVTQDAMLIFENLSRGFGRQGKRTFMAERQYTRMEDWLTAKLAYEGLPSKTYLSKTLAQYTSKTCSNCGFTITSADYDRVLEKLKKTATGWMTTINGKELKVEGQITYYNRYKRQNVVKDLSVELDRLSEESVNNDISSWTKGRSGEALSLLKKRFSHRPVQEKFVCLNCGFETHADEQAALNIARSWLFLRSQEYKKYQTNKTTGKNTDKRAFVETWQSFYRKKLKEVWKPAV

SEQ ID NO: 40213 - protein, 979 aa, synthetic construct
  REGION 1..979: note = engineered CasX variant
QEIKRINKIRRRLVKDSNTKKAGKTGPMKTLLVRVMTPDLRERLENLRKKPENIPQPISNTSRANLNKLLTDYTEMKKAILHVYWEEFQKDPVGLMSRVAQPASKKIDQNKLKPEMDEKGNLTTAGFACSQCGQPLFVYKLEQVSEKGKAYTNYFGRCNVAEHEKLILLAQLKPEKDSDEAVTYSLGKFGQRALDFYSIHVTKESTHPVKPLAQIAGNRYASGPVGKALRDACMGTIASFLSKYQDIIIEHQKVVKGNQKRLESLRELAGKENLEYPSVTLPPQPHTKEGVDAYNEVIARVRMWVNLNLWQKLKLSRDDAKPLLRLKKFPSFPLVERQANEVDWWDMVCNVKKLINEKKEDGKVFWQNLAGYKRQEALRPYLSSEEDRKKGKKFARYQLGDLLLHLEKKHEGEDWGKVYDEAWERIDKKVEGLSKHIKLEEERRSEDAQSKAALTDWLRAKASFVIEGLKEADKDEFCRCELKLQKWYGDLRGKPFAIEAENSILDISGFSKQYNCAFIWQKDGVKKLNLYLIINYFKGGKLRFKKIKPEAFEANRFYTVINKKSGEIVPMEVNFNFDDPNLIILPLAFGKRQGREFIWNDLLSLETGSLKLANGRVIEKTLYNRRTRQDEPALFVALTFERREVLDSSNIKPMNLIGVDRGENIPAVIALTDPEGCPLSRFKDSLGNPTHILRIGESYKEKQRTIQAKKEVEQRRAGGYSRKYASKAKNLADDMVRNTARDLLYYAVTQDAMLIFENLSRGFGRQGKRTFMAERQYTRMEDWLTAKLAYEGLPSKTYLSKTLAQYTSKTCSNCGFTITSADYDRVLEKLKKTATGWMTTINGKELKVEGQITYYNRYKRQNVVKDLSVELDRLSEESVNNDISSWTKGRSGEALSLLKKRFSHRPVQEKFVCLNCGFETHADEQAALNIARSWLFLRSQEYKKYQTNKTTGNTDKRAFVETWQSFYRKKLKEVWKPAV

SEQ ID NO: 40214 - protein, 979 aa, synthetic construct
  REGION 1..979: note = engineered CasX variant
QEIKRINKIRRRLVKDSNTKKAGKTGPMKTLLVRVMTPDLRERLENLRKKPENIPQPISNTSRANLNKLLTDYTEMKKAILHVYWEEFQKDPVGLMSRVAQPASKKIDQNKLKPEMDEKGNLTTAGFACSQCGQPLFVYKLEQVSEKGKAYTNYFGRCNVAEHEKLILLAQLKPEKDSDEAVTYSLGKFGQRALDFYSIHVTKESTHPVKPLAQIAGNRYASGPVGKALRDACMGTIASFLSKYQDIIIEHQKVVKGNQKRLESLRELAGKENLEYPSVTLPPQPHTKEGVDAYNEVIARVRMWVNLNLWQKLKLSRDDAKPLLRLKGFPSFPLVERQANEVDWWDMVCNVKKLINEKKEDGKVFWQNLAGYKRQEALRPYLSSEEDRKKGKKFARYQLGDLLLHLEKKHEGEDWGKVYDEAWERIDKKVEGLSKHIKLEEERRSEDAQSKAALTDWLRAKASFVIEGLKEADKDEFCRCELKLQKWYGDLRGKPFAIEAENSILDISGFSKQYNCAFIWQKDGVKKLNLYLIINYFKGGKLRFKKIKPEAFEANRFYTVINKKSGEIVPMEVNFNFDDPNLIILPLAFGKRQGREFIWNDLLSLETGSLKLANGRVIEKTLYNRRTRQDEPALFVALTFERREVLDSSNIKPMNLIGVDRGENIPAVIALTDPEGCPLSRFKDSLGNPTHILRIGERYKEKQRTIQAKKEVEQRRAGGYSRKYASKAKNLADDMVRNTARDLLYYAVTQDAMLIFENLSRGFGRQGKRTFMAERQYTRMEDWLTAKLAYEGLPSKTYLSKTLAQYTSKTCSNCGFTITSADYDRVLEKLKKTATGWMTTINGKELKVEGQITYYNRYKRQNVVKDLSVELDRLSEESVNNDISSWTKGRSGEALSLLKKRFSHRPVQEKFVCLNCGFETHADEQAALNIARSWLFLRSQEYKKYQTNKTTGNTDKRAFVETWQSFYRKKLKEVWKPAV

SEQ ID NO: 40215 - protein, 979 aa, synthetic construct
  REGION 1..979: note = engineered CasX variant
QEIKRINKIRRRLVKDSNTKKAGKTGPMKTLLVRVMTPDLRERLENLRKKPENIPQPISNTSRANLNKLLTDYTEMKKAILHVYWEEFQKDPVGLMSRVAQPASKKIDQNKLKPEMDEKGNLTTAGFACSQCGQPLFVYKLEQVSEKGKAYTNYFGRCNVAEHEKLILLAQLKPEKDSDEAVTYSLGKFGQRALDFYSIHVTKESTHPVKPLAQIAGNRYASGPVGKALRDACMGTIASFLSKYQDIIIEHQKVVKGNQKRLESLRELAGKENLEYPSVTLPPQPHTKEGVDAYNEVIARVRMWVNLNLWQKLKLSRDDAKPLLRLKGFPSFPLVERQANEVDWWDMVCNVKKLINEKKEDGKVFWQNLAGYKRQEALRPYLSSEEDRKKGKKFARYQLGDLLLHLEKKHEGEDWGKVYDEAWERIDKKVEGLSKHIKLEEERRSEDAQSKAALTDWLRAKASFVIEGLKEADKDEFCRCELKLQKWYGDLRGKPFAIEAENSILDISGFSKQYNCAFIWQKDGVKKLNLYLIINYFKGGKLRFKKIKPEAFEANRFYTVINKKSGEIVPMEVNFNFDDPNLIILPLAFGKRQGREFIWNDLLSLETGSLQLANGRVIEKTLYNRRTRQDEPALFVALTFERREVLDSSNIKPMNLIGVDRGENIPAVIALTDPEGCPLSRFKDSLGNPTHILRIGESYKEKQRTIQAKKEVEQRRAGGYSRKYASKAKNLADDMVRNTARDLLYYAVTQDAMLIFENLSRGFGRQGKRTFMAERQYTRMEDWLTAKLAYEGLPSKTYLSKTLAQYTSKTCSNCGFTITSADYDRVLEKLKKTATGWMTTINGKELKVEGQITYYNRYKRQNVVKDLSVELDRLSEESVNNDISSWTKGRSGEALSLLKKRFSHRPVQEKFVCLNCGFETHADEQAALNIARSWLFLRSQEYKKYQTNKTTGNTDKRAFVETWQSFYRKKLKEVWKPAV

SEQ ID NO: 40216 - protein, 978 aa, synthetic construct
  REGION 1..978: note = engineered CasX variant
QEIKRINKIRRRLVKDSNTKKAGKTGPMKTLLVRVMTPDLRERLENLRKKPENIPQPISNTSRANLNKLLTDYTEMKKAILHVYWEEFQKDPVGLMSRVAQPASKKIDQNKLKPEMDEKGNLTTAGFACSQCGQPLFVYKLEQVSEKGKAYTNYFGRCNVAEHEKLILLAQLKPEKDSDEAVTYSLGKFGQRALDFYSIHVTKESTHPVKPLAQIAGNRYASGPVGKALRDACMGTIASFLSKYQDIIIEHQKVVKGNQKRLESLRELAGKENLEYPSVTLPPQPHTKEGVDAYNEVIARVRMWVNLNLWQKLKLSRDDAKPLLRLKGFPSFPLVERQANEVDWWDMVCNVKKLINEKKEDGKVFWQNLAGYKRQEALRPYLSSEEDRKKGKKFARYQLGDLLLHLEKKHGEDWGKVYDEAWERIDKKVEGLSKHIKLEEERRSEDAQSKAALTDWLRAKASFVIEGLKEADKDEFCRCDLKLQKWYGDLRGKPFAIEAENSILDISGFSKQYNCAFIWQKDGVKKLNLYLIINYFKGGKLRFKKIKPEAFEANRFYTVINKKSGEIVPMEVNFNFDDPNLIILPLAFGKRFGREFIWNDLLSLETGSLKLANGRVIEKTLYNRRTRQDEPALFVALTFERREVLDSSNIKPMNLIGVDRGENIPAVIALTDPEGCPLSRFKDSLGNPTHILRIGESYKEKQRTIQAKKEVEQRRAGGYSRKYASKAKNLADDMVRNTARDLLYYAVTQDAMLIFENLSRGFGRQGKRTFMAERQYTRMEDWLTAKLAYEGLPSKTYLSKTLAQYTSKTCSNCGFTITSADYDRVLEKLKKTATGWMTTINGKELKVEGQITYYNRYKRQNVVKDLSVELDRLSEESVNNDISSWTKGRSGEALSLLKKRFSHRPVQEKFVCLNCGFETHADEQAALNIARSWLFLRSQEYKKYQTNKTTGNTDKRAFVETWQSFYRKKLKEVWKPAV

SEQ ID NO: 40217 - protein, 978 aa, synthetic construct
  REGION 1..978: note = engineered CasX variant
QEIKRINKIRRRLVKDSNTKKAGKTGPMKTLLVRVMTPDLRERLENLRKKPENIPQPISNTSRANLNKLLTDYTEMKKAILHVYWEEFQKDPVGLMSRVAQPASKKIDQNKLKPEMDEKGNLTTAGFACSQCGQPLFVYKLEQVSEKGKAYTNYFGRCNVAEHEKLILLAQLKPEKDSDEAVTYSLGKFGQRALDFYSIHVTKESTHPVKPLAQIAGNRYASGPVGKALRDACMGTIASFLSKYQDIIIEHQKVVKGNQKRLESLRELAGKENLEYPSVTLPPQPHTKEGVDAYNEVIARVRMWVNLNLWQKLKLSRDDAKPLLRLKGFPSFPLVERQANEVDWWDMVCNVKKLINEKKEDGKVFWQNLAGYKRQEALRPYLSSEEDRKKGKKFARYQLGDLLLHLEKKHGEDWGKVYDEAWERIDKKVEGLSKHIKLEEERRSEDAQSKAALTDWLRAKASFVIEGLKEADKDEFCRCDLKLQKWYGDLRGKPFAIEAENSILDISGFSKQYNCAFIWQKDGVKKLNLYLIINYFKGGKLRFKKIKPEAFEANRFYTVINKKSGEIVPMEVNFNFDDPNLIILPLAFGKRVGREFIWNDLLSLETGSLKLANGRVIEKTLYNRRTRQDEPALFVALTFERREVLDSSNIKPMNLIGVDRGENIPAVIALTDPEGCPLSRFKDSLGNPTHILRIGESYKEKQRTIQAKKEVEQRRAGGYSRKYASKAKNLADDMVRNTARDLLYYAVTQDAMLIFENLSRGFGRQGKRTFMAERQYTRMEDWLTAKLAYEGLPSKTYLSKTLAQYTSKTCSNCGFTITSADYDRVLEKLKKTATGWMTTINGKELKVEGQITYYNRYKRQNVVKDLSVELDRLSEESVNNDISSWTKGRSGEALSLLKKRFSHRPVQEKFVCLNCGFETHADEQAALNIARSWLFLRSQEYKKYQTNKTTGNTDKRAFVETWQSFYRKKLKEVWKPAV

SEQ ID NO: 40218 - protein, 979 aa, synthetic construct
  REGION 1..979: note = engineered CasX variant
QEIKRINKIRRRLVKDSNTKKAGKTGPMKTLLVRVMTPDLRERLENLRKKPENIPQPISNTSRANLNKLLTDYTEMKKAILHVYWEEFQKDPVGLMSRVAQPASKKIDQNKLKPEMDEKGNLTTAGFACSQCGQPLFVYKLEQVSEKGKAYTNYFGRCNVAEHEKLILLAQLKPEKDSDEAVTYSLGKFGQRALDFYSIHVTKESTHPVKPLAQIAGNRYASGPVGKALRDACMGTIASFLSKYQDIIIEHQKVVKGNQKRLESLRELAGKENLEYPSVTLPPQPHTKEGVDAYNEVIARVRMWVNLNLWQKLKLSRDDAKPLLRLKGFPSFPLVERQANEVDWWDMVCNVKKLINEKKEDGKVFWQNLAGYKRQEALRPYLSSEEDRKKGKKFARYQLGDLLLHLEKKHGEDWGKVYDEAWERIDKKVEGLSKHIKLEEERRSEDAQSKAALTDWLRAKASFVIEGLKEADKDEFCRCDLKLQKWYGDLRGKPFAIEAENSILDISGFSKQYNCAFIWQKDGVKKLNLYLIINYFKGGKLRFKKIKPEAFEANRFYTVINKKSGEIVPMEVNFNFDDPNLIILPLAFGKRQGREFIWNDLLSLETGSLKLANGRVIEKTLYNRRTRQDEPALFVALTFERREVLDSSNIKTPMNLIGVDRGENIPAVIALTDPEGCPLSRFKDSLGNPTHILRIGESYKEKQRTIQAKKEVEQRRAGGYSRKYASKAKNLADDMVRNTARDLLYYAVTQDAMLIFENLSRGFGRQGKRTFMAERQYTRMEDWLTAKLAYEGLPSKTYLSKTLAQYTSKTCSNCGFTITSADYDRVLEKLKKTATGWMTTINGKELKVEGQITYYNRYKRQNVVKDLSVELDRLSEESVNNDISSWTKGRSGEALSLLKKRFSHRPVQEKFVCLNCGFETHADEQAALNIARSWLFLRSQEYKKYQTNKTTGNTDKRAFVETWQSFYRKKLKEVWKPAV

SEQ ID NO: 40219 - protein, 979 aa, synthetic construct
  REGION 1..979: note = engineered CasX variant
QEIKRINKIRRRLVKDSNTKKAGKTGPMKTLLVRVMTPDLRERLENLRKKPENIPQPISNTSRANLNKLLTDYTEMKKAILHVYWEEFQKDPVGLMSRVAQPASKKIDQNKLKPEMDEKGNLTTAGFACSQCGQPLFVYKLEQVSEKGKAYTNYFGRCNVAEHEKLILLAQLKPEKDSDEAVTYSLGKFGQRALDFYSIHVTKESTHPVKPLAQIAGNRYASGPVGKALRDACMGTIASFLSKYQDIIIEHQKVVKGNQKRLESLRELAGKENLEYPSVTLPPQPHTKEGVDAYNEVIARVRMWVNLNLWQKLKLSRDDAKPLLRLKGFPSFPLVERQANEVDWWDMVCNVKKLINEKKEDGKVFWQNLAGYKRQEALRPYLSSEEDRKKGKKFARYQLGDLLLHLEKKHGEDWGKVYDEAWERIDKKVEGLSKHIKLEEERRSEDAQSKAALTDWLRAKASFVIEGLKEADKDEFCRCDLKLQKWYGDLRGKPFAIEAENSILDISGFSKQYNCAFIWQKDGVKKLNLYLIINYFKGGKLRFKKIKPEAFEANRFYTVINKKSGEIVPMEVNFNFDDPNLIILPLAFGKRQGREFIWNDLLSLETGSLKLANGRVIEKTLYNRRTRQDEPALFVALTFERREVLDSSNIKPMSNLIGVDRGENIPAVIALTDPEGCPLSRFKDSLGNPTHILRIGESYKEKQRTIQAKKEVEQRRAGGYSRKYASKAKNLADDMVRNTARDLLYYAVTQDAMLIFENLSRGFGRQGKRTFMAERQYTRMEDWLTAKLAYEGLPSKTYLSKTLAQYTSKTCSNCGFTITSADYDRVLEKLKKTATGWMTTINGKELKVEGQITYYNRYKRQNVVKDLSVELDRLSEESVNNDISSWTKGRSGEALSLLKKRFSHRPVQEKFVCLNCGFETHADEQAALNIARSWLFLRSQEYKKYQTNKTTGNTDKRAFVETWQSFYRKKLKEVWKPAV

SEQ ID NO: 40220 - protein, 978 aa, synthetic construct
  REGION 1..978: note = engineered CasX variant
QEIKRINKIRRRLVKDSNTKKAGKTGPMKTLLVRVMTPDLRERLENLRKKPENIPQPISNTSRANLNKLLTDYTEMKKAILHVYWEEFQKDPVGLMSRVAQPASKKIDQNKLKPEMDEKGNLTTAGFACSQCGQPLFVYKLEQVSEKGKAYTNYFGRCNVAEHEKLILLAQLKPEKDSDEAVTYSLGKFGQRALDFYSIHVTKESTHPVKPLAQIAGNRYASGPVGKALRDACMGTIASFLSKYQDIIIEHQKVVKGNQKRLESLRELAGKENLEYPSVTLPPQPHTKEGVDAYNEVIARVRMWVNLNLWQKLKLSRDDAKPLLRLKGFPSFPLVERQANEVDWWDMVCNVKKLINEKKEDGKVFWQNLAGYKRQEALRPYLSSEEDRKKGKKFARYQLGDLLLHLEKKHGEDWGKVYDEAWERIDKKVEGLSKHIKLEEERRSEDAQSKAALTDWLRAKASFVIEGLKEADKDEFCRCDLKLQKWYGDLRGKPFAIEAENSILDISGFSKQYNCAFIWQKDGVKKLNLYLIINYFKGGKLRFKKIKPEAFEANRFYTVINKKSGEIVPMEVNFNFDDPNLIILPLAFGKRQGREFIWNDLLSLETGSLKLANGRVIEKTLYNRRTRQDEPALFVALTFERREVLDSSNIKPMNLIGVDRGENIPAVIALTDPEGCPLSRFKDSLGNPTHILRIRESYKEKQRTIQAKKEVEQRRAGGYSRKYASKAKNLADDMVRNTARDLLYYAVTQDAMLIFENLSRGFGRQGKRTFMAERQYTRMEDWLTAKLAYEGLPSKTYLSKTLAQYTSKTCSNCGFTITSADYDRVLEKLKKTATGWMTTINGKELKVEGQITYYNRYKRQNVVKDLSVELDRLSEESVNNDISSWTKGRSGEALSLLKKRFSHRPVQEKFVCLNCGFETHADEQAALNIARSWLFLRSQEYKKYQTNKTTGNTDKRAFVETWQSFYRKKLKEVWKPAV

SEQ ID NO: 40221 - protein, 978 aa, synthetic construct
  REGION 1..978: note = engineered CasX variant
QEIKRINKIRRRLVKDSNTKKAGKTGPMKTLLVRVMTPDLRERLENLRKKPENIPQPISNTSRANLNKLLTDYTEMKKAILHVYWEEFQKDPVGLMSRVAQPASKKIDQNKLKPEMDEKGNLTTAGFACSQCGQPLFVYKLEQVSEKGKAYTNYFGRCNVAEHEKLILLAQLKPEKDSDEAVTYSLGKFGQRALDFYSIHVTKESTHPVKPLAQIAGNRYASGPVGKALRDACMGTIASFLSKYQDIIIEHQKVVKGNQKRLESLRELAGKENLEYPSVTLPPQPHTKEGVDAYNEVIARVRMWVNLNLWQKLKLSRDDAKPLLRLKGFPSFPLVERQANEVDWWDMVCNVKKLINEKKEDGKVFWQNLAGYKRQEALRPYLSSEEDRKKGKKFARYQLGDLLLHLEKKHGEDWGKVYDEAWERIDKKVEGLSKHIKLEEERRSEDAQSKAALTDWLRAKASFVIEGLKEADKDEFCRCDLKLQKWYGDLRGKPFAIEAENSILDISGFSKQYNCAFIWQKDGVKKLNLYLIINYFKGGKLRFKKIKPEAFEANRFYTVINKKSGEIVPMEVNFNFDDPNLIILPLAFGKRQGREFIWNDLLSLETGSLKLANGRVIEKTLYNRRTRQDEPALFVALTFERREVLDSSNIKPMNLIGVDRGENIPAVIALTDPEGCPLSRFKDSLGNPTHILRIGESYKEKQRTIQAKKEVEQRRAGGYSRKYASKAKNLADDMVRNTARDLLYYAVTQDAMLIFENLSRGFGRQGKRTFSAERQYTRMEDWLTAKLAYEGLPSKTYLSKTLAQYTSKTCSNCGFTITSADYDRVLEKLKKTATGWMTTINGKELKVEGQITYYNRYKRQNVVKDLSVELDRLSEESVNNDISSWTKGRSGEALSLLKKRFSHRPVQEKFVCLNCGFETHADEQAALNIARSWLFLRSQEYKKYQTNKTTGNTDKRAFVETWQSFYRKKLKEVWKPAV

SEQ ID NO: 40222 - protein, 978 aa, synthetic construct
  REGION 1..978: note = engineered CasX variant
QEIKRINKIRRRLVKDSNTKKAGKTGPMKTLLVRVMTPDLRERLENLRKKPENIPQPISNTSRANLNKLLTDYTEMKKAILHVYWEEFQKDPVGLMSRVAQPASKKIDQNKLKPEMDEKGNLTTAGFACSQCGQPLFVYKLEQVSEKGKAYTNYFGRCNVAEHEKLILLAQLKPEKDSDEAVTYSLGKFGQRALDFYSIHVTKESTHPVKPLAQIAGNRYASGPVGKALRDACMGTIASFLSKYQDIIIEHQKVVKGNQKRLESLRELAGKENLEYPSVTLPPQPHTKEGVDAYNEVIARVRMWVNLNLWQKLKLSRDDAKPLLRLKGFPSFPLVERQANEVDWWDMVCNVKKLINEKKEDGKVFWQNLAGYKRQEALRPYLSSEEDRKKGKKFARYQLGDLLLHLEKKHGEDWGKVYDEAWERIDKKVEGLSKHIKLEEERRSEDAQSKAALTDWLRAKASFVIEGLKEADKDEFCRCDLKLQKWYGDLRGKPFAIEAENSILDISGFSKQYNCAFIWQKDGVKKLNLYLIINYFKGGKLRFKKIKPEAFEANRFYTVINKKSGEIVPMEVNFNFDDPNLIILPLAFGKRQGREFIWNDLLSLETGSLKLANGRVIEKTLYNRRTRQDEPALFVALTFERREVLDSSNIKPMNLIGVDRGENIPAVIALTDPEGCPLSRFKDSLGNPTHILRIGESYKEKQRTIQAKKEVEQRRAGGYSRKYASKAKNLADDMVRNTARDLLYYAVTQDAMLIFENLSRGFGRQGKRTFMAERQYTRMEDWLTAKLAYEGLPSKTYLSKTLAQYTSKTCSNCGFTITSADYDRVLEKLKKTATGWMTTINGKELKVEGQITYYNRYKRQNVVKDLSVELDRLSEESVNNDISSWDKGRSGEALSLLKKRFSHRPVQEKFVCLNCGFETHADEQAALNIARSWLFLRSQEYKKYQTNKTTGNTDKRAFVETWQSFYRKKLKEVWKPAV

SEQ ID NO: 40223 - protein, 978 aa, synthetic construct
  REGION 1..978: note = engineered CasX variant
QEIKRINKIRRRLVKDSNTKKAGKTGPMKTLLVRVMTPDLRERLENLRKKPENIPQPISNTSRANLNKLLTDYTEMKKAILHVYWEEFQVDPVGLMSRVAQPASKKIDQNKLKPEMDEKGNLTTAGFACSQCGQPLFVYKLEQVSEKGKAYTNYFGRCNVAEHEKLILLAQLKPEKDSDEAVTYSLGKFGQRALDFYSIHVTKESTHPVKPLAQIAGNRYASGPVGKALRDACMGTIASFLSKYQDIIIEHQKVVKGNQKRLESLRELAGKENLEYPSVTLPPQPHTKEGVDAYNEVIARVRMWVNLNLWQKLKLSRDDAKPLLRLKGFPSFPLVERQANEVDWWDMVCNVKKLINEKKEDGKVFWQNLAGYKRQEALRPYLSSEEDRKKGKKFARYQLGDLLLHLEKKHGEDWGKVYDEAWERIDKKVEGLSKHIKLEEERRSEDAQSKAALTDWLRAKASFVIEGLKEADKDEFCRCDLKLQKWYGDLRGKPFAIEAENSILDISGFSKQYNCAFIWQKDGVKKLNLYLIINYFKGGKLRFKKIKPEAFEANRFYTVINKKSGEIVPMEVNFNFDDPNLIILPLAFGKRQGREFIWNDLLSLETGSLKLANGRVIEKTLYNRRTRQDEPALFVALTFERREVLDSSNIKPMNLIGVDRGENIPAVIALTDPEGCPLSRFKDSLGNPTHILRIGESYKEKQRTIQAKKEVEQRRAGGYSRKYASKAKNLADDMVRNTARDLLYYAVTQDAMLIFENLSRGFGRQGKRTFMAERQYTRMEDWLTAKLAYEGLPSKTYLSKTLAQYTSKTCSNCGFTITSADYDRVLEKLKKTATGWMTTINGKELKVEGQITYYNRYKRQNVVKDLSVELDRLSEESVNNDISSWTKGRSGEALSLLKKRFSHRPVQEKFVCLNCGFETHADEQAALNIARSWLFLRSQEYKKYQTNKTTGNTDKRAFVETWQSFYRKKLKEVWKPAV

SEQ ID NO: 40224 - protein, 978 aa, synthetic construct
  REGION 1..978: note = engineered CasX variant
QEIKRLNKIRRRLVKDSNTKKAGKTGPMKTLLVRVMTPDLRERLENLRKKPENIPQPISNTSRANLNKLLTDYTEMKKAILHVYWEEFQKDPVGLMSRVAQPASKKIDQNKLKPEMDEKGNLTTAGFACSQCGQPLFVYKLEQVSEKGKAYTNYFGRCNVAEHEKLILLAQLKPEKDSDEAVTYSLGKFGQRALDFYSIHVTKESTHPVKPLAQIAGNRYASGPVGKALRDACMGTIASFLSKYQDIIIEHQKVVKGNQKRLESLRELAGKENLEYPSVTLPPQPHTKEGVDAYNEVIARVRMWVNLNLWQKLKLSRDDAKPLLRLKGFPSFPLVERQANEVDWWDMVCNVKKLINEKKEDGKVFWQNLAGYKRQEALRPYLSSEEDRKKGKKFARYQLGDLLLHLEKKHGEDWGKVYDEAWERIDKKVEGLSKHIKLEEERRSEDAQSKAALTDWLRAKASFVIEGLKEADKDEFCRCDLKLQKWYGDLRGKPFAIEAENSILDISGFSKQYNCAFIWQKDGVKKLNLYLIINYFKGGKLRFKKIKPEAFEANRFYTVINKKSGEIVPMEVNFNFDDPNLIILPLAFGKRQGREFIWNDLLSLETGSLKLANGRVIEKTLYNRRTRQDEPALFVALTFERREVLDSSNIKPMNLIGVDRGENIPAVIALTDPEGCPLSRFKDSLGNPTHILRIGESYKEKQRTIQAKKEVEQRRAGGYSRKYASKAKNLADDMVRNTARDLLYYAVTQDAMLIFENLSRGFGRQGKRTFMAERQYTRMEDWLTAKLAYEGLPSKTYLSKTLAQYTSKTCSNCGFTITSADYDRVLEKLKKTATGWMTTINGKELKVEGQITYYNRYKRQNVVKDLSVELDRLSEESVNNDISSWTKGRSGEALSLLKKRFSHRPVQEKFVCLNCGFETHADEQAALNIARSWLFLRSQEYKKYQTNKTTGNTDKRAFVETWQSFYRKKLKEVWKPAV

SEQ ID NO: 40225 - protein, 978 aa, synthetic construct
  REGION 1..978: note = engineered CasX variant
QEIKRINKIRRRLVKDSNTKKAGKTGPMKTLLVRVMTPDLRERLENLRKKPENIPQPISNTSRANLNKLLTDYTEMKKAILHVYWEEFQKDPVGLMSRVAQPASKKIDQNKLKPEMDEKGNLTTAGFACSQCGQPLFVYKLEQVSEKGKAYTNYVGRCNVAEHEKLILLAQLKPEKDSDEAVTYSLGKFGQRALDFYSIHVTKESTHPVKPLAQIAGNRYASGPVGKALRDACMGTIASFLSKYQDIIIEHQKVVKGNQKRLESLRELAGKENLEYPSVTLPPQPHTKEGVDAYNEVIARVRMWVNLNLWQKLKLSRDDAKPLLRLKGFPSFPLVERQANEVDWWDMVCNVKKLINEKKEDGKVFWQNLAGYKRQEALRPYLSSEEDRKKGKKFARYQLGDLLLHLEKKHGEDWGKVYDEAWERIDKKVEGLSKHIKLEEERRSEDAQSKAALTDWLRAKASFVIEGLKEADKDEFCRCDLKLQKWYGDLRGKPFAIEAENSILDISGFSKQYNCAFIWQKDGVKKLNLYLIINYFKGGKLRFKKIKPEAFEANRFYTVINKKSGEIVPMEVNFNFDDPNLIILPLAFGKRQGREFIWNDLLSLETGSLKLANGRVIEKTLYNRRTRQDEPALFVALTFERREVLDSSNIKPMNLIGVDRGENIPAVIALTDPEGCPLSRFKDSLGNPTHILRIGESYKEKQRTIQAKKEVEQRRAGGYSRKYASKAKNLADDMVRNTARDLLYYAVTQDAMLIFENLSRGFGRQGKRTFMAERQYTRMEDWLTAKLAYEGLPSKTYLSKTLAQYTSKTCSNCGFTITSADYDRVLEKLKKTATGWMTTINGKELKVEGQITYYNRYKRQNVVKDLSVELDRLSEESVNNDISSWTKGRSGEALSLLKKRFSHRPVQEKFVCLNCGFETHADEQAALNIARSWLFLRSQEYKKYQTNKTTGNTDKRAFVETWQSFYRKKLKEVWKPAV

SEQ ID NO: 40226 - protein, 978 aa, synthetic construct
  REGION 1..978: note = engineered CasX variant
QEIKRINKIRRRLVKDSNTKKAGKTGPMKTLLVRVMTPDLRERLENLRKKPENIPQPISNTSRANLNKLLTDYTEMKKAILHVYWEEFQKDPVGLMSRVAQPASKKIDQNKLKPEMDEKGNLTTAGFACSQCGQPLFVYKLEQVSEKGKAYTNYFGRCNVAEHEKLILLAQLKPEKDSDEAVTYSLGKFGQRALDFYSIHVTKESTHPVKPLAQIAGNRYASGPVGKALRDACMGTIASFLSKYQDIIIEHQKVVKGNQKRLESLRELAGKENLEYPSVTLPPQPHTKEGVDAYNEVIARVRMWVNLNLWQKLKLSRDDAKPLLRLKGFPSFPLVERQANEVDWWDMVCNVKKLINEKKEDGKVFWQNLAGYKRQEALRPYLSSEEDRKKGKKFARYQLGDLLLHLEKKHGEDWGKVYDEAWERIDKKVEGLSKHIKLEEERRSEDAQSKAALTDWLRAKASFVIEGLKEADKDEFCRCDLKLQKWYGDLRGKPFAIEAENSILDISGFSKQYNCAFIWQKDGVKKLNLYLIINYFKGGKLRFKKIKPEAFEANRFYTVINKKSGEIVPMEVNFNFDDPNLIILPLAFGKRQGREFIWNDLLSLETGSLKLANGRVIEKTLYNRRTRQDEPALFVALTFERREVLDSSNIKPMNLIGVDRGENIPAVIALTDPEGCPLSRFKDSLGNPTHILRIGESYKEKQRTIQAKKEVEQRRAGGYSRKYASKAKNLADDMVRNTARDLLYYAVTQDAMLIFENLSRGFGRQGKRTFMAERQYTRMEDWLTAKLAYEGLASKTYLSKTLAQYTSKTCSNCGFTITSADYDRVLEKLKKTATGWMTTINGKELKVEGQITYYNRYKRQNVVKDLSVELDRLSEESVNNDISSWTKGRSGEALSLLKKRFSHRPVQEKFVCLNCGFETHADEQAALNIARSWLFLRSQEYKKYQTNKTTGNTDKRAFVETWQSFYRKKLKEVWKPAV

SEQ ID NO: 40227 - protein, 978 aa, synthetic construct
  REGION 1..978: note = engineered CasX variant
QEIKRINKIRRRLVKDSNTKKAGKTGPMKTLLVRVMTPDLRERLENLRKKPENIPQPISNTSRANLNKLLTDYTEMKKAILHVYWEEFQKDPVGLMSRVAQPASKKIDQNKLKPEMDEKGNLTTAGFACSQCGQPLFVYKLEQVSEKGKAYTNYFGRCNVAEHEKLILLAQLKPEKDSDEAVTYSLGKFGQRALDFYSIHVTKESTHPVKPLAQIAGNRYASGPVGKALRDACMGTIASFLSKYQDIIIEHQKVVKGNQKRLESLRELAGKENLEYPSVTLPPQPHTKEGVDAYNEVIARVRMWVNLNLWQKLKLSRDDAKPLLRLKGFPSFPLVERQANEVDWWDMVCNVKKLINEKKEDGKVFWQNLAGYKRQEALRPYLSSEEDRKKGKKFARYQLGDLLLHLEKKHGEDWGKVYDEAWERIDKKVEGLSKHIKLEEERRSEDAQSKAALTDWLRAKASFVIEGLKEADKDEFCRCDLKLQKWYGDLRGKPFAIEAENSILDISGFSKQYNCAFIWQKDGVKKLNLYLIINYFKGGKLRFKKIKPEAFEANRFYTVINKKSGEIVPMEVNFNFDDPNLIILPLAFGKRQGREFIWNDLLSLETGSLKLANGRVIEKTLYNRRTRQDEPALFVALTFERREVLDSSNIKPMNLIGVDRGENIPAVIALTDPEGCPLSRFKDSLGNPTHILRIGESYKEKQRTIQAKKEVEQRRAGGYSRKYASKAKNLADDMVRNTARDLLYYAVTQDAMLIFENLSRGFGRQGKRTFMAERQYTRMEDWLTAKLAYEGLPSKVYLSKTLAQYTSKTCSNCGFTITSADYDRVLEKLKKTATGWMTTINGKELKVEGQITYYNRYKRQNVVKDLSVELDRLSEESVNNDISSWTKGRSGEALSLLKKRFSHRPVQEKFVCLNCGFETHADEQAALNIARSWLFLRSQEYKKYQTNKTTGNTDKRAFVETWQSFYRKKLKEVWKPAV

SEQ ID NO: 40228 - protein, 979 aa, synthetic construct
  REGION 1..979: note = engineered CasX variant
QEIKRINKIRRRLVKDSNTKKAGKTGPMKTLLVRVMTPDLRERLENLRKKPENIPQPISNTSRANLNKLLTDYTEMKKAILHVYWEEFQKDPVGLMSRVAQPASKKIDQNKLKPEMDEKGNLTTAGFACSQCGQPLFVYKLEQVSEKGKAYTNYFGRCNVAEHEKLILLAQLKPEKDSDEAVTYSLGKFGQRALDFYSIHVTKESTHPVKPLAQIAGNRYASGPVGKALRDACMGTIASFLSKYQDIIIEHQKVVKGNQKRLESLRELAGKENLEYPSVTLPPQPHTKEGVDAYNEVIARVRMWVNLNLWQKLKLSRDDAKPLLRLKGFPSFPLVERQANEVDWWDMVCNVKKLINEKKEDGKVFWQNLAGYKRQEALRPYLSSEEDRKKGKKFARYQLGDLLLHLEKKHGEDWGKVYDEAWERIDKKVEGLSKHIKLEEERRSEDAQSKAALTDWLRAKASFVIEGLKEADKDEFCRCDLKLQKWYGDLRGKPFAIEAENSILDISGFSKQYNCAFIWQKDGVKKLNLYLIINYFKGGKLRFKKIKPEAFEANRFYTVINKKSGEIVPMEVNFNFDDPNLIILPLAFGKRQGREFIWNDLLSLETGSLKLANGRVIEKTLYNRRTRQDEPALFVALTFERREVLDSSNIKPMNLIGVDRGENIPAVIALTDPEGCPLSRFKDSLGNPTHILRIGESYKEKQRTIQAKKEVEQRRAGGYSRKYASKAKNLADDMVRNTARDLLYYAVTQDAMLIFENLSRGFGRQGKRTFMAERQYTRMEDWLTAKLAYEGPLPSKTYLSKTLAQYTSKTCSNCGFTITSADYDRVLEKLKKTATGWMTTINGKELKVEGQITYYNRYKRQNVVKDLSVELDRLSEESVNNDISSWTKGRSGEALSLLKKRFSHRPVQEKFVCLNCGFETHADEQAALNIARSWLFLRSQEYKKYQTNKTTGNTDKRAFVETWQSFYRKKLKEVWKPAV

SEQ ID NO: 40229 - protein, 979 aa, synthetic construct
  REGION 1..979: note = engineered CasX variant
QEIKRINKIRRRLVKDSNTKKAGKTGPMKTLLVRVMTPDLRERLENLRKKPENIPQPISNTSRANLNKLLTDYTEMKKAILHVYWEEFQKDPVGLMSRVAQPASKKIDQNKLKPEMDEKGNLTTAGFACSQCGQPLFVYKLEQVSEKGKAYTNYFGRCNVAEHEKLILLAQLKPEKDSDEAVTYSLGKFGQRALDFYSIHVTKESTHPVKPLAQIAGNRYASGPVGKALRDACMGTIASFLSKYQDIIIEHQKVVKGNQKRLESLRELAGKENLEYPSVTLPPQPHTKEGVDAYNEVIARVRMWVNLNLWQKLKLSRDDAKPLLRLKGFPSFPLVERQANEVDWWDMVCNVKKLINEKKEDGKVFWQNLAGYKRQEALRPYLSSEEDVRKKGKKFARYQLGDLLLHLEKKHGEDWGKVYDEAWERIDKKVEGLSKHIKLEEERRSEDAQSKAALTDWLRAKASFVIEGLKEADKDEFCRCDLKLQKWYGDLRGKPFAIEAENSILDISGFSKQYNCAFIWQKDGVKKLNLYLIINYFKGGKLRFKKIKPEAFEANRFYTVINKKSGEIVPMEVNFNFDDPNLIILPLAFGKRQGREFIWNDLLSLETGSLKLANGRVIEKTLYNRRTRQDEPALFVALTFERREVLDSSNIKPMNLIGVDRGENIPAVIALTDPEGCPLSRFKDSLGNPTHILRIGESYKEKQRTIQAKKEVEQRRAGGYSRKYASKAKNLADDMVRNTARDLLYYAVTQDAMLIFENLSRGFGRQGKRTFMAERQYTRMEDWLTAKLAYEGLPSKTYLSKTLAQYTSKTCSNCGFTITSADYDRVLEKLKKTATGWMTTINGKELKVEGQITYYNRYKRQNVVKDLSVELDRLSEESVNNDISSWTKGRSGEALSLLKKRFSHRPVQEKFVCLNCGFETHADEQAALNIARSWLFLRSQEYKKYQTNKTTGNTDKRAFVETWQSFYRKKLKEVWKPAV

SEQ ID NO: 40230 - protein, 978 aa, synthetic construct
  REGION 1..978: note = engineered CasX variant
QEIKRINKIRRRLVKDSNTKKAGKTGPMKTLLVRVMTPDLRERLENLRKKPENIPQPISNTSRANLNKLLTDYTEMKKAILHVYWEEFQKDPVGLMSRVAQPASKKIDQNKLKPEMDEKGNLTTAGFACSQCGQPLFVYKLEQVSEKGKAYTNYFGRCNVAEHEKLILLAQLKPEKDSDEAVTYSLGKFGQRALDFYSIHVTKESTHPVKPLAQIAGNRYASGPVGKALRDACMGTIASFLSKYQDIIIEHQKVVKGNQKRLESLRELAGKENLEYPSVTLPPQPHTKEGVDAYNEVIARVRMWVNLNLWQKLKLSRDDAKPLLRLKGFPSFPLVERQANEVDWWDMVCNVKKLINEKKEDGKVFWQNLAGYKRQEALRPYLSSEEDRKKGKKFARYQLGDLLLHLEKKHGEDWGKVYDEAWERIDKKVEGLSKHIKLEEERRSEDAQSKAALTDWLRAKASFVIEGLKEADKDEFCRCDLKLQKWYGDLRGKPFAIEAENSILDISGFSKQYNCAFIWQKDGVKKLNLYLIINYFKGGKLRFKKIKPEAFEANRFYTVINKKSGEIVPMEVNFNFDDPNLIILPLAFGKRQGREFIWNDLLSLETGSLKLANGRVIEKTLYNRRTRQDEPALFVALTFERREVLDSSNIKPMNLIGVDRGENIPAVIALTDPEGCPLSRFKDSLGNPTHILRIGESYKEKQRTIQAKKEVEQRRAGGYSRKYASKAKNLADDMVRNTARDLLYYAVTQDAMLIFENLSRGFGRQGKRTFMAERQYTRMEDWLTAKLAYEGLPSKTYLSKTLAQYTSKTCSNCGFTITSADYDRMLEKLKKTATGWMTTINGKELKVEGQITYYNRYKRQNVVKDLSVELDRLSEESVNNDISSWTKGRSGEALSLLKKRFSHRPVQEKFVCLNCGFETHADEQAALNIARSWLFLRSQEYKKYQTNKTTGNTDKRAFVETWQSFYRKKLKEVWKPAV

SEQ ID NO: 40231 - protein, 978 aa, synthetic construct
  REGION 1..978: note = engineered CasX variant
QEIKRINKIRRRLVKDSNTKKAGKTGPMKTLLVRVMTPDLRERLENLRKKPENIPQPISNTSRANLNKLLTDYTEMKKAILHVYWEEFQKDPVGLMSRVAQPASKKIDQNKLKPEMDEKGNLTTAGFACSQCGQPLFVYKLEQVSEKGKAYTNYFGRCNVAEHEKLILLAQLKPEKDSDEAVTYSLGKFGQRALDFYSIHVTKESTHPVKPLAQIAGNRYASGPVGKALRDACMGTIASFLSKYQDIIIEHQKVVKGNQKRLESLRELAGKENLEYPSVTLPPQPHTKEGVDAYNEVIARVRMWVNLNLWQKLKLSRDDAKPLLRLKGFPSFPLVERQANEVDWWDMVCNVKKLINEKKEDGKVFWQNLAGYKRQEALRPYLSSEEDRKKGKKFARYQLGDLLLHLEKKHGEDWGKVYDEAWERIDKKVEGLSKHIKLEEERRSEDAQSKAALTDWLRAKASFVIEGLKEADKDEFCRCDLKLQKWYGDLRGKPFAIEAENSILDISGFSKQYNCAFIWQKDGVKKLNLYLIINYFKGGKLRFKKIKPEAFEANRFYTVINKKSGEIVPMEVNFNFDDPNLIILPLAFGKRQGREFIWNDLLSLETGSLKLANGRVIEKTLYNRRTRQDEPALFVALTFERREVLDSSNIKPMNLIGVDRGENIPAVIALTDPEGCPLSRFKDSLGNPTHILRIGESYKEKQRTIQAKKEVEQRRAGGYSRKYASKAKNLADDMVRNTARDLLYYAVTQDAMLIFENLSRGFGRQGKRTFMAERQYTRMEDWLTAKLAYEGLPSKTYLSKTLAQYTSKTCSNCGFTITSADYDRVLEKLKKTATGWMTTINGKELKVEGQITYYNRYKRQNVVKDLSVELDRLSEESVNNDISSWTKGRQGEALSLLKKRFSHRPVQEKFVCLNCGFETHADEQAALNIARSWLFLRSQEYKKYQTNKTTGNTDKRAFVETWQSFYRKKLKEVWKPAV

SEQ ID NO: 40232 - protein, 978 aa, synthetic construct
  REGION 1..978: note = engineered CasX variant
QEIKRINKIRRRLVKDSNTKKAGKTGPMKTLLVRVMTPDLRERLENLRKKPENIPQPISNTSRANLNKLLTDYTEMKKAILHVYWEEFQKDPVGLMSRVAQPASKKIDQNKLKPEMDEKGNLTTAGFACSQCGQPLFVYKLEQVSEKGKAYTNYFGRCNVAEHEKLILLAQLKPEKDSDEAVTYSLGKFGQRALDFYSIHVTKESTHPVKPLAQIAGNRYASGPVGKALRDACMGTIASFLSKYQDIIIEHQKVVKGNQKRLESLRELAGKENLEYPSVTLPPQPHTKEGVDAYNEVIARVRMWVNLNLWQKLKLSRDDAKPLLRLKGFPSFPLVERQANEVDWWDMVCNVKKLINEKKEDGKVFWQNLAGYKRQEALRPYLSSEEDRKKGKKFARYQLGDLLLHLEKKHGEDWGKVYDEAWERIDKKVEGLSKHIKLEEERRSEDAQSKAALTDWLRAKASFVIEGLKEADKDEFCRCDLKLQKWYGDLRGKPFAIEAENSILDISGFSKQYNCAFIWQKDGVKKLNLYLIINYFKGGKLRFKKIKPEAFEANRFYTVINKKSGEIVPMEVNFNFDDPNLIILPLAFGKRQGREFIWNDLLSLETGSLKLANGRVIEKTLYNRRTRQDEPALFVALTFERREVLDSSNIKPMNLIGVDRGENIPAVIALTDPEGCPLSRFKDSLGNPTHILRIGESYKEKQRTIQAKKEVEQRRAGGYSRKYASKAKNLADDMVRNTARDLLYYAVTQDAMLIFENLSRGFGRQGKRTFMAERQYTRMEDWLTAKLAYEGLPSKTYLSKTLAQYTSKTCSNCGFTITSADYDRVLEKLKKTATGWMTTINGKELKVEGQITYYNRYKRQNVVKDLSVELDRLSEESVNNDISSWTKGRSGEALSLLKKRFSHRPVQEKFVCLNCEFETHADEQAALNIARSWLFLRSQEYKKYQTNKTTGNTDKRAFVETWQSFYRKKLKEVWKPAV

SEQ ID NO: 40233 - protein, 979 aa, synthetic construct
  REGION 1..979: note = engineered CasX variant
QEIKRINKIRRRLVKDSNTKKAGKTGPMKTLLVRVMTPDLRERLENLRKKPENIPQPISNTSRANLNKLLTDYTEMKKAILHVYWEEFQKDPVGLMSRVAQPASKKIDQNKLKPEMDEKGNLTTAGFACSQCGQPLFVYKLEQVSEKGKAYTNYFGRCNVAEHEKLILLAQLKPEKDSDEAVTYSLGKFGQRALDFYSIHVTKESTHPVKPLAQIAGNRYASGPVGKALRDACMGTIASFLSKYQDIIIEHQKVVKGNQKRLESLRELAGKENLEYPSVTLPPQPHTKEGVDAYNEVIARVRMWVNLNLWQKLKLSRDDAKPLLRLKGFPSFPLVERQANEVDWWDMVCNVKKLINEKKEDGKVFWQNLAGYKRQEALRPYLSSEEDRKKGKKFARYQLGDLLLHLEKKHGEDWGKVYDEAWERIDKKVEGLSKHIKLEEERRSEDAQSKAALTDWLRAKASFVIEGLKEADKDEFCRCDLKLQKWYGDLRGKPFAIEAENSILDISGFSKQYNCAFIWQKDGVKKLNLYLIINYFKGGKLRFKKIKPEAFEANRFYTVINKKSGEIVPMEVNFNFDDPNLIILPLAFGKRQGREFIWNDLLSLETGSLKLANGRVIEKTLYNRRTRQDEPALFVALTFERREVLDSSNIKPMNLIGVDRGENIPAVIALTDPEGCPLSRFKDSLGNPTHILRIGESYKEKQRTIQAKKEVEQRRAGGYSRKYASKAKNLADDMVRNTARDLLYYAVTQDAMLIFENLSRGFGRQGKRTFMAERQYTRMEDWLTAKLAYEGLPSKTYLSKTLAQYTSKTCSNCGFTITSADYDRVLEKLKKTATGWMTTINGKELKVEGQITYYNRYKRQNVVKDLSVELDRLSEESVNNDISSWTKGRSGEALSLLKKRFSHRPVQEKFVCLNCGFETHADEQAALNIARSWLFLRSQEYKKYQTNKTSTGNTDKRAFVETWQSFYRKKLKEVWKPAV

SEQ ID NO: 40234 - protein, 979 aa, synthetic construct
  REGION 1..979: note = engineered CasX variant
QEIKRINKIRRRLVKDSNTKKAGKTGPMKTLLVRVMTPDLRERLENLRKKPENIPQPISNTSRANLNKLLTDYTEMKKAILHVYWEEFQKDPVGLMSRVAQPASKKIDQNKLKPEMDEKGNLTTAGFACSQCGQPLFVYKLEQVSEKGKAYTNYFGRCNVAEHEKLILLAQLKPEKDSDEAVTYSLGKFGQRALDFYSIHVTKESTHPVKPLAQIAGNRYASGPVGKALRDACMGTIASFLSKYQDIIIEHQKVVKGNQKRLESLRELAGKENLEYPSVTLPPQPHTKEGVDAYNEVIARVRMWVNLNLWQKLKLSRDDAKPLLRLKGFPSFPLVERQANEVDWWDMVCNVKKLINEKKEDGKVFWQNLAGYKRQEALRPYLSSEEDRKKGKKFARYQLGDLLLHLEKKHGEDWGKVYDEAWERIDKKVEGLSKHIKLEEERRSEDAQSKAALTDWLRAKASFVIEGLKEADKDEFCRCDLKLQKWYGDLRGKPFAIEAENSILDISGFSKQYNCAFIWQKDGVKKLNLYLIINYFKGGKLRFKKIKPEAFEANRFYTVINKKSGEIVPMEVNFNFDDPNLIILPLAFGKRQGREFIWNDLLSLETGSLKLANGRVIEKTLYNRRTRQDEPALFVALTFERREVLDSSNIKPMNLIGVDRGENIPAVIALTDPEGCPLSRFKDSLGNPTHILRIGESYKEKQRTIQAKKEVEQRRAGGYSRKYASKAKNLADDMVRNTARDLLYYAVTQDAMLIFENLSRGFGRQGKRTFMAERQYTRMEDWLTAKLAYEGLPSKTYLSKTLAQYTSKTCSNCGFTITSADYDRVLEKLKKTATGWMTTINGKELKVEGQITYYNRYKRQNVVKDLSVELDRLSEESVNNDISSWTKGRSGEALSLLKKRFSHRPVQEKFVCLNCGFETHADEQAALNIARSWLFLRSQEYKKYQTNKTTGKNTDKRAFVETWQSFYRKKLKEVWKPAV

SEQ ID NO: 40235 - protein, 978 aa, synthetic construct
  REGION 1..978: note = engineered CasX variant
QEIKRINKIRRRLVKDSNTKKAGKTGPMKTLLVRVMTPDLRERLENLRKKPENIPQPISNTSRANLNKLLTDYTEMKKAILHVYWEEFQKDPVGLMSRVAQPASKKIDQNKLKPEMDEKGNLTTAGFACSQCGQPLFVYKLEQVSEKGKAYTNYFGRCNVAEHEKLILLAQLKPEKDSDEAVTYSLGKFGQRALDFYSIHVTKESTHPVKPLAQIAGNRYASGPVGKALRDACMGTIASFLSKYQDIIIEHQKVVKGNQKRLESLRELAGKENLEYPSVTLPPQPHTKEGVDAYNEVIARVRMWVNLNLWQKLKLSRDDAKPLLRLKKFPSFPLVERQANEVDWWDMVCNVKKLINEKKEDGKVFWQNLAGYKRQEALRPYLSSEEDRKKGKKFARYQLGDLLLHLEKKHGEDWGKVYDEAWERIDKKVEGLSKHIKLEEERRSEDAQSKAALTDWLRAKASFVIEGLKEADKDEFCRCDLKLQKWYGDLRGKPFAIEAENSILDISGFSKQYNCAFIWQKDGVKKLNLYLIINYFKGGKLRFKKIKPEAFEANRFYTVINKKSGEIVPMEVNFNFDDPNLIILPLAFGKRQGREFIWNDLLSLETGSLKLANGRVIEKTLYNRRTRQDEPALFVALTFERREVLDSSNIKPMNLIGVDRGENIPAVIALTDPEGCPLSRFKDSLGNPTHILRIGESYKEKQRTIQAKKEVEQRRAGGYSRKYASKAKNLADDMVRNTARDLLYYAVTQDAMLIFENLSRGFGRQGKRTFMAERQYTRMEDWLTAKLAYEGLPSKTYLSKTLAQYTSKTCSNCGFTITSADYDRVLEKLKKTATGWMTTINGKELKVEGQITYYNRYKRQNVVKDLSVELDRLSEESVNNDISSWTKGRSGEALSLLKKRFSHRPVQEKFVCLNCGFETHADEQAALNIARSWLFLRSQEYKKYQTNKTTGNTDKRAFVETWQSFYRKKLKEVWKPAV

SEQ ID NO: 40236 - protein, 978 aa, synthetic construct
  REGION 1..978: note = engineered CasX variant
QEIKRINKIRRRLVKDSNTKKAGKTGPMKTLLVRVMTPDLRERLENLRKKPENIPQPISNTSRANLNKLLTDYTEMKKAILHVYWEEFQKDPVGLMSRVAQPASKKIDQNKLKPEMDEKGNLTTAGFACSQCGQPLFVYKLEQVSEKGKAYTNYFGRCNVAEHEKLILLAQLKPEKDSDEAVTYSLGKFGQRALDFYSIHVTKESTHPVKPLAQIAGNRYASGPVGKALRDACMGTIASFLSKYQDIIIEHQKVVKGNQKRLESLRELAGKENLEYPSVTLPPQPHTKEGVDAYNEVIARVRMWVNLNLWQKLKLSRDDAKPLLRLKGFPSFPLVERQANEVDWWDMVCNVKKLINEKKEDGKVFWQNLAGYKRQEALRPYLSSEEDRKKGKKFARYQLGDLLLHLEKKHGEDWGKVYDEAWERIDKKVEGLSKHIKLEEERRSEDAQSKAALTDWLRAKASFVIEGLKEADKDEFCRCDLKLQKWYGDLRGKPFAIEAENSILDISGFSKQYNCAFIWQKDGVKKLNLYLIINYFKGGKLRFKKIKPEAFEANRFYTVINKKSGEIVPMEVNFNFDDPNLIILPLAFGKRQGREFIWNDLLSLETGSLKLANGRVIEKTLYNRRTRQDEPALFVALTFERREVLDSSNIKPMNLIGVDRGENIPAVIALTDPEGCPLSRFKDSLGNPTHILRIGERYKEKQRTIQAKKEVEQRRAGGYSRKYASKAKNLADDMVRNTARDLLYYAVTQDAMLIFENLSRGFGRQGKRTFMAERQYTRMEDWLTAKLAYEGLPSKTYLSKTLAQYTSKTCSNCGFTITSADYDRVLEKLKKTATGWMTTINGKELKVEGQITYYNRYKRQNVVKDLSVELDRLSEESVNNDISSWTKGRSGEALSLLKKRFSHRPVQEKFVCLNCGFETHADEQAALNIARSWLFLRSQEYKKYQTNKTTGNTDKRAFVETWQSFYRKKLKEVWKPAV

SEQ ID NO: 40237 - protein, 978 aa, synthetic construct
  REGION 1..978: note = engineered CasX variant
QEIKRINKIRRRLVKDSNTKKAGKTGPMKTLLVRVMTPDLRERLENLRKKPENIPQPISNTSRANLNKLLTDYTEMKKAILHVYWEEFQKDPVGLMSRVAQPASKKIDQNKLKPEMDEKGNLTTAGFACSQCGQPLFVYKLEQVSEKGKAYTNYFGRCNVAEHEKLILLAQLKPEKDSDEAVTYSLGKFGQRALDFYSIHVTKESTHPVKPLAQIAGNRYASGPVGKALRDACMGTIASFLSKYQDIIIEHQKVVKGNQKRLESLRELAGKENLEYPSVTLPPQPHTKEGVDAYNEVIARVRMWVNLNLWQKLKLSRDDAKPLLRLKGFPSFPLVERQANEVDWWDMVCNVKKLINEKKEDGKVFWQNLAGYKRQEALRPYLSSEEDRKKGKKFARYQLGDLLLHLEKKHGEDWGKVYDEAWERIDKKVEGLSKHIKLEEERRSEDAQSKAALTDWLRAKASFVIEGLKEADKDEFCRCDLKLQKWYGDLRGKPFAIEAENSILDISGFSKQYNCAFIWQKDGVKKLNLYLIINYFKGGKLRFKKIKPEAFEANRFYTVINKKSGEIVPMEVNFNFDDPNLIILPLAFGKRQGREFIWNDLLSLETGSLQLANGRVIEKTLYNRRTRQDEPALFVALTFERREVLDSSNIKPMNLIGVDRGENIPAVIALTDPEGCPLSRFKDSLGNPTHILRIGESYKEKQRTIQAKKEVEQRRAGGYSRKYASKAKNLADDMVRNTARDLLYYAVTQDAMLIFENLSRGFGRQGKRTFMAERQYTRMEDWLTAKLAYEGLPSKTYLSKTLAQYTSKTCSNCGFTITSADYDRVLEKLKKTATGWMTTINGKELKVEGQITYYNRYKRQNVVKDLSVELDRLSEESVNNDISSWTKGRSGEALSLLKKRFSHRPVQEKFVCLNCGFETHADEQAALNIARSWLFLRSQEYKKYQTNKTTGNTDKRAFVETWQSFYRKKLKEVWKPAV

SEQ ID NO: 40238 - protein, 979 aa, synthetic construct
  REGION 1..979: note = engineered CasX variant
QEIKRINKIRRRLVKDSNTKKAGKTGPMKTLLVRVMTPDLRERLENLRKKPENIPQPISNTSRANLNKLLTDYTEMKKAILHVYWEEFQKDPVGLMSRVAQPASKKIDQNKLKPEMDEKGNLTTAGFACSQCGQPLFVYKLEQVSEKGKAYTNYFGRCNVAEHEKLILLAQLKPEKDSDEAVTYSLGKFGQRALDFYSIHVTKESTHPVKPLAQIAGNRYASGPVGKALRDACMGTIASFLSKYQDIIIEHQKVVKGNQKRLESLRELAGKENLEYPSVTLPPQPHTKEGVDAYNEVIARVRMWVNLNLWQKLKLSRDDAKPLLRLKGFPSFPLVERQANEVDWWDMVCNVKKLINEKKEDGKVFWQNLAGYKRQEALRPYLSSEEDRKKGKKFARYQLGDLLLHLEKKHGEDWGKVYDEAWERIDKKVEGLSKHIKLEEERRSEDAQSKAALTDWLRAKASFVIEGLKEADKDEFCRCELKLQKWYGDLRGKPFAIEAENSILDISGFSKQYNCAFIWQKDGVKKLNLYLIINYFKGGKLRFKKIKPEAFEANRFYTVINKKSGEIVPMEVNFNFDDPNLIILPLAFGKRFVGREFIWNDLLSLETGSLKLANGRVIEKTLYNRRTRQDEPALFVALTFERREVLDSSNIKPMNLIGVDRGENIPAVIALTDPEGCPLSRFKDSLGNPTHILRIGESYKEKQRTIQAKKEVEQRRAGGYSRKYASKAKNLADDMVRNTARDLLYYAVTQDAMLIFENLSRGFGRQGKRTFMAERQYTRMEDWLTAKLAYEGLPSKTYLSKTLAQYTSKTCSNCGFTITSADYDRVLEKLKKTATGWMTTINGKELKVEGQITYYNRYKRQNVVKDLSVELDRLSEESVNNDISSWTKGRSGEALSLLKKRFSHRPVQEKFVCLNCGFETHADEQAALNIARSWLFLRSQEYKKYQTNKTTGNTDKRAFVETWQSFYRKKLKEVWKPAV

SEQ ID NO: 40239 - protein, 979 aa, synthetic construct
  REGION 1..979: note = engineered CasX variant
QEIKRINKIRRRLVKDSNTKKAGKTGPMKTLLVRVMTPDLRERLENLRKKPENIPQPISNTSRANLNKLLTDYTEMKKAILHVYWEEFQKDPVGLMSRVAQPASKKIDQNKLKPEMDEKGNLTTAGFACSQCGQPLFVYKLEQVSEKGKAYTNYFGRCNVAEHEKLILLAQLKPEKDSDEAVTYSLGKFGQRALDFYSIHVTKESTHPVKPLAQIAGNRYASGPVGKALRDACMGTIASFLSKYQDIIIEHQKVVKGNQKRLESLRELAGKENLEYPSVTLPPQPHTKEGVDAYNEVIARVRMWVNLNLWQKLKLSRDDAKPLLRLKGFPSFPLVERQANEVDWWDMVCNVKKLINEKKEDGKVFWQNLAGYKRQEALRPYLSSEEDRKKGKKFARYQLGDLLLHLEKKHGEDWGKVYDEAWERIDKKVEGLSKHIKLEEERRSEDAQSKAALTDWLRAKASFVIEGLKEADKDEFCRCELKLQKWYGDLRGKPFAIEAENSILDISGFSKQYNCAFIWQKDGVKKLNLYLIINYFKGGKLRFKKIKPEAFEANRFYTVINKKSGEIVPMEVNFNFDDPNLIILPLAFGKRFGREFIWNDLLSLETGSLKLANGRVIEKTLYNRRTRQDEPALFVALTFERREVLDSSNIKTPMNLIGVDRGENIPAVIALTDPEGCPLSRFKDSLGNPTHILRIGESYKEKQRTIQAKKEVEQRRAGGYSRKYASKAKNLADDMVRNTARDLLYYAVTQDAMLIFENLSRGFGRQGKRTFMAERQYTRMEDWLTAKLAYEGLPSKTYLSKTLAQYTSKTCSNCGFTITSADYDRVLEKLKKTATGWMTTINGKELKVEGQITYYNRYKRQNVVKDLSVELDRLSEESVNNDISSWTKGRSGEALSLLKKRFSHRPVQEKFVCLNCGFETHADEQAALNIARSWLFLRSQEYKKYQTNKTTGNTDKRAFVETWQSFYRKKLKEVWKPAV

SEQ ID NO: 40240 - protein, 979 aa, synthetic construct
  REGION 1..979: note = engineered CasX variant
QEIKRINKIRRRLVKDSNTKKAGKTGPMKTLLVRVMTPDLRERLENLRKKPENIPQPISNTSRANLNKLLTDYTEMKKAILHVYWEEFQKDPVGLMSRVAQPASKKIDQNKLKPEMDEKGNLTTAGFACSQCGQPLFVYKLEQVSEKGKAYTNYFGRCNVAEHEKLILLAQLKPEKDSDEAVTYSLGKFGQRALDFYSIHVTKESTHPVKPLAQIAGNRYASGPVGKALRDACMGTIASFLSKYQDIIIEHQKVVKGNQKRLESLRELAGKENLEYPSVTLPPQPHTKEGVDAYNEVIARVRMWVNLNLWQKLKLSRDDAKPLLRLKGFPSFPLVERQANEVDWWDMVCNVKKLINEKKEDGKVFWQNLAGYKRQEALRPYLSSEEDRKKGKKFARYQLGDLLLHLEKKHGEDWGKVYDEAWERIDKKVEGLSKHIKLEEERRSEDAQSKAALTDWLRAKASFVIEGLKEADKDEFCRCELKLQKWYGDLRGKPFAIEAENSILDISGFSKQYNCAFIWQKDGVKKLNLYLIINYFKGGKLRFKKIKPEAFEANRFYTVINKKSGEIVPMEVNFNFDDPNLIILPLAFGKRFGREFIWNDLLSLETGSLKLANGRVIEKTLYNRRTRQDEPALFVALTFERREVLDSSNIKPMSNLIGVDRGENIPAVIALTDPEGCPLSRFKDSLGNPTHILRIGESYKEKQRTIQAKKEVEQRRAGGYSRKYASKAKNLADDMVRNTARDLLYYAVTQDAMLIFENLSRGFGRQGKRTFMAERQYTRMEDWLTAKLAYEGLPSKTYLSKTLAQYTSKTCSNCGFTITSADYDRVLEKLKKTATGWMTTINGKELKVEGQITYYNRYKRQNVVKDLSVELDRLSEESVNNDISSWTKGRSGEALSLLKKRFSHRPVQEKFVCLNCGFETHADEQAALNIARSWLFLRSQEYKKYQTNKTTGNTDKRAFVETWQSFYRKKLKEVWKPAV

SEQ ID NO: 40241 - protein, 978 aa, synthetic construct
  REGION 1..978: note = engineered CasX variant
QEIKRINKIRRRLVKDSNTKKAGKTGPMKTLLVRVMTPDLRERLENLRKKPENIPQPISNTSRANLNKLLTDYTEMKKAILHVYWEEFQKDPVGLMSRVAQPASKKIDQNKLKPEMDEKGNLTTAGFACSQCGQPLFVYKLEQVSEKGKAYTNYFGRCNVAEHEKLILLAQLKPEKDSDEAVTYSLGKFGQRALDFYSIHVTKESTHPVKPLAQIAGNRYASGPVGKALRDACMGTIASFLSKYQDIIIEHQKVVKGNQKRLESLRELAGKENLEYPSVTLPPQPHTKEGVDAYNEVIARVRMWVNLNLWQKLKLSRDDAKPLLRLKGFPSFPLVERQANEVDWWDMVCNVKKLINEKKEDGKVFWQNLAGYKRQEALRPYLSSEEDRKKGKKFARYQLGDLLLHLEKKHGEDWGKVYDEAWERIDKKVEGLSKHIKLEEERRSEDAQSKAALTDWLRAKASFVIEGLKEADKDEFCRCELKLQKWYGDLRGKPFAIEAENSILDISGFSKQYNCAFIWQKDGVKKLNLYLIINYFKGGKLRFKKIKPEAFEANRFYTVINKKSGEIVPMEVNFNFDDPNLIILPLAFGKRFGREFIWNDLLSLETGSLKLANGRVIEKTLYNRRTRQDEPALFVALTFERREVLDSSNIKPMNLIGVDRGENIPAVIALTDPEGCPLSRFKDSLGNPTHILRIRESYKEKQRTIQAKKEVEQRRAGGYSRKYASKAKNLADDMVRNTARDLLYYAVTQDAMLIFENLSRGFGRQGKRTFMAERQYTRMEDWLTAKLAYEGLPSKTYLSKTLAQYTSKTCSNCGFTITSADYDRVLEKLKKTATGWMTTINGKELKVEGQITYYNRYKRQNVVKDLSVELDRLSEESVNNDISSWTKGRSGEALSLLKKRFSHRPVQEKFVCLNCGFETHADEQAALNIARSWLFLRSQEYKKYQTNKTTGNTDKRAFVETWQSFYRKKLKEVWKPAV

SEQ ID NO: 40242 - protein, 978 aa, synthetic construct
  REGION 1..978: note = engineered CasX variant
QEIKRINKIRRRLVKDSNTKKAGKTGPMKTLLVRVMTPDLRERLENLRKKPENIPQPISNTSRANLNKLLTDYTEMKKAILHVYWEEFQKDPVGLMSRVAQPASKKIDQNKLKPEMDEKGNLTTAGFACSQCGQPLFVYKLEQVSEKGKAYTNYFGRCNVAEHEKLILLAQLKPEKDSDEAVTYSLGKFGQRALDFYSIHVTKESTHPVKPLAQIAGNRYASGPVGKALRDACMGTIASFLSKYQDIIIEHQKVVKGNQKRLESLRELAGKENLEYPSVTLPPQPHTKEGVDAYNEVIARVRMWVNLNLWQKLKLSRDDAKPLLRLKGFPSFPLVERQANEVDWWDMVCNVKKLINEKKEDGKVFWQNLAGYKRQEALRPYLSSEEDRKKGKKFARYQLGDLLLHLEKKHGEDWGKVYDEAWERIDKKVEGLSKHIKLEEERRSEDAQSKAALTDWLRAKASFVIEGLKEADKDEFCRCELKLQKWYGDLRGKPFAIEAENSILDISGFSKQYNCAFIWQKDGVKKLNLYLIINYFKGGKLRFKKIKPEAFEANRFYTVINKKSGEIVPMEVNFNFDDPNLIILPLAFGKRFGREFIWNDLLSLETGSLKLANGRVIEKTLYNRRTRQDEPALFVALTFERREVLDSSNIKPMNLIGVDRGENIPAVIALTDPEGCPLSRFKDSLGNPTHILRIGESYKEKQRTIQAKKEVEQRRAGGYSRKYASKAKNLADDMVRNTARDLLYYAVTQDAMLIFENLSRGFGRQGKRTFSAERQYTRMEDWLTAKLAYEGLPSKTYLSKTLAQYTSKTCSNCGFTITSADYDRVLEKLKKTATGWMTTINGKELKVEGQITYYNRYKRQNVVKDLSVELDRLSEESVNNDISSWTKGRSGEALSLLKKRFSHRPVQEKFVCLNCGFETHADEQAALNIARSWLFLRSQEYKKYQTNKTTGNTDKRAFVETWQSFYRKKLKEVWKPAV

SEQ ID NO: 40243 - protein, 978 aa, synthetic construct
  REGION 1..978: note = engineered CasX variant
QEIKRINKIRRRLVKDSNTKKAGKTGPMKTLLVRVMTPDLRERLENLRKKPENIPQPISNTSRANLNKLLTDYTEMKKAILHVYWEEFQKDPVGLMSRVAQPASKKIDQNKLKPEMDEKGNLTTAGFACSQCGQPLFVYKLEQVSEKGKAYTNYFGRCNVAEHEKLILLAQLKPEKDSDEAVTYSLGKFGQRALDFYSIHVTKESTHPVKPLAQIAGNRYASGPVGKALRDACMGTIASFLSKYQDIIIEHQKVVKGNQKRLESLRELAGKENLEYPSVTLPPQPHTKEGVDAYNEVIARVRMWVNLNLWQKLKLSRDDAKPLLRLKGFPSFPLVERQANEVDWWDMVCNVKKLINEKKEDGKVFWQNLAGYKRQEALRPYLSSEEDRKKGKKFARYQLGDLLLHLEKKHGEDWGKVYDEAWERIDKKVEGLSKHIKLEEERRSEDAQSKAALTDWLRAKASFVIEGLKEADKDEFCRCELKLQKWYGDLRGKPFAIEAENSILDISGFSKQYNCAFIWQKDGVKKLNLYLIINYFKGGKLRFKKIKPEAFEANRFYTVINKKSGEIVPMEVNFNFDDPNLIILPLAFGKRFGREFIWNDLLSLETGSLKLANGRVIEKTLYNRRTRQDEPALFVALTFERREVLDSSNIKPMNLIGVDRGENIPAVIALTDPEGCPLSRFKDSLGNPTHILRIGESYKEKQRTIQAKKEVEQRRAGGYSRKYASKAKNLADDMVRNTARDLLYYAVTQDAMLIFENLSRGFGRQGKRTFMAERQYTRMEDWLTAKLAYEGLPSKTYLSKTLAQYTSKTCSNCGFTITSADYDRVLEKLKKTATGWMTTINGKELKVEGQITYYNRYKRQNVVKDLSVELDRLSEESVNNDISSWDKGRSGEALSLLKKRFSHRPVQEKFVCLNCGFETHADEQAALNIARSWLFLRSQEYKKYQTNKTTGNTDKRAFVETWQSFYRKKLKEVWKPAV

SEQ ID NO: 40244 - protein, 978 aa, synthetic construct
  REGION 1..978: note = engineered CasX variant
QEIKRINKIRRRLVKDSNTKKAGKTGPMKTLLVRVMTPDLRERLENLRKKPENIPQPISNTSRANLNKLLTDYTEMKKAILHVYWEEFQVDPVGLMSRVAQPASKKIDQNKLKPEMDEKGNLTTAGFACSQCGQPLFVYKLEQVSEKGKAYTNYFGRCNVAEHEKLILLAQLKPEKDSDEAVTYSLGKFGQRALDFYSIHVTKESTHPVKPLAQIAGNRYASGPVGKALRDACMGTIASFLSKYQDIIIEHQKVVKGNQKRLESLRELAGKENLEYPSVTLPPQPHTKEGVDAYNEVIARVRMWVNLNLWQKLKLSRDDAKPLLRLKGFPSFPLVERQANEVDWWDMVCNVKKLINEKKEDGKVFWQNLAGYKRQEALRPYLSSEEDRKKGKKFARYQLGDLLLHLEKKHGEDWGKVYDEAWERIDKKVEGLSKHIKLEEERRSEDAQSKAALTDWLRAKASFVIEGLKEADKDEFCRCELKLQKWYGDLRGKPFAIEAENSILDISGFSKQYNCAFIWQKDGVKKLNLYLIINYFKGGKLRFKKIKPEAFEANRFYTVINKKSGEIVPMEVNFNFDDPNLIILPLAFGKRFGREFIWNDLLSLETGSLKLANGRVIEKTLYNRRTRQDEPALFVALTFERREVLDSSNIKPMNLIGVDRGENIPAVIALTDPEGCPLSRFKDSLGNPTHILRIGESYKEKQRTIQAKKEVEQRRAGGYSRKYASKAKNLADDMVRNTARDLLYYAVTQDAMLIFENLSRGFGRQGKRTFMAERQYTRMEDWLTAKLAYEGLPSKTYLSKTLAQYTSKTCSNCGFTITSADYDRVLEKLKKTATGWMTTINGKELKVEGQITYYNRYKRQNVVKDLSVELDRLSEESVNNDISSWTKGRSGEALSLLKKRFSHRPVQEKFVCLNCGFETHADEQAALNIARSWLFLRSQEYKKYQTNKTTGNTDKRAFVETWQSFYRKKLKEVWKPAV

SEQ ID NO: 40245 - protein, 978 aa, synthetic construct
  REGION 1..978: note = engineered CasX variant
QEIKRLNKIRRRLVKDSNTKKAGKTGPMKTLLVRVMTPDLRERLENLRKKPENIPQPISNTSRANLNKLLTDYTEMKKAILHVYWEEFQKDPVGLMSRVAQPASKKIDQNKLKPEMDEKGNLTTAGFACSQCGQPLFVYKLEQVSEKGKAYTNYFGRCNVAEHEKLILLAQLKPEKDSDEAVTYSLGKFGQRALDFYSIHVTKESTHPVKPLAQIAGNRYASGPVGKALRDACMGTIASFLSKYQDIIIEHQKVVKGNQKRLESLRELAGKENLEYPSVTLPPQPHTKEGVDAYNEVIARVRMWVNLNLWQKLKLSRDDAKPLLRLKGFPSFPLVERQANEVDWWDMVCNVKKLINEKKEDGKVFWQNLAGYKRQEALRPYLSSEEDRKKGKKFARYQLGDLLLHLEKKHGEDWGKVYDEAWERIDKKVEGLSKHIKLEEERRSEDAQSKAALTDWLRAKASFVIEGLKEADKDEFCRCELKLQKWYGDLRGKPFAIEAENSILDISGFSKQYNCAFIWQKDGVKKLNLYLIINYFKGGKLRFKKIKPEAFEANRFYTVINKKSGEIVPMEVNFNFDDPNLIILPLAFGKRFGREFIWNDLLSLETGSLKLANGRVIEKTLYNRRTRQDEPALFVALTFERREVLDSSNIKPMNLIGVDRGENIPAVIALTDPEGCPLSRFKDSLGNPTHILRIGESYKEKQRTIQAKKEVEQRRAGGYSRKYASKAKNLADDMVRNTARDLLYYAVTQDAMLIFENLSRGFGRQGKRTFMAERQYTRMEDWLTAKLAYEGLPSKTYLSKTLAQYTSKTCSNCGFTITSADYDRVLEKLKKTATGWMTTINGKELKVEGQITYYNRYKRQNVVKDLSVELDRLSEESVNNDISSWTKGRSGEALSLLKKRFSHRPVQEKFVCLNCGFETHADEQAALNIARSWLFLRSQEYKKYQTNKTTGNTDKRAFVETWQSFYRKKLKEVWKPAV

SEQ ID NO: 40246 - protein, 978 aa, synthetic construct
  REGION 1..978: note = engineered CasX variant
QEIKRINKIRRRLVKDSNTKKAGKTGPMKTLLVRVMTPDLRERLENLRKKPENIPQPISNTSRANLNKLLTDYTEMKKAILHVYWEEFQKDPVGLMSRVAQPASKKIDQNKLKPEMDEKGNLTTAGFACSQCGQPLFVYKLEQVSEKGKAYTNYVGRCNVAEHEKLILLAQLKPEKDSDEAVTYSLGKFGQRALDFYSIHVTKESTHPVKPLAQIAGNRYASGPVGKALRDACMGTIASFLSKYQDIIIEHQKVVKGNQKRLESLRELAGKENLEYPSVTLPPQPHTKEGVDAYNEVIARVRMWVNLNLWQKLKLSRDDAKPLLRLKGFPSFPLVERQANEVDWWDMVCNVKKLINEKKEDGKVFWQNLAGYKRQEALRPYLSSEEDRKKGKKFARYQLGDLLLHLEKKHGEDWGKVYDEAWERIDKKVEGLSKHIKLEEERRSEDAQSKAALTDWLRAKASFVIEGLKEADKDEFCRCELKLQKWYGDLRGKPFAIEAENSILDISGFSKQYNCAFIWQKDGVKKLNLYLIINYFKGGKLRFKKIKPEAFEANRFYTVINKKSGEIVPMEVNFNFDDPNLIILPLAFGKRFGREFIWNDLLSLETGSLKLANGRVIEKTLYNRRTRQDEPALFVALTFERREVLDSSNIKPMNLIGVDRGENIPAVIALTDPEGCPLSRFKDSLGNPTHILRIGESYKEKQRTIQAKKEVEQRRAGGYSRKYASKAKNLADDMVRNTARDLLYYAVTQDAMLIFENLSRGFGRQGKRTFMAERQYTRMEDWLTAKLAYEGLPSKTYLSKTLAQYTSKTCSNCGFTITSADYDRVLEKLKKTATGWMTTINGKELKVEGQITYYNRYKRQNVVKDLSVELDRLSEESVNNDISSWTKGRSGEALSLLKKRFSHRPVQEKFVCLNCGFETHADEQAALNIARSWLFLRSQEYKKYQTNKTTGNTDKRAFVETWQSFYRKKLKEVWKPAV

SEQ ID NO: 40247 - protein, 978 aa, synthetic construct
  REGION 1..978: note = engineered CasX variant
QEIKRINKIRRRLVKDSNTKKAGKTGPMKTLLVRVMTPDLRERLENLRKKPENIPQPISNTSRANLNKLLTDYTEMKKAILHVYWEEFQKDPVGLMSRVAQPASKKIDQNKLKPEMDEKGNLTTAGFACSQCGQPLFVYKLEQVSEKGKAYTNYFGRCNVAEHEKLILLAQLKPEKDSDEAVTYSLGKFGQRALDFYSIHVTKESTHPVKPLAQIAGNRYASGPVGKALRDACMGTIASFLSKYQDIIIEHQKVVKGNQKRLESLRELAGKENLEYPSVTLPPQPHTKEGVDAYNEVIARVRMWVNLNLWQKLKLSRDDAKPLLRLKGFPSFPLVERQANEVDWWDMVCNVKKLINEKKEDGKVFWQNLAGYKRQEALRPYLSSEEDRKKGKKFARYQLGDLLLHLEKKHGEDWGKVYDEAWERIDKKVEGLSKHIKLEEERRSEDAQSKAALTDWLRAKASFVIEGLKEADKDEFCRCELKLQKWYGDLRGKPFAIEAENSILDISGFSKQYNCAFIWQKDGVKKLNLYLIINYFKGGKLRFKKIKPEAFEANRFYTVINKKSGEIVPMEVNFNFDDPNLIILPLAFGKRFGREFIWNDLLSLETGSLKLANGRVIEKTLYNRRTRQDEPALFVALTFERREVLDSSNIKPMNLIGVDRGENIPAVIALTDPEGCPLSRFKDSLGNPTHILRIGESYKEKQRTIQAKKEVEQRRAGGYSRKYASKAKNLADDMVRNTARDLLYYAVTQDAMLIFENLSRGFGRQGKRTFMAERQYTRMEDWLTAKLAYEGLASKTYLSKTLAQYTSKTCSNCGFTITSADYDRVLEKLKKTATGWMTTINGKELKVEGQITYYNRYKRQNVVKDLSVELDRLSEESVNNDISSWTKGRSGEALSLLKKRFSHRPVQEKFVCLNCGFETHADEQAALNIARSWLFLRSQEYKKYQTNKTTGNTDKRAFVETWQSFYRKKLKEVWKPAV

SEQ ID NO: 40248 - protein, 978 aa, synthetic construct
  REGION 1..978: note = engineered CasX variant
QEIKRINKIRRRLVKDSNTKKAGKTGPMKTLLVRVMTPDLRERLENLRKKPENIPQPISNTSRANLNKLLTDYTEMKKAILHVYWEEFQKDPVGLMSRVAQPASKKIDQNKLKPEMDEKGNLTTAGFACSQCGQPLFVYKLEQVSEKGKAYTNYFGRCNVAEHEKLILLAQLKPEKDSDEAVTYSLGKFGQRALDFYSIHVTKESTHPVKPLAQIAGNRYASGPVGKALRDACMGTIASFLSKYQDIIIEHQKVVKGNQKRLESLRELAGKENLEYPSVTLPPQPHTKEGVDAYNEVIARVRMWVNLNLWQKLKLSRDDAKPLLRLKGFPSFPLVERQANEVDWWDMVCNVKKLINEKKEDGKVFWQNLAGYKRQEALRPYLSSEEDRKKGKKFARYQLGDLLLHLEKKHGEDWGKVYDEAWERIDKKVEGLSKHIKLEEERRSEDAQSKAALTDWLRAKASFVIEGLKEADKDEFCRCELKLQKWYGDLRGKPFAIEAENSILDISGFSKQYNCAFIWQKDGVKKLNLYLIINYFKGGKLRFKKIKPEAFEANRFYTVINKKSGEIVPMEVNFNFDDPNLIILPLAFGKRFGREFIWNDLLSLETGSLKLANGRVIEKTLYNRRTRQDEPALFVALTFERREVLDSSNIKPMNLIGVDRGENIPAVIALTDPEGCPLSRFKDSLGNPTHILRIGESYKEKQRTIQAKKEVEQRRAGGYSRKYASKAKNLADDMVRNTARDLLYYAVTQDAMLIFENLSRGFGRQGKRTFMAERQYTRMEDWLTAKLAYEGLPSKVYLSKTLAQYTSKTCSNCGFTITSADYDRVLEKLKKTATGWMTTINGKELKVEGQITYYNRYKRQNVVKDLSVELDRLSEESVNNDISSWTKGRSGEALSLLKKRFSHRPVQEKFVCLNCGFETHADEQAALNIARSWLFLRSQEYKKYQTNKTTGNTDKRAFVETWQSFYRKKLKEVWKPAV

SEQ ID NO: 40249 - protein, 979 aa, synthetic construct
  REGION 1..979: note = engineered CasX variant
QEIKRINKIRRRLVKDSNTKKAGKTGPMKTLLVRVMTPDLRERLENLRKKPENIPQPISNTSRANLNKLLTDYTEMKKAILHVYWEEFQKDPVGLMSRVAQPASKKIDQNKLKPEMDEKGNLTTAGFACSQCGQPLFVYKLEQVSEKGKAYTNYFGRCNVAEHEKLILLAQLKPEKDSDEAVTYSLGKFGQRALDFYSIHVTKESTHPVKPLAQIAGNRYASGPVGKALRDACMGTIASFLSKYQDIIIEHQKVVKGNQKRLESLRELAGKENLEYPSVTLPPQPHTKEGVDAYNEVIARVRMWVNLNLWQKLKLSRDDAKPLLRLKGFPSFPLVERQANEVDWWDMVCNVKKLINEKKEDGKVFWQNLAGYKRQEALRPYLSSEEDRKKGKKFARYQLGDLLLHLEKKHGEDWGKVYDEAWERIDKKVEGLSKHIKLEEERRSEDAQSKAALTDWLRAKASFVIEGLKEADKDEFCRCELKLQKWYGDLRGKPFAIEAENSILDISGFSKQYNCAFIWQKDGVKKLNLYLIINYFKGGKLRFKKIKPEAFEANRFYTVINKKSGEIVPMEVNFNFDDPNLIILPLAFGKRFGREFIWNDLLSLETGSLKLANGRVIEKTLYNRRTRQDEPALFVALTFERREVLDSSNIKPMNLIGVDRGENIPAVIALTDPEGCPLSRFKDSLGNPTHILRIGESYKEKQRTIQAKKEVEQRRAGGYSRKYASKAKNLADDMVRNTARDLLYYAVTQDAMLIFENLSRGFGRQGKRTFMAERQYTRMEDWLTAKLAYEGPLPSKTYLSKTLAQYTSKTCSNCGFTITSADYDRVLEKLKKTATGWMTTINGKELKVEGQITYYNRYKRQNVVKDLSVELDRLSEESVNNDISSWTKGRSGEALSLLKKRFSHRPVQEKFVCLNCGFETHADEQAALNIARSWLFLRSQEYKKYQTNKTTGNTDKRAFVETWQSFYRKKLKEVWKPAV

SEQ ID NO: 40250 - protein, 979 aa, synthetic construct
  REGION 1..979: note = engineered CasX variant
QEIKRINKIRRRLVKDSNTKKAGKTGPMKTLLVRVMTPDLRERLENLRKKPENIPQPISNTSRANLNKLLTDYTEMKKAILHVYWEEFQKDPVGLMSRVAQPASKKIDQNKLKPEMDEKGNLTTAGFACSQCGQPLFVYKLEQVSEKGKAYTNYFGRCNVAEHEKLILLAQLKPEKDSDEAVTYSLGKFGQRALDFYSIHVTKESTHPVKPLAQIAGNRYASGPVGKALRDACMGTIASFLSKYQDIIIEHQKVVKGNQKRLESLRELAGKENLEYPSVTLPPQPHTKEGVDAYNEVIARVRMWVNLNLWQKLKLSRDDAKPLLRLKGFPSFPLVERQANEVDWWDMVCNVKKLINEKKEDGKVFWQNLAGYKRQEALRPYLSSEEDVRKKGKKFARYQLGDLLLHLEKKHGEDWGKVYDEAWERIDKKVEGLSKHIKLEEERRSEDAQSKAALTDWLRAKASFVIEGLKEADKDEFCRCELKLQKWYGDLRGKPFAIEAENSILDISGFSKQYNCAFIWQKDGVKKLNLYLIINYFKGGKLRFKKIKPEAFEANRFYTVINKKSGEIVPMEVNFNFDDPNLIILPLAFGKRFGREFIWNDLLSLETGSLKLANGRVIEKTLYNRRTRQDEPALFVALTFERREVLDSSNIKPMNLIGVDRGENIPAVIALTDPEGCPLSRFKDSLGNPTHILRIGESYKEKQRTIQAKKEVEQRRAGGYSRKYASKAKNLADDMVRNTARDLLYYAVTQDAMLIFENLSRGFGRQGKRTFMAERQYTRMEDWLTAKLAYEGLPSKTYLSKTLAQYTSKTCSNCGFTITSADYDRVLEKLKKTATGWMTTINGKELKVEGQITYYNRYKRQNVVKDLSVELDRLSEESVNNDISSWTKGRSGEALSLLKKRFSHRPVQEKFVCLNCGFETHADEQAALNIARSWLFLRSQEYKKYQTNKTTGNTDKRAFVETWQSFYRKKLKEVWKPAV

SEQ ID NO: 40251 - protein, 978 aa, synthetic construct
  REGION 1..978: note = engineered CasX variant
QEIKRINKIRRRLVKDSNTKKAGKTGPMKTLLVRVMTPDLRERLENLRKKPENIPQPISNTSRANLNKLLTDYTEMKKAILHVYWEEFQKDPVGLMSRVAQPASKKIDQNKLKPEMDEKGNLTTAGFACSQCGQPLFVYKLEQVSEKGKAYTNYFGRCNVAEHEKLILLAQLKPEKDSDEAVTYSLGKFGQRALDFYSIHVTKESTHPVKPLAQIAGNRYASGPVGKALRDACMGTIASFLSKYQDIIIEHQKVVKGNQKRLESLRELAGKENLEYPSVTLPPQPHTKEGVDAYNEVIARVRMWVNLNLWQKLKLSRDDAKPLLRLKGFPSFPLVERQANEVDWWDMVCNVKKLINEKKEDGKVFWQNLAGYKRQEALRPYLSSEEDRKKGKKFARYQLGDLLLHLEKKHGEDWGKVYDEAWERIDKKVEGLSKHIKLEEERRSEDAQSKAALTDWLRAKASFVIEGLKEADKDEFCRCELKLQKWYGDLRGKPFAIEAENSILDISGFSKQYNCAFIWQKDGVKKLNLYLIINYFKGGKLRFKKIKPEAFEANRFYTVINKKSGEIVPMEVNFNFDDPNLIILPLAFGKRFGREFIWNDLLSLETGSLKLANGRVIEKTLYNRRTRQDEPALFVALTFERREVLDSSNIKPMNLIGVDRGENIPAVIALTDPEGCPLSRFKDSLGNPTHILRIGESYKEKQRTIQAKKEVEQRRAGGYSRKYASKAKNLADDMVRNTARDLLYYAVTQDAMLIFENLSRGFGRQGKRTFMAERQYTRMEDWLTAKLAYEGLPSKTYLSKTLAQYTSKTCSNCGFTITSADYDRMLEKLKKTATGWMTTINGKELKVEGQITYYNRYKRQNVVKDLSVELDRLSEESVNNDISSWTKGRSGEALSLLKKRFSHRPVQEKFVCLNCGFETHADEQAALNIARSWLFLRSQEYKKYQTNKTTGNTDKRAFVETWQSFYRKKLKEVWKPAV

SEQ ID NO: 40252 - protein, 978 aa, synthetic construct
  REGION 1..978: note = engineered CasX variant
QEIKRINKIRRRLVKDSNTKKAGKTGPMKTLLVRVMTPDLRERLENLRKKPENIPQPISNTSRANLNKLLTDYTEMKKAILHVYWEEFQKDPVGLMSRVAQPASKKIDQNKLKPEMDEKGNLTTAGFACSQCGQPLFVYKLEQVSEKGKAYTNYFGRCNVAEHEKLILLAQLKPEKDSDEAVTYSLGKFGQRALDFYSIHVTKESTHPVKPLAQIAGNRYASGPVGKALRDACMGTIASFLSKYQDIIIEHQKVVKGNQKRLESLRELAGKENLEYPSVTLPPQPHTKEGVDAYNEVIARVRMWVNLNLWQKLKLSRDDAKPLLRLKGFPSFPLVERQANEVDWWDMVCNVKKLINEKKEDGKVFWQNLAGYKRQEALRPYLSSEEDRKKGKKFARYQLGDLLLHLEKKHGEDWGKVYDEAWERIDKKVEGLSKHIKLEEERRSEDAQSKAALTDWLRAKASFVIEGLKEADKDEFCRCELKLQKWYGDLRGKPFAIEAENSILDISGFSKQYNCAFIWQKDGVKKLNLYLIINYFKGGKLRFKKIKPEAFEANRFYTVINKKSGEIVPMEVNFNFDDPNLIILPLAFGKRFGREFIWNDLLSLETGSLKLANGRVIEKTLYNRRTRQDEPALFVALTFERREVLDSSNIKPMNLIGVDRGENIPAVIALTDPEGCPLSRFKDSLGNPTHILRIGESYKEKQRTIQAKKEVEQRRAGGYSRKYASKAKNLADDMVRNTARDLLYYAVTQDAMLIFENLSRGFGRQGKRTFMAERQYTRMEDWLTAKLAYEGLPSKTYLSKTLAQYTSKTCSNCGFTITSADYDRVLEKLKKTATGWMTTINGKELKVEGQITYYNRYKRQNVVKDLSVELDRLSEESVNNDISSWTKGRQGEALSLLKKRFSHRPVQEKFVCLNCGFETHADEQAALNIARSWLFLRSQEYKKYQTNKTTGNTDKRAFVETWQSFYRKKLKEVWKPAV

SEQ ID NO: 40253 - protein, 978 aa, synthetic construct
  REGION 1..978: note = engineered CasX variant
QEIKRINKIRRRLVKDSNTKKAGKTGPMKTLLVRVMTPDLRERLENLRKKPENIPQPISNTSRANLNKLLTDYTEMKKAILHVYWEEFQKDPVGLMSRVAQPASKKIDQNKLKPEMDEKGNLTTAGFACSQCGQPLFVYKLEQVSEKGKAYTNYFGRCNVAEHEKLILLAQLKPEKDSDEAVTYSLGKFGQRALDFYSIHVTKESTHPVKPLAQIAGNRYASGPVGKALRDACMGTIASFLSKYQDIIIEHQKVVKGNQKRLESLRELAGKENLEYPSVTLPPQPHTKEGVDAYNEVIARVRMWVNLNLWQKLKLSRDDAKPLLRLKGFPSFPLVERQANEVDWWDMVCNVKKLINEKKEDGKVFWQNLAGYKRQEALRPYLSSEEDRKKGKKFARYQLGDLLLHLEKKHGEDWGKVYDEAWERIDKKVEGLSKHIKLEEERRSEDAQSKAALTDWLRAKASFVIEGLKEADKDEFCRCELKLQKWYGDLRGKPFAIEAENSILDISGFSKQYNCAFIWQKDGVKKLNLYLIINYFKGGKLRFKKIKPEAFEANRFYTVINKKSGEIVPMEVNFNFDDPNLIILPLAFGKRFGREFIWNDLLSLETGSLKLANGRVIEKTLYNRRTRQDEPALFVALTFERREVLDSSNIKPMNLIGVDRGENIPAVIALTDPEGCPLSRFKDSLGNPTHILRIGESYKEKQRTIQAKKEVEQRRAGGYSRKYASKAKNLADDMVRNTARDLLYYAVTQDAMLIFENLSRGFGRQGKRTFMAERQYTRMEDWLTAKLAYEGLPSKTYLSKTLAQYTSKTCSNCGFTITSADYDRVLEKLKKTATGWMTTINGKELKVEGQITYYNRYKRQNVVKDLSVELDRLSEESVNNDISSWTKGRSGEALSLLKKRFSHRPVQEKFVCLNCEFETHADEQAALNIARSWLFLRSQEYKKYQTNKTTGNTDKRAFVETWQSFYRKKLKEVWKPAV

SEQ ID NO: 40254 - protein, 979 aa, synthetic construct
  REGION 1..979: note = engineered CasX variant
QEIKRINKIRRRLVKDSNTKKAGKTGPMKTLLVRVMTPDLRERLENLRKKPENIPQPISNTSRANLNKLLTDYTEMKKAILHVYWEEFQKDPVGLMSRVAQPASKKIDQNKLKPEMDEKGNLTTAGFACSQCGQPLFVYKLEQVSEKGKAYTNYFGRCNVAEHEKLILLAQLKPEKDSDEAVTYSLGKFGQRALDFYSIHVTKESTHPVKPLAQIAGNRYASGPVGKALRDACMGTIASFLSKYQDIIIEHQKVVKGNQKRLESLRELAGKENLEYPSVTLPPQPHTKEGVDAYNEVIARVRMWVNLNLWQKLKLSRDDAKPLLRLKGFPSFPLVERQANEVDWWDMVCNVKKLINEKKEDGKVFWQNLAGYKRQEALRPYLSSEEDRKKGKKFARYQLGDLLLHLEKKHGEDWGKVYDEAWERIDKKVEGLSKHIKLEEERRSEDAQSKAALTDWLRAKASFVIEGLKEADKDEFCRCELKLQKWYGDLRGKPFAIEAENSILDISGFSKQYNCAFIWQKDGVKKLNLYLIINYFKGGKLRFKKIKPEAFEANRFYTVINKKSGEIVPMEVNFNFDDPNLIILPLAFGKRFGREFIWNDLLSLETGSLKLANGRVIEKTLYNRRTRQDEPALFVALTFERREVLDSSNIKPMNLIGVDRGENIPAVIALTDPEGCPLSRFKDSLGNPTHILRIGESYKEKQRTIQAKKEVEQRRAGGYSRKYASKAKNLADDMVRNTARDLLYYAVTQDAMLIFENLSRGFGRQGKRTFMAERQYTRMEDWLTAKLAYEGLPSKTYLSKTLAQYTSKTCSNCGFTITSADYDRVLEKLKKTATGWMTTINGKELKVEGQITYYNRYKRQNVVKDLSVELDRLSEESVNNDISSWTKGRSGEALSLLKKRFSHRPVQEKFVCLNCGFETHADEQAALNIARSWLFLRSQEYKKYQTNKTSTGNTDKRAFVETWQSFYRKKLKEVWKPAV

SEQ ID NO: 40255 - protein, 979 aa, synthetic construct
  REGION 1..979: note = engineered CasX variant
QEIKRINKIRRRLVKDSNTKKAGKTGPMKTLLVRVMTPDLRERLENLRKKPENIPQPISNTSRANLNKLLTDYTEMKKAILHVYWEEFQKDPVGLMSRVAQPASKKIDQNKLKPEMDEKGNLTTAGFACSQCGQPLFVYKLEQVSEKGKAYTNYFGRCNVAEHEKLILLAQLKPEKDSDEAVTYSLGKFGQRALDFYSIHVTKESTHPVKPLAQIAGNRYASGPVGKALRDACMGTIASFLSKYQDIIIEHQKVVKGNQKRLESLRELAGKENLEYPSVTLPPQPHTKEGVDAYNEVIARVRMWVNLNLWQKLKLSRDDAKPLLRLKGFPSFPLVERQANEVDWWDMVCNVKKLINEKKEDGKVFWQNLAGYKRQEALRPYLSSEEDRKKGKKFARYQLGDLLLHLEKKHGEDWGKVYDEAWERIDKKVEGLSKHIKLEEERRSEDAQSKAALTDWLRAKASFVIEGLKEADKDEFCRCELKLQKWYGDLRGKPFAIEAENSILDISGFSKQYNCAFIWQKDGVKKLNLYLIINYFKGGKLRFKKIKPEAFEANRFYTVINKKSGEIVPMEVNFNFDDPNLIILPLAFGKRFGREFIWNDLLSLETGSLKLANGRVIEKTLYNRRTRQDEPALFVALTFERREVLDSSNIKPMNLIGVDRGENIPAVIALTDPEGCPLSRFKDSLGNPTHILRIGESYKEKQRTIQAKKEVEQRRAGGYSRKYASKAKNLADDMVRNTARDLLYYAVTQDAMLIFENLSRGFGRQGKRTFMAERQYTRMEDWLTAKLAYEGLPSKTYLSKTLAQYTSKTCSNCGFTITSADYDRVLEKLKKTATGWMTTINGKELKVEGQITYYNRYKRQNVVKDLSVELDRLSEESVNNDISSWTKGRSGEALSLLKKRFSHRPVQEKFVCLNCGFETHADEQAALNIARSWLFLRSQEYKKYQTNKTTGKNTDKRAFVETWQSFYRKKLKEVWKPAV

SEQ ID NO: 40256 - protein, 978 aa, synthetic construct
  REGION 1..978: note = engineered CasX variant
QEIKRINKIRRRLVKDSNTKKAGKTGPMKTLLVRVMTPDLRERLENLRKKPENIPQPISNTSRANLNKLLTDYTEMKKAILHVYWEEFQKDPVGLMSRVAQPASKKIDQNKLKPEMDEKGNLTTAGFACSQCGQPLFVYKLEQVSEKGKAYTNYFGRCNVAEHEKLILLAQLKPEKDSDEAVTYSLGKFGQRALDFYSIHVTKESTHPVKPLAQIAGNRYASGPVGKALRDACMGTIASFLSKYQDIIIEHQKVVKGNQKRLESLRELAGKENLEYPSVTLPPQPHTKEGVDAYNEVIARVRMWVNLNLWQKLKLSRDDAKPLLRLKKFPSFPLVERQANEVDWWDMVCNVKKLINEKKEDGKVFWQNLAGYKRQEALRPYLSSEEDRKKGKKFARYQLGDLLLHLEKKHGEDWGKVYDEAWERIDKKVEGLSKHIKLEEERRSEDAQSKAALTDWLRAKASFVIEGLKEADKDEFCRCELKLQKWYGDLRGKPFAIEAENSILDISGFSKQYNCAFIWQKDGVKKLNLYLIINYFKGGKLRFKKIKPEAFEANRFYTVINKKSGEIVPMEVNFNFDDPNLIILPLAFGKRFGREFIWNDLLSLETGSLKLANGRVIEKTLYNRRTRQDEPALFVALTFERREVLDSSNIKPMNLIGVDRGENIPAVIALTDPEGCPLSRFKDSLGNPTHILRIGESYKEKQRTIQAKKEVEQRRAGGYSRKYASKAKNLADDMVRNTARDLLYYAVTQDAMLIFENLSRGFGRQGKRTFMAERQYTRMEDWLTAKLAYEGLPSKTYLSKTLAQYTSKTCSNCGFTITSADYDRVLEKLKKTATGWMTTINGKELKVEGQITYYNRYKRQNVVKDLSVELDRLSEESVNNDISSWTKGRSGEALSLLKKRFSHRPVQEKFVCLNCGFETHADEQAALNIARSWLFLRSQEYKKYQTNKTTGNTDKRAFVETWQSFYRKKLKEVWKPAV

SEQ ID NO: 40257 - protein, 978 aa, synthetic construct
  REGION 1..978: note = engineered CasX variant
QEIKRINKIRRRLVKDSNTKKAGKTGPMKTLLVRVMTPDLRERLENLRKKPENIPQPISNTSRANLNKLLTDYTEMKKAILHVYWEEFQKDPVGLMSRVAQPASKKIDQNKLKPEMDEKGNLTTAGFACSQCGQPLFVYKLEQVSEKGKAYTNYFGRCNVAEHEKLILLAQLKPEKDSDEAVTYSLGKFGQRALDFYSIHVTKESTHPVKPLAQIAGNRYASGPVGKALRDACMGTIASFLSKYQDIIIEHQKVVKGNQKRLESLRELAGKENLEYPSVTLPPQPHTKEGVDAYNEVIARVRMWVNLNLWQKLKLSRDDAKPLLRLKGFPSFPLVERQANEVDWWDMVCNVKKLINEKKEDGKVFWQNLAGYKRQEALRPYLSSEEDRKKGKKFARYQLGDLLLHLEKKHGEDWGKVYDEAWERIDKKVEGLSKHIKLEEERRSEDAQSKAALTDWLRAKASFVIEGLKEADKDEFCRCELKLQKWYGDLRGKPFAIEAENSILDISGFSKQYNCAFIWQKDGVKKLNLYLIINYFKGGKLRFKKIKPEAFEANRFYTVINKKSGEIVPMEVNFNFDDPNLIILPLAFGKRFGREFIWNDLLSLETGSLKLANGRVIEKTLYNRRTRQDEPALFVALTFERREVLDSSNIKPMNLIGVDRGENIPAVIALTDPEGCPLSRFKDSLGNPTHILRIGERYKEKQRTIQAKKEVEQRRAGGYSRKYASKAKNLADDMVRNTARDLLYYAVTQDAMLIFENLSRGFGRQGKRTFMAERQYTRMEDWLTAKLAYEGLPSKTYLSKTLAQYTSKTCSNCGFTITSADYDRVLEKLKKTATGWMTTINGKELKVEGQITYYNRYKRQNVVKDLSVELDRLSEESVNNDISSWTKGRSGEALSLLKKRFSHRPVQEKFVCLNCGFETHADEQAALNIARSWLFLRSQEYKKYQTNKTTGNTDKRAFVETWQSFYRKKLKEVWKPAV

SEQ ID NO: 40258 - protein, 978 aa, synthetic construct
  REGION 1..978: note = engineered CasX variant
QEIKRINKIRRRLVKDSNTKKAGKTGPMKTLLVRVMTPDLRERLENLRKKPENIPQPISNTSRANLNKLLTDYTEMKKAILHVYWEEFQKDPVGLMSRVAQPASKKIDQNKLKPEMDEKGNLTTAGFACSQCGQPLFVYKLEQVSEKGKAYTNYFGRCNVAEHEKLILLAQLKPEKDSDEAVTYSLGKFGQRALDFYSIHVTKESTHPVKPLAQIAGNRYASGPVGKALRDACMGTIASFLSKYQDIIIEHQKVVKGNQKRLESLRELAGKENLEYPSVTLPPQPHTKEGVDAYNEVIARVRMWVNLNLWQKLKLSRDDAKPLLRLKGFPSFPLVERQANEVDWWDMVCNVKKLINEKKEDGKVFWQNLAGYKRQEALRPYLSSEEDRKKGKKFARYQLGDLLLHLEKKHGEDWGKVYDEAWERIDKKVEGLSKHIKLEEERRSEDAQSKAALTDWLRAKASFVIEGLKEADKDEFCRCELKLQKWYGDLRGKPFAIEAENSILDISGFSKQYNCAFIWQKDGVKKLNLYLIINYFKGGKLRFKKIKPEAFEANRFYTVINKKSGEIVPMEVNFNFDDPNLIILPLAFGKRFGREFIWNDLLSLETGSLQLANGRVIEKTLYNRRTRQDEPALFVALTFERREVLDSSNIKPMNLIGVDRGENIPAVIALTDPEGCPLSRFKDSLGNPTHILRIGESYKEKQRTIQAKKEVEQRRAGGYSRKYASKAKNLADDMVRNTARDLLYYAVTQDAMLIFENLSRGFGRQGKRTFMAERQYTRMEDWLTAKLAYEGLPSKTYLSKTLAQYTSKTCSNCGFTITSADYDRVLEKLKKTATGWMTTINGKELKVEGQITYYNRYKRQNVVKDLSVELDRLSEESVNNDISSWTKGRSGEALSLLKKRFSHRPVQEKFVCLNCGFETHADEQAALNIARSWLFLRSQEYKKYQTNKTTGNTDKRAFVETWQSFYRKKLKEVWKPAV

SEQ ID NO: 40259 - protein, 979 aa, synthetic construct
  REGION 1..979: note = engineered CasX variant
QEIKRINKIRRRLVKDSNTKKAGKTGPMKTLLVRVMTPDLRERLENLRKKPENIPQPISNTSRANLNKLLTDYTEMKKAILHVYWEEFQKDPVGLMSRVAQPASKKIDQNKLKPEMDEKGNLTTAGFACSQCGQPLFVYKLEQVSEKGKAYTNYFGRCNVAEHEKLILLAQLKPEKDSDEAVTYSLGKFGQRALDFYSIHVTKESTHPVKPLAQIAGNRYASGPVGKALRDACMGTIASFLSKYQDIIIEHQKVVKGNQKRLESLRELAGKENLEYPSVTLPPQPHTKEGVDAYNEVIARVRMWVNLNLWQKLKLSRDDAKPLLRLKGFPSFPLVERQANEVDWWDMVCNVKKLINEKKEDGKVFWQNLAGYKRQEALRPYLSSEEDRKKGKKFARYQLGDLLLHLEKKHGEDWGKVYDEAWERIDKKVEGLSKHIKLEEERRSEDAQSKAALTDWLRAKASFVIEGLKEADKDEFCRCELKLQKWYGDLRGKPFAIEAENSILDISGFSKQYNCAFIWQKDGVKKLNLYLIINYFKGGKLRFKKIKPEAFEANRFYTVINKKSGEIVPMEVNFNFDDPNLIILPLAFGKRVFGREFIWNDLLSLETGSLKLANGRVIEKTLYNRRTRQDEPALFVALTFERREVLDSSNIKPMNLIGVDRGENIPAVIALTDPEGCPLSRFKDSLGNPTHILRIGESYKEKQRTIQAKKEVEQRRAGGYSRKYASKAKNLADDMVRNTARDLLYYAVTQDAMLIFENLSRGFGRQGKRTFMAERQYTRMEDWLTAKLAYEGLPSKTYLSKTLAQYTSKTCSNCGFTITSADYDRVLEKLKKTATGWMTTINGKELKVEGQITYYNRYKRQNVVKDLSVELDRLSEESVNNDISSWTKGRSGEALSLLKKRFSHRPVQEKFVCLNCGFETHADEQAALNIARSWLFLRSQEYKKYQTNKTTGNTDKRAFVETWQSFYRKKLKEVWKPAV

SEQ ID NO: 40260 - protein, 979 aa, synthetic construct
  REGION 1..979: note = engineered CasX variant
QEIKRINKIRRRLVKDSNTKKAGKTGPMKTLLVRVMTPDLRERLENLRKKPENIPQPISNTSRANLNKLLTDYTEMKKAILHVYWEEFQKDPVGLMSRVAQPASKKIDQNKLKPEMDEKGNLTTAGFACSQCGQPLFVYKLEQVSEKGKAYTNYFGRCNVAEHEKLILLAQLKPEKDSDEAVTYSLGKFGQRALDFYSIHVTKESTHPVKPLAQIAGNRYASGPVGKALRDACMGTIASFLSKYQDIIIEHQKVVKGNQKRLESLRELAGKENLEYPSVTLPPQPHTKEGVDAYNEVIARVRMWVNLNLWQKLKLSRDDAKPLLRLKGFPSFPLVERQANEVDWWDMVCNVKKLINEKKEDGKVFWQNLAGYKRQEALRPYLSSEEDRKKGKKFARYQLGDLLLHLEKKHGEDWGKVYDEAWERIDKKVEGLSKHIKLEEERRSEDAQSKAALTDWLRAKASFVIEGLKEADKDEFCRCELKLQKWYGDLRGKPFAIEAENSILDISGFSKQYNCAFIWQKDGVKKLNLYLIINYFKGGKLRFKKIKPEAFEANRFYTVINKKSGEIVPMEVNFNFDDPNLIILPLAFGKRVGREFIWNDLLSLETGSLKLANGRVIEKTLYNRRTRQDEPALFVALTFERREVLDSSNIKTPMNLIGVDRGENIPAVIALTDPEGCPLSRFKDSLGNPTHILRIGESYKEKQRTIQAKKEVEQRRAGGYSRKYASKAKNLADDMVRNTARDLLYYAVTQDAMLIFENLSRGFGRQGKRTFMAERQYTRMEDWLTAKLAYEGLPSKTYLSKTLAQYTSKTCSNCGFTITSADYDRVLEKLKKTATGWMTTINGKELKVEGQITYYNRYKRQNVVKDLSVELDRLSEESVNNDISSWTKGRSGEALSLLKKRFSHRPVQEKFVCLNCGFETHADEQAALNIARSWLFLRSQEYKKYQTNKTTGNTDKRAFVETWQSFYRKKLKEVWKPAV

SEQ ID NO: 40261 - protein, 979 aa, synthetic construct
  REGION 1..979: note = engineered CasX variant
QEIKRINKIRRRLVKDSNTKKAGKTGPMKTLLVRVMTPDLRERLENLRKKPENIPQPISNTSRANLNKLLTDYTEMKKAILHVYWEEFQKDPVGLMSRVAQPASKKIDQNKLKPEMDEKGNLTTAGFACSQCGQPLFVYKLEQVSEKGKAYTNYFGRCNVAEHEKLILLAQLKPEKDSDEAVTYSLGKFGQRALDFYSIHVTKESTHPVKPLAQIAGNRYASGPVGKALRDACMGTIASFLSKYQDIIIEHQKVVKGNQKRLESLRELAGKENLEYPSVTLPPQPHTKEGVDAYNEVIARVRMWVNLNLWQKLKLSRDDAKPLLRLKGFPSFPLVERQANEVDWWDMVCNVKKLINEKKEDGKVFWQNLAGYKRQEALRPYLSSEEDRKKGKKFARYQLGDLLLHLEKKHGEDWGKVYDEAWERIDKKVEGLSKHIKLEEERRSEDAQSKAALTDWLRAKASFVIEGLKEADKDEFCRCELKLQKWYGDLRGKPFAIEAENSILDISGFSKQYNCAFIWQKDGVKKLNLYLIINYFKGGKLRFKKIKPEAFEANRFYTVINKKSGEIVPMEVNFNFDDPNLIILPLAFGKRVGREFIWNDLLSLETGSLKLANGRVIEKTLYNRRTRQDEPALFVALTFERREVLDSSNIKPMSNLIGVDRGENIPAVIALTDPEGCPLSRFKDSLGNPTHILRIGESYKEKQRTIQAKKEVEQRRAGGYSRKYASKAKNLADDMVRNTARDLLYYAVTQDAMLIFENLSRGFGRQGKRTFMAERQYTRMEDWLTAKLAYEGLPSKTYLSKTLAQYTSKTCSNCGFTITSADYDRVLEKLKKTATGWMTTINGKELKVEGQITYYNRYKRQNVVKDLSVELDRLSEESVNNDISSWTKGRSGEALSLLKKRFSHRPVQEKFVCLNCGFETHADEQAALNIARSWLFLRSQEYKKYQTNKTTGNTDKRAFVETWQSFYRKKLKEVWKPAV

SEQ ID NO: 40262 - protein, 978 aa, synthetic construct
  REGION 1..978: note = engineered CasX variant
QEIKRINKIRRRLVKDSNTKKAGKTGPMKTLLVRVMTPDLRERLENLRKKPENIPQPISNTSRANLNKLLTDYTEMKKAILHVYWEEFQKDPVGLMSRVAQPASKKIDQNKLKPEMDEKGNLTTAGFACSQCGQPLFVYKLEQVSEKGKAYTNYFGRCNVAEHEKLILLAQLKPEKDSDEAVTYSLGKFGQRALDFYSIHVTKESTHPVKPLAQIAGNRYASGPVGKALRDACMGTIASFLSKYQDIIIEHQKVVKGNQKRLESLRELAGKENLEYPSVTLPPQPHTKEGVDAYNEVIARVRMWVNLNLWQKLKLSRDDAKPLLRLKGFPSFPLVERQANEVDWWDMVCNVKKLINEKKEDGKVFWQNLAGYKRQEALRPYLSSEEDRKKGKKFARYQLGDLLLHLEKKHGEDWGKVYDEAWERIDKKVEGLSKHIKLEEERRSEDAQSKAALTDWLRAKASFVIEGLKEADKDEFCRCELKLQKWYGDLRGKPFAIEAENSILDISGFSKQYNCAFIWQKDGVKKLNLYLIINYFKGGKLRFKKIKPEAFEANRFYTVINKKSGEIVPMEVNFNFDDPNLIILPLAFGKRVGREFIWNDLLSLETGSLKLANGRVIEKTLYNRRTRQDEPALFVALTFERREVLDSSNIKPMNLIGVDRGENIPAVIALTDPEGCPLSRFKDSLGNPTHILRIRESYKEKQRTIQAKKEVEQRRAGGYSRKYASKAKNLADDMVRNTARDLLYYAVTQDAMLIFENLSRGFGRQGKRTFMAERQYTRMEDWLTAKLAYEGLPSKTYLSKTLAQYTSKTCSNCGFTITSADYDRVLEKLKKTATGWMTTINGKELKVEGQITYYNRYKRQNVVKDLSVELDRLSEESVNNDISSWTKGRSGEALSLLKKRFSHRPVQEKFVCLNCGFETHADEQAALNIARSWLFLRSQEYKKYQTNKTTGNTDKRAFVETWQSFYRKKLKEVWKPAV

SEQ ID NO: 40263 - protein, 978 aa, synthetic construct
  REGION 1..978: note = engineered CasX variant
QEIKRINKIRRRLVKDSNTKKAGKTGPMKTLLVRVMTPDLRERLENLRKKPENIPQPISNTSRANLNKLLTDYTEMKKAILHVYWEEFQKDPVGLMSRVAQPASKKIDQNKLKPEMDEKGNLTTAGFACSQCGQPLFVYKLEQVSEKGKAYTNYFGRCNVAEHEKLILLAQLKPEKDSDEAVTYSLGKFGQRALDFYSIHVTKESTHPVKPLAQIAGNRYASGPVGKALRDACMGTIASFLSKYQDIIIEHQKVVKGNQKRLESLRELAGKENLEYPSVTLPPQPHTKEGVDAYNEVIARVRMWVNLNLWQKLKLSRDDAKPLLRLKGFPSFPLVERQANEVDWWDMVCNVKKLINEKKEDGKVFWQNLAGYKRQEALRPYLSSEEDRKKGKKFARYQLGDLLLHLEKKHGEDWGKVYDEAWERIDKKVEGLSKHIKLEEERRSEDAQSKAALTDWLRAKASFVIEGLKEADKDEFCRCELKLQKWYGDLRGKPFAIEAENSILDISGFSKQYNCAFIWQKDGVKKLNLYLIINYFKGGKLRFKKIKPEAFEANRFYTVINKKSGEIVPMEVNFNFDDPNLIILPLAFGKRVGREFIWNDLLSLETGSLKLANGRVIEKTLYNRRTRQDEPALFVALTFERREVLDSSNIKPMNLIGVDRGENIPAVIALTDPEGCPLSRFKDSLGNPTHILRIGESYKEKQRTIQAKKEVEQRRAGGYSRKYASKAKNLADDMVRNTARDLLYYAVTQDAMLIFENLSRGFGRQGKRTFSAERQYTRMEDWLTAKLAYEGLPSKTYLSKTLAQYTSKTCSNCGFTITSADYDRVLEKLKKTATGWMTTINGKELKVEGQITYYNRYKRQNVVKDLSVELDRLSEESVNNDISSWTKGRSGEALSLLKKRFSHRPVQEKFVCLNCGFETHADEQAALNIARSWLFLRSQEYKKYQTNKTTGNTDKRAFVETWQSFYRKKLKEVWKPAV

SEQ ID NO: 40264 - protein, 978 aa, synthetic construct
  REGION 1..978: note = engineered CasX variant
QEIKRINKIRRRLVKDSNTKKAGKTGPMKTLLVRVMTPDLRERLENLRKKPENIPQPISNTSRANLNKLLTDYTEMKKAILHVYWEEFQKDPVGLMSRVAQPASKKIDQNKLKPEMDEKGNLTTAGFACSQCGQPLFVYKLEQVSEKGKAYTNYFGRCNVAEHEKLILLAQLKPEKDSDEAVTYSLGKFGQRALDFYSIHVTKESTHPVKPLAQIAGNRYASGPVGKALRDACMGTIASFLSKYQDIIIEHQKVVKGNQKRLESLRELAGKENLEYPSVTLPPQPHTKEGVDAYNEVIARVRMWVNLNLWQKLKLSRDDAKPLLRLKGFPSFPLVERQANEVDWWDMVCNVKKLINEKKEDGKVFWQNLAGYKRQEALRPYLSSEEDRKKGKKFARYQLGDLLLHLEKKHGEDWGKVYDEAWERIDKKVEGLSKHIKLEEERRSEDAQSKAALTDWLRAKASFVIEGLKEADKDEFCRCELKLQKWYGDLRGKPFAIEAENSILDISGFSKQYNCAFIWQKDGVKKLNLYLIINYFKGGKLRFKKIKPEAFEANRFYTVINKKSGEIVPMEVNFNFDDPNLIILPLAFGKRVGREFIWNDLLSLETGSLKLANGRVIEKTLYNRRTRQDEPALFVALTFERREVLDSSNIKPMNLIGVDRGENIPAVIALTDPEGCPLSRFKDSLGNPTHILRIGESYKEKQRTIQAKKEVEQRRAGGYSRKYASKAKNLADDMVRNTARDLLYYAVTQDAMLIFENLSRGFGRQGKRTFMAERQYTRMEDWLTAKLAYEGLPSKTYLSKTLAQYTSKTCSNCGFTITSADYDRVLEKLKKTATGWMTTINGKELKVEGQITYYNRYKRQNVVKDLSVELDRLSEESVNNDISSWDKGRSGEALSLLKKRFSHRPVQEKFVCLNCGFETHADEQAALNIARSWLFLRSQEYKKYQTNKTTGNTDKRAFVETWQSFYRKKLKEVWKPAV

SEQ ID NO: 40265 - protein, 978 aa, synthetic construct
  REGION 1..978: note = engineered CasX variant
QEIKRINKIRRRLVKDSNTKKAGKTGPMKTLLVRVMTPDLRERLENLRKKPENIPQPISNTSRANLNKLLTDYTEMKKAILHVYWEEFQVDPVGLMSRVAQPASKKIDQNKLKPEMDEKGNLTTAGFACSQCGQPLFVYKLEQVSEKGKAYTNYFGRCNVAEHEKLILLAQLKPEKDSDEAVTYSLGKFGQRALDFYSIHVTKESTHPVKPLAQIAGNRYASGPVGKALRDACMGTIASFLSKYQDIIIEHQKVVKGNQKRLESLRELAGKENLEYPSVTLPPQPHTKEGVDAYNEVIARVRMWVNLNLWQKLKLSRDDAKPLLRLKGFPSFPLVERQANEVDWWDMVCNVKKLINEKKEDGKVFWQNLAGYKRQEALRPYLSSEEDRKKGKKFARYQLGDLLLHLEKKHGEDWGKVYDEAWERIDKKVEGLSKHIKLEEERRSEDAQSKAALTDWLRAKASFVIEGLKEADKDEFCRCELKLQKWYGDLRGKPFAIEAENSILDISGFSKQYNCAFIWQKDGVKKLNLYLIINYFKGGKLRFKKIKPEAFEANRFYTVINKKSGEIVPMEVNFNFDDPNLIILPLAFGKRVGREFIWNDLLSLETGSLKLANGRVIEKTLYNRRTRQDEPALFVALTFERREVLDSSNIKPMNLIGVDRGENIPAVIALTDPEGCPLSRFKDSLGNPTHILRIGESYKEKQRTIQAKKEVEQRRAGGYSRKYASKAKNLADDMVRNTARDLLYYAVTQDAMLIFENLSRGFGRQGKRTFMAERQYTRMEDWLTAKLAYEGLPSKTYLSKTLAQYTSKTCSNCGFTITSADYDRVLEKLKKTATGWMTTINGKELKVEGQITYYNRYKRQNVVKDLSVELDRLSEESVNNDISSWTKGRSGEALSLLKKRFSHRPVQEKFVCLNCGFETHADEQAALNIARSWLFLRSQEYKKYQTNKTTGNTDKRAFVETWQSFYRKKLKEVWKPAV

SEQ ID NO: 40266 - protein, 978 aa, synthetic construct
  REGION 1..978: note = engineered CasX variant
QEIKRLNKIRRRLVKDSNTKKAGKTGPMKTLLVRVMTPDLRERLENLRKKPENIPQPISNTSRANLNKLLTDYTEMKKAILHVYWEEFQKDPVGLMSRVAQPASKKIDQNKLKPEMDEKGNLTTAGFACSQCGQPLFVYKLEQVSEKGKAYTNYFGRCNVAEHEKLILLAQLKPEKDSDEAVTYSLGKFGQRALDFYSIHVTKESTHPVKPLAQIAGNRYASGPVGKALRDACMGTIASFLSKYQDIIIEHQKVVKGNQKRLESLRELAGKENLEYPSVTLPPQPHTKEGVDAYNEVIARVRMWVNLNLWQKLKLSRDDAKPLLRLKGFPSFPLVERQANEVDWWDMVCNVKKLINEKKEDGKVFWQNLAGYKRQEALRPYLSSEEDRKKGKKFARYQLGDLLLHLEKKHGEDWGKVYDEAWERIDKKVEGLSKHIKLEEERRSEDAQSKAALTDWLRAKASFVIEGLKEADKDEFCRCELKLQKWYGDLRGKPFAIEAENSILDISGFSKQYNCAFIWQKDGVKKLNLYLIINYFKGGKLRFKKIKPEAFEANRFYTVINKKSGEIVPMEVNFNFDDPNLIILPLAFGKRVGREFIWNDLLSLETGSLKLANGRVIEKTLYNRRTRQDEPALFVALTFERREVLDSSNIKPMNLIGVDRGENIPAVIALTDPEGCPLSRFKDSLGNPTHILRIGESYKEKQRTIQAKKEVEQRRAGGYSRKYASKAKNLADDMVRNTARDLLYYAVTQDAMLIFENLSRGFGRQGKRTFMAERQYTRMEDWLTAKLAYEGLPSKTYLSKTLAQYTSKTCSNCGFTITSADYDRVLEKLKKTATGWMTTINGKELKVEGQITYYNRYKRQNVVKDLSVELDRLSEESVNNDISSWTKGRSGEALSLLKKRFSHRPVQEKFVCLNCGFETHADEQAALNIARSWLFLRSQEYKKYQTNKTTGNTDKRAFVETWQSFYRKKLKEVWKPAV

SEQ ID NO: 40267 - protein, 978 aa, synthetic construct
  REGION 1..978: note = engineered CasX variant
QEIKRINKIRRRLVKDSNTKKAGKTGPMKTLLVRVMTPDLRERLENLRKKPENIPQPISNTSRANLNKLLTDYTEMKKAILHVYWEEFQKDPVGLMSRVAQPASKKIDQNKLKPEMDEKGNLTTAGFACSQCGQPLFVYKLEQVSEKGKAYTNYVGRCNVAEHEKLILLAQLKPEKDSDEAVTYSLGKFGQRALDFYSIHVTKESTHPVKPLAQIAGNRYASGPVGKALRDACMGTIASFLSKYQDIIIEHQKVVKGNQKRLESLRELAGKENLEYPSVTLPPQPHTKEGVDAYNEVIARVRMWVNLNLWQKLKLSRDDAKPLLRLKGFPSFPLVERQANEVDWWDMVCNVKKLINEKKEDGKVFWQNLAGYKRQEALRPYLSSEEDRKKGKKFARYQLGDLLLHLEKKHGEDWGKVYDEAWERIDKKVEGLSKHIKLEEERRSEDAQSKAALTDWLRAKASFVIEGLKEADKDEFCRCELKLQKWYGDLRGKPFAIEAENSILDISGFSKQYNCAFIWQKDGVKKLNLYLIINYFKGGKLRFKKIKPEAFEANRFYTVINKKSGEIVPMEVNFNFDDPNLIILPLAFGKRVGREFIWNDLLSLETGSLKLANGRVIEKTLYNRRTRQDEPALFVALTFERREVLDSSNIKPMNLIGVDRGENIPAVIALTDPEGCPLSRFKDSLGNPTHILRIGESYKEKQRTIQAKKEVEQRRAGGYSRKYASKAKNLADDMVRNTARDLLYYAVTQDAMLIFENLSRGFGRQGKRTFMAERQYTRMEDWLTAKLAYEGLPSKTYLSKTLAQYTSKTCSNCGFTITSADYDRVLEKLKKTATGWMTTINGKELKVEGQITYYNRYKRQNVVKDLSVELDRLSEESVNNDISSWTKGRSGEALSLLKKRFSHRPVQEKFVCLNCGFETHADEQAALNIARSWLFLRSQEYKKYQTNKTTGNTDKRAFVETWQSFYRKKLKEVWKPAV

SEQ ID NO: 40268 - protein, 978 aa, synthetic construct
  REGION 1..978: note = engineered CasX variant
QEIKRINKIRRRLVKDSNTKKAGKTGPMKTLLVRVMTPDLRERLENLRKKPENIPQPISNTSRANLNKLLTDYTEMKKAILHVYWEEFQKDPVGLMSRVAQPASKKIDQNKLKPEMDEKGNLTTAGFACSQCGQPLFVYKLEQVSEKGKAYTNYFGRCNVAEHEKLILLAQLKPEKDSDEAVTYSLGKFGQRALDFYSIHVTKESTHPVKPLAQIAGNRYASGPVGKALRDACMGTIASFLSKYQDIIIEHQKVVKGNQKRLESLRELAGKENLEYPSVTLPPQPHTKEGVDAYNEVIARVRMWVNLNLWQKLKLSRDDAKPLLRLKGFPSFPLVERQANEVDWWDMVCNVKKLINEKKEDGKVFWQNLAGYKRQEALRPYLSSEEDRKKGKKFARYQLGDLLLHLEKKHGEDWGKVYDEAWERIDKKVEGLSKHIKLEEERRSEDAQSKAALTDWLRAKASFVIEGLKEADKDEFCRCELKLQKWYGDLRGKPFAIEAENSILDISGFSKQYNCAFIWQKDGVKKLNLYLIINYFKGGKLRFKKIKPEAFEANRFYTVINKKSGEIVPMEVNFNFDDPNLIILPLAFGKRVGREFIWNDLLSLETGSLKLANGRVIEKTLYNRRTRQDEPALFVALTFERREVLDSSNIKPMNLIGVDRGENIPAVIALTDPEGCPLSRFKDSLGNPTHILRIGESYKEKQRTIQAKKEVEQRRAGGYSRKYASKAKNLADDMVRNTARDLLYYAVTQDAMLIFENLSRGFGRQGKRTFMAERQYTRMEDWLTAKLAYEGLASKTYLSKTLAQYTSKTCSNCGFTITSADYDRVLEKLKKTATGWMTTINGKELKVEGQITYYNRYKRQNVVKDLSVELDRLSEESVNNDISSWTKGRSGEALSLLKKRFSHRPVQEKFVCLNCGFETHADEQAALNIARSWLFLRSQEYKKYQTNKTTGNTDKRAFVETWQSFYRKKLKEVWKPAV

SEQ ID NO: 40269 - protein, 978 aa, synthetic construct
  REGION 1..978: note = engineered CasX variant
QEIKRINKIRRRLVKDSNTKKAGKTGPMKTLLVRVMTPDLRERLENLRKKPENIPQPISNTSRANLNKLLTDYTEMKKAILHVYWEEFQKDPVGLMSRVAQPASKKIDQNKLKPEMDEKGNLTTAGFACSQCGQPLFVYKLEQVSEKGKAYTNYFGRCNVAEHEKLILLAQLKPEKDSDEAVTYSLGKFGQRALDFYSIHVTKESTHPVKPLAQIAGNRYASGPVGKALRDACMGTIASFLSKYQDIIIEHQKVVKGNQKRLESLRELAGKENLEYPSVTLPPQPHTKEGVDAYNEVIARVRMWVNLNLWQKLKLSRDDAKPLLRLKGFPSFPLVERQANEVDWWDMVCNVKKLINEKKEDGKVFWQNLAGYKRQEALRPYLSSEEDRKKGKKFARYQLGDLLLHLEKKHGEDWGKVYDEAWERIDKKVEGLSKHIKLEEERRSEDAQSKAALTDWLRAKASFVIEGLKEADKDEFCRCELKLQKWYGDLRGKPFAIEAENSILDISGFSKQYNCAFIWQKDGVKKLNLYLIINYFKGGKLRFKKIKPEAFEANRFYTVINKKSGEIVPMEVNFNFDDPNLIILPLAFGKRVGREFIWNDLLSLETGSLKLANGRVIEKTLYNRRTRQDEPALFVALTFERREVLDSSNIKPMNLIGVDRGENIPAVIALTDPEGCPLSRFKDSLGNPTHILRIGESYKEKQRTIQAKKEVEQRRAGGYSRKYASKAKNLADDMVRNTARDLLYYAVTQDAMLIFENLSRGFGRQGKRTFMAERQYTRMEDWLTAKLAYEGLPSKVYLSKTLAQYTSKTCSNCGFTITSADYDRVLEKLKKTATGWMTTINGKELKVEGQITYYNRYKRQNVVKDLSVELDRLSEESVNNDISSWTKGRSGEALSLLKKRFSHRPVQEKFVCLNCGFETHADEQAALNIARSWLFLRSQEYKKYQTNKTTGNTDKRAFVETWQSFYRKKLKEVWKPAV

SEQ ID NO: 40270 - protein, 979 aa, synthetic construct
  REGION 1..979: note = engineered CasX variant
QEIKRINKIRRRLVKDSNTKKAGKTGPMKTLLVRVMTPDLRERLENLRKKPENIPQPISNTSRANLNKLLTDYTEMKKAILHVYWEEFQKDPVGLMSRVAQPASKKIDQNKLKPEMDEKGNLTTAGFACSQCGQPLFVYKLEQVSEKGKAYTNYFGRCNVAEHEKLILLAQLKPEKDSDEAVTYSLGKFGQRALDFYSIHVTKESTHPVKPLAQIAGNRYASGPVGKALRDACMGTIASFLSKYQDIIIEHQKVVKGNQKRLESLRELAGKENLEYPSVTLPPQPHTKEGVDAYNEVIARVRMWVNLNLWQKLKLSRDDAKPLLRLKGFPSFPLVERQANEVDWWDMVCNVKKLINEKKEDGKVFWQNLAGYKRQEALRPYLSSEEDRKKGKKFARYQLGDLLLHLEKKHGEDWGKVYDEAWERIDKKVEGLSKHIKLEEERRSEDAQSKAALTDWLRAKASFVIEGLKEADKDEFCRCELKLQKWYGDLRGKPFAIEAENSILDISGFSKQYNCAFIWQKDGVKKLNLYLIINYFKGGKLRFKKIKPEAFEANRFYTVINKKSGEIVPMEVNFNFDDPNLIILPLAFGKRVGREFIWNDLLSLETGSLKLANGRVIEKTLYNRRTRQDEPALFVALTFERREVLDSSNIKPMNLIGVDRGENIPAVIALTDPEGCPLSRFKDSLGNPTHILRIGESYKEKQRTIQAKKEVEQRRAGGYSRKYASKAKNLADDMVRNTARDLLYYAVTQDAMLIFENLSRGFGRQGKRTFMAERQYTRMEDWLTAKLAYEGPLPSKTYLSKTLAQYTSKTCSNCGFTITSADYDRVLEKLKKTATGWMTTINGKELKVEGQITYYNRYKRQNVVKDLSVELDRLSEESVNNDISSWTKGRSGEALSLLKKRFSHRPVQEKFVCLNCGFETHADEQAALNIARSWLFLRSQEYKKYQTNKTTGNTDKRAFVETWQSFYRKKLKEVWKPAV

SEQ ID NO: 40271 - protein, 979 aa, synthetic construct
  REGION 1..979: note = engineered CasX variant
QEIKRINKIRRRLVKDSNTKKAGKTGPMKTLLVRVMTPDLRERLENLRKKPENIPQPISNTSRANLNKLLTDYTEMKKAILHVYWEEFQKDPVGLMSRVAQPASKKIDQNKLKPEMDEKGNLTTAGFACSQCGQPLFVYKLEQVSEKGKAYTNYFGRCNVAEHEKLILLAQLKPEKDSDEAVTYSLGKFGQRALDFYSIHVTKESTHPVKPLAQIAGNRYASGPVGKALRDACMGTIASFLSKYQDIIIEHQKVVKGNQKRLESLRELAGKENLEYPSVTLPPQPHTKEGVDAYNEVIARVRMWVNLNLWQKLKLSRDDAKPLLRLKGFPSFPLVERQANEVDWWDMVCNVKKLINEKKEDGKVFWQNLAGYKRQEALRPYLSSEEDVRKKGKKFARYQLGDLLLHLEKKHGEDWGKVYDEAWERIDKKVEGLSKHIKLEEERRSEDAQSKAALTDWLRAKASFVIEGLKEADKDEFCRCELKLQKWYGDLRGKPFAIEAENSILDISGFSKQYNCAFIWQKDGVKKLNLYLIINYFKGGKLRFKKIKPEAFEANRFYTVINKKSGEIVPMEVNFNFDDPNLIILPLAFGKRVGREFIWNDLLSLETGSLKLANGRVIEKTLYNRRTRQDEPALFVALTFERREVLDSSNIKPMNLIGVDRGENIPAVIALTDPEGCPLSRFKDSLGNPTHILRIGESYKEKQRTIQAKKEVEQRRAGGYSRKYASKAKNLADDMVRNTARDLLYYAVTQDAMLIFENLSRGFGRQGKRTFMAERQYTRMEDWLTAKLAYEGLPSKTYLSKTLAQYTSKTCSNCGFTITSADYDRVLEKLKKTATGWMTTINGKELKVEGQITYYNRYKRQNVVKDLSVELDRLSEESVNNDISSWTKGRSGEALSLLKKRFSHRPVQEKFVCLNCGFETHADEQAALNIARSWLFLRSQEYKKYQTNKTTGNTDKRAFVETWQSFYRKKLKEVWKPAV

SEQ ID NO: 40272 - protein, 978 aa, synthetic construct
  REGION 1..978: note = engineered CasX variant
QEIKRINKIRRRLVKDSNTKKAGKTGPMKTLLVRVMTPDLRERLENLRKKPENIPQPISNTSRANLNKLLTDYTEMKKAILHVYWEEFQKDPVGLMSRVAQPASKKIDQNKLKPEMDEKGNLTTAGFACSQCGQPLFVYKLEQVSEKGKAYTNYFGRCNVAEHEKLILLAQLKPEKDSDEAVTYSLGKFGQRALDFYSIHVTKESTHPVKPLAQIAGNRYASGPVGKALRDACMGTIASFLSKYQDIIIEHQKVVKGNQKRLESLRELAGKENLEYPSVTLPPQPHTKEGVDAYNEVIARVRMWVNLNLWQKLKLSRDDAKPLLRLKGFPSFPLVERQANEVDWWDMVCNVKKLINEKKEDGKVFWQNLAGYKRQEALRPYLSSEEDRKKGKKFARYQLGDLLLHLEKKHGEDWGKVYDEAWERIDKKVEGLSKHIKLEEERRSEDAQSKAALTDWLRAKASFVIEGLKEADKDEFCRCELKLQKWYGDLRGKPFAIEAENSILDISGFSKQYNCAFIWQKDGVKKLNLYLIINYFKGGKLRFKKIKPEAFEANRFYTVINKKSGEIVPMEVNFNFDDPNLIILPLAFGKRVGREFIWNDLLSLETGSLKLANGRVIEKTLYNRRTRQDEPALFVALTFERREVLDSSNIKPMNLIGVDRGENIPAVIALTDPEGCPLSRFKDSLGNPTHILRIGESYKEKQRTIQAKKEVEQRRAGGYSRKYASKAKNLADDMVRNTARDLLYYAVTQDAMLIFENLSRGFGRQGKRTFMAERQYTRMEDWLTAKLAYEGLPSKTYLSKTLAQYTSKTCSNCGFTITSADYDRMLEKLKKTATGWMTTINGKELKVEGQITYYNRYKRQNVVKDLSVELDRLSEESVNNDISSWTKGRSGEALSLLKKRFSHRPVQEKFVCLNCGFETHADEQAALNIARSWLFLRSQEYKKYQTNKTTGNTDKRAFVETWQSFYRKKLKEVWKPAV

SEQ ID NO: 40273 - protein, 978 aa, synthetic construct
  REGION 1..978: note = engineered CasX variant
QEIKRINKIRRRLVKDSNTKKAGKTGPMKTLLVRVMTPDLRERLENLRKKPENIPQPISNTSRANLNKLLTDYTEMKKAILHVYWEEFQKDPVGLMSRVAQPASKKIDQNKLKPEMDEKGNLTTAGFACSQCGQPLFVYKLEQVSEKGKAYTNYFGRCNVAEHEKLILLAQLKPEKDSDEAVTYSLGKFGQRALDFYSIHVTKESTHPVKPLAQIAGNRYASGPVGKALRDACMGTIASFLSKYQDIIIEHQKVVKGNQKRLESLRELAGKENLEYPSVTLPPQPHTKEGVDAYNEVIARVRMWVNLNLWQKLKLSRDDAKPLLRLKGFPSFPLVERQANEVDWWDMVCNVKKLINEKKEDGKVFWQNLAGYKRQEALRPYLSSEEDRKKGKKFARYQLGDLLLHLEKKHGEDWGKVYDEAWERIDKKVEGLSKHIKLEEERRSEDAQSKAALTDWLRAKASFVIEGLKEADKDEFCRCELKLQKWYGDLRGKPFAIEAENSILDISGFSKQYNCAFIWQKDGVKKLNLYLIINYFKGGKLRFKKIKPEAFEANRFYTVINKKSGEIVPMEVNFNFDDPNLIILPLAFGKRVGREFIWNDLLSLETGSLKLANGRVIEKTLYNRRTRQDEPALFVALTFERREVLDSSNIKPMNLIGVDRGENIPAVIALTDPEGCPLSRFKDSLGNPTHILRIGESYKEKQRTIQAKKEVEQRRAGGYSRKYASKAKNLADDMVRNTARDLLYYAVTQDAMLIFENLSRGFGRQGKRTFMAERQYTRMEDWLTAKLAYEGLPSKTYLSKTLAQYTSKTCSNCGFTITSADYDRVLEKLKKTATGWMTTINGKELKVEGQITYYNRYKRQNVVKDLSVELDRLSEESVNNDISSWTKGRQGEALSLLKKRFSHRPVQEKFVCLNCGFETHADEQAALNIARSWLFLRSQEYKKYQTNKTTGNTDKRAFVETWQSFYRKKLKEVWKPAV

SEQ ID NO: 40274 - protein, 978 aa, synthetic construct
  REGION 1..978: note = engineered CasX variant
QEIKRINKIRRRLVKDSNTKKAGKTGPMKTLLVRVMTPDLRERLENLRKKPENIPQPISNTSRANLNKLLTDYTEMKKAILHVYWEEFQKDPVGLMSRVAQPASKKIDQNKLKPEMDEKGNLTTAGFACSQCGQPLFVYKLEQVSEKGKAYTNYFGRCNVAEHEKLILLAQLKPEKDSDEAVTYSLGKFGQRALDFYSIHVTKESTHPVKPLAQIAGNRYASGPVGKALRDACMGTIASFLSKYQDIIIEHQKVVKGNQKRLESLRELAGKENLEYPSVTLPPQPHTKEGVDAYNEVIARVRMWVNLNLWQKLKLSRDDAKPLLRLKGFPSFPLVERQANEVDWWDMVCNVKKLINEKKEDGKVFWQNLAGYKRQEALRPYLSSEEDRKKGKKFARYQLGDLLLHLEKKHGEDWGKVYDEAWERIDKKVEGLSKHIKLEEERRSEDAQSKAALTDWLRAKASFVIEGLKEADKDEFCRCELKLQKWYGDLRGKPFAIEAENSILDISGFSKQYNCAFIWQKDGVKKLNLYLIINYFKGGKLRFKKIKPEAFEANRFYTVINKKSGEIVPMEVNFNFDDPNLIILPLAFGKRVGREFIWNDLLSLETGSLKLANGRVIEKTLYNRRTRQDEPALFVALTFERREVLDSSNIKPMNLIGVDRGENIPAVIALTDPEGCPLSRFKDSLGNPTHILRIGESYKEKQRTIQAKKEVEQRRAGGYSRKYASKAKNLADDMVRNTARDLLYYAVTQDAMLIFENLSRGFGRQGKRTFMAERQYTRMEDWLTAKLAYEGLPSKTYLSKTLAQYTSKTCSNCGFTITSADYDRVLEKLKKTATGWMTTINGKELKVEGQITYYNRYKRQNVVKDLSVELDRLSEESVNNDISSWTKGRSGEALSLLKKRFSHRPVQEKFVCLNCEFETHADEQAALNIARSWLFLRSQEYKKYQTNKTTGNTDKRAFVETWQSFYRKKLKEVWKPAV

SEQ ID NO: 40275 - protein, 979 aa, synthetic construct
  REGION 1..979: note = engineered CasX variant
QEIKRINKIRRRLVKDSNTKKAGKTGPMKTLLVRVMTPDLRERLENLRKKPENIPQPISNTSRANLNKLLTDYTEMKKAILHVYWEEFQKDPVGLMSRVAQPASKKIDQNKLKPEMDEKGNLTTAGFACSQCGQPLFVYKLEQVSEKGKAYTNYFGRCNVAEHEKLILLAQLKPEKDSDEAVTYSLGKFGQRALDFYSIHVTKESTHPVKPLAQIAGNRYASGPVGKALRDACMGTIASFLSKYQDIIIEHQKVVKGNQKRLESLRELAGKENLEYPSVTLPPQPHTKEGVDAYNEVIARVRMWVNLNLWQKLKLSRDDAKPLLRLKGFPSFPLVERQANEVDWWDMVCNVKKLINEKKEDGKVFWQNLAGYKRQEALRPYLSSEEDRKKGKKFARYQLGDLLLHLEKKHGEDWGKVYDEAWERIDKKVEGLSKHIKLEEERRSEDAQSKAALTDWLRAKASFVIEGLKEADKDEFCRCELKLQKWYGDLRGKPFAIEAENSILDISGFSKQYNCAFIWQKDGVKKLNLYLIINYFKGGKLRFKKIKPEAFEANRFYTVINKKSGEIVPMEVNFNFDDPNLIILPLAFGKRVGREFIWNDLLSLETGSLKLANGRVIEKTLYNRRTRQDEPALFVALTFERREVLDSSNIKPMNLIGVDRGENIPAVIALTDPEGCPLSRFKDSLGNPTHILRIGESYKEKQRTIQAKKEVEQRRAGGYSRKYASKAKNLADDMVRNTARDLLYYAVTQDAMLIFENLSRGFGRQGKRTFMAERQYTRMEDWLTAKLAYEGLPSKTYLSKTLAQYTSKTCSNCGFTITSADYDRVLEKLKKTATGWMTTINGKELKVEGQITYYNRYKRQNVVKDLSVELDRLSEESVNNDISSWTKGRSGEALSLLKKRFSHRPVQEKFVCLNCGFETHADEQAALNIARSWLFLRSQEYKKYQTNKTSTGNTDKRAFVETWQSFYRKKLKEVWKPAV

SEQ ID NO: 40276 - protein, 979 aa, synthetic construct
  REGION 1..979: note = engineered CasX variant
QEIKRINKIRRRLVKDSNTKKAGKTGPMKTLLVRVMTPDLRERLENLRKKPENIPQPISNTSRANLNKLLTDYTEMKKAILHVYWEEFQKDPVGLMSRVAQPASKKIDQNKLKPEMDEKGNLTTAGFACSQCGQPLFVYKLEQVSEKGKAYTNYFGRCNVAEHEKLILLAQLKPEKDSDEAVTYSLGKFGQRALDFYSIHVTKESTHPVKPLAQIAGNRYASGPVGKALRDACMGTIASFLSKYQDIIIEHQKVVKGNQKRLESLRELAGKENLEYPSVTLPPQPHTKEGVDAYNEVIARVRMWVNLNLWQKLKLSRDDAKPLLRLKGFPSFPLVERQANEVDWWDMVCNVKKLINEKKEDGKVFWQNLAGYKRQEALRPYLSSEEDRKKGKKFARYQLGDLLLHLEKKHGEDWGKVYDEAWERIDKKVEGLSKHIKLEEERRSEDAQSKAALTDWLRAKASFVIEGLKEADKDEFCRCELKLQKWYGDLRGKPFAIEAENSILDISGFSKQYNCAFIWQKDGVKKLNLYLIINYFKGGKLRFKKIKPEAFEANRFYTVINKKSGEIVPMEVNFNFDDPNLIILPLAFGKRVGREFIWNDLLSLETGSLKLANGRVIEKTLYNRRTRQDEPALFVALTFERREVLDSSNIKPMNLIGVDRGENIPAVIALTDPEGCPLSRFKDSLGNPTHILRIGESYKEKQRTIQAKKEVEQRRAGGYSRKYASKAKNLADDMVRNTARDLLYYAVTQDAMLIFENLSRGFGRQGKRTFMAERQYTRMEDWLTAKLAYEGLPSKTYLSKTLAQYTSKTCSNCGFTITSADYDRVLEKLKKTATGWMTTINGKELKVEGQITYYNRYKRQNVVKDLSVELDRLSEESVNNDISSWTKGRSGEALSLLKKRFSHRPVQEKFVCLNCGFETHADEQAALNIARSWLFLRSQEYKKYQTNKTTGKNTDKRAFVETWQSFYRKKLKEVWKPAV

SEQ ID NO: 40277 - protein, 978 aa, synthetic construct
  REGION 1..978: note = engineered CasX variant
QEIKRINKIRRRLVKDSNTKKAGKTGPMKTLLVRVMTPDLRERLENLRKKPENIPQPISNTSRANLNKLLTDYTEMKKAILHVYWEEFQKDPVGLMSRVAQPASKKIDQNKLKPEMDEKGNLTTAGFACSQCGQPLFVYKLEQVSEKGKAYTNYFGRCNVAEHEKLILLAQLKPEKDSDEAVTYSLGKFGQRALDFYSIHVTKESTHPVKPLAQIAGNRYASGPVGKALRDACMGTIASFLSKYQDIIIEHQKVVKGNQKRLESLRELAGKENLEYPSVTLPPQPHTKEGVDAYNEVIARVRMWVNLNLWQKLKLSRDDAKPLLRLKKFPSFPLVERQANEVDWWDMVCNVKKLINEKKEDGKVFWQNLAGYKRQEALRPYLSSEEDRKKGKKFARYQLGDLLLHLEKKHGEDWGKVYDEAWERIDKKVEGLSKHIKLEEERRSEDAQSKAALTDWLRAKASFVIEGLKEADKDEFCRCELKLQKWYGDLRGKPFAIEAENSILDISGFSKQYNCAFIWQKDGVKKLNLYLIINYFKGGKLRFKKIKPEAFEANRFYTVINKKSGEIVPMEVNFNFDDPNLIILPLAFGKRVGREFIWNDLLSLETGSLKLANGRVIEKTLYNRRTRQDEPALFVALTFERREVLDSSNIKPMNLIGVDRGENIPAVIALTDPEGCPLSRFKDSLGNPTHILRIGESYKEKQRTIQAKKEVEQRRAGGYSRKYASKAKNLADDMVRNTARDLLYYAVTQDAMLIFENLSRGFGRQGKRTFMAERQYTRMEDWLTAKLAYEGLPSKTYLSKTLAQYTSKTCSNCGFTITSADYDRVLEKLKKTATGWMTTINGKELKVEGQITYYNRYKRQNVVKDLSVELDRLSEESVNNDISSWTKGRSGEALSLLKKRFSHRPVQEKFVCLNCGFETHADEQAALNIARSWLFLRSQEYKKYQTNKTTGNTDKRAFVETWQSFYRKKLKEVWKPAV

SEQ ID NO: 40278 - protein, 978 aa, synthetic construct
  REGION 1..978: note = engineered CasX variant
QEIKRINKIRRRLVKDSNTKKAGKTGPMKTLLVRVMTPDLRERLENLRKKPENIPQPISNTSRANLNKLLTDYTEMKKAILHVYWEEFQKDPVGLMSRVAQPASKKIDQNKLKPEMDEKGNLTTAGFACSQCGQPLFVYKLEQVSEKGKAYTNYFGRCNVAEHEKLILLAQLKPEKDSDEAVTYSLGKFGQRALDFYSIHVTKESTHPVKPLAQIAGNRYASGPVGKALRDACMGTIASFLSKYQDIIIEHQKVVKGNQKRLESLRELAGKENLEYPSVTLPPQPHTKEGVDAYNEVIARVRMWVNLNLWQKLKLSRDDAKPLLRLKGFPSFPLVERQANEVDWWDMVCNVKKLINEKKEDGKVFWQNLAGYKRQEALRPYLSSEEDRKKGKKFARYQLGDLLLHLEKKHGEDWGKVYDEAWERIDKKVEGLSKHIKLEEERRSEDAQSKAALTDWLRAKASFVIEGLKEADKDEFCRCELKLQKWYGDLRGKPFAIEAENSILDISGFSKQYNCAFIWQKDGVKKLNLYLIINYFKGGKLRFKKIKPEAFEANRFYTVINKKSGEIVPMEVNFNFDDPNLIILPLAFGKRVGREFIWNDLLSLETGSLKLANGRVIEKTLYNRRTRQDEPALFVALTFERREVLDSSNIKPMNLIGVDRGENIPAVIALTDPEGCPLSRFKDSLGNPTHILRIGERYKEKQRTIQAKKEVEQRRAGGYSRKYASKAKNLADDMVRNTARDLLYYAVTQDAMLIFENLSRGFGRQGKRTFMAERQYTRMEDWLTAKLAYEGLPSKTYLSKTLAQYTSKTCSNCGFTITSADYDRVLEKLKKTATGWMTTINGKELKVEGQITYYNRYKRQNVVKDLSVELDRLSEESVNNDISSWTKGRSGEALSLLKKRFSHRPVQEKFVCLNCGFETHADEQAALNIARSWLFLRSQEYKKYQTNKTTGNTDKRAFVETWQSFYRKKLKEVWKPAV

SEQ ID NO: 40279 - protein, 978 aa, synthetic construct
  REGION 1..978: note = engineered CasX variant
QEIKRINKIRRRLVKDSNTKKAGKTGPMKTLLVRVMTPDLRERLENLRKKPENIPQPISNTSRANLNKLLTDYTEMKKAILHVYWEEFQKDPVGLMSRVAQPASKKIDQNKLKPEMDEKGNLTTAGFACSQCGQPLFVYKLEQVSEKGKAYTNYFGRCNVAEHEKLILLAQLKPEKDSDEAVTYSLGKFGQRALDFYSIHVTKESTHPVKPLAQIAGNRYASGPVGKALRDACMGTIASFLSKYQDIIIEHQKVVKGNQKRLESLRELAGKENLEYPSVTLPPQPHTKEGVDAYNEVIARVRMWVNLNLWQKLKLSRDDAKPLLRLKGFPSFPLVERQANEVDWWDMVCNVKKLINEKKEDGKVFWQNLAGYKRQEALRPYLSSEEDRKKGKKFARYQLGDLLLHLEKKHGEDWGKVYDEAWERIDKKVEGLSKHIKLEEERRSEDAQSKAALTDWLRAKASFVIEGLKEADKDEFCRCELKLQKWYGDLRGKPFAIEAENSILDISGFSKQYNCAFIWQKDGVKKLNLYLIINYFKGGKLRFKKIKPEAFEANRFYTVINKKSGEIVPMEVNFNFDDPNLIILPLAFGKRVGREFIWNDLLSLETGSLQLANGRVIEKTLYNRRTRQDEPALFVALTFERREVLDSSNIKPMNLIGVDRGENIPAVIALTDPEGCPLSRFKDSLGNPTHILRIGESYKEKQRTIQAKKEVEQRRAGGYSRKYASKAKNLADDMVRNTARDLLYYAVTQDAMLIFENLSRGFGRQGKRTFMAERQYTRMEDWLTAKLAYEGLPSKTYLSKTLAQYTSKTCSNCGFTITSADYDRVLEKLKKTATGWMTTINGKELKVEGQITYYNRYKRQNVVKDLSVELDRLSEESVNNDISSWTKGRSGEALSLLKKRFSHRPVQEKFVCLNCGFETHADEQAALNIARSWLFLRSQEYKKYQTNKTTGNTDKRAFVETWQSFYRKKLKEVWKPAV

SEQ ID NO: 40280 - protein, 980 aa, synthetic construct
  REGION 1..980: note = engineered CasX variant
QEIKRINKIRRRLVKDSNTKKAGKTGPMKTLLVRVMTPDLRERLENLRKKPENIPQPISNTSRANLNKLLTDYTEMKKAILHVYWEEFQKDPVGLMSRVAQPASKKIDQNKLKPEMDEKGNLTTAGFACSQCGQPLFVYKLEQVSEKGKAYTNYFGRCNVAEHEKLILLAQLKPEKDSDEAVTYSLGKFGQRALDFYSIHVTKESTHPVKPLAQIAGNRYASGPVGKALRDACMGTIASFLSKYQDIIIEHQKVVKGNQKRLESLRELAGKENLEYPSVTLPPQPHTKEGVDAYNEVIARVRMWVNLNLWQKLKLSRDDAKPLLRLKGFPSFPLVERQANEVDWWDMVCNVKKLINEKKEDGKVFWQNLAGYKRQEALRPYLSSEEDRKKGKKFARYQLGDLLLHLEKKHGEDWGKVYDEAWERIDKKVEGLSKHIKLEEERRSEDAQSKAALTDWLRAKASFVIEGLKEADKDEFCRCELKLQKWYGDLRGKPFAIEAENSILDISGFSKQYNCAFIWQKDGVKKLNLYLIINYFKGGKLRFKKIKPEAFEANRFYTVINKKSGEIVPMEVNFNFDDPNLIILPLAFGKRQGREFIWNDLLSLETGSLKLANGRVIEKTLYNRRTRQDEPALFVALTFERREVLDSSNIKTPMSNLIGVDRGENIPAVIALTDPEGCPLSRFKDSLGNPTHILRIGESYKEKQRTIQAKKEVEQRRAGGYSRKYASKAKNLADDMVRNTARDLLYYAVTQDAMLIFENLSRGFGRQGKRTFMAERQYTRMEDWLTAKLAYEGLPSKTYLSKTLAQYTSKTCSNCGFTITSADYDRVLEKLKKTATGWMTTINGKELKVEGQITYYNRYKRQNVVKDLSVELDRLSEESVNNDISSWTKGRSGEALSLLKKRFSHRPVQEKFVCLNCGFETHADEQAALNIARSWLFLRSQEYKKYQTNKTTGNTDKRAFVETWQSFYRKKLKEVWKPAV

SEQ ID NO: 40281 - protein, 979 aa, synthetic construct
  REGION 1..979: note = engineered CasX variant
QEIKRINKIRRRLVKDSNTKKAGKTGPMKTLLVRVMTPDLRERLENLRKKPENIPQPISNTSRANLNKLLTDYTEMKKAILHVYWEEFQKDPVGLMSRVAQPASKKIDQNKLKPEMDEKGNLTTAGFACSQCGQPLFVYKLEQVSEKGKAYTNYFGRCNVAEHEKLILLAQLKPEKDSDEAVTYSLGKFGQRALDFYSIHVTKESTHPVKPLAQIAGNRYASGPVGKALRDACMGTIASFLSKYQDIIIEHQKVVKGNQKRLESLRELAGKENLEYPSVTLPPQPHTKEGVDAYNEVIARVRMWVNLNLWQKLKLSRDDAKPLLRLKGFPSFPLVERQANEVDWWDMVCNVKKLINEKKEDGKVFWQNLAGYKRQEALRPYLSSEEDRKKGKKFARYQLGDLLLHLEKKHGEDWGKVYDEAWERIDKKVEGLSKHIKLEEERRSEDAQSKAALTDWLRAKASFVIEGLKEADKDEFCRCELKLQKWYGDLRGKPFAIEAENSILDISGFSKQYNCAFIWQKDGVKKLNLYLIINYFKGGKLRFKKIKPEAFEANRFYTVINKKSGEIVPMEVNFNFDDPNLIILPLAFGKRQGREFIWNDLLSLETGSLKLANGRVIEKTLYNRRTRQDEPALFVALTFERREVLDSSNIKTPMNLIGVDRGENIPAVIALTDPEGCPLSRFKDSLGNPTHILRIRESYKEKQRTIQAKKEVEQRRAGGYSRKYASKAKNLADDMVRNTARDLLYYAVTQDAMLIFENLSRGFGRQGKRTFMAERQYTRMEDWLTAKLAYEGLPSKTYLSKTLAQYTSKTCSNCGFTITSADYDRVLEKLKKTATGWMTTINGKELKVEGQITYYNRYKRQNVVKDLSVELDRLSEESVNNDISSWTKGRSGEALSLLKKRFSHRPVQEKFVCLNCGFETHADEQAALNIARSWLFLRSQEYKKYQTNKTTGNTDKRAFVETWQSFYRKKLKEVWKPAV

SEQ ID NO: 40282 - protein, 979 aa, synthetic construct
  REGION 1..979: note = engineered CasX variant
QEIKRINKIRRRLVKDSNTKKAGKTGPMKTLLVRVMTPDLRERLENLRKKPENIPQPISNTSRANLNKLLTDYTEMKKAILHVYWEEFQKDPVGLMSRVAQPASKKIDQNKLKPEMDEKGNLTTAGFACSQCGQPLFVYKLEQVSEKGKAYTNYFGRCNVAEHEKLILLAQLKPEKDSDEAVTYSLGKFGQRALDFYSIHVTKESTHPVKPLAQIAGNRYASGPVGKALRDACMGTIASFLSKYQDIIIEHQKVVKGNQKRLESLRELAGKENLEYPSVTLPPQPHTKEGVDAYNEVIARVRMWVNLNLWQKLKLSRDDAKPLLRLKGFPSFPLVERQANEVDWWDMVCNVKKLINEKKEDGKVFWQNLAGYKRQEALRPYLSSEEDRKKGKKFARYQLGDLLLHLEKKHGEDWGKVYDEAWERIDKKVEGLSKHIKLEEERRSEDAQSKAALTDWLRAKASFVIEGLKEADKDEFCRCELKLQKWYGDLRGKPFAIEAENSILDISGFSKQYNCAFIWQKDGVKKLNLYLIINYFKGGKLRFKKIKPEAFEANRFYTVINKKSGEIVPMEVNFNFDDPNLIILPLAFGKRQGREFIWNDLLSLETGSLKLANGRVIEKTLYNRRTRQDEPALFVALTFERREVLDSSNIKTPMNLIGVDRGENIPAVIALTDPEGCPLSRFKDSLGNPTHILRIGESYKEKQRTIQAKKEVEQRRAGGYSRKYASKAKNLADDMVRNTARDLLYYAVTQDAMLIFENLSRGFGRQGKRTFSAERQYTRMEDWLTAKLAYEGLPSKTYLSKTLAQYTSKTCSNCGFTITSADYDRVLEKLKKTATGWMTTINGKELKVEGQITYYNRYKRQNVVKDLSVELDRLSEESVNNDISSWTKGRSGEALSLLKKRFSHRPVQEKFVCLNCGFETHADEQAALNIARSWLFLRSQEYKKYQTNKTTGNTDKRAFVETWQSFYRKKLKEVWKPAV

SEQ ID NO: 40283 - protein, 979 aa, synthetic construct
  REGION 1..979: note = engineered CasX variant
QEIKRINKIRRRLVKDSNTKKAGKTGPMKTLLVRVMTPDLRERLENLRKKPENIPQPISNTSRANLNKLLTDYTEMKKAILHVYWEEFQKDPVGLMSRVAQPASKKIDQNKLKPEMDEKGNLTTAGFACSQCGQPLFVYKLEQVSEKGKAYTNYFGRCNVAEHEKLILLAQLKPEKDSDEAVTYSLGKFGQRALDFYSIHVTKESTHPVKPLAQIAGNRYASGPVGKALRDACMGTIASFLSKYQDIIIEHQKVVKGNQKRLESLRELAGKENLEYPSVTLPPQPHTKEGVDAYNEVIARVRMWVNLNLWQKLKLSRDDAKPLLRLKGFPSFPLVERQANEVDWWDMVCNVKKLINEKKEDGKVFWQNLAGYKRQEALRPYLSSEEDRKKGKKFARYQLGDLLLHLEKKHGEDWGKVYDEAWERIDKKVEGLSKHIKLEEERRSEDAQSKAALTDWLRAKASFVIEGLKEADKDEFCRCELKLQKWYGDLRGKPFAIEAENSILDISGFSKQYNCAFIWQKDGVKKLNLYLIINYFKGGKLRFKKIKPEAFEANRFYTVINKKSGEIVPMEVNFNFDDPNLIILPLAFGKRQGREFIWNDLLSLETGSLKLANGRVIEKTLYNRRTRQDEPALFVALTFERREVLDSSNIKTPMNLIGVDRGENIPAVIALTDPEGCPLSRFKDSLGNPTHILRIGESYKEKQRTIQAKKEVEQRRAGGYSRKYASKAKNLADDMVRNTARDLLYYAVTQDAMLIFENLSRGFGRQGKRTFMAERQYTRMEDWLTAKLAYEGLPSKTYLSKTLAQYTSKTCSNCGFTITSADYDRVLEKLKKTATGWMTTINGKELKVEGQITYYNRYKRQNVVKDLSVELDRLSEESVNNDISSWDKGRSGEALSLLKKRFSHRPVQEKFVCLNCGFETHADEQAALNIARSWLFLRSQEYKKYQTNKTTGNTDKRAFVETWQSFYRKKLKEVWKPAV

SEQ ID NO: 40284 - protein, 979 aa, synthetic construct
  REGION 1..979: note = engineered CasX variant
QEIKRINKIRRRLVKDSNTKKAGKTGPMKTLLVRVMTPDLRERLENLRKKPENIPQPISNTSRANLNKLLTDYTEMKKAILHVYWEEFQVDPVGLMSRVAQPASKKIDQNKLKPEMDEKGNLTTAGFACSQCGQPLFVYKLEQVSEKGKAYTNYFGRCNVAEHEKLILLAQLKPEKDSDEAVTYSLGKFGQRALDFYSIHVTKESTHPVKPLAQIAGNRYASGPVGKALRDACMGTIASFLSKYQDIIIEHQKVVKGNQKRLESLRELAGKENLEYPSVTLPPQPHTKEGVDAYNEVIARVRMWVNLNLWQKLKLSRDDAKPLLRLKGFPSFPLVERQANEVDWWDMVCNVKKLINEKKEDGKVFWQNLAGYKRQEALRPYLSSEEDRKKGKKFARYQLGDLLLHLEKKHGEDWGKVYDEAWERIDKKVEGLSKHIKLEEERRSEDAQSKAALTDWLRAKASFVIEGLKEADKDEFCRCELKLQKWYGDLRGKPFAIEAENSILDISGFSKQYNCAFIWQKDGVKKLNLYLIINYFKGGKLRFKKIKPEAFEANRFYTVINKKSGEIVPMEVNFNFDDPNLIILPLAFGKRQGREFIWNDLLSLETGSLKLANGRVIEKTLYNRRTRQDEPALFVALTFERREVLDSSNIKTPMNLIGVDRGENIPAVIALTDPEGCPLSRFKDSLGNPTHILRIGESYKEKQRTIQAKKEVEQRRAGGYSRKYASKAKNLADDMVRNTARDLLYYAVTQDAMLIFENLSRGFGRQGKRTFMAERQYTRMEDWLTAKLAYEGLPSKTYLSKTLAQYTSKTCSNCGFTITSADYDRVLEKLKKTATGWMTTINGKELKVEGQITYYNRYKRQNVVKDLSVELDRLSEESVNNDISSWTKGRSGEALSLLKKRFSHRPVQEKFVCLNCGFETHADEQAALNIARSWLFLRSQEYKKYQTNKTTGNTDKRAFVETWQSFYRKKLKEVWKPAV

SEQ ID NO: 40285 - protein, 979 aa, synthetic construct
  REGION 1..979: note = engineered CasX variant
QEIKRLNKIRRRLVKDSNTKKAGKTGPMKTLLVRVMTPDLRERLENLRKKPENIPQPISNTSRANLNKLLTDYTEMKKAILHVYWEEFQKDPVGLMSRVAQPASKKIDQNKLKPEMDEKGNLTTAGFACSQCGQPLFVYKLEQVSEKGKAYTNYFGRCNVAEHEKLILLAQLKPEKDSDEAVTYSLGKFGQRALDFYSIHVTKESTHPVKPLAQIAGNRYASGPVGKALRDACMGTIASFLSKYQDIIIEHQKVVKGNQKRLESLRELAGKENLEYPSVTLPPQPHTKEGVDAYNEVIARVRMWVNLNLWQKLKLSRDDAKPLLRLKGFPSFPLVERQANEVDWWDMVCNVKKLINEKKEDGKVFWQNLAGYKRQEALRPYLSSEEDRKKGKKFARYQLGDLLLHLEKKHGEDWGKVYDEAWERIDKKVEGLSKHIKLEEERRSEDAQSKAALTDWLRAKASFVIEGLKEADKDEFCRCELKLQKWYGDLRGKPFAIEAENSILDISGFSKQYNCAFIWQKDGVKKLNLYLIINYFKGGKLRFKKIKPEAFEANRFYTVINKKSGEIVPMEVNFNFDDPNLIILPLAFGKRQGREFIWNDLLSLETGSLKLANGRVIEKTLYNRRTRQDEPALFVALTFERREVLDSSNIKTPMNLIGVDRGENIPAVIALTDPEGCPLSRFKDSLGNPTHILRIGESYKEKQRTIQAKKEVEQRRAGGYSRKYASKAKNLADDMVRNTARDLLYYAVTQDAMLIFENLSRGFGRQGKRTFMAERQYTRMEDWLTAKLAYEGLPSKTYLSKTLAQYTSKTCSNCGFTITSADYDRVLEKLKKTATGWMTTINGKELKVEGQITYYNRYKRQNVVKDLSVELDRLSEESVNNDISSWTKGRSGEALSLLKKRFSHRPVQEKFVCLNCGFETHADEQAALNIARSWLFLRSQEYKKYQTNKTTGNTDKRAFVETWQSFYRKKLKEVWKPAV

SEQ ID NO: 40286 - protein, 979 aa, synthetic construct
  REGION 1..979: note = engineered CasX variant
QEIKRINKIRRRLVKDSNTKKAGKTGPMKTLLVRVMTPDLRERLENLRKKPENIPQPISNTSRANLNKLLTDYTEMKKAILHVYWEEFQKDPVGLMSRVAQPASKKIDQNKLKPEMDEKGNLTTAGFACSQCGQPLFVYKLEQVSEKGKAYTNYVGRCNVAEHEKLILLAQLKPEKDSDEAVTYSLGKFGQRALDFYSIHVTKESTHPVKPLAQIAGNRYASGPVGKALRDACMGTIASFLSKYQDIIIEHQKVVKGNQKRLESLRELAGKENLEYPSVTLPPQPHTKEGVDAYNEVIARVRMWVNLNLWQKLKLSRDDAKPLLRLKGFPSFPLVERQANEVDWWDMVCNVKKLINEKKEDGKVFWQNLAGYKRQEALRPYLSSEEDRKKGKKFARYQLGDLLLHLEKKHGEDWGKVYDEAWERIDKKVEGLSKHIKLEEERRSEDAQSKAALTDWLRAKASFVIEGLKEADKDEFCRCELKLQKWYGDLRGKPFAIEAENSILDISGFSKQYNCAFIWQKDGVKKLNLYLIINYFKGGKLRFKKIKPEAFEANRFYTVINKKSGEIVPMEVNFNFDDPNLIILPLAFGKRQGREFIWNDLLSLETGSLKLANGRVIEKTLYNRRTRQDEPALFVALTFERREVLDSSNIKTPMNLIGVDRGENIPAVIALTDPEGCPLSRFKDSLGNPTHILRIGESYKEKQRTIQAKKEVEQRRAGGYSRKYASKAKNLADDMVRNTARDLLYYAVTQDAMLIFENLSRGFGRQGKRTFMAERQYTRMEDWLTAKLAYEGLPSKTYLSKTLAQYTSKTCSNCGFTITSADYDRVLEKLKKTATGWMTTINGKELKVEGQITYYNRYKRQNVVKDLSVELDRLSEESVNNDISSWTKGRSGEALSLLKKRFSHRPVQEKFVCLNCGFETHADEQAALNIARSWLFLRSQEYKKYQTNKTTGNTDKRAFVETWQSFYRKKLKEVWKPAV

SEQ ID NO: 40287 - protein, 979 aa, synthetic construct
  REGION 1..979: note = engineered CasX variant
QEIKRINKIRRRLVKDSNTKKAGKTGPMKTLLVRVMTPDLRERLENLRKKPENIPQPISNTSRANLNKLLTDYTEMKKAILHVYWEEFQKDPVGLMSRVAQPASKKIDQNKLKPEMDEKGNLTTAGFACSQCGQPLFVYKLEQVSEKGKAYTNYFGRCNVAEHEKLILLAQLKPEKDSDEAVTYSLGKFGQRALDFYSIHVTKESTHPVKPLAQIAGNRYASGPVGKALRDACMGTIASFLSKYQDIIIEHQKVVKGNQKRLESLRELAGKENLEYPSVTLPPQPHTKEGVDAYNEVIARVRMWVNLNLWQKLKLSRDDAKPLLRLKGFPSFPLVERQANEVDWWDMVCNVKKLINEKKEDGKVFWQNLAGYKRQEALRPYLSSEEDRKKGKKFARYQLGDLLLHLEKKHGEDWGKVYDEAWERIDKKVEGLSKHIKLEEERRSEDAQSKAALTDWLRAKASFVIEGLKEADKDEFCRCELKLQKWYGDLRGKPFAIEAENSILDISGFSKQYNCAFIWQKDGVKKLNLYLIINYFKGGKLRFKKIKPEAFEANRFYTVINKKSGEIVPMEVNFNFDDPNLIILPLAFGKRQGREFIWNDLLSLETGSLKLANGRVIEKTLYNRRTRQDEPALFVALTFERREVLDSSNIKTPMNLIGVDRGENIPAVIALTDPEGCPLSRFKDSLGNPTHILRIGESYKEKQRTIQAKKEVEQRRAGGYSRKYASKAKNLADDMVRNTARDLLYYAVTQDAMLIFENLSRGFGRQGKRTFMAERQYTRMEDWLTAKLAYEGLASKTYLSKTLAQYTSKTCSNCGFTITSADYDRVLEKLKKTATGWMTTINGKELKVEGQITYYNRYKRQNVVKDLSVELDRLSEESVNNDISSWTKGRSGEALSLLKKRFSHRPVQEKFVCLNCGFETHADEQAALNIARSWLFLRSQEYKKYQTNKTTGNTDKRAFVETWQSFYRKKLKEVWKPAV

SEQ ID NO: 40288 - protein, 979 aa, synthetic construct
  REGION 1..979: note = engineered CasX variant
QEIKRINKIRRRLVKDSNTKKAGKTGPMKTLLVRVMTPDLRERLENLRKKPENIPQPISNTSRANLNKLLTDYTEMKKAILHVYWEEFQKDPVGLMSRVAQPASKKIDQNKLKPEMDEKGNLTTAGFACSQCGQPLFVYKLEQVSEKGKAYTNYFGRCNVAEHEKLILLAQLKPEKDSDEAVTYSLGKFGQRALDFYSIHVTKESTHPVKPLAQIAGNRYASGPVGKALRDACMGTIASFLSKYQDIIIEHQKVVKGNQKRLESLRELAGKENLEYPSVTLPPQPHTKEGVDAYNEVIARVRMWVNLNLWQKLKLSRDDAKPLLRLKGFPSFPLVERQANEVDWWDMVCNVKKLINEKKEDGKVFWQNLAGYKRQEALRPYLSSEEDRKKGKKFARYQLGDLLLHLEKKHGEDWGKVYDEAWERIDKKVEGLSKHIKLEEERRSEDAQSKAALTDWLRAKASFVIEGLKEADKDEFCRCELKLQKWYGDLRGKPFAIEAENSILDISGFSKQYNCAFIWQKDGVKKLNLYLIINYFKGGKLRFKKIKPEAFEANRFYTVINKKSGEIVPMEVNFNFDDPNLIILPLAFGKRQGREFIWNDLLSLETGSLKLANGRVIEKTLYNRRTRQDEPALFVALTFERREVLDSSNIKTPMNLIGVDRGENIPAVIALTDPEGCPLSRFKDSLGNPTHILRIGESYKEKQRTIQAKKEVEQRRAGGYSRKYASKAKNLADDMVRNTARDLLYYAVTQDAMLIFENLSRGFGRQGKRTFMAERQYTRMEDWLTAKLAYEGLPSKVYLSKTLAQYTSKTCSNCGFTITSADYDRVLEKLKKTATGWMTTINGKELKVEGQITYYNRYKRQNVVKDLSVELDRLSEESVNNDISSWTKGRSGEALSLLKKRFSHRPVQEKFVCLNCGFETHADEQAALNIARSWLFLRSQEYKKYQTNKTTGNTDKRAFVETWQSFYRKKLKEVWKPAV

SEQ ID NO: 40289 - protein, 980 aa, synthetic construct
  REGION 1..980: note = engineered CasX variant
QEIKRINKIRRRLVKDSNTKKAGKTGPMKTLLVRVMTPDLRERLENLRKKPENIPQPISNTSRANLNKLLTDYTEMKKAILHVYWEEFQKDPVGLMSRVAQPASKKIDQNKLKPEMDEKGNLTTAGFACSQCGQPLFVYKLEQVSEKGKAYTNYFGRCNVAEHEKLILLAQLKPEKDSDEAVTYSLGKFGQRALDFYSIHVTKESTHPVKPLAQIAGNRYASGPVGKALRDACMGTIASFLSKYQDIIIEHQKVVKGNQKRLESLRELAGKENLEYPSVTLPPQPHTKEGVDAYNEVIARVRMWVNLNLWQKLKLSRDDAKPLLRLKGFPSFPLVERQANEVDWWDMVCNVKKLINEKKEDGKVFWQNLAGYKRQEALRPYLSSEEDRKKGKKFARYQLGDLLLHLEKKHGEDWGKVYDEAWERIDKKVEGLSKHIKLEEERRSEDAQSKAALTDWLRAKASFVIEGLKEADKDEFCRCELKLQKWYGDLRGKPFAIEAENSILDISGFSKQYNCAFIWQKDGVKKLNLYLIINYFKGGKLRFKKIKPEAFEANRFYTVINKKSGEIVPMEVNFNFDDPNLIILPLAFGKRQGREFIWNDLLSLETGSLKLANGRVIEKTLYNRRTRQDEPALFVALTFERREVLDSSNIKTPMNLIGVDRGENIPAVIALTDPEGCPLSRFKDSLGNPTHILRIGESYKEKQRTIQAKKEVEQRRAGGYSRKYASKAKNLADDMVRNTARDLLYYAVTQDAMLIFENLSRGFGRQGKRTFMAERQYTRMEDWLTAKLAYEGPLPSKTYLSKTLAQYTSKTCSNCGFTITSADYDRVLEKLKKTATGWMTTINGKELKVEGQITYYNRYKRQNVVKDLSVELDRLSEESVNNDISSWTKGRSGEALSLLKKRFSHRPVQEKFVCLNCGFETHADEQAALNIARSWLFLRSQEYKKYQTNKTTGNTDKRAFVETWQSFYRKKLKEVWKPAV

SEQ ID NO: 40290 - protein, 980 aa, synthetic construct
  REGION 1..980: note = engineered CasX variant
QEIKRINKIRRRLVKDSNTKKAGKTGPMKTLLVRVMTPDLRERLENLRKKPENIPQPISNTSRANLNKLLTDYTEMKKAILHVYWEEFQKDPVGLMSRVAQPASKKIDQNKLKPEMDEKGNLTTAGFACSQCGQPLFVYKLEQVSEKGKAYTNYFGRCNVAEHEKLILLAQLKPEKDSDEAVTYSLGKFGQRALDFYSIHVTKESTHPVKPLAQIAGNRYASGPVGKALRDACMGTIASFLSKYQDIIIEHQKVVKGNQKRLESLRELAGKENLEYPSVTLPPQPHTKEGVDAYNEVIARVRMWVNLNLWQKLKLSRDDAKPLLRLKGFPSFPLVERQANEVDWWDMVCNVKKLINEKKEDGKVFWQNLAGYKRQEALRPYLSSEEDVRKKGKKFARYQLGDLLLHLEKKHGEDWGKVYDEAWERIDKKVEGLSKHIKLEEERRSEDAQSKAALTDWLRAKASFVIEGLKEADKDEFCRCELKLQKWYGDLRGKPFAIEAENSILDISGFSKQYNCAFIWQKDGVKKLNLYLIINYFKGGKLRFKKIKPEAFEANRFYTVINKKSGEIVPMEVNFNFDDPNLIILPLAFGKRQGREFIWNDLLSLETGSLKLANGRVIEKTLYNRRTRQDEPALFVALTFERREVLDSSNIKTPMNLIGVDRGENIPAVIALTDPEGCPLSRFKDSLGNPTHILRIGESYKEKQRTIQAKKEVEQRRAGGYSRKYASKAKNLADDMVRNTARDLLYYAVTQDAMLIFENLSRGFGRQGKRTFMAERQYTRMEDWLTAKLAYEGLPSKTYLSKTLAQYTSKTCSNCGFTITSADYDRVLEKLKKTATGWMTTINGKELKVEGQITYYNRYKRQNVVKDLSVELDRLSEESVNNDISSWTKGRSGEALSLLKKRFSHRPVQEKFVCLNCGFETHADEQAALNIARSWLFLRSQEYKKYQTNKTTGNTDKRAFVETWQSFYRKKLKEVWKPAV

SEQ ID NO: 40291 - protein, 979 aa, synthetic construct
  REGION 1..979: note = engineered CasX variant
QEIKRINKIRRRLVKDSNTKKAGKTGPMKTLLVRVMTPDLRERLENLRKKPENIPQPISNTSRANLNKLLTDYTEMKKAILHVYWEEFQKDPVGLMSRVAQPASKKIDQNKLKPEMDEKGNLTTAGFACSQCGQPLFVYKLEQVSEKGKAYTNYFGRCNVAEHEKLILLAQLKPEKDSDEAVTYSLGKFGQRALDFYSIHVTKESTHPVKPLAQIAGNRYASGPVGKALRDACMGTIASFLSKYQDIIIEHQKVVKGNQKRLESLRELAGKENLEYPSVTLPPQPHTKEGVDAYNEVIARVRMWVNLNLWQKLKLSRDDAKPLLRLKGFPSFPLVERQANEVDWWDMVCNVKKLINEKKEDGKVFWQNLAGYKRQEALRPYLSSEEDRKKGKKFARYQLGDLLLHLEKKHGEDWGKVYDEAWERIDKKVEGLSKHIKLEEERRSEDAQSKAALTDWLRAKASFVIEGLKEADKDEFCRCELKLQKWYGDLRGKPFAIEAENSILDISGFSKQYNCAFIWQKDGVKKLNLYLIINYFKGGKLRFKKIKPEAFEANRFYTVINKKSGEIVPMEVNFNFDDPNLIILPLAFGKRQGREFIWNDLLSLETGSLKLANGRVIEKTLYNRRTRQDEPALFVALTFERREVLDSSNIKTPMNLIGVDRGENIPAVIALTDPEGCPLSRFKDSLGNPTHILRIGESYKEKQRTIQAKKEVEQRRAGGYSRKYASKAKNLADDMVRNTARDLLYYAVTQDAMLIFENLSRGFGRQGKRTFMAERQYTRMEDWLTAKLAYEGLPSKTYLSKTLAQYTSKTCSNCGFTITSADYDRMLEKLKKTATGWMTTINGKELKVEGQITYYNRYKRQNVVKDLSVELDRLSEESVNNDISSWTKGRSGEALSLLKKRFSHRPVQEKFVCLNCGFETHADEQAALNIARSWLFLRSQEYKKYQTNKTTGNTDKRAFVETWQSFYRKKLKEVWKPAV

SEQ ID NO: 40292 - protein, 979 aa, synthetic construct
  REGION 1..979: note = engineered CasX variant
QEIKRINKIRRRLVKDSNTKKAGKTGPMKTLLVRVMTPDLRERLENLRKKPENIPQPISNTSRANLNKLLTDYTEMKKAILHVYWEEFQKDPVGLMSRVAQPASKKIDQNKLKPEMDEKGNLTTAGFACSQCGQPLFVYKLEQVSEKGKAYTNYFGRCNVAEHEKLILLAQLKPEKDSDEAVTYSLGKFGQRALDFYSIHVTKESTHPVKPLAQIAGNRYASGPVGKALRDACMGTIASFLSKYQDIIIEHQKVVKGNQKRLESLRELAGKENLEYPSVTLPPQPHTKEGVDAYNEVIARVRMWVNLNLWQKLKLSRDDAKPLLRLKGFPSFPLVERQANEVDWWDMVCNVKKLINEKKEDGKVFWQNLAGYKRQEALRPYLSSEEDRKKGKKFARYQLGDLLLHLEKKHGEDWGKVYDEAWERIDKKVEGLSKHIKLEEERRSEDAQSKAALTDWLRAKASFVIEGLKEADKDEFCRCELKLQKWYGDLRGKPFAIEAENSILDISGFSKQYNCAFIWQKDGVKKLNLYLIINYFKGGKLRFKKIKPEAFEANRFYTVINKKSGEIVPMEVNFNFDDPNLIILPLAFGKRQGREFIWNDLLSLETGSLKLANGRVIEKTLYNRRTRQDEPALFVALTFERREVLDSSNIKTPMNLIGVDRGENIPAVIALTDPEGCPLSRFKDSLGNPTHILRIGESYKEKQRTIQAKKEVEQRRAGGYSRKYASKAKNLADDMVRNTARDLLYYAVTQDAMLIFENLSRGFGRQGKRTFMAERQYTRMEDWLTAKLAYEGLPSKTYLSKTLAQYTSKTCSNCGFTITSADYDRVLEKLKKTATGWMTTINGKELKVEGQITYYNRYKRQNVVKDLSVELDRLSEESVNNDISSWTKGRQGEALSLLKKRFSHRPVQEKFVCLNCGFETHADEQAALNIARSWLFLRSQEYKKYQTNKTTGNTDKRAFVETWQSFYRKKLKEVWKPAV

SEQ ID NO: 40293 - protein, 979 aa, synthetic construct
  REGION 1..979: note = engineered CasX variant
QEIKRINKIRRRLVKDSNTKKAGKTGPMKTLLVRVMTPDLRERLENLRKKPENIPQPISNTSRANLNKLLTDYTEMKKAILHVYWEEFQKDPVGLMSRVAQPASKKIDQNKLKPEMDEKGNLTTAGFACSQCGQPLFVYKLEQVSEKGKAYTNYFGRCNVAEHEKLILLAQLKPEKDSDEAVTYSLGKFGQRALDFYSIHVTKESTHPVKPLAQIAGNRYASGPVGKALRDACMGTIASFLSKYQDIIIEHQKVVKGNQKRLESLRELAGKENLEYPSVTLPPQPHTKEGVDAYNEVIARVRMWVNLNLWQKLKLSRDDAKPLLRLKGFPSFPLVERQANEVDWWDMVCNVKKLINEKKEDGKVFWQNLAGYKRQEALRPYLSSEEDRKKGKKFARYQLGDLLLHLEKKHGEDWGKVYDEAWERIDKKVEGLSKHIKLEEERRSEDAQSKAALTDWLRAKASFVIEGLKEADKDEFCRCELKLQKWYGDLRGKPFAIEAENSILDISGFSKQYNCAFIWQKDGVKKLNLYLIINYFKGGKLRFKKIKPEAFEANRFYTVINKKSGEIVPMEVNFNFDDPNLIILPLAFGKRQGREFIWNDLLSLETGSLKLANGRVIEKTLYNRRTRQDEPALFVALTFERREVLDSSNIKTPMNLIGVDRGENIPAVIALTDPEGCPLSRFKDSLGNPTHILRIGESYKEKQRTIQAKKEVEQRRAGGYSRKYASKAKNLADDMVRNTARDLLYYAVTQDAMLIFENLSRGFGRQGKRTFMAERQYTRMEDWLTAKLAYEGLPSKTYLSKTLAQYTSKTCSNCGFTITSADYDRVLEKLKKTATGWMTTINGKELKVEGQITYYNRYKRQNVVKDLSVELDRLSEESVNNDISSWTKGRSGEALSLLKKRFSHRPVQEKFVCLNCEFETHADEQAALNIARSWLFLRSQEYKKYQTNKTTGNTDKRAFVETWQSFYRKKLKEVWKPAV

SEQ ID NO: 40294 - protein, 980 aa, synthetic construct
  REGION 1..980: note = engineered CasX variant
QEIKRINKIRRRLVKDSNTKKAGKTGPMKTLLVRVMTPDLRERLENLRKKPENIPQPISNTSRANLNKLLTDYTEMKKAILHVYWEEFQKDPVGLMSRVAQPASKKIDQNKLKPEMDEKGNLTTAGFACSQCGQPLFVYKLEQVSEKGKAYTNYFGRCNVAEHEKLILLAQLKPEKDSDEAVTYSLGKFGQRALDFYSIHVTKESTHPVKPLAQIAGNRYASGPVGKALRDACMGTIASFLSKYQDIIIEHQKVVKGNQKRLESLRELAGKENLEYPSVTLPPQPHTKEGVDAYNEVIARVRMWVNLNLWQKLKLSRDDAKPLLRLKGFPSFPLVERQANEVDWWDMVCNVKKLINEKKEDGKVFWQNLAGYKRQEALRPYLSSEEDRKKGKKFARYQLGDLLLHLEKKHGEDWGKVYDEAWERIDKKVEGLSKHIKLEEERRSEDAQSKAALTDWLRAKASFVIEGLKEADKDEFCRCELKLQKWYGDLRGKPFAIEAENSILDISGFSKQYNCAFIWQKDGVKKLNLYLIINYFKGGKLRFKKIKPEAFEANRFYTVINKKSGEIVPMEVNFNFDDPNLIILPLAFGKRQGREFIWNDLLSLETGSLKLANGRVIEKTLYNRRTRQDEPALFVALTFERREVLDSSNIKTPMNLIGVDRGENIPAVIALTDPEGCPLSRFKDSLGNPTHILRIGESYKEKQRTIQAKKEVEQRRAGGYSRKYASKAKNLADDMVRNTARDLLYYAVTQDAMLIFENLSRGFGRQGKRTFMAERQYTRMEDWLTAKLAYEGLPSKTYLSKTLAQYTSKTCSNCGFTITSADYDRVLEKLKKTATGWMTTINGKELKVEGQITYYNRYKRQNVVKDLSVELDRLSEESVNNDISSWTKGRSGEALSLLKKRFSHRPVQEKFVCLNCGFETHADEQAALNIARSWLFLRSQEYKKYQTNKTSTGNTDKRAFVETWQSFYRKKLKEVWKPAV

SEQ ID NO: 40295 - protein, 980 aa, synthetic construct
  REGION 1..980: note = engineered CasX variant
QEIKRINKIRRRLVKDSNTKKAGKTGPMKTLLVRVMTPDLRERLENLRKKPENIPQPISNTSRANLNKLLTDYTEMKKAILHVYWEEFQKDPVGLMSRVAQPASKKIDQNKLKPEMDEKGNLTTAGFACSQCGQPLFVYKLEQVSEKGKAYTNYFGRCNVAEHEKLILLAQLKPEKDSDEAVTYSLGKFGQRALDFYSIHVTKESTHPVKPLAQIAGNRYASGPVGKALRDACMGTIASFLSKYQDIIIEHQKVVKGNQKRLESLRELAGKENLEYPSVTLPPQPHTKEGVDAYNEVIARVRMWVNLNLWQKLKLSRDDAKPLLRLKGFPSFPLVERQANEVDWWDMVCNVKKLINEKKEDGKVFWQNLAGYKRQEALRPYLSSEEDRKKGKKFARYQLGDLLLHLEKKHGEDWGKVYDEAWERIDKKVEGLSKHIKLEEERRSEDAQSKAALTDWLRAKASFVIEGLKEADKDEFCRCELKLQKWYGDLRGKPFAIEAENSILDISGFSKQYNCAFIWQKDGVKKLNLYLIINYFKGGKLRFKKIKPEAFEANRFYTVINKKSGEIVPMEVNFNFDDPNLIILPLAFGKRQGREFIWNDLLSLETGSLKLANGRVIEKTLYNRRTRQDEPALFVALTFERREVLDSSNIKTPMNLIGVDRGENIPAVIALTDPEGCPLSRFKDSLGNPTHILRIGESYKEKQRTIQAKKEVEQRRAGGYSRKYASKAKNLADDMVRNTARDLLYYAVTQDAMLIFENLSRGFGRQGKRTFMAERQYTRMEDWLTAKLAYEGLPSKTYLSKTLAQYTSKTCSNCGFTITSADYDRVLEKLKKTATGWMTTINGKELKVEGQITYYNRYKRQNVVKDLSVELDRLSEESVNNDISSWTKGRSGEALSLLKKRFSHRPVQEKFVCLNCGFETHADEQAALNIARSWLFLRSQEYKKYQTNKTTGKNTDKRAFVETWQSFYRKKLKEVWKPAV

SEQ ID NO: 40296 - protein, 979 aa, synthetic construct
  REGION 1..979: note = engineered CasX variant
QEIKRINKIRRRLVKDSNTKKAGKTGPMKTLLVRVMTPDLRERLENLRKKPENIPQPISNTSRANLNKLLTDYTEMKKAILHVYWEEFQKDPVGLMSRVAQPASKKIDQNKLKPEMDEKGNLTTAGFACSQCGQPLFVYKLEQVSEKGKAYTNYFGRCNVAEHEKLILLAQLKPEKDSDEAVTYSLGKFGQRALDFYSIHVTKESTHPVKPLAQIAGNRYASGPVGKALRDACMGTIASFLSKYQDIIIEHQKVVKGNQKRLESLRELAGKENLEYPSVTLPPQPHTKEGVDAYNEVIARVRMWVNLNLWQKLKLSRDDAKPLLRLKKFPSFPLVERQANEVDWWDMVCNVKKLINEKKEDGKVFWQNLAGYKRQEALRPYLSSEEDRKKGKKFARYQLGDLLLHLEKKHGEDWGKVYDEAWERIDKKVEGLSKHIKLEEERRSEDAQSKAALTDWLRAKASFVIEGLKEADKDEFCRCELKLQKWYGDLRGKPFAIEAENSILDISGFSKQYNCAFIWQKDGVKKLNLYLIINYFKGGKLRFKKIKPEAFEANRFYTVINKKSGEIVPMEVNFNFDDPNLIILPLAFGKRQGREFIWNDLLSLETGSLKLANGRVIEKTLYNRRTRQDEPALFVALTFERREVLDSSNIKTPMNLIGVDRGENIPAVIALTDPEGCPLSRFKDSLGNPTHILRIGESYKEKQRTIQAKKEVEQRRAGGYSRKYASKAKNLADDMVRNTARDLLYYAVTQDAMLIFENLSRGFGRQGKRTFMAERQYTRMEDWLTAKLAYEGLPSKTYLSKTLAQYTSKTCSNCGFTITSADYDRVLEKLKKTATGWMTTINGKELKVEGQITYYNRYKRQNVVKDLSVELDRLSEESVNNDISSWTKGRSGEALSLLKKRFSHRPVQEKFVCLNCGFETHADEQAALNIARSWLFLRSQEYKKYQTNKTTGNTDKRAFVETWQSFYRKKLKEVWKPAV

SEQ ID NO: 40297 - protein, 979 aa, synthetic construct
  REGION 1..979: note = engineered CasX variant
QEIKRINKIRRRLVKDSNTKKAGKTGPMKTLLVRVMTPDLRERLENLRKKPENIPQPISNTSRANLNKLLTDYTEMKKAILHVYWEEFQKDPVGLMSRVAQPASKKIDQNKLKPEMDEKGNLTTAGFACSQCGQPLFVYKLEQVSEKGKAYTNYFGRCNVAEHEKLILLAQLKPEKDSDEAVTYSLGKFGQRALDFYSIHVTKESTHPVKPLAQIAGNRYASGPVGKALRDACMGTIASFLSKYQDIIIEHQKVVKGNQKRLESLRELAGKENLEYPSVTLPPQPHTKEGVDAYNEVIARVRMWVNLNLWQKLKLSRDDAKPLLRLKGFPSFPLVERQANEVDWWDMVCNVKKLINEKKEDGKVFWQNLAGYKRQEALRPYLSSEEDRKKGKKFARYQLGDLLLHLEKKHGEDWGKVYDEAWERIDKKVEGLSKHIKLEEERRSEDAQSKAALTDWLRAKASFVIEGLKEADKDEFCRCELKLQKWYGDLRGKPFAIEAENSILDISGFSKQYNCAFIWQKDGVKKLNLYLIINYFKGGKLRFKKIKPEAFEANRFYTVINKKSGEIVPMEVNFNFDDPNLIILPLAFGKRQGREFIWNDLLSLETGSLKLANGRVIEKTLYNRRTRQDEPALFVALTFERREVLDSSNIKTPMNLIGVDRGENIPAVIALTDPEGCPLSRFKDSLGNPTHILRIGERYKEKQRTIQAKKEVEQRRAGGYSRKYASKAKNLADDMVRNTARDLLYYAVTQDAMLIFENLSRGFGRQGKRTFMAERQYTRMEDWLTAKLAYEGLPSKTYLSKTLAQYTSKTCSNCGFTITSADYDRVLEKLKKTATGWMTTINGKELKVEGQITYYNRYKRQNVVKDLSVELDRLSEESVNNDISSWTKGRSGEALSLLKKRFSHRPVQEKFVCLNCGFETHADEQAALNIARSWLFLRSQEYKKYQTNKTTGNTDKRAFVETWQSFYRKKLKEVWKPAV

SEQ ID NO: 40298 - protein, 979 aa, synthetic construct
  REGION 1..979: note = engineered CasX variant
QEIKRINKIRRRLVKDSNTKKAGKTGPMKTLLVRVMTPDLRERLENLRKKPENIPQPISNTSRANLNKLLTDYTEMKKAILHVYWEEFQKDPVGLMSRVAQPASKKIDQNKLKPEMDEKGNLTTAGFACSQCGQPLFVYKLEQVSEKGKAYTNYFGRCNVAEHEKLILLAQLKPEKDSDEAVTYSLGKFGQRALDFYSIHVTKESTHPVKPLAQIAGNRYASGPVGKALRDACMGTIASFLSKYQDIIIEHQKVVKGNQKRLESLRELAGKENLEYPSVTLPPQPHTKEGVDAYNEVIARVRMWVNLNLWQKLKLSRDDAKPLLRLKGFPSFPLVERQANEVDWWDMVCNVKKLINEKKEDGKVFWQNLAGYKRQEALRPYLSSEEDRKKGKKFARYQLGDLLLHLEKKHGEDWGKVYDEAWERIDKKVEGLSKHIKLEEERRSEDAQSKAALTDWLRAKASFVIEGLKEADKDEFCRCELKLQKWYGDLRGKPFAIEAENSILDISGFSKQYNCAFIWQKDGVKKLNLYLIINYFKGGKLRFKKIKPEAFEANRFYTVINKKSGEIVPMEVNFNFDDPNLIILPLAFGKRQGREFIWNDLLSLETGSLQLANGRVIEKTLYNRRTRQDEPALFVALTFERREVLDSSNIKTPMNLIGVDRGENIPAVIALTDPEGCPLSRFKDSLGNPTHILRIGESYKEKQRTIQAKKEVEQRRAGGYSRKYASKAKNLADDMVRNTARDLLYYAVTQDAMLIFENLSRGFGRQGKRTFMAERQYTRMEDWLTAKLAYEGLPSKTYLSKTLAQYTSKTCSNCGFTITSADYDRVLEKLKKTATGWMTTINGKELKVEGQITYYNRYKRQNVVKDLSVELDRLSEESVNNDISSWTKGRSGEALSLLKKRFSHRPVQEKFVCLNCGFETHADEQAALNIARSWLFLRSQEYKKYQTNKTTGNTDKRAFVETWQSFYRKKLKEVWKPAV

SEQ ID NO: 40299 - protein, 979 aa, synthetic construct
  REGION 1..979: note = engineered CasX variant
QEIKRINKIRRRLVKDSNTKKAGKTGPMKTLLVRVMTPDLRERLENLRKKPENIPQPISNTSRANLNKLLTDYTEMKKAILHVYWEEFQKDPVGLMSRVAQPASKKIDQNKLKPEMDEKGNLTTAGFACSQCGQPLFVYKLEQVSEKGKAYTNYFGRCNVAEHEKLILLAQLKPEKDSDEAVTYSLGKFGQRALDFYSIHVTKESTHPVKPLAQIAGNRYASGPVGKALRDACMGTIASFLSKYQDIIIEHQKVVKGNQKRLESLRELAGKENLEYPSVTLPPQPHTKEGVDAYNEVIARVRMWVNLNLWQKLKLSRDDAKPLLRLKGFPSFPLVERQANEVDWWDMVCNVKKLINEKKEDGKVFWQNLAGYKRQEALRPYLSSEEDRKKGKKFARYQLGDLLLHLEKKHGEDWGKVYDEAWERIDKKVEGLSKHIKLEEERRSEDAQSKAALTDWLRAKASFVIEGLKEADKDEFCRCELKLQKWYGDLRGKPFAIEAENSILDISGFSKQYNCAFIWQKDGVKKLNLYLIINYFKGGKLRFKKIKPEAFEANRFYTVINKKSGEIVPMEVNFNFDDPNLIILPLAFGKRQGREFIWNDLLSLETGSLKLANGRVIEKTLYNRRTRQDEPALFVALTFERREVLDSSNIKPMSNLIGVDRGENIPAVIALTDPEGCPLSRFKDSLGNPTHILRIRESYKEKQRTIQAKKEVEQRRAGGYSRKYASKAKNLADDMVRNTARDLLYYAVTQDAMLIFENLSRGFGRQGKRTFMAERQYTRMEDWLTAKLAYEGLPSKTYLSKTLAQYTSKTCSNCGFTITSADYDRVLEKLKKTATGWMTTINGKELKVEGQITYYNRYKRQNVVKDLSVELDRLSEESVNNDISSWTKGRSGEALSLLKKRFSHRPVQEKFVCLNCGFETHADEQAALNIARSWLFLRSQEYKKYQTNKTTGNTDKRAFVETWQSFYRKKLKEVWKPAV

SEQ ID NO: 40300 - protein, 979 aa, synthetic construct
  REGION 1..979: note = engineered CasX variant
QEIKRINKIRRRLVKDSNTKKAGKTGPMKTLLVRVMTPDLRERLENLRKKPENIPQPISNTSRANLNKLLTDYTEMKKAILHVYWEEFQKDPVGLMSRVAQPASKKIDQNKLKPEMDEKGNLTTAGFACSQCGQPLFVYKLEQVSEKGKAYTNYFGRCNVAEHEKLILLAQLKPEKDSDEAVTYSLGKFGQRALDFYSIHVTKESTHPVKPLAQIAGNRYASGPVGKALRDACMGTIASFLSKYQDIIIEHQKVVKGNQKRLESLRELAGKENLEYPSVTLPPQPHTKEGVDAYNEVIARVRMWVNLNLWQKLKLSRDDAKPLLRLKGFPSFPLVERQANEVDWWDMVCNVKKLINEKKEDGKVFWQNLAGYKRQEALRPYLSSEEDRKKGKKFARYQLGDLLLHLEKKHGEDWGKVYDEAWERIDKKVEGLSKHIKLEEERRSEDAQSKAALTDWLRAKASFVIEGLKEADKDEFCRCELKLQKWYGDLRGKPFAIEAENSILDISGFSKQYNCAFIWQKDGVKKLNLYLIINYFKGGKLRFKKIKPEAFEANRFYTVINKKSGEIVPMEVNFNFDDPNLIILPLAFGKRQGREFIWNDLLSLETGSLKLANGRVIEKTLYNRRTRQDEPALFVALTFERREVLDSSNIKPMSNLIGVDRGENIPAVIALTDPEGCPLSRFKDSLGNPTHILRIGESYKEKQRTIQAKKEVEQRRAGGYSRKYASKAKNLADDMVRNTARDLLYYAVTQDAMLIFENLSRGFGRQGKRTFSAERQYTRMEDWLTAKLAYEGLPSKTYLSKTLAQYTSKTCSNCGFTITSADYDRVLEKLKKTATGWMTTINGKELKVEGQITYYNRYKRQNVVKDLSVELDRLSEESVNNDISSWTKGRSGEALSLLKKRFSHRPVQEKFVCLNCGFETHADEQAALNIARSWLFLRSQEYKKYQTNKTTGNTDKRAFVETWQSFYRKKLKEVWKPAV

SEQ ID NO: 40301 - protein, 979 aa, synthetic construct
  REGION 1..979: note = engineered CasX variant
QEIKRINKIRRRLVKDSNTKKAGKTGPMKTLLVRVMTPDLRERLENLRKKPENIPQPISNTSRANLNKLLTDYTEMKKAILHVYWEEFQKDPVGLMSRVAQPASKKIDQNKLKPEMDEKGNLTTAGFACSQCGQPLFVYKLEQVSEKGKAYTNYFGRCNVAEHEKLILLAQLKPEKDSDEAVTYSLGKFGQRALDFYSIHVTKESTHPVKPLAQIAGNRYASGPVGKALRDACMGTIASFLSKYQDIIIEHQKVVKGNQKRLESLRELAGKENLEYPSVTLPPQPHTKEGVDAYNEVIARVRMWVNLNLWQKLKLSRDDAKPLLRLKGFPSFPLVERQANEVDWWDMVCNVKKLINEKKEDGKVFWQNLAGYKRQEALRPYLSSEEDRKKGKKFARYQLGDLLLHLEKKHGEDWGKVYDEAWERIDKKVEGLSKHIKLEEERRSEDAQSKAALTDWLRAKASFVIEGLKEADKDEFCRCELKLQKWYGDLRGKPFAIEAENSILDISGFSKQYNCAFIWQKDGVKKLNLYLIINYFKGGKLRFKKIKPEAFEANRFYTVINKKSGEIVPMEVNFNFDDPNLIILPLAFGKRQGREFIWNDLLSLETGSLKLANGRVIEKTLYNRRTRQDEPALFVALTFERREVLDSSNIKPMSNLIGVDRGENIPAVIALTDPEGCPLSRFKDSLGNPTHILRIGESYKEKQRTIQAKKEVEQRRAGGYSRKYASKAKNLADDMVRNTARDLLYYAVTQDAMLIFENLSRGFGRQGKRTFMAERQYTRMEDWLTAKLAYEGLPSKTYLSKTLAQYTSKTCSNCGFTITSADYDRVLEKLKKTATGWMTTINGKELKVEGQITYYNRYKRQNVVKDLSVELDRLSEESVNNDISSWDKGRSGEALSLLKKRFSHRPVQEKFVCLNCGFETHADEQAALNIARSWLFLRSQEYKKYQTNKTTGNTDKRAFVETWQSFYRKKLKEVWKPAV

SEQ ID NO: 40302 - protein, 979 aa, synthetic construct
  REGION 1..979: note = engineered CasX variant
QEIKRINKIRRRLVKDSNTKKAGKTGPMKTLLVRVMTPDLRERLENLRKKPENIPQPISNTSRANLNKLLTDYTEMKKAILHVYWEEFQVDPVGLMSRVAQPASKKIDQNKLKPEMDEKGNLTTAGFACSQCGQPLFVYKLEQVSEKGKAYTNYFGRCNVAEHEKLILLAQLKPEKDSDEAVTYSLGKFGQRALDFYSIHVTKESTHPVKPLAQIAGNRYASGPVGKALRDACMGTIASFLSKYQDIIIEHQKVVKGNQKRLESLRELAGKENLEYPSVTLPPQPHTKEGVDAYNEVIARVRMWVNLNLWQKLKLSRDDAKPLLRLKGFPSFPLVERQANEVDWWDMVCNVKKLINEKKEDGKVFWQNLAGYKRQEALRPYLSSEEDRKKGKKFARYQLGDLLLHLEKKHGEDWGKVYDEAWERIDKKVEGLSKHIKLEEERRSEDAQSKAALTDWLRAKASFVIEGLKEADKDEFCRCELKLQKWYGDLRGKPFAIEAENSILDISGFSKQYNCAFIWQKDGVKKLNLYLIINYFKGGKLRFKKIKPEAFEANRFYTVINKKSGEIVPMEVNFNFDDPNLIILPLAFGKRQGREFIWNDLLSLETGSLKLANGRVIEKTLYNRRTRQDEPALFVALTFERREVLDSSNIKPMSNLIGVDRGENIPAVIALTDPEGCPLSRFKDSLGNPTHILRIGESYKEKQRTIQAKKEVEQRRAGGYSRKYASKAKNLADDMVRNTARDLLYYAVTQDAMLIFENLSRGFGRQGKRTFMAERQYTRMEDWLTAKLAYEGLPSKTYLSKTLAQYTSKTCSNCGFTITSADYDRVLEKLKKTATGWMTTINGKELKVEGQITYYNRYKRQNVVKDLSVELDRLSEESVNNDISSWTKGRSGEALSLLKKRFSHRPVQEKFVCLNCGFETHADEQAALNIARSWLFLRSQEYKKYQTNKTTGNTDKRAFVETWQSFYRKKLKEVWKPAV

SEQ ID NO: 40303 - protein, 979 aa, synthetic construct
  REGION 1..979: note = engineered CasX variant
QEIKRLNKIRRRLVKDSNTKKAGKTGPMKTLLVRVMTPDLRERLENLRKKPENIPQPISNTSRANLNKLLTDYTEMKKAILHVYWEEFQKDPVGLMSRVAQPASKKIDQNKLKPEMDEKGNLTTAGFACSQCGQPLFVYKLEQVSEKGKAYTNYFGRCNVAEHEKLILLAQLKPEKDSDEAVTYSLGKFGQRALDFYSIHVTKESTHPVKPLAQIAGNRYASGPVGKALRDACMGTIASFLSKYQDIIIEHQKVVKGNQKRLESLRELAGKENLEYPSVTLPPQPHTKEGVDAYNEVIARVRMWVNLNLWQKLKLSRDDAKPLLRLKGFPSFPLVERQANEVDWWDMVCNVKKLINEKKEDGKVFWQNLAGYKRQEALRPYLSSEEDRKKGKKFARYQLGDLLLHLEKKHGEDWGKVYDEAWERIDKKVEGLSKHIKLEEERRSEDAQSKAALTDWLRAKASFVIEGLKEADKDEFCRCELKLQKWYGDLRGKPFAIEAENSILDISGFSKQYNCAFIWQKDGVKKLNLYLIINYFKGGKLRFKKIKPEAFEANRFYTVINKKSGEIVPMEVNFNFDDPNLIILPLAFGKRQGREFIWNDLLSLETGSLKLANGRVIEKTLYNRRTRQDEPALFVALTFERREVLDSSNIKPMSNLIGVDRGENIPAVIALTDPEGCPLSRFKDSLGNPTHILRIGESYKEKQRTIQAKKEVEQRRAGGYSRKYASKAKNLADDMVRNTARDLLYYAVTQDAMLIFENLSRGFGRQGKRTFMAERQYTRMEDWLTAKLAYEGLPSKTYLSKTLAQYTSKTCSNCGFTITSADYDRVLEKLKKTATGWMTTINGKELKVEGQITYYNRYKRQNVVKDLSVELDRLSEESVNNDISSWTKGRSGEALSLLKKRFSHRPVQEKFVCLNCGFETHADEQAALNIARSWLFLRSQEYKKYQTNKTTGNTDKRAFVETWQSFYRKKLKEVWKPAV

SEQ ID NO: 40304 - protein, 979 aa, synthetic construct
  REGION 1..979: note = engineered CasX variant
QEIKRINKIRRRLVKDSNTKKAGKTGPMKTLLVRVMTPDLRERLENLRKKPENIPQPISNTSRANLNKLLTDYTEMKKAILHVYWEEFQKDPVGLMSRVAQPASKKIDQNKLKPEMDEKGNLTTAGFACSQCGQPLFVYKLEQVSEKGKAYTNYVGRCNVAEHEKLILLAQLKPEKDSDEAVTYSLGKFGQRALDFYSIHVTKESTHPVKPLAQIAGNRYASGPVGKALRDACMGTIASFLSKYQDIIIEHQKVVKGNQKRLESLRELAGKENLEYPSVTLPPQPHTKEGVDAYNEVIARVRMWVNLNLWQKLKLSRDDAKPLLRLKGFPSFPLVERQANEVDWWDMVCNVKKLINEKKEDGKVFWQNLAGYKRQEALRPYLSSEEDRKKGKKFARYQLGDLLLHLEKKHGEDWGKVYDEAWERIDKKVEGLSKHIKLEEERRSEDAQSKAALTDWLRAKASFVIEGLKEADKDEFCRCELKLQKWYGDLRGKPFAIEAENSILDISGFSKQYNCAFIWQKDGVKKLNLYLIINYFKGGKLRFKKIKPEAFEANRFYTVINKKSGEIVPMEVNFNFDDPNLIILPLAFGKRQGREFIWNDLLSLETGSLKLANGRVIEKTLYNRRTRQDEPALFVALTFERREVLDSSNIKPMSNLIGVDRGENIPAVIALTDPEGCPLSRFKDSLGNPTHILRIGESYKEKQRTIQAKKEVEQRRAGGYSRKYASKAKNLADDMVRNTARDLLYYAVTQDAMLIFENLSRGFGRQGKRTFMAERQYTRMEDWLTAKLAYEGLPSKTYLSKTLAQYTSKTCSNCGFTITSADYDRVLEKLKKTATGWMTTINGKELKVEGQITYYNRYKRQNVVKDLSVELDRLSEESVNNDISSWTKGRSGEALSLLKKRFSHRPVQEKFVCLNCGFETHADEQAALNIARSWLFLRSQEYKKYQTNKTTGNTDKRAFVETWQSFYRKKLKEVWKPAV

SEQ ID NO: 40305 - protein, 979 aa, synthetic construct
  REGION 1..979: note = engineered CasX variant
QEIKRINKIRRRLVKDSNTKKAGKTGPMKTLLVRVMTPDLRERLENLRKKPENIPQPISNTSRANLNKLLTDYTEMKKAILHVYWEEFQKDPVGLMSRVAQPASKKIDQNKLKPEMDEKGNLTTAGFACSQCGQPLFVYKLEQVSEKGKAYTNYFGRCNVAEHEKLILLAQLKPEKDSDEAVTYSLGKFGQRALDFYSIHVTKESTHPVKPLAQIAGNRYASGPVGKALRDACMGTIASFLSKYQDIIIEHQKVVKGNQKRLESLRELAGKENLEYPSVTLPPQPHTKEGVDAYNEVIARVRMWVNLNLWQKLKLSRDDAKPLLRLKGFPSFPLVERQANEVDWWDMVCNVKKLINEKKEDGKVFWQNLAGYKRQEALRPYLSSEEDRKKGKKFARYQLGDLLLHLEKKHGEDWGKVYDEAWERIDKKVEGLSKHIKLEEERRSEDAQSKAALTDWLRAKASFVIEGLKEADKDEFCRCELKLQKWYGDLRGKPFAIEAENSILDISGFSKQYNCAFIWQKDGVKKLNLYLIINYFKGGKLRFKKIKPEAFEANRFYTVINKKSGEIVPMEVNFNFDDPNLIILPLAFGKRQGREFIWNDLLSLETGSLKLANGRVIEKTLYNRRTRQDEPALFVALTFERREVLDSSNIKPMSNLIGVDRGENIPAVIALTDPEGCPLSRFKDSLGNPTHILRIGESYKEKQRTIQAKKEVEQRRAGGYSRKYASKAKNLADDMVRNTARDLLYYAVTQDAMLIFENLSRGFGRQGKRTFMAERQYTRMEDWLTAKLAYEGLASKTYLSKTLAQYTSKTCSNCGFTITSADYDRVLEKLKKTATGWMTTINGKELKVEGQITYYNRYKRQNVVKDLSVELDRLSEESVNNDISSWTKGRSGEALSLLKKRFSHRPVQEKFVCLNCGFETHADEQAALNIARSWLFLRSQEYKKYQTNKTTGNTDKRAFVETWQSFYRKKLKEVWKPAV

SEQ ID NO: 40306 - protein, 979 aa, synthetic construct
  REGION 1..979: note = engineered CasX variant
QEIKRINKIRRRLVKDSNTKKAGKTGPMKTLLVRVMTPDLRERLENLRKKPENIPQPISNTSRANLNKLLTDYTEMKKAILHVYWEEFQKDPVGLMSRVAQPASKKIDQNKLKPEMDEKGNLTTAGFACSQCGQPLFVYKLEQVSEKGKAYTNYFGRCNVAEHEKLILLAQLKPEKDSDEAVTYSLGKFGQRALDFYSIHVTKESTHPVKPLAQIAGNRYASGPVGKALRDACMGTIASFLSKYQDIIIEHQKVVKGNQKRLESLRELAGKENLEYPSVTLPPQPHTKEGVDAYNEVIARVRMWVNLNLWQKLKLSRDDAKPLLRLKGFPSFPLVERQANEVDWWDMVCNVKKLINEKKEDGKVFWQNLAGYKRQEALRPYLSSEEDRKKGKKFARYQLGDLLLHLEKKHGEDWGKVYDEAWERIDKKVEGLSKHIKLEEERRSEDAQSKAALTDWLRAKASFVIEGLKEADKDEFCRCELKLQKWYGDLRGKPFAIEAENSILDISGFSKQYNCAFIWQKDGVKKLNLYLIINYFKGGKLRFKKIKPEAFEANRFYTVINKKSGEIVPMEVNFNFDDPNLIILPLAFGKRQGREFIWNDLLSLETGSLKLANGRVIEKTLYNRRTRQDEPALFVALTFERREVLDSSNIKPMSNLIGVDRGENIPAVIALTDPEGCPLSRFKDSLGNPTHILRIGESYKEKQRTIQAKKEVEQRRAGGYSRKYASKAKNLADDMVRNTARDLLYYAVTQDAMLIFENLSRGFGRQGKRTFMAERQYTRMEDWLTAKLAYEGLPSKVYLSKTLAQYTSKTCSNCGFTITSADYDRVLEKLKKTATGWMTTINGKELKVEGQITYYNRYKRQNVVKDLSVELDRLSEESVNNDISSWTKGRSGEALSLLKKRFSHRPVQEKFVCLNCGFETHADEQAALNIARSWLFLRSQEYKKYQTNKTTGNTDKRAFVETWQSFYRKKLKEVWKPAV

SEQ ID NO: 40307 - protein, 980 aa, synthetic construct
  REGION 1..980: note = engineered CasX variant
QEIKRINKIRRRLVKDSNTKKAGKTGPMKTLLVRVMTPDLRERLENLRKKPENIPQPISNTSRANLNKLLTDYTEMKKAILHVYWEEFQKDPVGLMSRVAQPASKKIDQNKLKPEMDEKGNLTTAGFACSQCGQPLFVYKLEQVSEKGKAYTNYFGRCNVAEHEKLILLAQLKPEKDSDEAVTYSLGKFGQRALDFYSIHVTKESTHPVKPLAQIAGNRYASGPVGKALRDACMGTIASFLSKYQDIIIEHQKVVKGNQKRLESLRELAGKENLEYPSVTLPPQPHTKEGVDAYNEVIARVRMWVNLNLWQKLKLSRDDAKPLLRLKGFPSFPLVERQANEVDWWDMVCNVKKLINEKKEDGKVFWQNLAGYKRQEALRPYLSSEEDRKKGKKFARYQLGDLLLHLEKKHGEDWGKVYDEAWERIDKKVEGLSKHIKLEEERRSEDAQSKAALTDWLRAKASFVIEGLKEADKDEFCRCELKLQKWYGDLRGKPFAIEAENSILDISGFSKQYNCAFIWQKDGVKKLNLYLIINYFKGGKLRFKKIKPEAFEANRFYTVINKKSGEIVPMEVNFNFDDPNLIILPLAFGKRQGREFIWNDLLSLETGSLKLANGRVIEKTLYNRRTRQDEPALFVALTFERREVLDSSNIKPMSNLIGVDRGENIPAVIALTDPEGCPLSRFKDSLGNPTHILRIGESYKEKQRTIQAKKEVEQRRAGGYSRKYASKAKNLADDMVRNTARDLLYYAVTQDAMLIFENLSRGFGRQGKRTFMAERQYTRMEDWLTAKLAYEGPLPSKTYLSKTLAQYTSKTCSNCGFTITSADYDRVLEKLKKTATGWMTTINGKELKVEGQITYYNRYKRQNVVKDLSVELDRLSEESVNNDISSWTKGRSGEALSLLKKRFSHRPVQEKFVCLNCGFETHADEQAALNIARSWLFLRSQEYKKYQTNKTTGNTDKRAFVETWQSFYRKKLKEVWKPAV

SEQ ID NO: 40308 - protein, 980 aa, synthetic construct
  REGION 1..980: note = engineered CasX variant
QEIKRINKIRRRLVKDSNTKKAGKTGPMKTLLVRVMTPDLRERLENLRKKPENIPQPISNTSRANLNKLLTDYTEMKKAILHVYWEEFQKDPVGLMSRVAQPASKKIDQNKLKPEMDEKGNLTTAGFACSQCGQPLFVYKLEQVSEKGKAYTNYFGRCNVAEHEKLILLAQLKPEKDSDEAVTYSLGKFGQRALDFYSIHVTKESTHPVKPLAQIAGNRYASGPVGKALRDACMGTIASFLSKYQDIIIEHQKVVKGNQKRLESLRELAGKENLEYPSVTLPPQPHTKEGVDAYNEVIARVRMWVNLNLWQKLKLSRDDAKPLLRLKGFPSFPLVERQANEVDWWDMVCNVKKLINEKKEDGKVFWQNLAGYKRQEALRPYLSSEEDVRKKGKKFARYQLGDLLLHLEKKHGEDWGKVYDEAWERIDKKVEGLSKHIKLEEERRSEDAQSKAALTDWLRAKASFVIEGLKEADKDEFCRCELKLQKWYGDLRGKPFAIEAENSILDISGFSKQYNCAFIWQKDGVKKLNLYLIINYFKGGKLRFKKIKPEAFEANRFYTVINKKSGEIVPMEVNFNFDDPNLIILPLAFGKRQGREFIWNDLLSLETGSLKLANGRVIEKTLYNRRTRQDEPALFVALTFERREVLDSSNIKPMSNLIGVDRGENIPAVIALTDPEGCPLSRFKDSLGNPTHILRIGESYKEKQRTIQAKKEVEQRRAGGYSRKYASKAKNLADDMVRNTARDLLYYAVTQDAMLIFENLSRGFGRQGKRTFMAERQYTRMEDWLTAKLAYEGLPSKTYLSKTLAQYTSKTCSNCGFTITSADYDRVLEKLKKTATGWMTTINGKELKVEGQITYYNRYKRQNVVKDLSVELDRLSEESVNNDISSWTKGRSGEALSLLKKRFSHRPVQEKFVCLNCGFETHADEQAALNIARSWLFLRSQEYKKYQTNKTTGNTDKRAFVETWQSFYRKKLKEVWKPAV

SEQ ID NO: 40309 - protein, 979 aa, synthetic construct
  REGION 1..979: note = engineered CasX variant
QEIKRINKIRRRLVKDSNTKKAGKTGPMKTLLVRVMTPDLRERLENLRKKPENIPQPISNTSRANLNKLLTDYTEMKKAILHVYWEEFQKDPVGLMSRVAQPASKKIDQNKLKPEMDEKGNLTTAGFACSQCGQPLFVYKLEQVSEKGKAYTNYFGRCNVAEHEKLILLAQLKPEKDSDEAVTYSLGKFGQRALDFYSIHVTKESTHPVKPLAQIAGNRYASGPVGKALRDACMGTIASFLSKYQDIIIEHQKVVKGNQKRLESLRELAGKENLEYPSVTLPPQPHTKEGVDAYNEVIARVRMWVNLNLWQKLKLSRDDAKPLLRLKGFPSFPLVERQANEVDWWDMVCNVKKLINEKKEDGKVFWQNLAGYKRQEALRPYLSSEEDRKKGKKFARYQLGDLLLHLEKKHGEDWGKVYDEAWERIDKKVEGLSKHIKLEEERRSEDAQSKAALTDWLRAKASFVIEGLKEADKDEFCRCELKLQKWYGDLRGKPFAIEAENSILDISGFSKQYNCAFIWQKDGVKKLNLYLIINYFKGGKLRFKKIKPEAFEANRFYTVINKKSGEIVPMEVNFNFDDPNLIILPLAFGKRQGREFIWNDLLSLETGSLKLANGRVIEKTLYNRRTRQDEPALFVALTFERREVLDSSNIKPMSNLIGVDRGENIPAVIALTDPEGCPLSRFKDSLGNPTHILRIGESYKEKQRTIQAKKEVEQRRAGGYSRKYASKAKNLADDMVRNTARDLLYYAVTQDAMLIFENLSRGFGRQGKRTFMAERQYTRMEDWLTAKLAYEGLPSKTYLSKTLAQYTSKTCSNCGFTITSADYDRMLEKLKKTATGWMTTINGKELKVEGQITYYNRYKRQNVVKDLSVELDRLSEESVNNDISSWTKGRSGEALSLLKKRFSHRPVQEKFVCLNCGFETHADEQAALNIARSWLFLRSQEYKKYQTNKTTGNTDKRAFVETWQSFYRKKLKEVWKPAV

SEQ ID NO: 40310 - protein, 979 aa, synthetic construct
  REGION 1..979: note = engineered CasX variant
QEIKRINKIRRRLVKDSNTKKAGKTGPMKTLLVRVMTPDLRERLENLRKKPENIPQPISNTSRANLNKLLTDYTEMKKAILHVYWEEFQKDPVGLMSRVAQPASKKIDQNKLKPEMDEKGNLTTAGFACSQCGQPLFVYKLEQVSEKGKAYTNYFGRCNVAEHEKLILLAQLKPEKDSDEAVTYSLGKFGQRALDFYSIHVTKESTHPVKPLAQIAGNRYASGPVGKALRDACMGTIASFLSKYQDIIIEHQKVVKGNQKRLESLRELAGKENLEYPSVTLPPQPHTKEGVDAYNEVIARVRMWVNLNLWQKLKLSRDDAKPLLRLKGFPSFPLVERQANEVDWWDMVCNVKKLINEKKEDGKVFWQNLAGYKRQEALRPYLSSEEDRKKGKKFARYQLGDLLLHLEKKHGEDWGKVYDEAWERIDKKVEGLSKHIKLEEERRSEDAQSKAALTDWLRAKASFVIEGLKEADKDEFCRCELKLQKWYGDLRGKPFAIEAENSILDISGFSKQYNCAFIWQKDGVKKLNLYLIINYFKGGKLRFKKIKPEAFEANRFYTVINKKSGEIVPMEVNFNFDDPNLIILPLAFGKRQGREFIWNDLLSLETGSLKLANGRVIEKTLYNRRTRQDEPALFVALTFERREVLDSSNIKPMSNLIGVDRGENIPAVIALTDPEGCPLSRFKDSLGNPTHILRIGESYKEKQRTIQAKKEVEQRRAGGYSRKYASKAKNLADDMVRNTARDLLYYAVTQDAMLIFENLSRGFGRQGKRTFMAERQYTRMEDWLTAKLAYEGLPSKTYLSKTLAQYTSKTCSNCGFTITSADYDRVLEKLKKTATGWMTTINGKELKVEGQITYYNRYKRQNVVKDLSVELDRLSEESVNNDISSWTKGRQGEALSLLKKRFSHRPVQEKFVCLNCGFETHADEQAALNIARSWLFLRSQEYKKYQTNKTTGNTDKRAFVETWQSFYRKKLKEVWKPAV

SEQ ID NO: 40311 - protein, 979 aa, synthetic construct
  REGION 1..979: note = engineered CasX variant
QEIKRINKIRRRLVKDSNTKKAGKTGPMKTLLVRVMTPDLRERLENLRKKPENIPQPISNTSRANLNKLLTDYTEMKKAILHVYWEEFQKDPVGLMSRVAQPASKKIDQNKLKPEMDEKGNLTTAGFACSQCGQPLFVYKLEQVSEKGKAYTNYFGRCNVAEHEKLILLAQLKPEKDSDEAVTYSLGKFGQRALDFYSIHVTKESTHPVKPLAQIAGNRYASGPVGKALRDACMGTIASFLSKYQDIIIEHQKVVKGNQKRLESLRELAGKENLEYPSVTLPPQPHTKEGVDAYNEVIARVRMWVNLNLWQKLKLSRDDAKPLLRLKGFPSFPLVERQANEVDWWDMVCNVKKLINEKKEDGKVFWQNLAGYKRQEALRPYLSSEEDRKKGKKFARYQLGDLLLHLEKKHGEDWGKVYDEAWERIDKKVEGLSKHIKLEEERRSEDAQSKAALTDWLRAKASFVIEGLKEADKDEFCRCELKLQKWYGDLRGKPFAIEAENSILDISGFSKQYNCAFIWQKDGVKKLNLYLIINYFKGGKLRFKKIKPEAFEANRFYTVINKKSGEIVPMEVNFNFDDPNLIILPLAFGKRQGREFIWNDLLSLETGSLKLANGRVIEKTLYNRRTRQDEPALFVALTFERREVLDSSNIKPMSNLIGVDRGENIPAVIALTDPEGCPLSRFKDSLGNPTHILRIGESYKEKQRTIQAKKEVEQRRAGGYSRKYASKAKNLADDMVRNTARDLLYYAVTQDAMLIFENLSRGFGRQGKRTFMAERQYTRMEDWLTAKLAYEGLPSKTYLSKTLAQYTSKTCSNCGFTITSADYDRVLEKLKKTATGWMTTINGKELKVEGQITYYNRYKRQNVVKDLSVELDRLSEESVNNDISSWTKGRSGEALSLLKKRFSHRPVQEKFVCLNCEFETHADEQAALNIARSWLFLRSQEYKKYQTNKTTGNTDKRAFVETWQSFYRKKLKEVWKPAV

SEQ ID NO: 40312 - protein, 980 aa, synthetic construct
  REGION 1..980: note = engineered CasX variant
QEIKRINKIRRRLVKDSNTKKAGKTGPMKTLLVRVMTPDLRERLENLRKKPENIPQPISNTSRANLNKLLTDYTEMKKAILHVYWEEFQKDPVGLMSRVAQPASKKIDQNKLKPEMDEKGNLTTAGFACSQCGQPLFVYKLEQVSEKGKAYTNYFGRCNVAEHEKLILLAQLKPEKDSDEAVTYSLGKFGQRALDFYSIHVTKESTHPVKPLAQIAGNRYASGPVGKALRDACMGTIASFLSKYQDIIIEHQKVVKGNQKRLESLRELAGKENLEYPSVTLPPQPHTKEGVDAYNEVIARVRMWVNLNLWQKLKLSRDDAKPLLRLKGFPSFPLVERQANEVDWWDMVCNVKKLINEKKEDGKVFWQNLAGYKRQEALRPYLSSEEDRKKGKKFARYQLGDLLLHLEKKHGEDWGKVYDEAWERIDKKVEGLSKHIKLEEERRSEDAQSKAALTDWLRAKASFVIEGLKEADKDEFCRCELKLQKWYGDLRGKPFAIEAENSILDISGFSKQYNCAFIWQKDGVKKLNLYLIINYFKGGKLRFKKIKPEAFEANRFYTVINKKSGEIVPMEVNFNFDDPNLIILPLAFGKRQGREFIWNDLLSLETGSLKLANGRVIEKTLYNRRTRQDEPALFVALTFERREVLDSSNIKPMSNLIGVDRGENIPAVIALTDPEGCPLSRFKDSLGNPTHILRIGESYKEKQRTIQAKKEVEQRRAGGYSRKYASKAKNLADDMVRNTARDLLYYAVTQDAMLIFENLSRGFGRQGKRTFMAERQYTRMEDWLTAKLAYEGLPSKTYLSKTLAQYTSKTCSNCGFTITSADYDRVLEKLKKTATGWMTTINGKELKVEGQITYYNRYKRQNVVKDLSVELDRLSEESVNNDISSWTKGRSGEALSLLKKRFSHRPVQEKFVCLNCGFETHADEQAALNIARSWLFLRSQEYKKYQTNKTSTGNTDKRAFVETWQSFYRKKLKEVWKPAV

SEQ ID NO: 40313 - protein, 980 aa, synthetic construct
  REGION 1..980: note = engineered CasX variant
QEIKRINKIRRRLVKDSNTKKAGKTGPMKTLLVRVMTPDLRERLENLRKKPENIPQPISNTSRANLNKLLTDYTEMKKAILHVYWEEFQKDPVGLMSRVAQPASKKIDQNKLKPEMDEKGNLTTAGFACSQCGQPLFVYKLEQVSEKGKAYTNYFGRCNVAEHEKLILLAQLKPEKDSDEAVTYSLGKFGQRALDFYSIHVTKESTHPVKPLAQIAGNRYASGPVGKALRDACMGTIASFLSKYQDIIIEHQKVVKGNQKRLESLRELAGKENLEYPSVTLPPQPHTKEGVDAYNEVIARVRMWVNLNLWQKLKLSRDDAKPLLRLKGFPSFPLVERQANEVDWWDMVCNVKKLINEKKEDGKVFWQNLAGYKRQEALRPYLSSEEDRKKGKKFARYQLGDLLLHLEKKHGEDWGKVYDEAWERIDKKVEGLSKHIKLEEERRSEDAQSKAALTDWLRAKASFVIEGLKEADKDEFCRCELKLQKWYGDLRGKPFAIEAENSILDISGFSKQYNCAFIWQKDGVKKLNLYLIINYFKGGKLRFKKIKPEAFEANRFYTVINKKSGEIVPMEVNFNFDDPNLIILPLAFGKRQGREFIWNDLLSLETGSLKLANGRVIEKTLYNRRTRQDEPALFVALTFERREVLDSSNIKPMSNLIGVDRGENIPAVIALTDPEGCPLSRFKDSLGNPTHILRIGESYKEKQRTIQAKKEVEQRRAGGYSRKYASKAKNLADDMVRNTARDLLYYAVTQDAMLIFENLSRGFGRQGKRTFMAERQYTRMEDWLTAKLAYEGLPSKTYLSKTLAQYTSKTCSNCGFTITSADYDRVLEKLKKTATGWMTTINGKELKVEGQITYYNRYKRQNVVKDLSVELDRLSEESVNNDISSWTKGRSGEALSLLKKRFSHRPVQEKFVCLNCGFETHADEQAALNIARSWLFLRSQEYKKYQTNKTTGKNTDKRAFVETWQSFYRKKLKEVWKPAV

SEQ ID NO: 40314 - protein, 979 aa, synthetic construct
  REGION 1..979: note = engineered CasX variant
QEIKRINKIRRRLVKDSNTKKAGKTGPMKTLLVRVMTPDLRERLENLRKKPENIPQPISNTSRANLNKLLTDYTEMKKAILHVYWEEFQKDPVGLMSRVAQPASKKIDQNKLKPEMDEKGNLTTAGFACSQCGQPLFVYKLEQVSEKGKAYTNYFGRCNVAEHEKLILLAQLKPEKDSDEAVTYSLGKFGQRALDFYSIHVTKESTHPVKPLAQIAGNRYASGPVGKALRDACMGTIASFLSKYQDIIIEHQKVVKGNQKRLESLRELAGKENLEYPSVTLPPQPHTKEGVDAYNEVIARVRMWVNLNLWQKLKLSRDDAKPLLRLKKFPSFPLVERQANEVDWWDMVCNVKKLINEKKEDGKVFWQNLAGYKRQEALRPYLSSEEDRKKGKKFARYQLGDLLLHLEKKHGEDWGKVYDEAWERIDKKVEGLSKHIKLEEERRSEDAQSKAALTDWLRAKASFVIEGLKEADKDEFCRCELKLQKWYGDLRGKPFAIEAENSILDISGFSKQYNCAFIWQKDGVKKLNLYLIINYFKGGKLRFKKIKPEAFEANRFYTVINKKSGEIVPMEVNFNFDDPNLIILPLAFGKRQGREFIWNDLLSLETGSLKLANGRVIEKTLYNRRTRQDEPALFVALTFERREVLDSSNIKPMSNLIGVDRGENIPAVIALTDPEGCPLSRFKDSLGNPTHILRIGESYKEKQRTIQAKKEVEQRRAGGYSRKYASKAKNLADDMVRNTARDLLYYAVTQDAMLIFENLSRGFGRQGKRTFMAERQYTRMEDWLTAKLAYEGLPSKTYLSKTLAQYTSKTCSNCGFTITSADYDRVLEKLKKTATGWMTTINGKELKVEGQITYYNRYKRQNVVKDLSVELDRLSEESVNNDISSWTKGRSGEALSLLKKRFSHRPVQEKFVCLNCGFETHADEQAALNIARSWLFLRSQEYKKYQTNKTTGNTDKRAFVETWQSFYRKKLKEVWKPAV

SEQ ID NO: 40315 - protein, 979 aa, synthetic construct
  REGION 1..979: note = engineered CasX variant
QEIKRINKIRRRLVKDSNTKKAGKTGPMKTLLVRVMTPDLRERLENLRKKPENIPQPISNTSRANLNKLLTDYTEMKKAILHVYWEEFQKDPVGLMSRVAQPASKKIDQNKLKPEMDEKGNLTTAGFACSQCGQPLFVYKLEQVSEKGKAYTNYFGRCNVAEHEKLILLAQLKPEKDSDEAVTYSLGKFGQRALDFYSIHVTKESTHPVKPLAQIAGNRYASGPVGKALRDACMGTIASFLSKYQDIIIEHQKVVKGNQKRLESLRELAGKENLEYPSVTLPPQPHTKEGVDAYNEVIARVRMWVNLNLWQKLKLSRDDAKPLLRLKGFPSFPLVERQANEVDWWDMVCNVKKLINEKKEDGKVFWQNLAGYKRQEALRPYLSSEEDRKKGKKFARYQLGDLLLHLEKKHGEDWGKVYDEAWERIDKKVEGLSKHIKLEEERRSEDAQSKAALTDWLRAKASFVIEGLKEADKDEFCRCELKLQKWYGDLRGKPFAIEAENSILDISGFSKQYNCAFIWQKDGVKKLNLYLIINYFKGGKLRFKKIKPEAFEANRFYTVINKKSGEIVPMEVNFNFDDPNLIILPLAFGKRQGREFIWNDLLSLETGSLKLANGRVIEKTLYNRRTRQDEPALFVALTFERREVLDSSNIKPMSNLIGVDRGENIPAVIALTDPEGCPLSRFKDSLGNPTHILRIGERYKEKQRTIQAKKEVEQRRAGGYSRKYASKAKNLADDMVRNTARDLLYYAVTQDAMLIFENLSRGFGRQGKRTFMAERQYTRMEDWLTAKLAYEGLPSKTYLSKTLAQYTSKTCSNCGFTITSADYDRVLEKLKKTATGWMTTINGKELKVEGQITYYNRYKRQNVVKDLSVELDRLSEESVNNDISSWTKGRSGEALSLLKKRFSHRPVQEKFVCLNCGFETHADEQAALNIARSWLFLRSQEYKKYQTNKTTGNTDKRAFVETWQSFYRKKLKEVWKPAV

SEQ ID NO: 40316 - protein, 979 aa, synthetic construct
  REGION 1..979: note = engineered CasX variant
QEIKRINKIRRRLVKDSNTKKAGKTGPMKTLLVRVMTPDLRERLENLRKKPENIPQPISNTSRANLNKLLTDYTEMKKAILHVYWEEFQKDPVGLMSRVAQPASKKIDQNKLKPEMDEKGNLTTAGFACSQCGQPLFVYKLEQVSEKGKAYTNYFGRCNVAEHEKLILLAQLKPEKDSDEAVTYSLGKFGQRALDFYSIHVTKESTHPVKPLAQIAGNRYASGPVGKALRDACMGTIASFLSKYQDIIIEHQKVVKGNQKRLESLRELAGKENLEYPSVTLPPQPHTKEGVDAYNEVIARVRMWVNLNLWQKLKLSRDDAKPLLRLKGFPSFPLVERQANEVDWWDMVCNVKKLINEKKEDGKVFWQNLAGYKRQEALRPYLSSEEDRKKGKKFARYQLGDLLLHLEKKHGEDWGKVYDEAWERIDKKVEGLSKHIKLEEERRSEDAQSKAALTDWLRAKASFVIEGLKEADKDEFCRCELKLQKWYGDLRGKPFAIEAENSILDISGFSKQYNCAFIWQKDGVKKLNLYLIINYFKGGKLRFKKIKPEAFEANRFYTVINKKSGEIVPMEVNFNFDDPNLIILPLAFGKRQGREFIWNDLLSLETGSLQLANGRVIEKTLYNRRTRQDEPALFVALTFERREVLDSSNIKPMSNLIGVDRGENIPAVIALTDPEGCPLSRFKDSLGNPTHILRIGESYKEKQRTIQAKKEVEQRRAGGYSRKYASKAKNLADDMVRNTARDLLYYAVTQDAMLIFENLSRGFGRQGKRTFMAERQYTRMEDWLTAKLAYEGLPSKTYLSKTLAQYTSKTCSNCGFTITSADYDRVLEKLKKTATGWMTTINGKELKVEGQITYYNRYKRQNVVKDLSVELDRLSEESVNNDISSWTKGRSGEALSLLKKRFSHRPVQEKFVCLNCGFETHADEQAALNIARSWLFLRSQEYKKYQTNKTTGNTDKRAFVETWQSFYRKKLKEVWKPAV

SEQ ID NO: 40317 - protein, 978 aa, synthetic construct
  REGION 1..978: note = engineered CasX variant
QEIKRINKIRRRLVKDSNTKKAGKTGPMKTLLVRVMTPDLRERLENLRKKPENIPQPISNTSRANLNKLLTDYTEMKKAILHVYWEEFQKDPVGLMSRVAQPASKKIDQNKLKPEMDEKGNLTTAGFACSQCGQPLFVYKLEQVSEKGKAYTNYFGRCNVAEHEKLILLAQLKPEKDSDEAVTYSLGKFGQRALDFYSIHVTKESTHPVKPLAQIAGNRYASGPVGKALRDACMGTIASFLSKYQDIIIEHQKVVKGNQKRLESLRELAGKENLEYPSVTLPPQPHTKEGVDAYNEVIARVRMWVNLNLWQKLKLSRDDAKPLLRLKGFPSFPLVERQANEVDWWDMVCNVKKLINEKKEDGKVFWQNLAGYKRQEALRPYLSSEEDRKKGKKFARYQLGDLLLHLEKKHGEDWGKVYDEAWERIDKKVEGLSKHIKLEEERRSEDAQSKAALTDWLRAKASFVIEGLKEADKDEFCRCELKLQKWYGDLRGKPFAIEAENSILDISGFSKQYNCAFIWQKDGVKKLNLYLIINYFKGGKLRFKKIKPEAFEANRFYTVINKKSGEIVPMEVNFNFDDPNLIILPLAFGKRQGREFIWNDLLSLETGSLKLANGRVIEKTLYNRRTRQDEPALFVALTFERREVLDSSNIKPMNLIGVDRGENIPAVIALTDPEGCPLSRFKDSLGNPTHILRIRESYKEKQRTIQAKKEVEQRRAGGYSRKYASKAKNLADDMVRNTARDLLYYAVTQDAMLIFENLSRGFGRQGKRTFSAERQYTRMEDWLTAKLAYEGLPSKTYLSKTLAQYTSKTCSNCGFTITSADYDRVLEKLKKTATGWMTTINGKELKVEGQITYYNRYKRQNVVKDLSVELDRLSEESVNNDISSWTKGRSGEALSLLKKRFSHRPVQEKFVCLNCGFETHADEQAALNIARSWLFLRSQEYKKYQTNKTTGNTDKRAFVETWQSFYRKKLKEVWKPAV

SEQ ID NO: 40318 - protein, 978 aa, synthetic construct
  REGION 1..978: note = engineered CasX variant
QEIKRINKIRRRLVKDSNTKKAGKTGPMKTLLVRVMTPDLRERLENLRKKPENIPQPISNTSRANLNKLLTDYTEMKKAILHVYWEEFQKDPVGLMSRVAQPASKKIDQNKLKPEMDEKGNLTTAGFACSQCGQPLFVYKLEQVSEKGKAYTNYFGRCNVAEHEKLILLAQLKPEKDSDEAVTYSLGKFGQRALDFYSIHVTKESTHPVKPLAQIAGNRYASGPVGKALRDACMGTIASFLSKYQDIIIEHQKVVKGNQKRLESLRELAGKENLEYPSVTLPPQPHTKEGVDAYNEVIARVRMWVNLNLWQKLKLSRDDAKPLLRLKGFPSFPLVERQANEVDWWDMVCNVKKLINEKKEDGKVFWQNLAGYKRQEALRPYLSSEEDRKKGKKFARYQLGDLLLHLEKKHGEDWGKVYDEAWERIDKKVEGLSKHIKLEEERRSEDAQSKAALTDWLRAKASFVIEGLKEADKDEFCRCELKLQKWYGDLRGKPFAIEAENSILDISGFSKQYNCAFIWQKDGVKKLNLYLIINYFKGGKLRFKKIKPEAFEANRFYTVINKKSGEIVPMEVNFNFDDPNLIILPLAFGKRQGREFIWNDLLSLETGSLKLANGRVIEKTLYNRRTRQDEPALFVALTFERREVLDSSNIKPMNLIGVDRGENIPAVIALTDPEGCPLSRFKDSLGNPTHILRIRESYKEKQRTIQAKKEVEQRRAGGYSRKYASKAKNLADDMVRNTARDLLYYAVTQDAMLIFENLSRGFGRQGKRTFMAERQYTRMEDWLTAKLAYEGLPSKTYLSKTLAQYTSKTCSNCGFTITSADYDRVLEKLKKTATGWMTTINGKELKVEGQITYYNRYKRQNVVKDLSVELDRLSEESVNNDISSWDKGRSGEALSLLKKRFSHRPVQEKFVCLNCGFETHADEQAALNIARSWLFLRSQEYKKYQTNKTTGNTDKRAFVETWQSFYRKKLKEVWKPAV

SEQ ID NO: 40319 - protein, 978 aa, synthetic construct
  REGION 1..978: note = engineered CasX variant
QEIKRINKIRRRLVKDSNTKKAGKTGPMKTLLVRVMTPDLRERLENLRKKPENIPQPISNTSRANLNKLLTDYTEMKKAILHVYWEEFQVDPVGLMSRVAQPASKKIDQNKLKPEMDEKGNLTTAGFACSQCGQPLFVYKLEQVSEKGKAYTNYFGRCNVAEHEKLILLAQLKPEKDSDEAVTYSLGKFGQRALDFYSIHVTKESTHPVKPLAQIAGNRYASGPVGKALRDACMGTIASFLSKYQDIIIEHQKVVKGNQKRLESLRELAGKENLEYPSVTLPPQPHTKEGVDAYNEVIARVRMWVNLNLWQKLKLSRDDAKPLLRLKGFPSFPLVERQANEVDWWDMVCNVKKLINEKKEDGKVFWQNLAGYKRQEALRPYLSSEEDRKKGKKFARYQLGDLLLHLEKKHGEDWGKVYDEAWERIDKKVEGLSKHIKLEEERRSEDAQSKAALTDWLRAKASFVIEGLKEADKDEFCRCELKLQKWYGDLRGKPFAIEAENSILDISGFSKQYNCAFIWQKDGVKKLNLYLIINYFKGGKLRFKKIKPEAFEANRFYTVINKKSGEIVPMEVNFNFDDPNLIILPLAFGKRQGREFIWNDLLSLETGSLKLANGRVIEKTLYNRRTRQDEPALFVALTFERREVLDSSNIKPMNLIGVDRGENIPAVIALTDPEGCPLSRFKDSLGNPTHILRIRESYKEKQRTIQAKKEVEQRRAGGYSRKYASKAKNLADDMVRNTARDLLYYAVTQDAMLIFENLSRGFGRQGKRTFMAERQYTRMEDWLTAKLAYEGLPSKTYLSKTLAQYTSKTCSNCGFTITSADYDRVLEKLKKTATGWMTTINGKELKVEGQITYYNRYKRQNVVKDLSVELDRLSEESVNNDISSWTKGRSGEALSLLKKRFSHRPVQEKFVCLNCGFETHADEQAALNIARSWLFLRSQEYKKYQTNKTTGNTDKRAFVETWQSFYRKKLKEVWKPAV

SEQ ID NO: 40320 - protein, 978 aa, synthetic construct
  REGION 1..978: note = engineered CasX variant
QEIKRLNKIRRRLVKDSNTKKAGKTGPMKTLLVRVMTPDLRERLENLRKKPENIPQPISNTSRANLNKLLTDYTEMKKAILHVYWEEFQKDPVGLMSRVAQPASKKIDQNKLKPEMDEKGNLTTAGFACSQCGQPLFVYKLEQVSEKGKAYTNYFGRCNVAEHEKLILLAQLKPEKDSDEAVTYSLGKFGQRALDFYSIHVTKESTHPVKPLAQIAGNRYASGPVGKALRDACMGTIASFLSKYQDIIIEHQKVVKGNQKRLESLRELAGKENLEYPSVTLPPQPHTKEGVDAYNEVIARVRMWVNLNLWQKLKLSRDDAKPLLRLKGFPSFPLVERQANEVDWWDMVCNVKKLINEKKEDGKVFWQNLAGYKRQEALRPYLSSEEDRKKGKKFARYQLGDLLLHLEKKHGEDWGKVYDEAWERIDKKVEGLSKHIKLEEERRSEDAQSKAALTDWLRAKASFVIEGLKEADKDEFCRCELKLQKWYGDLRGKPFAIEAENSILDISGFSKQYNCAFIWQKDGVKKLNLYLIINYFKGGKLRFKKIKPEAFEANRFYTVINKKSGEIVPMEVNFNFDDPNLIILPLAFGKRQGREFIWNDLLSLETGSLKLANGRVIEKTLYNRRTRQDEPALFVALTFERREVLDSSNIKPMNLIGVDRGENIPAVIALTDPEGCPLSRFKDSLGNPTHILRIRESYKEKQRTIQAKKEVEQRRAGGYSRKYASKAKNLADDMVRNTARDLLYYAVTQDAMLIFENLSRGFGRQGKRTFMAERQYTRMEDWLTAKLAYEGLPSKTYLSKTLAQYTSKTCSNCGFTITSADYDRVLEKLKKTATGWMTTINGKELKVEGQITYYNRYKRQNVVKDLSVELDRLSEESVNNDISSWTKGRSGEALSLLKKRFSHRPVQEKFVCLNCGFETHADEQAALNIARSWLFLRSQEYKKYQTNKTTGNTDKRAFVETWQSFYRKKLKEVWKPAV

SEQ ID NO: 40321 - protein, 978 aa, synthetic construct
  REGION 1..978: note = engineered CasX variant
QEIKRINKIRRRLVKDSNTKKAGKTGPMKTLLVRVMTPDLRERLENLRKKPENIPQPISNTSRANLNKLLTDYTEMKKAILHVYWEEFQKDPVGLMSRVAQPASKKIDQNKLKPEMDEKGNLTTAGFACSQCGQPLFVYKLEQVSEKGKAYTNYVGRCNVAEHEKLILLAQLKPEKDSDEAVTYSLGKFGQRALDFYSIHVTKESTHPVKPLAQIAGNRYASGPVGKALRDACMGTIASFLSKYQDIIIEHQKVVKGNQKRLESLRELAGKENLEYPSVTLPPQPHTKEGVDAYNEVIARVRMWVNLNLWQKLKLSRDDAKPLLRLKGFPSFPLVERQANEVDWWDMVCNVKKLINEKKEDGKVFWQNLAGYKRQEALRPYLSSEEDRKKGKKFARYQLGDLLLHLEKKHGEDWGKVYDEAWERIDKKVEGLSKHIKLEEERRSEDAQSKAALTDWLRAKASFVIEGLKEADKDEFCRCELKLQKWYGDLRGKPFAIEAENSILDISGFSKQYNCAFIWQKDGVKKLNLYLIINYFKGGKLRFKKIKPEAFEANRFYTVINKKSGEIVPMEVNFNFDDPNLIILPLAFGKRQGREFIWNDLLSLETGSLKLANGRVIEKTLYNRRTRQDEPALFVALTFERREVLDSSNIKPMNLIGVDRGENIPAVIALTDPEGCPLSRFKDSLGNPTHILRIRESYKEKQRTIQAKKEVEQRRAGGYSRKYASKAKNLADDMVRNTARDLLYYAVTQDAMLIFENLSRGFGRQGKRTFMAERQYTRMEDWLTAKLAYEGLPSKTYLSKTLAQYTSKTCSNCGFTITSADYDRVLEKLKKTATGWMTTINGKELKVEGQITYYNRYKRQNVVKDLSVELDRLSEESVNNDISSWTKGRSGEALSLLKKRFSHRPVQEKFVCLNCGFETHADEQAALNIARSWLFLRSQEYKKYQTNKTTGNTDKRAFVETWQSFYRKKLKEVWKPAV

SEQ ID NO: 40322 - protein, 978 aa, synthetic construct
  REGION 1..978: note = engineered CasX variant
QEIKRINKIRRRLVKDSNTKKAGKTGPMKTLLVRVMTPDLRERLENLRKKPENIPQPISNTSRANLNKLLTDYTEMKKAILHVYWEEFQKDPVGLMSRVAQPASKKIDQNKLKPEMDEKGNLTTAGFACSQCGQPLFVYKLEQVSEKGKAYTNYFGRCNVAEHEKLILLAQLKPEKDSDEAVTYSLGKFGQRALDFYSIHVTKESTHPVKPLAQIAGNRYASGPVGKALRDACMGTIASFLSKYQDIIIEHQKVVKGNQKRLESLRELAGKENLEYPSVTLPPQPHTKEGVDAYNEVIARVRMWVNLNLWQKLKLSRDDAKPLLRLKGFPSFPLVERQANEVDWWDMVCNVKKLINEKKEDGKVFWQNLAGYKRQEALRPYLSSEEDRKKGKKFARYQLGDLLLHLEKKHGEDWGKVYDEAWERIDKKVEGLSKHIKLEEERRSEDAQSKAALTDWLRAKASFVIEGLKEADKDEFCRCELKLQKWYGDLRGKPFAIEAENSILDISGFSKQYNCAFIWQKDGVKKLNLYLIINYFKGGKLRFKKIKPEAFEANRFYTVINKKSGEIVPMEVNFNFDDPNLIILPLAFGKRQGREFIWNDLLSLETGSLKLANGRVIEKTLYNRRTRQDEPALFVALTFERREVLDSSNIKPMNLIGVDRGENIPAVIALTDPEGCPLSRFKDSLGNPTHILRIRESYKEKQRTIQAKKEVEQRRAGGYSRKYASKAKNLADDMVRNTARDLLYYAVTQDAMLIFENLSRGFGRQGKRTFMAERQYTRMEDWLTAKLAYEGLASKTYLSKTLAQYTSKTCSNCGFTITSADYDRVLEKLKKTATGWMTTINGKELKVEGQITYYNRYKRQNVVKDLSVELDRLSEESVNNDISSWTKGRSGEALSLLKKRFSHRPVQEKFVCLNCGFETHADEQAALNIARSWLFLRSQEYKKYQTNKTTGNTDKRAFVETWQSFYRKKLKEVWKPAV

SEQ ID NO: 40323 - protein, 978 aa, synthetic construct
  REGION 1..978: note = engineered CasX variant
QEIKRINKIRRRLVKDSNTKKAGKTGPMKTLLVRVMTPDLRERLENLRKKPENIPQPISNTSRANLNKLLTDYTEMKKAILHVYWEEFQKDPVGLMSRVAQPASKKIDQNKLKPEMDEKGNLTTAGFACSQCGQPLFVYKLEQVSEKGKAYTNYFGRCNVAEHEKLILLAQLKPEKDSDEAVTYSLGKFGQRALDFYSIHVTKESTHPVKPLAQIAGNRYASGPVGKALRDACMGTIASFLSKYQDIIIEHQKVVKGNQKRLESLRELAGKENLEYPSVTLPPQPHTKEGVDAYNEVIARVRMWVNLNLWQKLKLSRDDAKPLLRLKGFPSFPLVERQANEVDWWDMVCNVKKLINEKKEDGKVFWQNLAGYKRQEALRPYLSSEEDRKKGKKFARYQLGDLLLHLEKKHGEDWGKVYDEAWERIDKKVEGLSKHIKLEEERRSEDAQSKAALTDWLRAKASFVIEGLKEADKDEFCRCELKLQKWYGDLRGKPFAIEAENSILDISGFSKQYNCAFIWQKDGVKKLNLYLIINYFKGGKLRFKKIKPEAFEANRFYTVINKKSGEIVPMEVNFNFDDPNLIILPLAFGKRQGREFIWNDLLSLETGSLKLANGRVIEKTLYNRRTRQDEPALFVALTFERREVLDSSNIKPMNLIGVDRGENIPAVIALTDPEGCPLSRFKDSLGNPTHILRIRESYKEKQRTIQAKKEVEQRRAGGYSRKYASKAKNLADDMVRNTARDLLYYAVTQDAMLIFENLSRGFGRQGKRTFMAERQYTRMEDWLTAKLAYEGLPSKVYLSKTLAQYTSKTCSNCGFTITSADYDRVLEKLKKTATGWMTTINGKELKVEGQITYYNRYKRQNVVKDLSVELDRLSEESVNNDISSWTKGRSGEALSLLKKRFSHRPVQEKFVCLNCGFETHADEQAALNIARSWLFLRSQEYKKYQTNKTTGNTDKRAFVETWQSFYRKKLKEVWKPAV

SEQ ID NO: 40324 - protein, 979 aa, synthetic construct
  REGION 1..979: note = engineered CasX variant
QEIKRINKIRRRLVKDSNTKKAGKTGPMKTLLVRVMTPDLRERLENLRKKPENIPQPISNTSRANLNKLLTDYTEMKKAILHVYWEEFQKDPVGLMSRVAQPASKKIDQNKLKPEMDEKGNLTTAGFACSQCGQPLFVYKLEQVSEKGKAYTNYFGRCNVAEHEKLILLAQLKPEKDSDEAVTYSLGKFGQRALDFYSIHVTKESTHPVKPLAQIAGNRYASGPVGKALRDACMGTIASFLSKYQDIIIEHQKVVKGNQKRLESLRELAGKENLEYPSVTLPPQPHTKEGVDAYNEVIARVRMWVNLNLWQKLKLSRDDAKPLLRLKGFPSFPLVERQANEVDWWDMVCNVKKLINEKKEDGKVFWQNLAGYKRQEALRPYLSSEEDRKKGKKFARYQLGDLLLHLEKKHGEDWGKVYDEAWERIDKKVEGLSKHIKLEEERRSEDAQSKAALTDWLRAKASFVIEGLKEADKDEFCRCELKLQKWYGDLRGKPFAIEAENSILDISGFSKQYNCAFIWQKDGVKKLNLYLIINYFKGGKLRFKKIKPEAFEANRFYTVINKKSGEIVPMEVNFNFDDPNLIILPLAFGKRQGREFIWNDLLSLETGSLKLANGRVIEKTLYNRRTRQDEPALFVALTFERREVLDSSNIKPMNLIGVDRGENIPAVIALTDPEGCPLSRFKDSLGNPTHILRIRESYKEKQRTIQAKKEVEQRRAGGYSRKYASKAKNLADDMVRNTARDLLYYAVTQDAMLIFENLSRGFGRQGKRTFMAERQYTRMEDWLTAKLAYEGPLPSKTYLSKTLAQYTSKTCSNCGFTITSADYDRVLEKLKKTATGWMTTINGKELKVEGQITYYNRYKRQNVVKDLSVELDRLSEESVNNDISSWTKGRSGEALSLLKKRFSHRPVQEKFVCLNCGFETHADEQAALNIARSWLFLRSQEYKKYQTNKTTGNTDKRAFVETWQSFYRKKLKEVWKPAV

SEQ ID NO: 40325 - protein, 979 aa, synthetic construct
  REGION 1..979: note = engineered CasX variant
QEIKRINKIRRRLVKDSNTKKAGKTGPMKTLLVRVMTPDLRERLENLRKKPENIPQPISNTSRANLNKLLTDYTEMKKAILHVYWEEFQKDPVGLMSRVAQPASKKIDQNKLKPEMDEKGNLTTAGFACSQCGQPLFVYKLEQVSEKGKAYTNYFGRCNVAEHEKLILLAQLKPEKDSDEAVTYSLGKFGQRALDFYSIHVTKESTHPVKPLAQIAGNRYASGPVGKALRDACMGTIASFLSKYQDIIIEHQKVVKGNQKRLESLRELAGKENLEYPSVTLPPQPHTKEGVDAYNEVIARVRMWVNLNLWQKLKLSRDDAKPLLRLKGFPSFPLVERQANEVDWWDMVCNVKKLINEKKEDGKVFWQNLAGYKRQEALRPYLSSEEDVRKKGKKFARYQLGDLLLHLEKKHGEDWGKVYDEAWERIDKKVEGLSKHIKLEEERRSEDAQSKAALTDWLRAKASFVIEGLKEADKDEFCRCELKLQKWYGDLRGKPFAIEAENSILDISGFSKQYNCAFIWQKDGVKKLNLYLIINYFKGGKLRFKKIKPEAFEANRFYTVINKKSGEIVPMEVNFNFDDPNLIILPLAFGKRQGREFIWNDLLSLETGSLKLANGRVIEKTLYNRRTRQDEPALFVALTFERREVLDSSNIKPMNLIGVDRGENIPAVIALTDPEGCPLSRFKDSLGNPTHILRIRESYKEKQRTIQAKKEVEQRRAGGYSRKYASKAKNLADDMVRNTARDLLYYAVTQDAMLIFENLSRGFGRQGKRTFMAERQYTRMEDWLTAKLAYEGLPSKTYLSKTLAQYTSKTCSNCGFTITSADYDRVLEKLKKTATGWMTTINGKELKVEGQITYYNRYKRQNVVKDLSVELDRLSEESVNNDISSWTKGRSGEALSLLKKRFSHRPVQEKFVCLNCGFETHADEQAALNIARSWLFLRSQEYKKYQTNKTTGNTDKRAFVETWQSFYRKKLKEVWKPAV

SEQ ID NO: 40326 - protein, 978 aa, synthetic construct
  REGION 1..978: note = engineered CasX variant
QEIKRINKIRRRLVKDSNTKKAGKTGPMKTLLVRVMTPDLRERLENLRKKPENIPQPISNTSRANLNKLLTDYTEMKKAILHVYWEEFQKDPVGLMSRVAQPASKKIDQNKLKPEMDEKGNLTTAGFACSQCGQPLFVYKLEQVSEKGKAYTNYFGRCNVAEHEKLILLAQLKPEKDSDEAVTYSLGKFGQRALDFYSIHVTKESTHPVKPLAQIAGNRYASGPVGKALRDACMGTIASFLSKYQDIIIEHQKVVKGNQKRLESLRELAGKENLEYPSVTLPPQPHTKEGVDAYNEVIARVRMWVNLNLWQKLKLSRDDAKPLLRLKGFPSFPLVERQANEVDWWDMVCNVKKLINEKKEDGKVFWQNLAGYKRQEALRPYLSSEEDRKKGKKFARYQLGDLLLHLEKKHGEDWGKVYDEAWERIDKKVEGLSKHIKLEEERRSEDAQSKAALTDWLRAKASFVIEGLKEADKDEFCRCELKLQKWYGDLRGKPFAIEAENSILDISGFSKQYNCAFIWQKDGVKKLNLYLIINYFKGGKLRFKKIKPEAFEANRFYTVINKKSGEIVPMEVNFNFDDPNLIILPLAFGKRQGREFIWNDLLSLETGSLKLANGRVIEKTLYNRRTRQDEPALFVALTFERREVLDSSNIKPMNLIGVDRGENIPAVIALTDPEGCPLSRFKDSLGNPTHILRIRESYKEKQRTIQAKKEVEQRRAGGYSRKYASKAKNLADDMVRNTARDLLYYAVTQDAMLIFENLSRGFGRQGKRTFMAERQYTRMEDWLTAKLAYEGLPSKTYLSKTLAQYTSKTCSNCGFTITSADYDRMLEKLKKTATGWMTTINGKELKVEGQITYYNRYKRQNVVKDLSVELDRLSEESVNNDISSWTKGRSGEALSLLKKRFSHRPVQEKFVCLNCGFETHADEQAALNIARSWLFLRSQEYKKYQTNKTTGNTDKRAFVETWQSFYRKKLKEVWKPAV

SEQ ID NO: 40327 - protein, 978 aa, synthetic construct
  REGION 1..978: note = engineered CasX variant
QEIKRINKIRRRLVKDSNTKKAGKTGPMKTLLVRVMTPDLRERLENLRKKPENIPQPISNTSRANLNKLLTDYTEMKKAILHVYWEEFQKDPVGLMSRVAQPASKKIDQNKLKPEMDEKGNLTTAGFACSQCGQPLFVYKLEQVSEKGKAYTNYFGRCNVAEHEKLILLAQLKPEKDSDEAVTYSLGKFGQRALDFYSIHVTKESTHPVKPLAQIAGNRYASGPVGKALRDACMGTIASFLSKYQDIIIEHQKVVKGNQKRLESLRELAGKENLEYPSVTLPPQPHTKEGVDAYNEVIARVRMWVNLNLWQKLKLSRDDAKPLLRLKGFPSFPLVERQANEVDWWDMVCNVKKLINEKKEDGKVFWQNLAGYKRQEALRPYLSSEEDRKKGKKFARYQLGDLLLHLEKKHGEDWGKVYDEAWERIDKKVEGLSKHIKLEEERRSEDAQSKAALTDWLRAKASFVIEGLKEADKDEFCRCELKLQKWYGDLRGKPFAIEAENSILDISGFSKQYNCAFIWQKDGVKKLNLYLIINYFKGGKLRFKKIKPEAFEANRFYTVINKKSGEIVPMEVNFNFDDPNLIILPLAFGKRQGREFIWNDLLSLETGSLKLANGRVIEKTLYNRRTRQDEPALFVALTFERREVLDSSNIKPMNLIGVDRGENIPAVIALTDPEGCPLSRFKDSLGNPTHILRIRESYKEKQRTIQAKKEVEQRRAGGYSRKYASKAKNLADDMVRNTARDLLYYAVTQDAMLIFENLSRGFGRQGKRTFMAERQYTRMEDWLTAKLAYEGLPSKTYLSKTLAQYTSKTCSNCGFTITSADYDRVLEKLKKTATGWMTTINGKELKVEGQITYYNRYKRQNVVKDLSVELDRLSEESVNNDISSWTKGRQGEALSLLKKRFSHRPVQEKFVCLNCGFETHADEQAALNIARSWLFLRSQEYKKYQTNKTTGNTDKRAFVETWQSFYRKKLKEVWKPAV

SEQ ID NO: 40328 - protein, 978 aa, synthetic construct
  REGION 1..978: note = engineered CasX variant
QEIKRINKIRRRLVKDSNTKKAGKTGPMKTLLVRVMTPDLRERLENLRKKPENIPQPISNTSRANLNKLLTDYTEMKKAILHVYWEEFQKDPVGLMSRVAQPASKKIDQNKLKPEMDEKGNLTTAGFACSQCGQPLFVYKLEQVSEKGKAYTNYFGRCNVAEHEKLILLAQLKPEKDSDEAVTYSLGKFGQRALDFYSIHVTKESTHPVKPLAQIAGNRYASGPVGKALRDACMGTIASFLSKYQDIIIEHQKVVKGNQKRLESLRELAGKENLEYPSVTLPPQPHTKEGVDAYNEVIARVRMWVNLNLWQKLKLSRDDAKPLLRLKGFPSFPLVERQANEVDWWDMVCNVKKLINEKKEDGKVFWQNLAGYKRQEALRPYLSSEEDRKKGKKFARYQLGDLLLHLEKKHGEDWGKVYDEAWERIDKKVEGLSKHIKLEEERRSEDAQSKAALTDWLRAKASFVIEGLKEADKDEFCRCELKLQKWYGDLRGKPFAIEAENSILDISGFSKQYNCAFIWQKDGVKKLNLYLIINYFKGGKLRFKKIKPEAFEANRFYTVINKKSGEIVPMEVNFNFDDPNLIILPLAFGKRQGREFIWNDLLSLETGSLKLANGRVIEKTLYNRRTRQDEPALFVALTFERREVLDSSNIKPMNLIGVDRGENIPAVIALTDPEGCPLSRFKDSLGNPTHILRIRESYKEKQRTIQAKKEVEQRRAGGYSRKYASKAKNLADDMVRNTARDLLYYAVTQDAMLIFENLSRGFGRQGKRTFMAERQYTRMEDWLTAKLAYEGLPSKTYLSKTLAQYTSKTCSNCGFTITSADYDRVLEKLKKTATGWMTTINGKELKVEGQITYYNRYKRQNVVKDLSVELDRLSEESVNNDISSWTKGRSGEALSLLKKRFSHRPVQEKFVCLNCEFETHADEQAALNIARSWLFLRSQEYKKYQTNKTTGNTDKRAFVETWQSFYRKKLKEVWKPAV

SEQ ID NO: 40329 - protein, 979 aa, synthetic construct
  REGION 1..979: note = engineered CasX variant
QEIKRINKIRRRLVKDSNTKKAGKTGPMKTLLVRVMTPDLRERLENLRKKPENIPQPISNTSRANLNKLLTDYTEMKKAILHVYWEEFQKDPVGLMSRVAQPASKKIDQNKLKPEMDEKGNLTTAGFACSQCGQPLFVYKLEQVSEKGKAYTNYFGRCNVAEHEKLILLAQLKPEKDSDEAVTYSLGKFGQRALDFYSIHVTKESTHPVKPLAQIAGNRYASGPVGKALRDACMGTIASFLSKYQDIIIEHQKVVKGNQKRLESLRELAGKENLEYPSVTLPPQPHTKEGVDAYNEVIARVRMWVNLNLWQKLKLSRDDAKPLLRLKGFPSFPLVERQANEVDWWDMVCNVKKLINEKKEDGKVFWQNLAGYKRQEALRPYLSSEEDRKKGKKFARYQLGDLLLHLEKKHGEDWGKVYDEAWERIDKKVEGLSKHIKLEEERRSEDAQSKAALTDWLRAKASFVIEGLKEADKDEFCRCELKLQKWYGDLRGKPFAIEAENSILDISGFSKQYNCAFIWQKDGVKKLNLYLIINYFKGGKLRFKKIKPEAFEANRFYTVINKKSGEIVPMEVNFNFDDPNLIILPLAFGKRQGREFIWNDLLSLETGSLKLANGRVIEKTLYNRRTRQDEPALFVALTFERREVLDSSNIKPMNLIGVDRGENIPAVIALTDPEGCPLSRFKDSLGNPTHILRIRESYKEKQRTIQAKKEVEQRRAGGYSRKYASKAKNLADDMVRNTARDLLYYAVTQDAMLIFENLSRGFGRQGKRTFMAERQYTRMEDWLTAKLAYEGLPSKTYLSKTLAQYTSKTCSNCGFTITSADYDRVLEKLKKTATGWMTTINGKELKVEGQITYYNRYKRQNVVKDLSVELDRLSEESVNNDISSWTKGRSGEALSLLKKRFSHRPVQEKFVCLNCGFETHADEQAALNIARSWLFLRSQEYKKYQTNKTSTGNTDKRAFVETWQSFYRKKLKEVWKPAV

SEQ ID NO: 40330 - protein, 979 aa, synthetic construct
  REGION 1..979: note = engineered CasX variant
QEIKRINKIRRRLVKDSNTKKAGKTGPMKTLLVRVMTPDLRERLENLRKKPENIPQPISNTSRANLNKLLTDYTEMKKAILHVYWEEFQKDPVGLMSRVAQPASKKIDQNKLKPEMDEKGNLTTAGFACSQCGQPLFVYKLEQVSEKGKAYTNYFGRCNVAEHEKLILLAQLKPEKDSDEAVTYSLGKFGQRALDFYSIHVTKESTHPVKPLAQIAGNRYASGPVGKALRDACMGTIASFLSKYQDIIIEHQKVVKGNQKRLESLRELAGKENLEYPSVTLPPQPHTKEGVDAYNEVIARVRMWVNLNLWQKLKLSRDDAKPLLRLKGFPSFPLVERQANEVDWWDMVCNVKKLINEKKEDGKVFWQNLAGYKRQEALRPYLSSEEDRKKGKKFARYQLGDLLLHLEKKHGEDWGKVYDEAWERIDKKVEGLSKHIKLEEERRSEDAQSKAALTDWLRAKASFVIEGLKEADKDEFCRCELKLQKWYGDLRGKPFAIEAENSILDISGFSKQYNCAFIWQKDGVKKLNLYLIINYFKGGKLRFKKIKPEAFEANRFYTVINKKSGEIVPMEVNFNFDDPNLIILPLAFGKRQGREFIWNDLLSLETGSLKLANGRVIEKTLYNRRTRQDEPALFVALTFERREVLDSSNIKPMNLIGVDRGENIPAVIALTDPEGCPLSRFKDSLGNPTHILRIRESYKEKQRTIQAKKEVEQRRAGGYSRKYASKAKNLADDMVRNTARDLLYYAVTQDAMLIFENLSRGFGRQGKRTFMAERQYTRMEDWLTAKLAYEGLPSKTYLSKTLAQYTSKTCSNCGFTITSADYDRVLEKLKKTATGWMTTINGKELKVEGQITYYNRYKRQNVVKDLSVELDRLSEESVNNDISSWTKGRSGEALSLLKKRFSHRPVQEKFVCLNCGFETHADEQAALNIARSWLFLRSQEYKKYQTNKTTGKNTDKRAFVETWQSFYRKKLKEVWKPAV

SEQ ID NO: 40331 - protein, 978 aa, synthetic construct
  REGION 1..978: note = engineered CasX variant
QEIKRINKIRRRLVKDSNTKKAGKTGPMKTLLVRVMTPDLRERLENLRKKPENIPQPISNTSRANLNKLLTDYTEMKKAILHVYWEEFQKDPVGLMSRVAQPASKKIDQNKLKPEMDEKGNLTTAGFACSQCGQPLFVYKLEQVSEKGKAYTNYFGRCNVAEHEKLILLAQLKPEKDSDEAVTYSLGKFGQRALDFYSIHVTKESTHPVKPLAQIAGNRYASGPVGKALRDACMGTIASFLSKYQDIIIEHQKVVKGNQKRLESLRELAGKENLEYPSVTLPPQPHTKEGVDAYNEVIARVRMWVNLNLWQKLKLSRDDAKPLLRLKKFPSFPLVERQANEVDWWDMVCNVKKLINEKKEDGKVFWQNLAGYKRQEALRPYLSSEEDRKKGKKFARYQLGDLLLHLEKKHGEDWGKVYDEAWERIDKKVEGLSKHIKLEEERRSEDAQSKAALTDWLRAKASFVIEGLKEADKDEFCRCELKLQKWYGDLRGKPFAIEAENSILDISGFSKQYNCAFIWQKDGVKKLNLYLIINYFKGGKLRFKKIKPEAFEANRFYTVINKKSGEIVPMEVNFNFDDPNLIILPLAFGKRQGREFIWNDLLSLETGSLKLANGRVIEKTLYNRRTRQDEPALFVALTFERREVLDSSNIKPMNLIGVDRGENIPAVIALTDPEGCPLSRFKDSLGNPTHILRIRESYKEKQRTIQAKKEVEQRRAGGYSRKYASKAKNLADDMVRNTARDLLYYAVTQDAMLIFENLSRGFGRQGKRTFMAERQYTRMEDWLTAKLAYEGLPSKTYLSKTLAQYTSKTCSNCGFTITSADYDRVLEKLKKTATGWMTTINGKELKVEGQITYYNRYKRQNVVKDLSVELDRLSEESVNNDISSWTKGRSGEALSLLKKRFSHRPVQEKFVCLNCGFETHADEQAALNIARSWLFLRSQEYKKYQTNKTTGNTDKRAFVETWQSFYRKKLKEVWKPAV

SEQ ID NO: 40332 - protein, 978 aa, synthetic construct
  REGION 1..978: note = engineered CasX variant
QEIKRINKIRRRLVKDSNTKKAGKTGPMKTLLVRVMTPDLRERLENLRKKPENIPQPISNTSRANLNKLLTDYTEMKKAILHVYWEEFQKDPVGLMSRVAQPASKKIDQNKLKPEMDEKGNLTTAGFACSQCGQPLFVYKLEQVSEKGKAYTNYFGRCNVAEHEKLILLAQLKPEKDSDEAVTYSLGKFGQRALDFYSIHVTKESTHPVKPLAQIAGNRYASGPVGKALRDACMGTIASFLSKYQDIIIEHQKVVKGNQKRLESLRELAGKENLEYPSVTLPPQPHTKEGVDAYNEVIARVRMWVNLNLWQKLKLSRDDAKPLLRLKGFPSFPLVERQANEVDWWDMVCNVKKLINEKKEDGKVFWQNLAGYKRQEALRPYLSSEEDRKKGKKFARYQLGDLLLHLEKKHGEDWGKVYDEAWERIDKKVEGLSKHIKLEEERRSEDAQSKAALTDWLRAKASFVIEGLKEADKDEFCRCELKLQKWYGDLRGKPFAIEAENSILDISGFSKQYNCAFIWQKDGVKKLNLYLIINYFKGGKLRFKKIKPEAFEANRFYTVINKKSGEIVPMEVNFNFDDPNLIILPLAFGKRQGREFIWNDLLSLETGSLKLANGRVIEKTLYNRRTRQDEPALFVALTFERREVLDSSNIKPMNLIGVDRGENIPAVIALTDPEGCPLSRFKDSLGNPTHILRIRERYKEKQRTIQAKKEVEQRRAGGYSRKYASKAKNLADDMVRNTARDLLYYAVTQDAMLIFENLSRGFGRQGKRTFMAERQYTRMEDWLTAKLAYEGLPSKTYLSKTLAQYTSKTCSNCGFTITSADYDRVLEKLKKTATGWMTTINGKELKVEGQITYYNRYKRQNVVKDLSVELDRLSEESVNNDISSWTKGRSGEALSLLKKRFSHRPVQEKFVCLNCGFETHADEQAALNIARSWLFLRSQEYKKYQTNKTTGNTDKRAFVETWQSFYRKKLKEVWKPAV

SEQ ID NO: 40333 - protein, 978 aa, synthetic construct
  REGION 1..978: note = engineered CasX variant
QEIKRINKIRRRLVKDSNTKKAGKTGPMKTLLVRVMTPDLRERLENLRKKPENIPQPISNTSRANLNKLLTDYTEMKKAILHVYWEEFQKDPVGLMSRVAQPASKKIDQNKLKPEMDEKGNLTTAGFACSQCGQPLFVYKLEQVSEKGKAYTNYFGRCNVAEHEKLILLAQLKPEKDSDEAVTYSLGKFGQRALDFYSIHVTKESTHPVKPLAQIAGNRYASGPVGKALRDACMGTIASFLSKYQDIIIEHQKVVKGNQKRLESLRELAGKENLEYPSVTLPPQPHTKEGVDAYNEVIARVRMWVNLNLWQKLKLSRDDAKPLLRLKGFPSFPLVERQANEVDWWDMVCNVKKLINEKKEDGKVFWQNLAGYKRQEALRPYLSSEEDRKKGKKFARYQLGDLLLHLEKKHGEDWGKVYDEAWERIDKKVEGLSKHIKLEEERRSEDAQSKAALTDWLRAKASFVIEGLKEADKDEFCRCELKLQKWYGDLRGKPFAIEAENSILDISGFSKQYNCAFIWQKDGVKKLNLYLIINYFKGGKLRFKKIKPEAFEANRFYTVINKKSGEIVPMEVNFNFDDPNLIILPLAFGKRQGREFIWNDLLSLETGSLQLANGRVIEKTLYNRRTRQDEPALFVALTFERREVLDSSNIKPMNLIGVDRGENIPAVIALTDPEGCPLSRFKDSLGNPTHILRIRESYKEKQRTIQAKKEVEQRRAGGYSRKYASKAKNLADDMVRNTARDLLYYAVTQDAMLIFENLSRGFGRQGKRTFMAERQYTRMEDWLTAKLAYEGLPSKTYLSKTLAQYTSKTCSNCGFTITSADYDRVLEKLKKTATGWMTTINGKELKVEGQITYYNRYKRQNVVKDLSVELDRLSEESVNNDISSWTKGRSGEALSLLKKRFSHRPVQEKFVCLNCGFETHADEQAALNIARSWLFLRSQEYKKYQTNKTTGNTDKRAFVETWQSFYRKKLKEVWKPAV

SEQ ID NO: 40334 - protein, 978 aa, synthetic construct
  REGION 1..978: note = engineered CasX variant
QEIKRINKIRRRLVKDSNTKKAGKTGPMKTLLVRVMTPDLRERLENLRKKPENIPQPISNTSRANLNKLLTDYTEMKKAILHVYWEEFQKDPVGLMSRVAQPASKKIDQNKLKPEMDEKGNLTTAGFACSQCGQPLFVYKLEQVSEKGKAYTNYFGRCNVAEHEKLILLAQLKPEKDSDEAVTYSLGKFGQRALDFYSIHVTKESTHPVKPLAQIAGNRYASGPVGKALRDACMGTIASFLSKYQDIIIEHQKVVKGNQKRLESLRELAGKENLEYPSVTLPPQPHTKEGVDAYNEVIARVRMWVNLNLWQKLKLSRDDAKPLLRLKGFPSFPLVERQANEVDWWDMVCNVKKLINEKKEDGKVFWQNLAGYKRQEALRPYLSSEEDRKKGKKFARYQLGDLLLHLEKKHGEDWGKVYDEAWERIDKKVEGLSKHIKLEEERRSEDAQSKAALTDWLRAKASFVIEGLKEADKDEFCRCELKLQKWYGDLRGKPFAIEAENSILDISGFSKQYNCAFIWQKDGVKKLNLYLIINYFKGGKLRFKKIKPEAFEANRFYTVINKKSGEIVPMEVNFNFDDPNLIILPLAFGKRQGREFIWNDLLSLETGSLKLANGRVIEKTLYNRRTRQDEPALFVALTFERREVLDSSNIKPMNLIGVDRGENIPAVIALTDPEGCPLSRFKDSLGNPTHILRIGESYKEKQRTIQAKKEVEQRRAGGYSRKYASKAKNLADDMVRNTARDLLYYAVTQDAMLIFENLSRGFGRQGKRTFSAERQYTRMEDWLTAKLAYEGLPSKTYLSKTLAQYTSKTCSNCGFTITSADYDRVLEKLKKTATGWMTTINGKELKVEGQITYYNRYKRQNVVKDLSVELDRLSEESVNNDISSWDKGRSGEALSLLKKRFSHRPVQEKFVCLNCGFETHADEQAALNIARSWLFLRSQEYKKYQTNKTTGNTDKRAFVETWQSFYRKKLKEVWKPAV

SEQ ID NO: 40335 - protein, 978 aa, synthetic construct
  REGION 1..978: note = engineered CasX variant
QEIKRINKIRRRLVKDSNTKKAGKTGPMKTLLVRVMTPDLRERLENLRKKPENIPQPISNTSRANLNKLLTDYTEMKKAILHVYWEEFQVDPVGLMSRVAQPASKKIDQNKLKPEMDEKGNLTTAGFACSQCGQPLFVYKLEQVSEKGKAYTNYFGRCNVAEHEKLILLAQLKPEKDSDEAVTYSLGKFGQRALDFYSIHVTKESTHPVKPLAQIAGNRYASGPVGKALRDACMGTIASFLSKYQDIIIEHQKVVKGNQKRLESLRELAGKENLEYPSVTLPPQPHTKEGVDAYNEVIARVRMWVNLNLWQKLKLSRDDAKPLLRLKGFPSFPLVERQANEVDWWDMVCNVKKLINEKKEDGKVFWQNLAGYKRQEALRPYLSSEEDRKKGKKFARYQLGDLLLHLEKKHGEDWGKVYDEAWERIDKKVEGLSKHIKLEEERRSEDAQSKAALTDWLRAKASFVIEGLKEADKDEFCRCELKLQKWYGDLRGKPFAIEAENSILDISGFSKQYNCAFIWQKDGVKKLNLYLIINYFKGGKLRFKKIKPEAFEANRFYTVINKKSGEIVPMEVNFNFDDPNLIILPLAFGKRQGREFIWNDLLSLETGSLKLANGRVIEKTLYNRRTRQDEPALFVALTFERREVLDSSNIKPMNLIGVDRGENIPAVIALTDPEGCPLSRFKDSLGNPTHILRIGESYKEKQRTIQAKKEVEQRRAGGYSRKYASKAKNLADDMVRNTARDLLYYAVTQDAMLIFENLSRGFGRQGKRTFSAERQYTRMEDWLTAKLAYEGLPSKTYLSKTLAQYTSKTCSNCGFTITSADYDRVLEKLKKTATGWMTTINGKELKVEGQITYYNRYKRQNVVKDLSVELDRLSEESVNNDISSWTKGRSGEALSLLKKRFSHRPVQEKFVCLNCGFETHADEQAALNIARSWLFLRSQEYKKYQTNKTTGNTDKRAFVETWQSFYRKKLKEVWKPAV

SEQ ID NO: 40336 - protein, 978 aa, synthetic construct
  REGION 1..978: note = engineered CasX variant
QEIKRLNKIRRRLVKDSNTKKAGKTGPMKTLLVRVMTPDLRERLENLRKKPENIPQPISNTSRANLNKLLTDYTEMKKAILHVYWEEFQKDPVGLMSRVAQPASKKIDQNKLKPEMDEKGNLTTAGFACSQCGQPLFVYKLEQVSEKGKAYTNYFGRCNVAEHEKLILLAQLKPEKDSDEAVTYSLGKFGQRALDFYSIHVTKESTHPVKPLAQIAGNRYASGPVGKALRDACMGTIASFLSKYQDIIIEHQKVVKGNQKRLESLRELAGKENLEYPSVTLPPQPHTKEGVDAYNEVIARVRMWVNLNLWQKLKLSRDDAKPLLRLKGFPSFPLVERQANEVDWWDMVCNVKKLINEKKEDGKVFWQNLAGYKRQEALRPYLSSEEDRKKGKKFARYQLGDLLLHLEKKHGEDWGKVYDEAWERIDKKVEGLSKHIKLEEERRSEDAQSKAALTDWLRAKASFVIEGLKEADKDEFCRCELKLQKWYGDLRGKPFAIEAENSILDISGFSKQYNCAFIWQKDGVKKLNLYLIINYFKGGKLRFKKIKPEAFEANRFYTVINKKSGEIVPMEVNFNFDDPNLIILPLAFGKRQGREFIWNDLLSLETGSLKLANGRVIEKTLYNRRTRQDEPALFVALTFERREVLDSSNIKPMNLIGVDRGENIPAVIALTDPEGCPLSRFKDSLGNPTHILRIGESYKEKQRTIQAKKEVEQRRAGGYSRKYASKAKNLADDMVRNTARDLLYYAVTQDAMLIFENLSRGFGRQGKRTFSAERQYTRMEDWLTAKLAYEGLPSKTYLSKTLAQYTSKTCSNCGFTITSADYDRVLEKLKKTATGWMTTINGKELKVEGQITYYNRYKRQNVVKDLSVELDRLSEESVNNDISSWTKGRSGEALSLLKKRFSHRPVQEKFVCLNCGFETHADEQAALNIARSWLFLRSQEYKKYQTNKTTGNTDKRAFVETWQSFYRKKLKEVWKPAV

SEQ ID NO: 40337 - protein, 978 aa, synthetic construct
  REGION 1..978: note = engineered CasX variant
QEIKRINKIRRRLVKDSNTKKAGKTGPMKTLLVRVMTPDLRERLENLRKKPENIPQPISNTSRANLNKLLTDYTEMKKAILHVYWEEFQKDPVGLMSRVAQPASKKIDQNKLKPEMDEKGNLTTAGFACSQCGQPLFVYKLEQVSEKGKAYTNYVGRCNVAEHEKLILLAQLKPEKDSDEAVTYSLGKFGQRALDFYSIHVTKESTHPVKPLAQIAGNRYASGPVGKALRDACMGTIASFLSKYQDIIIEHQKVVKGNQKRLESLRELAGKENLEYPSVTLPPQPHTKEGVDAYNEVIARVRMWVNLNLWQKLKLSRDDAKPLLRLKGFPSFPLVERQANEVDWWDMVCNVKKLINEKKEDGKVFWQNLAGYKRQEALRPYLSSEEDRKKGKKFARYQLGDLLLHLEKKHGEDWGKVYDEAWERIDKKVEGLSKHIKLEEERRSEDAQSKAALTDWLRAKASFVIEGLKEADKDEFCRCELKLQKWYGDLRGKPFAIEAENSILDISGFSKQYNCAFIWQKDGVKKLNLYLIINYFKGGKLRFKKIKPEAFEANRFYTVINKKSGEIVPMEVNFNFDDPNLIILPLAFGKRQGREFIWNDLLSLETGSLKLANGRVIEKTLYNRRTRQDEPALFVALTFERREVLDSSNIKPMNLIGVDRGENIPAVIALTDPEGCPLSRFKDSLGNPTHILRIGESYKEKQRTIQAKKEVEQRRAGGYSRKYASKAKNLADDMVRNTARDLLYYAVTQDAMLIFENLSRGFGRQGKRTFSAERQYTRMEDWLTAKLAYEGLPSKTYLSKTLAQYTSKTCSNCGFTITSADYDRVLEKLKKTATGWMTTINGKELKVEGQITYYNRYKRQNVVKDLSVELDRLSEESVNNDISSWTKGRSGEALSLLKKRFSHRPVQEKFVCLNCGFETHADEQAALNIARSWLFLRSQEYKKYQTNKTTGNTDKRAFVETWQSFYRKKLKEVWKPAV

SEQ ID NO: 40338 - protein, 978 aa, synthetic construct
  REGION 1..978: note = engineered CasX variant
QEIKRINKIRRRLVKDSNTKKAGKTGPMKTLLVRVMTPDLRERLENLRKKPENIPQPISNTSRANLNKLLTDYTEMKKAILHVYWEEFQKDPVGLMSRVAQPASKKIDQNKLKPEMDEKGNLTTAGFACSQCGQPLFVYKLEQVSEKGKAYTNYFGRCNVAEHEKLILLAQLKPEKDSDEAVTYSLGKFGQRALDFYSIHVTKESTHPVKPLAQIAGNRYASGPVGKALRDACMGTIASFLSKYQDIIIEHQKVVKGNQKRLESLRELAGKENLEYPSVTLPPQPHTKEGVDAYNEVIARVRMWVNLNLWQKLKLSRDDAKPLLRLKGFPSFPLVERQANEVDWWDMVCNVKKLINEKKEDGKVFWQNLAGYKRQEALRPYLSSEEDRKKGKKFARYQLGDLLLHLEKKHGEDWGKVYDEAWERIDKKVEGLSKHIKLEEERRSEDAQSKAALTDWLRAKASFVIEGLKEADKDEFCRCELKLQKWYGDLRGKPFAIEAENSILDISGFSKQYNCAFIWQKDGVKKLNLYLIINYFKGGKLRFKKIKPEAFEANRFYTVINKKSGEIVPMEVNFNFDDPNLIILPLAFGKRQGREFIWNDLLSLETGSLKLANGRVIEKTLYNRRTRQDEPALFVALTFERREVLDSSNIKPMNLIGVDRGENIPAVIALTDPEGCPLSRFKDSLGNPTHILRIGESYKEKQRTIQAKKEVEQRRAGGYSRKYASKAKNLADDMVRNTARDLLYYAVTQDAMLIFENLSRGFGRQGKRTFSAERQYTRMEDWLTAKLAYEGLASKTYLSKTLAQYTSKTCSNCGFTITSADYDRVLEKLKKTATGWMTTINGKELKVEGQITYYNRYKRQNVVKDLSVELDRLSEESVNNDISSWTKGRSGEALSLLKKRFSHRPVQEKFVCLNCGFETHADEQAALNIARSWLFLRSQEYKKYQTNKTTGNTDKRAFVETWQSFYRKKLKEVWKPAV

SEQ ID NO: 40339 - protein, 978 aa, synthetic construct
  REGION 1..978: note = engineered CasX variant
QEIKRINKIRRRLVKDSNTKKAGKTGPMKTLLVRVMTPDLRERLENLRKKPENIPQPISNTSRANLNKLLTDYTEMKKAILHVYWEEFQKDPVGLMSRVAQPASKKIDQNKLKPEMDEKGNLTTAGFACSQCGQPLFVYKLEQVSEKGKAYTNYFGRCNVAEHEKLILLAQLKPEKDSDEAVTYSLGKFGQRALDFYSIHVTKESTHPVKPLAQIAGNRYASGPVGKALRDACMGTIASFLSKYQDIIIEHQKVVKGNQKRLESLRELAGKENLEYPSVTLPPQPHTKEGVDAYNEVIARVRMWVNLNLWQKLKLSRDDAKPLLRLKGFPSFPLVERQANEVDWWDMVCNVKKLINEKKEDGKVFWQNLAGYKRQEALRPYLSSEEDRKKGKKFARYQLGDLLLHLEKKHGEDWGKVYDEAWERIDKKVEGLSKHIKLEEERRSEDAQSKAALTDWLRAKASFVIEGLKEADKDEFCRCELKLQKWYGDLRGKPFAIEAENSILDISGFSKQYNCAFIWQKDGVKKLNLYLIINYFKGGKLRFKKIKPEAFEANRFYTVINKKSGEIVPMEVNFNFDDPNLIILPLAFGKRQGREFIWNDLLSLETGSLKLANGRVIEKTLYNRRTRQDEPALFVALTFERREVLDSSNIKPMNLIGVDRGENIPAVIALTDPEGCPLSRFKDSLGNPTHILRIGESYKEKQRTIQAKKEVEQRRAGGYSRKYASKAKNLADDMVRNTARDLLYYAVTQDAMLIFENLSRGFGRQGKRTFSAERQYTRMEDWLTAKLAYEGLPSKVYLSKTLAQYTSKTCSNCGFTITSADYDRVLEKLKKTATGWMTTINGKELKVEGQITYYNRYKRQNVVKDLSVELDRLSEESVNNDISSWTKGRSGEALSLLKKRFSHRPVQEKFVCLNCGFETHADEQAALNIARSWLFLRSQEYKKYQTNKTTGNTDKRAFVETWQSFYRKKLKEVWKPAV

SEQ ID NO: 40340 - protein, 979 aa, synthetic construct
  REGION 1..979: note = engineered CasX variant
QEIKRINKIRRRLVKDSNTKKAGKTGPMKTLLVRVMTPDLRERLENLRKKPENIPQPISNTSRANLNKLLTDYTEMKKAILHVYWEEFQKDPVGLMSRVAQPASKKIDQNKLKPEMDEKGNLTTAGFACSQCGQPLFVYKLEQVSEKGKAYTNYFGRCNVAEHEKLILLAQLKPEKDSDEAVTYSLGKFGQRALDFYSIHVTKESTHPVKPLAQIAGNRYASGPVGKALRDACMGTIASFLSKYQDIIIEHQKVVKGNQKRLESLRELAGKENLEYPSVTLPPQPHTKEGVDAYNEVIARVRMWVNLNLWQKLKLSRDDAKPLLRLKGFPSFPLVERQANEVDWWDMVCNVKKLINEKKEDGKVFWQNLAGYKRQEALRPYLSSEEDRKKGKKFARYQLGDLLLHLEKKHGEDWGKVYDEAWERIDKKVEGLSKHIKLEEERRSEDAQSKAALTDWLRAKASFVIEGLKEADKDEFCRCELKLQKWYGDLRGKPFAIEAENSILDISGFSKQYNCAFIWQKDGVKKLNLYLIINYFKGGKLRFKKIKPEAFEANRFYTVINKKSGEIVPMEVNFNFDDPNLIILPLAFGKRQGREFIWNDLLSLETGSLKLANGRVIEKTLYNRRTRQDEPALFVALTFERREVLDSSNIKPMNLIGVDRGENIPAVIALTDPEGCPLSRFKDSLGNPTHILRIGESYKEKQRTIQAKKEVEQRRAGGYSRKYASKAKNLADDMVRNTARDLLYYAVTQDAMLIFENLSRGFGRQGKRTFSAERQYTRMEDWLTAKLAYEGPLPSKTYLSKTLAQYTSKTCSNCGFTITSADYDRVLEKLKKTATGWMTTINGKELKVEGQITYYNRYKRQNVVKDLSVELDRLSEESVNNDISSWTKGRSGEALSLLKKRFSHRPVQEKFVCLNCGFETHADEQAALNIARSWLFLRSQEYKKYQTNKTTGNTDKRAFVETWQSFYRKKLKEVWKPAV

SEQ ID NO: 40341 - protein, 979 aa, synthetic construct
  REGION 1..979: note = engineered CasX variant
QEIKRINKIRRRLVKDSNTKKAGKTGPMKTLLVRVMTPDLRERLENLRKKPENIPQPISNTSRANLNKLLTDYTEMKKAILHVYWEEFQKDPVGLMSRVAQPASKKIDQNKLKPEMDEKGNLTTAGFACSQCGQPLFVYKLEQVSEKGKAYTNYFGRCNVAEHEKLILLAQLKPEKDSDEAVTYSLGKFGQRALDFYSIHVTKESTHPVKPLAQIAGNRYASGPVGKALRDACMGTIASFLSKYQDIIIEHQKVVKGNQKRLESLRELAGKENLEYPSVTLPPQPHTKEGVDAYNEVIARVRMWVNLNLWQKLKLSRDDAKPLLRLKGFPSFPLVERQANEVDWWDMVCNVKKLINEKKEDGKVFWQNLAGYKRQEALRPYLSSEEDVRKKGKKFARYQLGDLLLHLEKKHGEDWGKVYDEAWERIDKKVEGLSKHIKLEEERRSEDAQSKAALTDWLRAKASFVIEGLKEADKDEFCRCELKLQKWYGDLRGKPFAIEAENSILDISGFSKQYNCAFIWQKDGVKKLNLYLIINYFKGGKLRFKKIKPEAFEANRFYTVINKKSGEIVPMEVNFNFDDPNLIILPLAFGKRQGREFIWNDLLSLETGSLKLANGRVIEKTLYNRRTRQDEPALFVALTFERREVLDSSNIKPMNLIGVDRGENIPAVIALTDPEGCPLSRFKDSLGNPTHILRIGESYKEKQRTIQAKKEVEQRRAGGYSRKYASKAKNLADDMVRNTARDLLYYAVTQDAMLIFENLSRGFGRQGKRTFSAERQYTRMEDWLTAKLAYEGLPSKTYLSKTLAQYTSKTCSNCGFTITSADYDRVLEKLKKTATGWMTTINGKELKVEGQITYYNRYKRQNVVKDLSVELDRLSEESVNNDISSWTKGRSGEALSLLKKRFSHRPVQEKFVCLNCGFETHADEQAALNIARSWLFLRSQEYKKYQTNKTTGNTDKRAFVETWQSFYRKKLKEVWKPAV

SEQ ID NO: 40342 - protein, 978 aa, synthetic construct
  REGION 1..978: note = engineered CasX variant
QEIKRINKIRRRLVKDSNTKKAGKTGPMKTLLVRVMTPDLRERLENLRKKPENIPQPISNTSRANLNKLLTDYTEMKKAILHVYWEEFQKDPVGLMSRVAQPASKKIDQNKLKPEMDEKGNLTTAGFACSQCGQPLFVYKLEQVSEKGKAYTNYFGRCNVAEHEKLILLAQLKPEKDSDEAVTYSLGKFGQRALDFYSIHVTKESTHPVKPLAQIAGNRYASGPVGKALRDACMGTIASFLSKYQDIIIEHQKVVKGNQKRLESLRELAGKENLEYPSVTLPPQPHTKEGVDAYNEVIARVRMWVNLNLWQKLKLSRDDAKPLLRLKGFPSFPLVERQANEVDWWDMVCNVKKLINEKKEDGKVFWQNLAGYKRQEALRPYLSSEEDRKKGKKFARYQLGDLLLHLEKKHGEDWGKVYDEAWERIDKKVEGLSKHIKLEEERRSEDAQSKAALTDWLRAKASFVIEGLKEADKDEFCRCELKLQKWYGDLRGKPFAIEAENSILDISGFSKQYNCAFIWQKDGVKKLNLYLIINYFKGGKLRFKKIKPEAFEANRFYTVINKKSGEIVPMEVNFNFDDPNLIILPLAFGKRQGREFIWNDLLSLETGSLKLANGRVIEKTLYNRRTRQDEPALFVALTFERREVLDSSNIKPMNLIGVDRGENIPAVIALTDPEGCPLSRFKDSLGNPTHILRIGESYKEKQRTIQAKKEVEQRRAGGYSRKYASKAKNLADDMVRNTARDLLYYAVTQDAMLIFENLSRGFGRQGKRTFSAERQYTRMEDWLTAKLAYEGLPSKTYLSKTLAQYTSKTCSNCGFTITSADYDRMLEKLKKTATGWMTTINGKELKVEGQITYYNRYKRQNVVKDLSVELDRLSEESVNNDISSWTKGRSGEALSLLKKRFSHRPVQEKFVCLNCGFETHADEQAALNIARSWLFLRSQEYKKYQTNKTTGNTDKRAFVETWQSFYRKKLKEVWKPAV

SEQ ID NO: 40343 - protein, 978 aa, synthetic construct
  REGION 1..978: note = engineered CasX variant
QEIKRINKIRRRLVKDSNTKKAGKTGPMKTLLVRVMTPDLRERLENLRKKPENIPQPISNTSRANLNKLLTDYTEMKKAILHVYWEEFQKDPVGLMSRVAQPASKKIDQNKLKPEMDEKGNLTTAGFACSQCGQPLFVYKLEQVSEKGKAYTNYFGRCNVAEHEKLILLAQLKPEKDSDEAVTYSLGKFGQRALDFYSIHVTKESTHPVKPLAQIAGNRYASGPVGKALRDACMGTIASFLSKYQDIIIEHQKVVKGNQKRLESLRELAGKENLEYPSVTLPPQPHTKEGVDAYNEVIARVRMWVNLNLWQKLKLSRDDAKPLLRLKGFPSFPLVERQANEVDWWDMVCNVKKLINEKKEDGKVFWQNLAGYKRQEALRPYLSSEEDRKKGKKFARYQLGDLLLHLEKKHGEDWGKVYDEAWERIDKKVEGLSKHIKLEEERRSEDAQSKAALTDWLRAKASFVIEGLKEADKDEFCRCELKLQKWYGDLRGKPFAIEAENSILDISGFSKQYNCAFIWQKDGVKKLNLYLIINYFKGGKLRFKKIKPEAFEANRFYTVINKKSGEIVPMEVNFNFDDPNLIILPLAFGKRQGREFIWNDLLSLETGSLKLANGRVIEKTLYNRRTRQDEPALFVALTFERREVLDSSNIKPMNLIGVDRGENIPAVIALTDPEGCPLSRFKDSLGNPTHILRIGESYKEKQRTIQAKKEVEQRRAGGYSRKYASKAKNLADDMVRNTARDLLYYAVTQDAMLIFENLSRGFGRQGKRTFSAERQYTRMEDWLTAKLAYEGLPSKTYLSKTLAQYTSKTCSNCGFTITSADYDRVLEKLKKTATGWMTTINGKELKVEGQITYYNRYKRQNVVKDLSVELDRLSEESVNNDISSWTKGRQGEALSLLKKRFSHRPVQEKFVCLNCGFETHADEQAALNIARSWLFLRSQEYKKYQTNKTTGNTDKRAFVETWQSFYRKKLKEVWKPAV

SEQ ID NO: 40344 - protein, 978 aa, synthetic construct
  REGION 1..978: note = engineered CasX variant
QEIKRINKIRRRLVKDSNTKKAGKTGPMKTLLVRVMTPDLRERLENLRKKPENIPQPISNTSRANLNKLLTDYTEMKKAILHVYWEEFQKDPVGLMSRVAQPASKKIDQNKLKPEMDEKGNLTTAGFACSQCGQPLFVYKLEQVSEKGKAYTNYFGRCNVAEHEKLILLAQLKPEKDSDEAVTYSLGKFGQRALDFYSIHVTKESTHPVKPLAQIAGNRYASGPVGKALRDACMGTIASFLSKYQDIIIEHQKVVKGNQKRLESLRELAGKENLEYPSVTLPPQPHTKEGVDAYNEVIARVRMWVNLNLWQKLKLSRDDAKPLLRLKGFPSFPLVERQANEVDWWDMVCNVKKLINEKKEDGKVFWQNLAGYKRQEALRPYLSSEEDRKKGKKFARYQLGDLLLHLEKKHGEDWGKVYDEAWERIDKKVEGLSKHIKLEEERRSEDAQSKAALTDWLRAKASFVIEGLKEADKDEFCRCELKLQKWYGDLRGKPFAIEAENSILDISGFSKQYNCAFIWQKDGVKKLNLYLIINYFKGGKLRFKKIKPEAFEANRFYTVINKKSGEIVPMEVNFNFDDPNLIILPLAFGKRQGREFIWNDLLSLETGSLKLANGRVIEKTLYNRRTRQDEPALFVALTFERREVLDSSNIKPMNLIGVDRGENIPAVIALTDPEGCPLSRFKDSLGNPTHILRIGESYKEKQRTIQAKKEVEQRRAGGYSRKYASKAKNLADDMVRNTARDLLYYAVTQDAMLIFENLSRGFGRQGKRTFSAERQYTRMEDWLTAKLAYEGLPSKTYLSKTLAQYTSKTCSNCGFTITSADYDRVLEKLKKTATGWMTTINGKELKVEGQITYYNRYKRQNVVKDLSVELDRLSEESVNNDISSWTKGRSGEALSLLKKRFSHRPVQEKFVCLNCEFETHADEQAALNIARSWLFLRSQEYKKYQTNKTTGNTDKRAFVETWQSFYRKKLKEVWKPAV

SEQ ID NO: 40345 - protein, 979 aa, synthetic construct
  REGION 1..979: note = engineered CasX variant
QEIKRINKIRRRLVKDSNTKKAGKTGPMKTLLVRVMTPDLRERLENLRKKPENIPQPISNTSRANLNKLLTDYTEMKKAILHVYWEEFQKDPVGLMSRVAQPASKKIDQNKLKPEMDEKGNLTTAGFACSQCGQPLFVYKLEQVSEKGKAYTNYFGRCNVAEHEKLILLAQLKPEKDSDEAVTYSLGKFGQRALDFYSIHVTKESTHPVKPLAQIAGNRYASGPVGKALRDACMGTIASFLSKYQDIIIEHQKVVKGNQKRLESLRELAGKENLEYPSVTLPPQPHTKEGVDAYNEVIARVRMWVNLNLWQKLKLSRDDAKPLLRLKGFPSFPLVERQANEVDWWDMVCNVKKLINEKKEDGKVFWQNLAGYKRQEALRPYLSSEEDRKKGKKFARYQLGDLLLHLEKKHGEDWGKVYDEAWERIDKKVEGLSKHIKLEEERRSEDAQSKAALTDWLRAKASFVIEGLKEADKDEFCRCELKLQKWYGDLRGKPFAIEAENSILDISGFSKQYNCAFIWQKDGVKKLNLYLIINYFKGGKLRFKKIKPEAFEANRFYTVINKKSGEIVPMEVNFNFDDPNLIILPLAFGKRQGREFIWNDLLSLETGSLKLANGRVIEKTLYNRRTRQDEPALFVALTFERREVLDSSNIKPMNLIGVDRGENIPAVIALTDPEGCPLSRFKDSLGNPTHILRIGESYKEKQRTIQAKKEVEQRRAGGYSRKYASKAKNLADDMVRNTARDLLYYAVTQDAMLIFENLSRGFGRQGKRTFSAERQYTRMEDWLTAKLAYEGLPSKTYLSKTLAQYTSKTCSNCGFTITSADYDRVLEKLKKTATGWMTTINGKELKVEGQITYYNRYKRQNVVKDLSVELDRLSEESVNNDISSWTKGRSGEALSLLKKRFSHRPVQEKFVCLNCGFETHADEQAALNIARSWLFLRSQEYKKYQTNKTSTGNTDKRAFVETWQSFYRKKLKEVWKPAV

SEQ ID NO: 40346 - protein, 979 aa, synthetic construct
  REGION 1..979: note = engineered CasX variant
QEIKRINKIRRRLVKDSNTKKAGKTGPMKTLLVRVMTPDLRERLENLRKKPENIPQPISNTSRANLNKLLTDYTEMKKAILHVYWEEFQKDPVGLMSRVAQPASKKIDQNKLKPEMDEKGNLTTAGFACSQCGQPLFVYKLEQVSEKGKAYTNYFGRCNVAEHEKLILLAQLKPEKDSDEAVTYSLGKFGQRALDFYSIHVTKESTHPVKPLAQIAGNRYASGPVGKALRDACMGTIASFLSKYQDIIIEHQKVVKGNQKRLESLRELAGKENLEYPSVTLPPQPHTKEGVDAYNEVIARVRMWVNLNLWQKLKLSRDDAKPLLRLKGFPSFPLVERQANEVDWWDMVCNVKKLINEKKEDGKVFWQNLAGYKRQEALRPYLSSEEDRKKGKKFARYQLGDLLLHLEKKHGEDWGKVYDEAWERIDKKVEGLSKHIKLEEERRSEDAQSKAALTDWLRAKASFVIEGLKEADKDEFCRCELKLQKWYGDLRGKPFAIEAENSILDISGFSKQYNCAFIWQKDGVKKLNLYLIINYFKGGKLRFKKIKPEAFEANRFYTVINKKSGEIVPMEVNFNFDDPNLIILPLAFGKRQGREFIWNDLLSLETGSLKLANGRVIEKTLYNRRTRQDEPALFVALTFERREVLDSSNIKPMNLIGVDRGENIPAVIALTDPEGCPLSRFKDSLGNPTHILRIGESYKEKQRTIQAKKEVEQRRAGGYSRKYASKAKNLADDMVRNTARDLLYYAVTQDAMLIFENLSRGFGRQGKRTFSAERQYTRMEDWLTAKLAYEGLPSKTYLSKTLAQYTSKTCSNCGFTITSADYDRVLEKLKKTATGWMTTINGKELKVEGQITYYNRYKRQNVVKDLSVELDRLSEESVNNDISSWTKGRSGEALSLLKKRFSHRPVQEKFVCLNCGFETHADEQAALNIARSWLFLRSQEYKKYQTNKTTGKNTDKRAFVETWQSFYRKKLKEVWKPAV

SEQ ID NO: 40347 - protein, 978 aa, synthetic construct
  REGION 1..978: note = engineered CasX variant
QEIKRINKIRRRLVKDSNTKKAGKTGPMKTLLVRVMTPDLRERLENLRKKPENIPQPISNTSRANLNKLLTDYTEMKKAILHVYWEEFQKDPVGLMSRVAQPASKKIDQNKLKPEMDEKGNLTTAGFACSQCGQPLFVYKLEQVSEKGKAYTNYFGRCNVAEHEKLILLAQLKPEKDSDEAVTYSLGKFGQRALDFYSIHVTKESTHPVKPLAQIAGNRYASGPVGKALRDACMGTIASFLSKYQDIIIEHQKVVKGNQKRLESLRELAGKENLEYPSVTLPPQPHTKEGVDAYNEVIARVRMWVNLNLWQKLKLSRDDAKPLLRLKKFPSFPLVERQANEVDWWDMVCNVKKLINEKKEDGKVFWQNLAGYKRQEALRPYLSSEEDRKKGKKFARYQLGDLLLHLEKKHGEDWGKVYDEAWERIDKKVEGLSKHIKLEEERRSEDAQSKAALTDWLRAKASFVIEGLKEADKDEFCRCELKLQKWYGDLRGKPFAIEAENSILDISGFSKQYNCAFIWQKDGVKKLNLYLIINYFKGGKLRFKKIKPEAFEANRFYTVINKKSGEIVPMEVNFNFDDPNLIILPLAFGKRQGREFIWNDLLSLETGSLKLANGRVIEKTLYNRRTRQDEPALFVALTFERREVLDSSNIKPMNLIGVDRGENIPAVIALTDPEGCPLSRFKDSLGNPTHILRIGESYKEKQRTIQAKKEVEQRRAGGYSRKYASKAKNLADDMVRNTARDLLYYAVTQDAMLIFENLSRGFGRQGKRTFSAERQYTRMEDWLTAKLAYEGLPSKTYLSKTLAQYTSKTCSNCGFTITSADYDRVLEKLKKTATGWMTTINGKELKVEGQITYYNRYKRQNVVKDLSVELDRLSEESVNNDISSWTKGRSGEALSLLKKRFSHRPVQEKFVCLNCGFETHADEQAALNIARSWLFLRSQEYKKYQTNKTTGNTDKRAFVETWQSFYRKKLKEVWKPAV

SEQ ID NO: 40348 - protein, 978 aa, synthetic construct
  REGION 1..978: note = engineered CasX variant
QEIKRINKIRRRLVKDSNTKKAGKTGPMKTLLVRVMTPDLRERLENLRKKPENIPQPISNTSRANLNKLLTDYTEMKKAILHVYWEEFQKDPVGLMSRVAQPASKKIDQNKLKPEMDEKGNLTTAGFACSQCGQPLFVYKLEQVSEKGKAYTNYFGRCNVAEHEKLILLAQLKPEKDSDEAVTYSLGKFGQRALDFYSIHVTKESTHPVKPLAQIAGNRYASGPVGKALRDACMGTIASFLSKYQDIIIEHQKVVKGNQKRLESLRELAGKENLEYPSVTLPPQPHTKEGVDAYNEVIARVRMWVNLNLWQKLKLSRDDAKPLLRLKGFPSFPLVERQANEVDWWDMVCNVKKLINEKKEDGKVFWQNLAGYKRQEALRPYLSSEEDRKKGKKFARYQLGDLLLHLEKKHGEDWGKVYDEAWERIDKKVEGLSKHIKLEEERRSEDAQSKAALTDWLRAKASFVIEGLKEADKDEFCRCELKLQKWYGDLRGKPFAIEAENSILDISGFSKQYNCAFIWQKDGVKKLNLYLIINYFKGGKLRFKKIKPEAFEANRFYTVINKKSGEIVPMEVNFNFDDPNLIILPLAFGKRQGREFIWNDLLSLETGSLKLANGRVIEKTLYNRRTRQDEPALFVALTFERREVLDSSNIKPMNLIGVDRGENIPAVIALTDPEGCPLSRFKDSLGNPTHILRIGERYKEKQRTIQAKKEVEQRRAGGYSRKYASKAKNLADDMVRNTARDLLYYAVTQDAMLIFENLSRGFGRQGKRTFSAERQYTRMEDWLTAKLAYEGLPSKTYLSKTLAQYTSKTCSNCGFTITSADYDRVLEKLKKTATGWMTTINGKELKVEGQITYYNRYKRQNVVKDLSVELDRLSEESVNNDISSWTKGRSGEALSLLKKRFSHRPVQEKFVCLNCGFETHADEQAALNIARSWLFLRSQEYKKYQTNKTTGNTDKRAFVETWQSFYRKKLKEVWKPAV

SEQ ID NO: 40349 - protein, 978 aa, synthetic construct
  REGION 1..978: note = engineered CasX variant
QEIKRINKIRRRLVKDSNTKKAGKTGPMKTLLVRVMTPDLRERLENLRKKPENIPQPISNTSRANLNKLLTDYTEMKKAILHVYWEEFQKDPVGLMSRVAQPASKKIDQNKLKPEMDEKGNLTTAGFACSQCGQPLFVYKLEQVSEKGKAYTNYFGRCNVAEHEKLILLAQLKPEKDSDEAVTYSLGKFGQRALDFYSIHVTKESTHPVKPLAQIAGNRYASGPVGKALRDACMGTIASFLSKYQDIIIEHQKVVKGNQKRLESLRELAGKENLEYPSVTLPPQPHTKEGVDAYNEVIARVRMWVNLNLWQKLKLSRDDAKPLLRLKGFPSFPLVERQANEVDWWDMVCNVKKLINEKKEDGKVFWQNLAGYKRQEALRPYLSSEEDRKKGKKFARYQLGDLLLHLEKKHGEDWGKVYDEAWERIDKKVEGLSKHIKLEEERRSEDAQSKAALTDWLRAKASFVIEGLKEADKDEFCRCELKLQKWYGDLRGKPFAIEAENSILDISGFSKQYNCAFIWQKDGVKKLNLYLIINYFKGGKLRFKKIKPEAFEANRFYTVINKKSGEIVPMEVNFNFDDPNLIILPLAFGKRQGREFIWNDLLSLETGSLQLANGRVIEKTLYNRRTRQDEPALFVALTFERREVLDSSNIKPMNLIGVDRGENIPAVIALTDPEGCPLSRFKDSLGNPTHILRIGESYKEKQRTIQAKKEVEQRRAGGYSRKYASKAKNLADDMVRNTARDLLYYAVTQDAMLIFENLSRGFGRQGKRTFSAERQYTRMEDWLTAKLAYEGLPSKTYLSKTLAQYTSKTCSNCGFTITSADYDRVLEKLKKTATGWMTTINGKELKVEGQITYYNRYKRQNVVKDLSVELDRLSEESVNNDISSWTKGRSGEALSLLKKRFSHRPVQEKFVCLNCGFETHADEQAALNIARSWLFLRSQEYKKYQTNKTTGNTDKRAFVETWQSFYRKKLKEVWKPAV

SEQ ID NO: 40350 - protein, 978 aa, synthetic construct
  REGION 1..978: note = engineered CasX variant
QEIKRINKIRRRLVKDSNTKKAGKTGPMKTLLVRVMTPDLRERLENLRKKPENIPQPISNTSRANLNKLLTDYTEMKKAILHVYWEEFQVDPVGLMSRVAQPASKKIDQNKLKPEMDEKGNLTTAGFACSQCGQPLFVYKLEQVSEKGKAYTNYFGRCNVAEHEKLILLAQLKPEKDSDEAVTYSLGKFGQRALDFYSIHVTKESTHPVKPLAQIAGNRYASGPVGKALRDACMGTIASFLSKYQDIIIEHQKVVKGNQKRLESLRELAGKENLEYPSVTLPPQPHTKEGVDAYNEVIARVRMWVNLNLWQKLKLSRDDAKPLLRLKGFPSFPLVERQANEVDWWDMVCNVKKLINEKKEDGKVFWQNLAGYKRQEALRPYLSSEEDRKKGKKFARYQLGDLLLHLEKKHGEDWGKVYDEAWERIDKKVEGLSKHIKLEEERRSEDAQSKAALTDWLRAKASFVIEGLKEADKDEFCRCELKLQKWYGDLRGKPFAIEAENSILDISGFSKQYNCAFIWQKDGVKKLNLYLIINYFKGGKLRFKKIKPEAFEANRFYTVINKKSGEIVPMEVNFNFDDPNLIILPLAFGKRQGREFIWNDLLSLETGSLKLANGRVIEKTLYNRRTRQDEPALFVALTFERREVLDSSNIKPMNLIGVDRGENIPAVIALTDPEGCPLSRFKDSLGNPTHILRIGESYKEKQRTIQAKKEVEQRRAGGYSRKYASKAKNLADDMVRNTARDLLYYAVTQDAMLIFENLSRGFGRQGKRTFMAERQYTRMEDWLTAKLAYEGLPSKTYLSKTLAQYTSKTCSNCGFTITSADYDRVLEKLKKTATGWMTTINGKELKVEGQITYYNRYKRQNVVKDLSVELDRLSEESVNNDISSWDKGRSGEALSLLKKRFSHRPVQEKFVCLNCGFETHADEQAALNIARSWLFLRSQEYKKYQTNKTTGNTDKRAFVETWQSFYRKKLKEVWKPAV

SEQ ID NO: 40351 - protein, 978 aa, synthetic construct
  REGION 1..978: note = engineered CasX variant
QEIKRLNKIRRRLVKDSNTKKAGKTGPMKTLLVRVMTPDLRERLENLRKKPENIPQPISNTSRANLNKLLTDYTEMKKAILHVYWEEFQKDPVGLMSRVAQPASKKIDQNKLKPEMDEKGNLTTAGFACSQCGQPLFVYKLEQVSEKGKAYTNYFGRCNVAEHEKLILLAQLKPEKDSDEAVTYSLGKFGQRALDFYSIHVTKESTHPVKPLAQIAGNRYASGPVGKALRDACMGTIASFLSKYQDIIIEHQKVVKGNQKRLESLRELAGKENLEYPSVTLPPQPHTKEGVDAYNEVIARVRMWVNLNLWQKLKLSRDDAKPLLRLKGFPSFPLVERQANEVDWWDMVCNVKKLINEKKEDGKVFWQNLAGYKRQEALRPYLSSEEDRKKGKKFARYQLGDLLLHLEKKHGEDWGKVYDEAWERIDKKVEGLSKHIKLEEERRSEDAQSKAALTDWLRAKASFVIEGLKEADKDEFCRCELKLQKWYGDLRGKPFAIEAENSILDISGFSKQYNCAFIWQKDGVKKLNLYLIINYFKGGKLRFKKIKPEAFEANRFYTVINKKSGEIVPMEVNFNFDDPNLIILPLAFGKRQGREFIWNDLLSLETGSLKLANGRVIEKTLYNRRTRQDEPALFVALTFERREVLDSSNIKPMNLIGVDRGENIPAVIALTDPEGCPLSRFKDSLGNPTHILRIGESYKEKQRTIQAKKEVEQRRAGGYSRKYASKAKNLADDMVRNTARDLLYYAVTQDAMLIFENLSRGFGRQGKRTFMAERQYTRMEDWLTAKLAYEGLPSKTYLSKTLAQYTSKTCSNCGFTITSADYDRVLEKLKKTATGWMTTINGKELKVEGQITYYNRYKRQNVVKDLSVELDRLSEESVNNDISSWDKGRSGEALSLLKKRFSHRPVQEKFVCLNCGFETHADEQAALNIARSWLFLRSQEYKKYQTNKTTGNTDKRAFVETWQSFYRKKLKEVWKPAV

SEQ ID NO: 40352 - protein, 978 aa, synthetic construct
  REGION 1..978: note = engineered CasX variant
QEIKRINKIRRRLVKDSNTKKAGKTGPMKTLLVRVMTPDLRERLENLRKKPENIPQPISNTSRANLNKLLTDYTEMKKAILHVYWEEFQKDPVGLMSRVAQPASKKIDQNKLKPEMDEKGNLTTAGFACSQCGQPLFVYKLEQVSEKGKAYTNYVGRCNVAEHEKLILLAQLKPEKDSDEAVTYSLGKFGQRALDFYSIHVTKESTHPVKPLAQIAGNRYASGPVGKALRDACMGTIASFLSKYQDIIIEHQKVVKGNQKRLESLRELAGKENLEYPSVTLPPQPHTKEGVDAYNEVIARVRMWVNLNLWQKLKLSRDDAKPLLRLKGFPSFPLVERQANEVDWWDMVCNVKKLINEKKEDGKVFWQNLAGYKRQEALRPYLSSEEDRKKGKKFARYQLGDLLLHLEKKHGEDWGKVYDEAWERIDKKVEGLSKHIKLEEERRSEDAQSKAALTDWLRAKASFVIEGLKEADKDEFCRCELKLQKWYGDLRGKPFAIEAENSILDISGFSKQYNCAFIWQKDGVKKLNLYLIINYFKGGKLRFKKIKPEAFEANRFYTVINKKSGEIVPMEVNFNFDDPNLIILPLAFGKRQGREFIWNDLLSLETGSLKLANGRVIEKTLYNRRTRQDEPALFVALTFERREVLDSSNIKPMNLIGVDRGENIPAVIALTDPEGCPLSRFKDSLGNPTHILRIGESYKEKQRTIQAKKEVEQRRAGGYSRKYASKAKNLADDMVRNTARDLLYYAVTQDAMLIFENLSRGFGRQGKRTFMAERQYTRMEDWLTAKLAYEGLPSKTYLSKTLAQYTSKTCSNCGFTITSADYDRVLEKLKKTATGWMTTINGKELKVEGQITYYNRYKRQNVVKDLSVELDRLSEESVNNDISSWDKGRSGEALSLLKKRFSHRPVQEKFVCLNCGFETHADEQAALNIARSWLFLRSQEYKKYQTNKTTGNTDKRAFVETWQSFYRKKLKEVWKPAV

SEQ ID NO: 40353 - protein, 978 aa, synthetic construct
  REGION 1..978: note = engineered CasX variant
QEIKRINKIRRRLVKDSNTKKAGKTGPMKTLLVRVMTPDLRERLENLRKKPENIPQPISNTSRANLNKLLTDYTEMKKAILHVYWEEFQKDPVGLMSRVAQPASKKIDQNKLKPEMDEKGNLTTAGFACSQCGQPLFVYKLEQVSEKGKAYTNYFGRCNVAEHEKLILLAQLKPEKDSDEAVTYSLGKFGQRALDFYSIHVTKESTHPVKPLAQIAGNRYASGPVGKALRDACMGTIASFLSKYQDIIIEHQKVVKGNQKRLESLRELAGKENLEYPSVTLPPQPHTKEGVDAYNEVIARVRMWVNLNLWQKLKLSRDDAKPLLRLKGFPSFPLVERQANEVDWWDMVCNVKKLINEKKEDGKVFWQNLAGYKRQEALRPYLSSEEDRKKGKKFARYQLGDLLLHLEKKHGEDWGKVYDEAWERIDKKVEGLSKHIKLEEERRSEDAQSKAALTDWLRAKASFVIEGLKEADKDEFCRCELKLQKWYGDLRGKPFAIEAENSILDISGFSKQYNCAFIWQKDGVKKLNLYLIINYFKGGKLRFKKIKPEAFEANRFYTVINKKSGEIVPMEVNFNFDDPNLIILPLAFGKRQGREFIWNDLLSLETGSLKLANGRVIEKTLYNRRTRQDEPALFVALTFERREVLDSSNIKPMNLIGVDRGENIPAVIALTDPEGCPLSRFKDSLGNPTHILRIGESYKEKQRTIQAKKEVEQRRAGGYSRKYASKAKNLADDMVRNTARDLLYYAVTQDAMLIFENLSRGFGRQGKRTFMAERQYTRMEDWLTAKLAYEGLASKTYLSKTLAQYTSKTCSNCGFTITSADYDRVLEKLKKTATGWMTTINGKELKVEGQITYYNRYKRQNVVKDLSVELDRLSEESVNNDISSWDKGRSGEALSLLKKRFSHRPVQEKFVCLNCGFETHADEQAALNIARSWLFLRSQEYKKYQTNKTTGNTDKRAFVETWQSFYRKKLKEVWKPAV

SEQ ID NO: 40354 - protein, 978 aa, synthetic construct
  REGION 1..978: note = engineered CasX variant
QEIKRINKIRRRLVKDSNTKKAGKTGPMKTLLVRVMTPDLRERLENLRKKPENIPQPISNTSRANLNKLLTDYTEMKKAILHVYWEEFQKDPVGLMSRVAQPASKKIDQNKLKPEMDEKGNLTTAGFACSQCGQPLFVYKLEQVSEKGKAYTNYFGRCNVAEHEKLILLAQLKPEKDSDEAVTYSLGKFGQRALDFYSIHVTKESTHPVKPLAQIAGNRYASGPVGKALRDACMGTIASFLSKYQDIIIEHQKVVKGNQKRLESLRELAGKENLEYPSVTLPPQPHTKEGVDAYNEVIARVRMWVNLNLWQKLKLSRDDAKPLLRLKGFPSFPLVERQANEVDWWDMVCNVKKLINEKKEDGKVFWQNLAGYKRQEALRPYLSSEEDRKKGKKFARYQLGDLLLHLEKKHGEDWGKVYDEAWERIDKKVEGLSKHIKLEEERRSEDAQSKAALTDWLRAKASFVIEGLKEADKDEFCRCELKLQKWYGDLRGKPFAIEAENSILDISGFSKQYNCAFIWQKDGVKKLNLYLIINYFKGGKLRFKKIKPEAFEANRFYTVINKKSGEIVPMEVNFNFDDPNLIILPLAFGKRQGREFIWNDLLSLETGSLKLANGRVIEKTLYNRRTRQDEPALFVALTFERREVLDSSNIKPMNLIGVDRGENIPAVIALTDPEGCPLSRFKDSLGNPTHILRIGESYKEKQRTIQAKKEVEQRRAGGYSRKYASKAKNLADDMVRNTARDLLYYAVTQDAMLIFENLSRGFGRQGKRTFMAERQYTRMEDWLTAKLAYEGLPSKVYLSKTLAQYTSKTCSNCGFTITSADYDRVLEKLKKTATGWMTTINGKELKVEGQITYYNRYKRQNVVKDLSVELDRLSEESVNNDISSWDKGRSGEALSLLKKRFSHRPVQEKFVCLNCGFETHADEQAALNIARSWLFLRSQEYKKYQTNKTTGNTDKRAFVETWQSFYRKKLKEVWKPAV

SEQ ID NO: 40355 - protein, 979 aa, synthetic construct
  REGION 1..979: note = engineered CasX variant
QEIKRINKIRRRLVKDSNTKKAGKTGPMKTLLVRVMTPDLRERLENLRKKPENIPQPISNTSRANLNKLLTDYTEMKKAILHVYWEEFQKDPVGLMSRVAQPASKKIDQNKLKPEMDEKGNLTTAGFACSQCGQPLFVYKLEQVSEKGKAYTNYFGRCNVAEHEKLILLAQLKPEKDSDEAVTYSLGKFGQRALDFYSIHVTKESTHPVKPLAQIAGNRYASGPVGKALRDACMGTIASFLSKYQDIIIEHQKVVKGNQKRLESLRELAGKENLEYPSVTLPPQPHTKEGVDAYNEVIARVRMWVNLNLWQKLKLSRDDAKPLLRLKGFPSFPLVERQANEVDWWDMVCNVKKLINEKKEDGKVFWQNLAGYKRQEALRPYLSSEEDRKKGKKFARYQLGDLLLHLEKKHGEDWGKVYDEAWERIDKKVEGLSKHIKLEEERRSEDAQSKAALTDWLRAKASFVIEGLKEADKDEFCRCELKLQKWYGDLRGKPFAIEAENSILDISGFSKQYNCAFIWQKDGVKKLNLYLIINYFKGGKLRFKKIKPEAFEANRFYTVINKKSGEIVPMEVNFNFDDPNLIILPLAFGKRQGREFIWNDLLSLETGSLKLANGRVIEKTLYNRRTRQDEPALFVALTFERREVLDSSNIKPMNLIGVDRGENIPAVIALTDPEGCPLSRFKDSLGNPTHILRIGESYKEKQRTIQAKKEVEQRRAGGYSRKYASKAKNLADDMVRNTARDLLYYAVTQDAMLIFENLSRGFGRQGKRTFMAERQYTRMEDWLTAKLAYEGPLPSKTYLSKTLAQYTSKTCSNCGFTITSADYDRVLEKLKKTATGWMTTINGKELKVEGQITYYNRYKRQNVVKDLSVELDRLSEESVNNDISSWDKGRSGEALSLLKKRFSHRPVQEKFVCLNCGFETHADEQAALNIARSWLFLRSQEYKKYQTNKTTGNTDKRAFVETWQSFYRKKLKEVWKPAV

SEQ ID NO: 40356 - protein, 979 aa, synthetic construct
  REGION 1..979: note = engineered CasX variant
QEIKRINKIRRRLVKDSNTKKAGKTGPMKTLLVRVMTPDLRERLENLRKKPENIPQPISNTSRANLNKLLTDYTEMKKAILHVYWEEFQKDPVGLMSRVAQPASKKIDQNKLKPEMDEKGNLTTAGFACSQCGQPLFVYKLEQVSEKGKAYTNYFGRCNVAEHEKLILLAQLKPEKDSDEAVTYSLGKFGQRALDFYSIHVTKESTHPVKPLAQIAGNRYASGPVGKALRDACMGTIASFLSKYQDIIIEHQKVVKGNQKRLESLRELAGKENLEYPSVTLPPQPHTKEGVDAYNEVIARVRMWVNLNLWQKLKLSRDDAKPLLRLKGFPSFPLVERQANEVDWWDMVCNVKKLINEKKEDGKVFWQNLAGYKRQEALRPYLSSEEDVRKKGKKFARYQLGDLLLHLEKKHGEDWGKVYDEAWERIDKKVEGLSKHIKLEEERRSEDAQSKAALTDWLRAKASFVIEGLKEADKDEFCRCELKLQKWYGDLRGKPFAIEAENSILDISGFSKQYNCAFIWQKDGVKKLNLYLIINYFKGGKLRFKKIKPEAFEANRFYTVINKKSGEIVPMEVNFNFDDPNLIILPLAFGKRQGREFIWNDLLSLETGSLKLANGRVIEKTLYNRRTRQDEPALFVALTFERREVLDSSNIKPMNLIGVDRGENIPAVIALTDPEGCPLSRFKDSLGNPTHILRIGESYKEKQRTIQAKKEVEQRRAGGYSRKYASKAKNLADDMVRNTARDLLYYAVTQDAMLIFENLSRGFGRQGKRTFMAERQYTRMEDWLTAKLAYEGLPSKTYLSKTLAQYTSKTCSNCGFTITSADYDRVLEKLKKTATGWMTTINGKELKVEGQITYYNRYKRQNVVKDLSVELDRLSEESVNNDISSWDKGRSGEALSLLKKRFSHRPVQEKFVCLNCGFETHADEQAALNIARSWLFLRSQEYKKYQTNKTTGNTDKRAFVETWQSFYRKKLKEVWKPAV

SEQ ID NO: 40357 - protein, 978 aa, synthetic construct
  REGION 1..978: note = engineered CasX variant
QEIKRINKIRRRLVKDSNTKKAGKTGPMKTLLVRVMTPDLRERLENLRKKPENIPQPISNTSRANLNKLLTDYTEMKKAILHVYWEEFQKDPVGLMSRVAQPASKKIDQNKLKPEMDEKGNLTTAGFACSQCGQPLFVYKLEQVSEKGKAYTNYFGRCNVAEHEKLILLAQLKPEKDSDEAVTYSLGKFGQRALDFYSIHVTKESTHPVKPLAQIAGNRYASGPVGKALRDACMGTIASFLSKYQDIIIEHQKVVKGNQKRLESLRELAGKENLEYPSVTLPPQPHTKEGVDAYNEVIARVRMWVNLNLWQKLKLSRDDAKPLLRLKGFPSFPLVERQANEVDWWDMVCNVKKLINEKKEDGKVFWQNLAGYKRQEALRPYLSSEEDRKKGKKFARYQLGDLLLHLEKKHGEDWGKVYDEAWERIDKKVEGLSKHIKLEEERRSEDAQSKAALTDWLRAKASFVIEGLKEADKDEFCRCELKLQKWYGDLRGKPFAIEAENSILDISGFSKQYNCAFIWQKDGVKKLNLYLIINYFKGGKLRFKKIKPEAFEANRFYTVINKKSGEIVPMEVNFNFDDPNLIILPLAFGKRQGREFIWNDLLSLETGSLKLANGRVIEKTLYNRRTRQDEPALFVALTFERREVLDSSNIKPMNLIGVDRGENIPAVIALTDPEGCPLSRFKDSLGNPTHILRIGESYKEKQRTIQAKKEVEQRRAGGYSRKYASKAKNLADDMVRNTARDLLYYAVTQDAMLIFENLSRGFGRQGKRTFMAERQYTRMEDWLTAKLAYEGLPSKTYLSKTLAQYTSKTCSNCGFTITSADYDRMLEKLKKTATGWMTTINGKELKVEGQITYYNRYKRQNVVKDLSVELDRLSEESVNNDISSWDKGRSGEALSLLKKRFSHRPVQEKFVCLNCGFETHADEQAALNIARSWLFLRSQEYKKYQTNKTTGNTDKRAFVETWQSFYRKKLKEVWKPAV

SEQ ID NO: 40358 - protein, 978 aa, synthetic construct
  REGION 1..978: note = engineered CasX variant
QEIKRINKIRRRLVKDSNTKKAGKTGPMKTLLVRVMTPDLRERLENLRKKPENIPQPISNTSRANLNKLLTDYTEMKKAILHVYWEEFQKDPVGLMSRVAQPASKKIDQNKLKPEMDEKGNLTTAGFACSQCGQPLFVYKLEQVSEKGKAYTNYFGRCNVAEHEKLILLAQLKPEKDSDEAVTYSLGKFGQRALDFYSIHVTKESTHPVKPLAQIAGNRYASGPVGKALRDACMGTIASFLSKYQDIIIEHQKVVKGNQKRLESLRELAGKENLEYPSVTLPPQPHTKEGVDAYNEVIARVRMWVNLNLWQKLKLSRDDAKPLLRLKGFPSFPLVERQANEVDWWDMVCNVKKLINEKKEDGKVFWQNLAGYKRQEALRPYLSSEEDRKKGKKFARYQLGDLLLHLEKKHGEDWGKVYDEAWERIDKKVEGLSKHIKLEEERRSEDAQSKAALTDWLRAKASFVIEGLKEADKDEFCRCELKLQKWYGDLRGKPFAIEAENSILDISGFSKQYNCAFIWQKDGVKKLNLYLIINYFKGGKLRFKKIKPEAFEANRFYTVINKKSGEIVPMEVNFNFDDPNLIILPLAFGKRQGREFIWNDLLSLETGSLKLANGRVIEKTLYNRRTRQDEPALFVALTFERREVLDSSNIKPMNLIGVDRGENIPAVIALTDPEGCPLSRFKDSLGNPTHILRIGESYKEKQRTIQAKKEVEQRRAGGYSRKYASKAKNLADDMVRNTARDLLYYAVTQDAMLIFENLSRGFGRQGKRTFMAERQYTRMEDWLTAKLAYEGLPSKTYLSKTLAQYTSKTCSNCGFTITSADYDRVLEKLKKTATGWMTTINGKELKVEGQITYYNRYKRQNVVKDLSVELDRLSEESVNNDISSWDKGRQGEALSLLKKRFSHRPVQEKFVCLNCGFETHADEQAALNIARSWLFLRSQEYKKYQTNKTTGNTDKRAFVETWQSFYRKKLKEVWKPAV

SEQ ID NO: 40359 - protein, 978 aa, synthetic construct
  REGION 1..978: note = engineered CasX variant
QEIKRINKIRRRLVKDSNTKKAGKTGPMKTLLVRVMTPDLRERLENLRKKPENIPQPISNTSRANLNKLLTDYTEMKKAILHVYWEEFQKDPVGLMSRVAQPASKKIDQNKLKPEMDEKGNLTTAGFACSQCGQPLFVYKLEQVSEKGKAYTNYFGRCNVAEHEKLILLAQLKPEKDSDEAVTYSLGKFGQRALDFYSIHVTKESTHPVKPLAQIAGNRYASGPVGKALRDACMGTIASFLSKYQDIIIEHQKVVKGNQKRLESLRELAGKENLEYPSVTLPPQPHTKEGVDAYNEVIARVRMWVNLNLWQKLKLSRDDAKPLLRLKGFPSFPLVERQANEVDWWDMVCNVKKLINEKKEDGKVFWQNLAGYKRQEALRPYLSSEEDRKKGKKFARYQLGDLLLHLEKKHGEDWGKVYDEAWERIDKKVEGLSKHIKLEEERRSEDAQSKAALTDWLRAKASFVIEGLKEADKDEFCRCELKLQKWYGDLRGKPFAIEAENSILDISGFSKQYNCAFIWQKDGVKKLNLYLIINYFKGGKLRFKKIKPEAFEANRFYTVINKKSGEIVPMEVNFNFDDPNLIILPLAFGKRQGREFIWNDLLSLETGSLKLANGRVIEKTLYNRRTRQDEPALFVALTFERREVLDSSNIKPMNLIGVDRGENIPAVIALTDPEGCPLSRFKDSLGNPTHILRIGESYKEKQRTIQAKKEVEQRRAGGYSRKYASKAKNLADDMVRNTARDLLYYAVTQDAMLIFENLSRGFGRQGKRTFMAERQYTRMEDWLTAKLAYEGLPSKTYLSKTLAQYTSKTCSNCGFTITSADYDRVLEKLKKTATGWMTTINGKELKVEGQITYYNRYKRQNVVKDLSVELDRLSEESVNNDISSWDKGRSGEALSLLKKRFSHRPVQEKFVCLNCEFETHADEQAALNIARSWLFLRSQEYKKYQTNKTTGNTDKRAFVETWQSFYRKKLKEVWKPAV

SEQ ID NO: 40360 - protein, 979 aa, synthetic construct
  REGION 1..979: note = engineered CasX variant
QEIKRINKIRRRLVKDSNTKKAGKTGPMKTLLVRVMTPDLRERLENLRKKPENIPQPISNTSRANLNKLLTDYTEMKKAILHVYWEEFQKDPVGLMSRVAQPASKKIDQNKLKPEMDEKGNLTTAGFACSQCGQPLFVYKLEQVSEKGKAYTNYFGRCNVAEHEKLILLAQLKPEKDSDEAVTYSLGKFGQRALDFYSIHVTKESTHPVKPLAQIAGNRYASGPVGKALRDACMGTIASFLSKYQDIIIEHQKVVKGNQKRLESLRELAGKENLEYPSVTLPPQPHTKEGVDAYNEVIARVRMWVNLNLWQKLKLSRDDAKPLLRLKGFPSFPLVERQANEVDWWDMVCNVKKLINEKKEDGKVFWQNLAGYKRQEALRPYLSSEEDRKKGKKFARYQLGDLLLHLEKKHGEDWGKVYDEAWERIDKKVEGLSKHIKLEEERRSEDAQSKAALTDWLRAKASFVIEGLKEADKDEFCRCELKLQKWYGDLRGKPFAIEAENSILDISGFSKQYNCAFIWQKDGVKKLNLYLIINYFKGGKLRFKKIKPEAFEANRFYTVINKKSGEIVPMEVNFNFDDPNLIILPLAFGKRQGREFIWNDLLSLETGSLKLANGRVIEKTLYNRRTRQDEPALFVALTFERREVLDSSNIKPMNLIGVDRGENIPAVIALTDPEGCPLSRFKDSLGNPTHILRIGESYKEKQRTIQAKKEVEQRRAGGYSRKYASKAKNLADDMVRNTARDLLYYAVTQDAMLIFENLSRGFGRQGKRTFMAERQYTRMEDWLTAKLAYEGLPSKTYLSKTLAQYTSKTCSNCGFTITSADYDRVLEKLKKTATGWMTTINGKELKVEGQITYYNRYKRQNVVKDLSVELDRLSEESVNNDISSWDKGRSGEALSLLKKRFSHRPVQEKFVCLNCGFETHADEQAALNIARSWLFLRSQEYKKYQTNKTSTGNTDKRAFVETWQSFYRKKLKEVWKPAV

SEQ ID NO: 40361 - protein, 979 aa, synthetic construct
  REGION 1..979: note = engineered CasX variant
QEIKRINKIRRRLVKDSNTKKAGKTGPMKTLLVRVMTPDLRERLENLRKKPENIPQPISNTSRANLNKLLTDYTEMKKAILHVYWEEFQKDPVGLMSRVAQPASKKIDQNKLKPEMDEKGNLTTAGFACSQCGQPLFVYKLEQVSEKGKAYTNYFGRCNVAEHEKLILLAQLKPEKDSDEAVTYSLGKFGQRALDFYSIHVTKESTHPVKPLAQIAGNRYASGPVGKALRDACMGTIASFLSKYQDIIIEHQKVVKGNQKRLESLRELAGKENLEYPSVTLPPQPHTKEGVDAYNEVIARVRMWVNLNLWQKLKLSRDDAKPLLRLKGFPSFPLVERQANEVDWWDMVCNVKKLINEKKEDGKVFWQNLAGYKRQEALRPYLSSEEDRKKGKKFARYQLGDLLLHLEKKHGEDWGKVYDEAWERIDKKVEGLSKHIKLEEERRSEDAQSKAALTDWLRAKASFVIEGLKEADKDEFCRCELKLQKWYGDLRGKPFAIEAENSILDISGFSKQYNCAFIWQKDGVKKLNLYLIINYFKGGKLRFKKIKPEAFEANRFYTVINKKSGEIVPMEVNFNFDDPNLIILPLAFGKRQGREFIWNDLLSLETGSLKLANGRVIEKTLYNRRTRQDEPALFVALTFERREVLDSSNIKPMNLIGVDRGENIPAVIALTDPEGCPLSRFKDSLGNPTHILRIGESYKEKQRTIQAKKEVEQRRAGGYSRKYASKAKNLADDMVRNTARDLLYYAVTQDAMLIFENLSRGFGRQGKRTFMAERQYTRMEDWLTAKLAYEGLPSKTYLSKTLAQYTSKTCSNCGFTITSADYDRVLEKLKKTATGWMTTINGKELKVEGQITYYNRYKRQNVVKDLSVELDRLSEESVNNDISSWDKGRSGEALSLLKKRFSHRPVQEKFVCLNCGFETHADEQAALNIARSWLFLRSQEYKKYQTNKTTGKNTDKRAFVETWQSFYRKKLKEVWKPAV

SEQ ID NO: 40362 - protein, 978 aa, synthetic construct
  REGION 1..978: note = engineered CasX variant
QEIKRINKIRRRLVKDSNTKKAGKTGPMKTLLVRVMTPDLRERLENLRKKPENIPQPISNTSRANLNKLLTDYTEMKKAILHVYWEEFQKDPVGLMSRVAQPASKKIDQNKLKPEMDEKGNLTTAGFACSQCGQPLFVYKLEQVSEKGKAYTNYFGRCNVAEHEKLILLAQLKPEKDSDEAVTYSLGKFGQRALDFYSIHVTKESTHPVKPLAQIAGNRYASGPVGKALRDACMGTIASFLSKYQDIIIEHQKVVKGNQKRLESLRELAGKENLEYPSVTLPPQPHTKEGVDAYNEVIARVRMWVNLNLWQKLKLSRDDAKPLLRLKKFPSFPLVERQANEVDWWDMVCNVKKLINEKKEDGKVFWQNLAGYKRQEALRPYLSSEEDRKKGKKFARYQLGDLLLHLEKKHGEDWGKVYDEAWERIDKKVEGLSKHIKLEEERRSEDAQSKAALTDWLRAKASFVIEGLKEADKDEFCRCELKLQKWYGDLRGKPFAIEAENSILDISGFSKQYNCAFIWQKDGVKKLNLYLIINYFKGGKLRFKKIKPEAFEANRFYTVINKKSGEIVPMEVNFNFDDPNLIILPLAFGKRQGREFIWNDLLSLETGSLKLANGRVIEKTLYNRRTRQDEPALFVALTFERREVLDSSNIKPMNLIGVDRGENIPAVIALTDPEGCPLSRFKDSLGNPTHILRIGESYKEKQRTIQAKKEVEQRRAGGYSRKYASKAKNLADDMVRNTARDLLYYAVTQDAMLIFENLSRGFGRQGKRTFMAERQYTRMEDWLTAKLAYEGLPSKTYLSKTLAQYTSKTCSNCGFTITSADYDRVLEKLKKTATGWMTTINGKELKVEGQITYYNRYKRQNVVKDLSVELDRLSEESVNNDISSWDKGRSGEALSLLKKRFSHRPVQEKFVCLNCGFETHADEQAALNIARSWLFLRSQEYKKYQTNKTTGNTDKRAFVETWQSFYRKKLKEVWKPAV

SEQ ID NO: 40363 - protein, 978 aa, synthetic construct
  REGION 1..978: note = engineered CasX variant
QEIKRINKIRRRLVKDSNTKKAGKTGPMKTLLVRVMTPDLRERLENLRKKPENIPQPISNTSRANLNKLLTDYTEMKKAILHVYWEEFQKDPVGLMSRVAQPASKKIDQNKLKPEMDEKGNLTTAGFACSQCGQPLFVYKLEQVSEKGKAYTNYFGRCNVAEHEKLILLAQLKPEKDSDEAVTYSLGKFGQRALDFYSIHVTKESTHPVKPLAQIAGNRYASGPVGKALRDACMGTIASFLSKYQDIIIEHQKVVKGNQKRLESLRELAGKENLEYPSVTLPPQPHTKEGVDAYNEVIARVRMWVNLNLWQKLKLSRDDAKPLLRLKGFPSFPLVERQANEVDWWDMVCNVKKLINEKKEDGKVFWQNLAGYKRQEALRPYLSSEEDRKKGKKFARYQLGDLLLHLEKKHGEDWGKVYDEAWERIDKKVEGLSKHIKLEEERRSEDAQSKAALTDWLRAKASFVIEGLKEADKDEFCRCELKLQKWYGDLRGKPFAIEAENSILDISGFSKQYNCAFIWQKDGVKKLNLYLIINYFKGGKLRFKKIKPEAFEANRFYTVINKKSGEIVPMEVNFNFDDPNLIILPLAFGKRQGREFIWNDLLSLETGSLKLANGRVIEKTLYNRRTRQDEPALFVALTFERREVLDSSNIKPMNLIGVDRGENIPAVIALTDPEGCPLSRFKDSLGNPTHILRIGERYKEKQRTIQAKKEVEQRRAGGYSRKYASKAKNLADDMVRNTARDLLYYAVTQDAMLIFENLSRGFGRQGKRTFMAERQYTRMEDWLTAKLAYEGLPSKTYLSKTLAQYTSKTCSNCGFTITSADYDRVLEKLKKTATGWMTTINGKELKVEGQITYYNRYKRQNVVKDLSVELDRLSEESVNNDISSWDKGRSGEALSLLKKRFSHRPVQEKFVCLNCGFETHADEQAALNIARSWLFLRSQEYKKYQTNKTTGNTDKRAFVETWQSFYRKKLKEVWKPAV

SEQ ID NO: 40364 - protein, 978 aa, synthetic construct
  REGION 1..978: note = engineered CasX variant
QEIKRINKIRRRLVKDSNTKKAGKTGPMKTLLVRVMTPDLRERLENLRKKPENIPQPISNTSRANLNKLLTDYTEMKKAILHVYWEEFQKDPVGLMSRVAQPASKKIDQNKLKPEMDEKGNLTTAGFACSQCGQPLFVYKLEQVSEKGKAYTNYFGRCNVAEHEKLILLAQLKPEKDSDEAVTYSLGKFGQRALDFYSIHVTKESTHPVKPLAQIAGNRYASGPVGKALRDACMGTIASFLSKYQDIIIEHQKVVKGNQKRLESLRELAGKENLEYPSVTLPPQPHTKEGVDAYNEVIARVRMWVNLNLWQKLKLSRDDAKPLLRLKGFPSFPLVERQANEVDWWDMVCNVKKLINEKKEDGKVFWQNLAGYKRQEALRPYLSSEEDRKKGKKFARYQLGDLLLHLEKKHGEDWGKVYDEAWERIDKKVEGLSKHIKLEEERRSEDAQSKAALTDWLRAKASFVIEGLKEADKDEFCRCELKLQKWYGDLRGKPFAIEAENSILDISGFSKQYNCAFIWQKDGVKKLNLYLIINYFKGGKLRFKKIKPEAFEANRFYTVINKKSGEIVPMEVNFNFDDPNLIILPLAFGKRQGREFIWNDLLSLETGSLQLANGRVIEKTLYNRRTRQDEPALFVALTFERREVLDSSNIKPMNLIGVDRGENIPAVIALTDPEGCPLSRFKDSLGNPTHILRIGESYKEKQRTIQAKKEVEQRRAGGYSRKYASKAKNLADDMVRNTARDLLYYAVTQDAMLIFENLSRGFGRQGKRTFMAERQYTRMEDWLTAKLAYEGLPSKTYLSKTLAQYTSKTCSNCGFTITSADYDRVLEKLKKTATGWMTTINGKELKVEGQITYYNRYKRQNVVKDLSVELDRLSEESVNNDISSWDKGRSGEALSLLKKRFSHRPVQEKFVCLNCGFETHADEQAALNIARSWLFLRSQEYKKYQTNKTTGNTDKRAFVETWQSFYRKKLKEVWKPAV

SEQ ID NO: 40365 - protein, 978 aa, synthetic construct
  REGION 1..978: note = engineered CasX variant
QEIKRLNKIRRRLVKDSNTKKAGKTGPMKTLLVRVMTPDLRERLENLRKKPENIPQPISNTSRANLNKLLTDYTEMKKAILHVYWEEFQVDPVGLMSRVAQPASKKIDQNKLKPEMDEKGNLTTAGFACSQCGQPLFVYKLEQVSEKGKAYTNYFGRCNVAEHEKLILLAQLKPEKDSDEAVTYSLGKFGQRALDFYSIHVTKESTHPVKPLAQIAGNRYASGPVGKALRDACMGTIASFLSKYQDIIIEHQKVVKGNQKRLESLRELAGKENLEYPSVTLPPQPHTKEGVDAYNEVIARVRMWVNLNLWQKLKLSRDDAKPLLRLKGFPSFPLVERQANEVDWWDMVCNVKKLINEKKEDGKVFWQNLAGYKRQEALRPYLSSEEDRKKGKKFARYQLGDLLLHLEKKHGEDWGKVYDEAWERIDKKVEGLSKHIKLEEERRSEDAQSKAALTDWLRAKASFVIEGLKEADKDEFCRCELKLQKWYGDLRGKPFAIEAENSILDISGFSKQYNCAFIWQKDGVKKLNLYLIINYFKGGKLRFKKIKPEAFEANRFYTVINKKSGEIVPMEVNFNFDDPNLIILPLAFGKRQGREFIWNDLLSLETGSLKLANGRVIEKTLYNRRTRQDEPALFVALTFERREVLDSSNIKPMNLIGVDRGENIPAVIALTDPEGCPLSRFKDSLGNPTHILRIGESYKEKQRTIQAKKEVEQRRAGGYSRKYASKAKNLADDMVRNTARDLLYYAVTQDAMLIFENLSRGFGRQGKRTFMAERQYTRMEDWLTAKLAYEGLPSKTYLSKTLAQYTSKTCSNCGFTITSADYDRVLEKLKKTATGWMTTINGKELKVEGQITYYNRYKRQNVVKDLSVELDRLSEESVNNDISSWTKGRSGEALSLLKKRFSHRPVQEKFVCLNCGFETHADEQAALNIARSWLFLRSQEYKKYQTNKTTGNTDKRAFVETWQSFYRKKLKEVWKPAV

SEQ ID NO: 40366 - protein, 978 aa, synthetic construct
  REGION 1..978: note = engineered CasX variant
QEIKRINKIRRRLVKDSNTKKAGKTGPMKTLLVRVMTPDLRERLENLRKKPENIPQPISNTSRANLNKLLTDYTEMKKAILHVYWEEFQVDPVGLMSRVAQPASKKIDQNKLKPEMDEKGNLTTAGFACSQCGQPLFVYKLEQVSEKGKAYTNYVGRCNVAEHEKLILLAQLKPEKDSDEAVTYSLGKFGQRALDFYSIHVTKESTHPVKPLAQIAGNRYASGPVGKALRDACMGTIASFLSKYQDIIIEHQKVVKGNQKRLESLRELAGKENLEYPSVTLPPQPHTKEGVDAYNEVIARVRMWVNLNLWQKLKLSRDDAKPLLRLKGFPSFPLVERQANEVDWWDMVCNVKKLINEKKEDGKVFWQNLAGYKRQEALRPYLSSEEDRKKGKKFARYQLGDLLLHLEKKHGEDWGKVYDEAWERIDKKVEGLSKHIKLEEERRSEDAQSKAALTDWLRAKASFVIEGLKEADKDEFCRCELKLQKWYGDLRGKPFAIEAENSILDISGFSKQYNCAFIWQKDGVKKLNLYLIINYFKGGKLRFKKIKPEAFEANRFYTVINKKSGEIVPMEVNFNFDDPNLIILPLAFGKRQGREFIWNDLLSLETGSLKLANGRVIEKTLYNRRTRQDEPALFVALTFERREVLDSSNIKPMNLIGVDRGENIPAVIALTDPEGCPLSRFKDSLGNPTHILRIGESYKEKQRTIQAKKEVEQRRAGGYSRKYASKAKNLADDMVRNTARDLLYYAVTQDAMLIFENLSRGFGRQGKRTFMAERQYTRMEDWLTAKLAYEGLPSKTYLSKTLAQYTSKTCSNCGFTITSADYDRVLEKLKKTATGWMTTINGKELKVEGQITYYNRYKRQNVVKDLSVELDRLSEESVNNDISSWTKGRSGEALSLLKKRFSHRPVQEKFVCLNCGFETHADEQAALNIARSWLFLRSQEYKKYQTNKTTGNTDKRAFVETWQSFYRKKLKEVWKPAV

SEQ ID NO: 40367 - protein, 978 aa, synthetic construct
  REGION 1..978: note = engineered CasX variant
QEIKRINKIRRRLVKDSNTKKAGKTGPMKTLLVRVMTPDLRERLENLRKKPENIPQPISNTSRANLNKLLTDYTEMKKAILHVYWEEFQVDPVGLMSRVAQPASKKIDQNKLKPEMDEKGNLTTAGFACSQCGQPLFVYKLEQVSEKGKAYTNYFGRCNVAEHEKLILLAQLKPEKDSDEAVTYSLGKFGQRALDFYSIHVTKESTHPVKPLAQIAGNRYASGPVGKALRDACMGTIASFLSKYQDIIIEHQKVVKGNQKRLESLRELAGKENLEYPSVTLPPQPHTKEGVDAYNEVIARVRMWVNLNLWQKLKLSRDDAKPLLRLKGFPSFPLVERQANEVDWWDMVCNVKKLINEKKEDGKVFWQNLAGYKRQEALRPYLSSEEDRKKGKKFARYQLGDLLLHLEKKHGEDWGKVYDEAWERIDKKVEGLSKHIKLEEERRSEDAQSKAALTDWLRAKASFVIEGLKEADKDEFCRCELKLQKWYGDLRGKPFAIEAENSILDISGFSKQYNCAFIWQKDGVKKLNLYLIINYFKGGKLRFKKIKPEAFEANRFYTVINKKSGEIVPMEVNFNFDDPNLIILPLAFGKRQGREFIWNDLLSLETGSLKLANGRVIEKTLYNRRTRQDEPALFVALTFERREVLDSSNIKPMNLIGVDRGENIPAVIALTDPEGCPLSRFKDSLGNPTHILRIGESYKEKQRTIQAKKEVEQRRAGGYSRKYASKAKNLADDMVRNTARDLLYYAVTQDAMLIFENLSRGFGRQGKRTFMAERQYTRMEDWLTAKLAYEGLASKTYLSKTLAQYTSKTCSNCGFTITSADYDRVLEKLKKTATGWMTTINGKELKVEGQITYYNRYKRQNVVKDLSVELDRLSEESVNNDISSWTKGRSGEALSLLKKRFSHRPVQEKFVCLNCGFETHADEQAALNIARSWLFLRSQEYKKYQTNKTTGNTDKRAFVETWQSFYRKKLKEVWKPAV

SEQ ID NO: 40368 - protein, 978 aa, synthetic construct
  REGION 1..978: note = engineered CasX variant
QEIKRINKIRRRLVKDSNTKKAGKTGPMKTLLVRVMTPDLRERLENLRKKPENIPQPISNTSRANLNKLLTDYTEMKKAILHVYWEEFQVDPVGLMSRVAQPASKKIDQNKLKPEMDEKGNLTTAGFACSQCGQPLFVYKLEQVSEKGKAYTNYFGRCNVAEHEKLILLAQLKPEKDSDEAVTYSLGKFGQRALDFYSIHVTKESTHPVKPLAQIAGNRYASGPVGKALRDACMGTIASFLSKYQDIIIEHQKVVKGNQKRLESLRELAGKENLEYPSVTLPPQPHTKEGVDAYNEVIARVRMWVNLNLWQKLKLSRDDAKPLLRLKGFPSFPLVERQANEVDWWDMVCNVKKLINEKKEDGKVFWQNLAGYKRQEALRPYLSSEEDRKKGKKFARYQLGDLLLHLEKKHGEDWGKVYDEAWERIDKKVEGLSKHIKLEEERRSEDAQSKAALTDWLRAKASFVIEGLKEADKDEFCRCELKLQKWYGDLRGKPFAIEAENSILDISGFSKQYNCAFIWQKDGVKKLNLYLIINYFKGGKLRFKKIKPEAFEANRFYTVINKKSGEIVPMEVNFNFDDPNLIILPLAFGKRQGREFIWNDLLSLETGSLKLANGRVIEKTLYNRRTRQDEPALFVALTFERREVLDSSNIKPMNLIGVDRGENIPAVIALTDPEGCPLSRFKDSLGNPTHILRIGESYKEKQRTIQAKKEVEQRRAGGYSRKYASKAKNLADDMVRNTARDLLYYAVTQDAMLIFENLSRGFGRQGKRTFMAERQYTRMEDWLTAKLAYEGLPSKVYLSKTLAQYTSKTCSNCGFTITSADYDRVLEKLKKTATGWMTTINGKELKVEGQITYYNRYKRQNVVKDLSVELDRLSEESVNNDISSWTKGRSGEALSLLKKRFSHRPVQEKFVCLNCGFETHADEQAALNIARSWLFLRSQEYKKYQTNKTTGNTDKRAFVETWQSFYRKKLKEVWKPAV

SEQ ID NO: 40369 - protein, 979 aa, synthetic construct
  REGION 1..979: note = engineered CasX variant
QEIKRINKIRRRLVKDSNTKKAGKTGPMKTLLVRVMTPDLRERLENLRKKPENIPQPISNTSRANLNKLLTDYTEMKKAILHVYWEEFQVDPVGLMSRVAQPASKKIDQNKLKPEMDEKGNLTTAGFACSQCGQPLFVYKLEQVSEKGKAYTNYFGRCNVAEHEKLILLAQLKPEKDSDEAVTYSLGKFGQRALDFYSIHVTKESTHPVKPLAQIAGNRYASGPVGKALRDACMGTIASFLSKYQDIIIEHQKVVKGNQKRLESLRELAGKENLEYPSVTLPPQPHTKEGVDAYNEVIARVRMWVNLNLWQKLKLSRDDAKPLLRLKGFPSFPLVERQANEVDWWDMVCNVKKLINEKKEDGKVFWQNLAGYKRQEALRPYLSSEEDRKKGKKFARYQLGDLLLHLEKKHGEDWGKVYDEAWERIDKKVEGLSKHIKLEEERRSEDAQSKAALTDWLRAKASFVIEGLKEADKDEFCRCELKLQKWYGDLRGKPFAIEAENSILDISGFSKQYNCAFIWQKDGVKKLNLYLIINYFKGGKLRFKKIKPEAFEANRFYTVINKKSGEIVPMEVNFNFDDPNLIILPLAFGKRQGREFIWNDLLSLETGSLKLANGRVIEKTLYNRRTRQDEPALFVALTFERREVLDSSNIKPMNLIGVDRGENIPAVIALTDPEGCPLSRFKDSLGNPTHILRIGESYKEKQRTIQAKKEVEQRRAGGYSRKYASKAKNLADDMVRNTARDLLYYAVTQDAMLIFENLSRGFGRQGKRTFMAERQYTRMEDWLTAKLAYEGPLPSKTYLSKTLAQYTSKTCSNCGFTITSADYDRVLEKLKKTATGWMTTINGKELKVEGQITYYNRYKRQNVVKDLSVELDRLSEESVNNDISSWTKGRSGEALSLLKKRFSHRPVQEKFVCLNCGFETHADEQAALNIARSWLFLRSQEYKKYQTNKTTGNTDKRAFVETWQSFYRKKLKEVWKPAV

SEQ ID NO: 40370 - protein, 979 aa, synthetic construct
  REGION 1..979: note = engineered CasX variant
QEIKRINKIRRRLVKDSNTKKAGKTGPMKTLLVRVMTPDLRERLENLRKKPENIPQPISNTSRANLNKLLTDYTEMKKAILHVYWEEFQVDPVGLMSRVAQPASKKIDQNKLKPEMDEKGNLTTAGFACSQCGQPLFVYKLEQVSEKGKAYTNYFGRCNVAEHEKLILLAQLKPEKDSDEAVTYSLGKFGQRALDFYSIHVTKESTHPVKPLAQIAGNRYASGPVGKALRDACMGTIASFLSKYQDIIIEHQKVVKGNQKRLESLRELAGKENLEYPSVTLPPQPHTKEGVDAYNEVIARVRMWVNLNLWQKLKLSRDDAKPLLRLKGFPSFPLVERQANEVDWWDMVCNVKKLINEKKEDGKVFWQNLAGYKRQEALRPYLSSEEDVRKKGKKFARYQLGDLLLHLEKKHGEDWGKVYDEAWERIDKKVEGLSKHIKLEEERRSEDAQSKAALTDWLRAKASFVIEGLKEADKDEFCRCELKLQKWYGDLRGKPFAIEAENSILDISGFSKQYNCAFIWQKDGVKKLNLYLIINYFKGGKLRFKKIKPEAFEANRFYTVINKKSGEIVPMEVNFNFDDPNLIILPLAFGKRQGREFIWNDLLSLETGSLKLANGRVIEKTLYNRRTRQDEPALFVALTFERREVLDSSNIKPMNLIGVDRGENIPAVIALTDPEGCPLSRFKDSLGNPTHILRIGESYKEKQRTIQAKKEVEQRRAGGYSRKYASKAKNLADDMVRNTARDLLYYAVTQDAMLIFENLSRGFGRQGKRTFMAERQYTRMEDWLTAKLAYEGLPSKTYLSKTLAQYTSKTCSNCGFTITSADYDRVLEKLKKTATGWMTTINGKELKVEGQITYYNRYKRQNVVKDLSVELDRLSEESVNNDISSWTKGRSGEALSLLKKRFSHRPVQEKFVCLNCGFETHADEQAALNIARSWLFLRSQEYKKYQTNKTTGNTDKRAFVETWQSFYRKKLKEVWKPAV

SEQ ID NO: 40371 - protein, 978 aa, synthetic construct
  REGION 1..978: note = engineered CasX variant
QEIKRINKIRRRLVKDSNTKKAGKTGPMKTLLVRVMTPDLRERLENLRKKPENIPQPISNTSRANLNKLLTDYTEMKKAILHVYWEEFQVDPVGLMSRVAQPASKKIDQNKLKPEMDEKGNLTTAGFACSQCGQPLFVYKLEQVSEKGKAYTNYFGRCNVAEHEKLILLAQLKPEKDSDEAVTYSLGKFGQRALDFYSIHVTKESTHPVKPLAQIAGNRYASGPVGKALRDACMGTIASFLSKYQDIIIEHQKVVKGNQKRLESLRELAGKENLEYPSVTLPPQPHTKEGVDAYNEVIARVRMWVNLNLWQKLKLSRDDAKPLLRLKGFPSFPLVERQANEVDWWDMVCNVKKLINEKKEDGKVFWQNLAGYKRQEALRPYLSSEEDRKKGKKFARYQLGDLLLHLEKKHGEDWGKVYDEAWERIDKKVEGLSKHIKLEEERRSEDAQSKAALTDWLRAKASFVIEGLKEADKDEFCRCELKLQKWYGDLRGKPFAIEAENSILDISGFSKQYNCAFIWQKDGVKKLNLYLIINYFKGGKLRFKKIKPEAFEANRFYTVINKKSGEIVPMEVNFNFDDPNLIILPLAFGKRQGREFIWNDLLSLETGSLKLANGRVIEKTLYNRRTRQDEPALFVALTFERREVLDSSNIKPMNLIGVDRGENIPAVIALTDPEGCPLSRFKDSLGNPTHILRIGESYKEKQRTIQAKKEVEQRRAGGYSRKYASKAKNLADDMVRNTARDLLYYAVTQDAMLIFENLSRGFGRQGKRTFMAERQYTRMEDWLTAKLAYEGLPSKTYLSKTLAQYTSKTCSNCGFTITSADYDRMLEKLKKTATGWMTTINGKELKVEGQITYYNRYKRQNVVKDLSVELDRLSEESVNNDISSWTKGRSGEALSLLKKRFSHRPVQEKFVCLNCGFETHADEQAALNIARSWLFLRSQEYKKYQTNKTTGNTDKRAFVETWQSFYRKKLKEVWKPAV

SEQ ID NO: 40372 - protein, 978 aa, synthetic construct
  REGION 1..978: note = engineered CasX variant
QEIKRINKIRRRLVKDSNTKKAGKTGPMKTLLVRVMTPDLRERLENLRKKPENIPQPISNTSRANLNKLLTDYTEMKKAILHVYWEEFQVDPVGLMSRVAQPASKKIDQNKLKPEMDEKGNLTTAGFACSQCGQPLFVYKLEQVSEKGKAYTNYFGRCNVAEHEKLILLAQLKPEKDSDEAVTYSLGKFGQRALDFYSIHVTKESTHPVKPLAQIAGNRYASGPVGKALRDACMGTIASFLSKYQDIIIEHQKVVKGNQKRLESLRELAGKENLEYPSVTLPPQPHTKEGVDAYNEVIARVRMWVNLNLWQKLKLSRDDAKPLLRLKGFPSFPLVERQANEVDWWDMVCNVKKLINEKKEDGKVFWQNLAGYKRQEALRPYLSSEEDRKKGKKFARYQLGDLLLHLEKKHGEDWGKVYDEAWERIDKKVEGLSKHIKLEEERRSEDAQSKAALTDWLRAKASFVIEGLKEADKDEFCRCELKLQKWYGDLRGKPFAIEAENSILDISGFSKQYNCAFIWQKDGVKKLNLYLIINYFKGGKLRFKKIKPEAFEANRFYTVINKKSGEIVPMEVNFNFDDPNLIILPLAFGKRQGREFIWNDLLSLETGSLKLANGRVIEKTLYNRRTRQDEPALFVALTFERREVLDSSNIKPMNLIGVDRGENIPAVIALTDPEGCPLSRFKDSLGNPTHILRIGESYKEKQRTIQAKKEVEQRRAGGYSRKYASKAKNLADDMVRNTARDLLYYAVTQDAMLIFENLSRGFGRQGKRTFMAERQYTRMEDWLTAKLAYEGLPSKTYLSKTLAQYTSKTCSNCGFTITSADYDRVLEKLKKTATGWMTTINGKELKVEGQITYYNRYKRQNVVKDLSVELDRLSEESVNNDISSWTKGRQGEALSLLKKRFSHRPVQEKFVCLNCGFETHADEQAALNIARSWLFLRSQEYKKYQTNKTTGNTDKRAFVETWQSFYRKKLKEVWKPAV

SEQ ID NO: 40373 - protein, 978 aa, synthetic construct
  REGION 1..978: note = engineered CasX variant
QEIKRINKIRRRLVKDSNTKKAGKTGPMKTLLVRVMTPDLRERLENLRKKPENIPQPISNTSRANLNKLLTDYTEMKKAILHVYWEEFQVDPVGLMSRVAQPASKKIDQNKLKPEMDEKGNLTTAGFACSQCGQPLFVYKLEQVSEKGKAYTNYFGRCNVAEHEKLILLAQLKPEKDSDEAVTYSLGKFGQRALDFYSIHVTKESTHPVKPLAQIAGNRYASGPVGKALRDACMGTIASFLSKYQDIIIEHQKVVKGNQKRLESLRELAGKENLEYPSVTLPPQPHTKEGVDAYNEVIARVRMWVNLNLWQKLKLSRDDAKPLLRLKGFPSFPLVERQANEVDWWDMVCNVKKLINEKKEDGKVFWQNLAGYKRQEALRPYLSSEEDRKKGKKFARYQLGDLLLHLEKKHGEDWGKVYDEAWERIDKKVEGLSKHIKLEEERRSEDAQSKAALTDWLRAKASFVIEGLKEADKDEFCRCELKLQKWYGDLRGKPFAIEAENSILDISGFSKQYNCAFIWQKDGVKKLNLYLIINYFKGGKLRFKKIKPEAFEANRFYTVINKKSGEIVPMEVNFNFDDPNLIILPLAFGKRQGREFIWNDLLSLETGSLKLANGRVIEKTLYNRRTRQDEPALFVALTFERREVLDSSNIKPMNLIGVDRGENIPAVIALTDPEGCPLSRFKDSLGNPTHILRIGESYKEKQRTIQAKKEVEQRRAGGYSRKYASKAKNLADDMVRNTARDLLYYAVTQDAMLIFENLSRGFGRQGKRTFMAERQYTRMEDWLTAKLAYEGLPSKTYLSKTLAQYTSKTCSNCGFTITSADYDRVLEKLKKTATGWMTTINGKELKVEGQITYYNRYKRQNVVKDLSVELDRLSEESVNNDISSWTKGRSGEALSLLKKRFSHRPVQEKFVCLNCEFETHADEQAALNIARSWLFLRSQEYKKYQTNKTTGNTDKRAFVETWQSFYRKKLKEVWKPAV

SEQ ID NO: 40374 - protein, 979 aa, synthetic construct
  REGION 1..979: note = engineered CasX variant
QEIKRINKIRRRLVKDSNTKKAGKTGPMKTLLVRVMTPDLRERLENLRKKPENIPQPISNTSRANLNKLLTDYTEMKKAILHVYWEEFQVDPVGLMSRVAQPASKKIDQNKLKPEMDEKGNLTTAGFACSQCGQPLFVYKLEQVSEKGKAYTNYFGRCNVAEHEKLILLAQLKPEKDSDEAVTYSLGKFGQRALDFYSIHVTKESTHPVKPLAQIAGNRYASGPVGKALRDACMGTIASFLSKYQDIIIEHQKVVKGNQKRLESLRELAGKENLEYPSVTLPPQPHTKEGVDAYNEVIARVRMWVNLNLWQKLKLSRDDAKPLLRLKGFPSFPLVERQANEVDWWDMVCNVKKLINEKKEDGKVFWQNLAGYKRQEALRPYLSSEEDRKKGKKFARYQLGDLLLHLEKKHGEDWGKVYDEAWERIDKKVEGLSKHIKLEEERRSEDAQSKAALTDWLRAKASFVIEGLKEADKDEFCRCELKLQKWYGDLRGKPFAIEAENSILDISGFSKQYNCAFIWQKDGVKKLNLYLIINYFKGGKLRFKKIKPEAFEANRFYTVINKKSGEIVPMEVNFNFDDPNLIILPLAFGKRQGREFIWNDLLSLETGSLKLANGRVIEKTLYNRRTRQDEPALFVALTFERREVLDSSNIKPMNLIGVDRGENIPAVIALTDPEGCPLSRFKDSLGNPTHILRIGESYKEKQRTIQAKKEVEQRRAGGYSRKYASKAKNLADDMVRNTARDLLYYAVTQDAMLIFENLSRGFGRQGKRTFMAERQYTRMEDWLTAKLAYEGLPSKTYLSKTLAQYTSKTCSNCGFTITSADYDRVLEKLKKTATGWMTTINGKELKVEGQITYYNRYKRQNVVKDLSVELDRLSEESVNNDISSWTKGRSGEALSLLKKRFSHRPVQEKFVCLNCGFETHADEQAALNIARSWLFLRSQEYKKYQTNKTSTGNTDKRAFVETWQSFYRKKLKEVWKPAV

SEQ ID NO: 40375 - protein, 979 aa, synthetic construct
  REGION 1..979: note = engineered CasX variant
QEIKRINKIRRRLVKDSNTKKAGKTGPMKTLLVRVMTPDLRERLENLRKKPENIPQPISNTSRANLNKLLTDYTEMKKAILHVYWEEFQVDPVGLMSRVAQPASKKIDQNKLKPEMDEKGNLTTAGFACSQCGQPLFVYKLEQVSEKGKAYTNYFGRCNVAEHEKLILLAQLKPEKDSDEAVTYSLGKFGQRALDFYSIHVTKESTHPVKPLAQIAGNRYASGPVGKALRDACMGTIASFLSKYQDIIIEHQKVVKGNQKRLESLRELAGKENLEYPSVTLPPQPHTKEGVDAYNEVIARVRMWVNLNLWQKLKLSRDDAKPLLRLKGFPSFPLVERQANEVDWWDMVCNVKKLINEKKEDGKVFWQNLAGYKRQEALRPYLSSEEDRKKGKKFARYQLGDLLLHLEKKHGEDWGKVYDEAWERIDKKVEGLSKHIKLEEERRSEDAQSKAALTDWLRAKASFVIEGLKEADKDEFCRCELKLQKWYGDLRGKPFAIEAENSILDISGFSKQYNCAFIWQKDGVKKLNLYLIINYFKGGKLRFKKIKPEAFEANRFYTVINKKSGEIVPMEVNFNFDDPNLIILPLAFGKRQGREFIWNDLLSLETGSLKLANGRVIEKTLYNRRTRQDEPALFVALTFERREVLDSSNIKPMNLIGVDRGENIPAVIALTDPEGCPLSRFKDSLGNPTHILRIGESYKEKQRTIQAKKEVEQRRAGGYSRKYASKAKNLADDMVRNTARDLLYYAVTQDAMLIFENLSRGFGRQGKRTFMAERQYTRMEDWLTAKLAYEGLPSKTYLSKTLAQYTSKTCSNCGFTITSADYDRVLEKLKKTATGWMTTINGKELKVEGQITYYNRYKRQNVVKDLSVELDRLSEESVNNDISSWTKGRSGEALSLLKKRFSHRPVQEKFVCLNCGFETHADEQAALNIARSWLFLRSQEYKKYQTNKTTGKNTDKRAFVETWQSFYRKKLKEVWKPAV

SEQ ID NO: 40376 - protein, 978 aa, synthetic construct
  REGION 1..978: note = engineered CasX variant
QEIKRINKIRRRLVKDSNTKKAGKTGPMKTLLVRVMTPDLRERLENLRKKPENIPQPISNTSRANLNKLLTDYTEMKKAILHVYWEEFQVDPVGLMSRVAQPASKKIDQNKLKPEMDEKGNLTTAGFACSQCGQPLFVYKLEQVSEKGKAYTNYFGRCNVAEHEKLILLAQLKPEKDSDEAVTYSLGKFGQRALDFYSIHVTKESTHPVKPLAQIAGNRYASGPVGKALRDACMGTIASFLSKYQDIIIEHQKVVKGNQKRLESLRELAGKENLEYPSVTLPPQPHTKEGVDAYNEVIARVRMWVNLNLWQKLKLSRDDAKPLLRLKKFPSFPLVERQANEVDWWDMVCNVKKLINEKKEDGKVFWQNLAGYKRQEALRPYLSSEEDRKKGKKFARYQLGDLLLHLEKKHGEDWGKVYDEAWERIDKKVEGLSKHIKLEEERRSEDAQSKAALTDWLRAKASFVIEGLKEADKDEFCRCELKLQKWYGDLRGKPFAIEAENSILDISGFSKQYNCAFIWQKDGVKKLNLYLIINYFKGGKLRFKKIKPEAFEANRFYTVINKKSGEIVPMEVNFNFDDPNLIILPLAFGKRQGREFIWNDLLSLETGSLKLANGRVIEKTLYNRRTRQDEPALFVALTFERREVLDSSNIKPMNLIGVDRGENIPAVIALTDPEGCPLSRFKDSLGNPTHILRIGESYKEKQRTIQAKKEVEQRRAGGYSRKYASKAKNLADDMVRNTARDLLYYAVTQDAMLIFENLSRGFGRQGKRTFMAERQYTRMEDWLTAKLAYEGLPSKTYLSKTLAQYTSKTCSNCGFTITSADYDRVLEKLKKTATGWMTTINGKELKVEGQITYYNRYKRQNVVKDLSVELDRLSEESVNNDISSWTKGRSGEALSLLKKRFSHRPVQEKFVCLNCGFETHADEQAALNIARSWLFLRSQEYKKYQTNKTTGNTDKRAFVETWQSFYRKKLKEVWKPAV

SEQ ID NO: 40377 - protein, 978 aa, synthetic construct
  REGION 1..978: note = engineered CasX variant
QEIKRINKIRRRLVKDSNTKKAGKTGPMKTLLVRVMTPDLRERLENLRKKPENIPQPISNTSRANLNKLLTDYTEMKKAILHVYWEEFQVDPVGLMSRVAQPASKKIDQNKLKPEMDEKGNLTTAGFACSQCGQPLFVYKLEQVSEKGKAYTNYFGRCNVAEHEKLILLAQLKPEKDSDEAVTYSLGKFGQRALDFYSIHVTKESTHPVKPLAQIAGNRYASGPVGKALRDACMGTIASFLSKYQDIIIEHQKVVKGNQKRLESLRELAGKENLEYPSVTLPPQPHTKEGVDAYNEVIARVRMWVNLNLWQKLKLSRDDAKPLLRLKGFPSFPLVERQANEVDWWDMVCNVKKLINEKKEDGKVFWQNLAGYKRQEALRPYLSSEEDRKKGKKFARYQLGDLLLHLEKKHGEDWGKVYDEAWERIDKKVEGLSKHIKLEEERRSEDAQSKAALTDWLRAKASFVIEGLKEADKDEFCRCELKLQKWYGDLRGKPFAIEAENSILDISGFSKQYNCAFIWQKDGVKKLNLYLIINYFKGGKLRFKKIKPEAFEANRFYTVINKKSGEIVPMEVNFNFDDPNLIILPLAFGKRQGREFIWNDLLSLETGSLKLANGRVIEKTLYNRRTRQDEPALFVALTFERREVLDSSNIKPMNLIGVDRGENIPAVIALTDPEGCPLSRFKDSLGNPTHILRIGERYKEKQRTIQAKKEVEQRRAGGYSRKYASKAKNLADDMVRNTARDLLYYAVTQDAMLIFENLSRGFGRQGKRTFMAERQYTRMEDWLTAKLAYEGLPSKTYLSKTLAQYTSKTCSNCGFTITSADYDRVLEKLKKTATGWMTTINGKELKVEGQITYYNRYKRQNVVKDLSVELDRLSEESVNNDISSWTKGRSGEALSLLKKRFSHRPVQEKFVCLNCGFETHADEQAALNIARSWLFLRSQEYKKYQTNKTTGNTDKRAFVETWQSFYRKKLKEVWKPAV

SEQ ID NO: 40378 - protein, 978 aa, synthetic construct
  REGION 1..978: note = engineered CasX variant
QEIKRINKIRRRLVKDSNTKKAGKTGPMKTLLVRVMTPDLRERLENLRKKPENIPQPISNTSRANLNKLLTDYTEMKKAILHVYWEEFQVDPVGLMSRVAQPASKKIDQNKLKPEMDEKGNLTTAGFACSQCGQPLFVYKLEQVSEKGKAYTNYFGRCNVAEHEKLILLAQLKPEKDSDEAVTYSLGKFGQRALDFYSIHVTKESTHPVKPLAQIAGNRYASGPVGKALRDACMGTIASFLSKYQDIIIEHQKVVKGNQKRLESLRELAGKENLEYPSVTLPPQPHTKEGVDAYNEVIARVRMWVNLNLWQKLKLSRDDAKPLLRLKGFPSFPLVERQANEVDWWDMVCNVKKLINEKKEDGKVFWQNLAGYKRQEALRPYLSSEEDRKKGKKFARYQLGDLLLHLEKKHGEDWGKVYDEAWERIDKKVEGLSKHIKLEEERRSEDAQSKAALTDWLRAKASFVIEGLKEADKDEFCRCELKLQKWYGDLRGKPFAIEAENSILDISGFSKQYNCAFIWQKDGVKKLNLYLIINYFKGGKLRFKKIKPEAFEANRFYTVINKKSGEIVPMEVNFNFDDPNLIILPLAFGKRQGREFIWNDLLSLETGSLQLANGRVIEKTLYNRRTRQDEPALFVALTFERREVLDSSNIKPMNLIGVDRGENIPAVIALTDPEGCPLSRFKDSLGNPTHILRIGESYKEKQRTIQAKKEVEQRRAGGYSRKYASKAKNLADDMVRNTARDLLYYAVTQDAMLIFENLSRGFGRQGKRTFMAERQYTRMEDWLTAKLAYEGLPSKTYLSKTLAQYTSKTCSNCGFTITSADYDRVLEKLKKTATGWMTTINGKELKVEGQITYYNRYKRQNVVKDLSVELDRLSEESVNNDISSWTKGRSGEALSLLKKRFSHRPVQEKFVCLNCGFETHADEQAALNIARSWLFLRSQEYKKYQTNKTTGNTDKRAFVETWQSFYRKKLKEVWKPAV

SEQ ID NO: 40379 - protein, 979 aa, synthetic construct
  REGION 1..979: note = engineered CasX variant
QEIKRLANKIRRRLVKDSNTKKAGKTGPMKTLLVRVMTPDLRERLENLRKKPENIPQPISNTSRANLNKLLTDYTEMKKAILHVYWEEFQKDPVGLMSRVAQPASKKIDQNKLKPEMDEKGNLTTAGFACSQCGQPLFVYKLEQVSEKGKAYTNYFGRCNVAEHEKLILLAQLKPEKDSDEAVTYSLGKFGQRALDFYSIHVTKESTHPVKPLAQIAGNRYASGPVGKALRDACMGTIASFLSKYQDIIIEHQKVVKGNQKRLESLRELAGKENLEYPSVTLPPQPHTKEGVDAYNEVIARVRMWVNLNLWQKLKLSRDDAKPLLRLKGFPSFPLVERQANEVDWWDMVCNVKKLINEKKEDGKVFWQNLAGYKRQEALRPYLSSEEDRKKGKKFARYQLGDLLLHLEKKHGEDWGKVYDEAWERIDKKVEGLSKHIKLEEERRSEDAQSKAALTDWLRAKASFVIEGLKEADKDEFCRCELKLQKWYGDLRGKPFAIEAENSILDISGFSKQYNCAFIWQKDGVKKLNLYLIINYFKGGKLRFKKIKPEAFEANRFYTVINKKSGEIVPMEVNFNFDDPNLIILPLAFGKRQGREFIWNDLLSLETGSLKLANGRVIEKTLYNRRTRQDEPALFVALTFERREVLDSSNIKPMNLIGVDRGENIPAVIALTDPEGCPLSRFKDSLGNPTHILRIGESYKEKQRTIQAKKEVEQRRAGGYSRKYASKAKNLADDMVRNTARDLLYYAVTQDAMLIFENLSRGFGRQGKRTFMAERQYTRMEDWLTAKLAYEGLPSKTYLSKTLAQYTSKTCSNCGFTITSADYDRVLEKLKKTATGWMTTINGKELKVEGQITYYNRYKRQNVVKDLSVELDRLSEESVNNDISSWTKGRSGEALSLLKKRFSHRPVQEKFVCLNCGFETHADEQAALNIARSWLFLRSQEYKKYQTNKTTGNTDKRAFVETWQSFYRKKLKEVWKPAV

SEQ ID NO: 40380 - protein, 978 aa, synthetic construct
  REGION 1..978: note = engineered CasX variant
QEIKRLNKIRRRLVKDSNTKKAGKTGPMKTLLVRVMTPDLRERLENLRKKPENIPQPISNTSRANLNKLLTDYTEMKKAILHVYWEEFQKDPVGLMSRVAQPASKKIDQNKLKPEMDEKGNLTTAGFACSQCGQPLFVYKLEQVSEKGKAYTNYVGRCNVAEHEKLILLAQLKPEKDSDEAVTYSLGKFGQRALDFYSIHVTKESTHPVKPLAQIAGNRYASGPVGKALRDACMGTIASFLSKYQDIIIEHQKVVKGNQKRLESLRELAGKENLEYPSVTLPPQPHTKEGVDAYNEVIARVRMWVNLNLWQKLKLSRDDAKPLLRLKGFPSFPLVERQANEVDWWDMVCNVKKLINEKKEDGKVFWQNLAGYKRQEALRPYLSSEEDRKKGKKFARYQLGDLLLHLEKKHGEDWGKVYDEAWERIDKKVEGLSKHIKLEEERRSEDAQSKAALTDWLRAKASFVIEGLKEADKDEFCRCELKLQKWYGDLRGKPFAIEAENSILDISGFSKQYNCAFIWQKDGVKKLNLYLIINYFKGGKLRFKKIKPEAFEANRFYTVINKKSGEIVPMEVNFNFDDPNLIILPLAFGKRQGREFIWNDLLSLETGSLKLANGRVIEKTLYNRRTRQDEPALFVALTFERREVLDSSNIKPMNLIGVDRGENIPAVIALTDPEGCPLSRFKDSLGNPTHILRIGESYKEKQRTIQAKKEVEQRRAGGYSRKYASKAKNLADDMVRNTARDLLYYAVTQDAMLIFENLSRGFGRQGKRTFMAERQYTRMEDWLTAKLAYEGLPSKTYLSKTLAQYTSKTCSNCGFTITSADYDRVLEKLKKTATGWMTTINGKELKVEGQITYYNRYKRQNVVKDLSVELDRLSEESVNNDISSWTKGRSGEALSLLKKRFSHRPVQEKFVCLNCGFETHADEQAALNIARSWLFLRSQEYKKYQTNKTTGNTDKRAFVETWQSFYRKKLKEVWKPAV

SEQ ID NO: 40381 - protein, 978 aa, synthetic construct
  REGION 1..978: note = engineered CasX variant
QEIKRLNKIRRRLVKDSNTKKAGKTGPMKTLLVRVMTPDLRERLENLRKKPENIPQPISNTSRANLNKLLTDYTEMKKAILHVYWEEFQKDPVGLMSRVAQPASKKIDQNKLKPEMDEKGNLTTAGFACSQCGQPLFVYKLEQVSEKGKAYTNYFGRCNVAEHEKLILLAQLKPEKDSDEAVTYSLGKFGQRALDFYSIHVTKESTHPVKPLAQIAGNRYASGPVGKALRDACMGTIASFLSKYQDIIIEHQKVVKGNQKRLESLRELAGKENLEYPSVTLPPQPHTKEGVDAYNEVIARVRMWVNLNLWQKLKLSRDDAKPLLRLKGFPSFPLVERQANEVDWWDMVCNVKKLINEKKEDGKVFWQNLAGYKRQEALRPYLSSEEDRKKGKKFARYQLGDLLLHLEKKHGEDWGKVYDEAWERIDKKVEGLSKHIKLEEERRSEDAQSKAALTDWLRAKASFVIEGLKEADKDEFCRCELKLQKWYGDLRGKPFAIEAENSILDISGFSKQYNCAFIWQKDGVKKLNLYLIINYFKGGKLRFKKIKPEAFEANRFYTVINKKSGEIVPMEVNFNFDDPNLIILPLAFGKRQGREFIWNDLLSLETGSLKLANGRVIEKTLYNRRTRQDEPALFVALTFERREVLDSSNIKPMNLIGVDRGENIPAVIALTDPEGCPLSRFKDSLGNPTHILRIGESYKEKQRTIQAKKEVEQRRAGGYSRKYASKAKNLADDMVRNTARDLLYYAVTQDAMLIFENLSRGFGRQGKRTFMAERQYTRMEDWLTAKLAYEGLASKTYLSKTLAQYTSKTCSNCGFTITSADYDRVLEKLKKTATGWMTTINGKELKVEGQITYYNRYKRQNVVKDLSVELDRLSEESVNNDISSWTKGRSGEALSLLKKRFSHRPVQEKFVCLNCGFETHADEQAALNIARSWLFLRSQEYKKYQTNKTTGNTDKRAFVETWQSFYRKKLKEVWKPAV

SEQ ID NO: 40382 - protein, 978 aa, synthetic construct
  REGION 1..978: note = engineered CasX variant
QEIKRLNKIRRRLVKDSNTKKAGKTGPMKTLLVRVMTPDLRERLENLRKKPENIPQPISNTSRANLNKLLTDYTEMKKAILHVYWEEFQKDPVGLMSRVAQPASKKIDQNKLKPEMDEKGNLTTAGFACSQCGQPLFVYKLEQVSEKGKAYTNYFGRCNVAEHEKLILLAQLKPEKDSDEAVTYSLGKFGQRALDFYSIHVTKESTHPVKPLAQIAGNRYASGPVGKALRDACMGTIASFLSKYQDIIIEHQKVVKGNQKRLESLRELAGKENLEYPSVTLPPQPHTKEGVDAYNEVIARVRMWVNLNLWQKLKLSRDDAKPLLRLKGFPSFPLVERQANEVDWWDMVCNVKKLINEKKEDGKVFWQNLAGYKRQEALRPYLSSEEDRKKGKKFARYQLGDLLLHLEKKHGEDWGKVYDEAWERIDKKVEGLSKHIKLEEERRSEDAQSKAALTDWLRAKASFVIEGLKEADKDEFCRCELKLQKWYGDLRGKPFAIEAENSILDISGFSKQYNCAFIWQKDGVKKLNLYLIINYFKGGKLRFKKIKPEAFEANRFYTVINKKSGEIVPMEVNFNFDDPNLIILPLAFGKRQGREFIWNDLLSLETGSLKLANGRVIEKTLYNRRTRQDEPALFVALTFERREVLDSSNIKPMNLIGVDRGENIPAVIALTDPEGCPLSRFKDSLGNPTHILRIGESYKEKQRTIQAKKEVEQRRAGGYSRKYASKAKNLADDMVRNTARDLLYYAVTQDAMLIFENLSRGFGRQGKRTFMAERQYTRMEDWLTAKLAYEGLPSKVYLSKTLAQYTSKTCSNCGFTITSADYDRVLEKLKKTATGWMTTINGKELKVEGQITYYNRYKRQNVVKDLSVELDRLSEESVNNDISSWTKGRSGEALSLLKKRFSHRPVQEKFVCLNCGFETHADEQAALNIARSWLFLRSQEYKKYQTNKTTGNTDKRAFVETWQSFYRKKLKEVWKPAV

SEQ ID NO: 40383 - protein, 979 aa, synthetic construct
  REGION 1..979: note = engineered CasX variant
QEIKRLNKIRRRLVKDSNTKKAGKTGPMKTLLVRVMTPDLRERLENLRKKPENIPQPISNTSRANLNKLLTDYTEMKKAILHVYWEEFQKDPVGLMSRVAQPASKKIDQNKLKPEMDEKGNLTTAGFACSQCGQPLFVYKLEQVSEKGKAYTNYFGRCNVAEHEKLILLAQLKPEKDSDEAVTYSLGKFGQRALDFYSIHVTKESTHPVKPLAQIAGNRYASGPVGKALRDACMGTIASFLSKYQDIIIEHQKVVKGNQKRLESLRELAGKENLEYPSVTLPPQPHTKEGVDAYNEVIARVRMWVNLNLWQKLKLSRDDAKPLLRLKGFPSFPLVERQANEVDWWDMVCNVKKLINEKKEDGKVFWQNLAGYKRQEALRPYLSSEEDRKKGKKFARYQLGDLLLHLEKKHGEDWGKVYDEAWERIDKKVEGLSKHIKLEEERRSEDAQSKAALTDWLRAKASFVIEGLKEADKDEFCRCELKLQKWYGDLRGKPFAIEAENSILDISGFSKQYNCAFIWQKDGVKKLNLYLIINYFKGGKLRFKKIKPEAFEANRFYTVINKKSGEIVPMEVNFNFDDPNLIILPLAFGKRQGREFIWNDLLSLETGSLKLANGRVIEKTLYNRRTRQDEPALFVALTFERREVLDSSNIKPMNLIGVDRGENIPAVIALTDPEGCPLSRFKDSLGNPTHILRIGESYKEKQRTIQAKKEVEQRRAGGYSRKYASKAKNLADDMVRNTARDLLYYAVTQDAMLIFENLSRGFGRQGKRTFMAERQYTRMEDWLTAKLAYEGPLPSKTYLSKTLAQYTSKTCSNCGFTITSADYDRVLEKLKKTATGWMTTINGKELKVEGQITYYNRYKRQNVVKDLSVELDRLSEESVNNDISSWTKGRSGEALSLLKKRFSHRPVQEKFVCLNCGFETHADEQAALNIARSWLFLRSQEYKKYQTNKTTGNTDKRAFVETWQSFYRKKLKEVWKPAV

SEQ ID NO: 40384 - protein, 979 aa, synthetic construct
  REGION 1..979: note = engineered CasX variant
QEIKRLNKIRRRLVKDSNTKKAGKTGPMKTLLVRVMTPDLRERLENLRKKPENIPQPISNTSRANLNKLLTDYTEMKKAILHVYWEEFQKDPVGLMSRVAQPASKKIDQNKLKPEMDEKGNLTTAGFACSQCGQPLFVYKLEQVSEKGKAYTNYFGRCNVAEHEKLILLAQLKPEKDSDEAVTYSLGKFGQRALDFYSIHVTKESTHPVKPLAQIAGNRYASGPVGKALRDACMGTIASFLSKYQDIIIEHQKVVKGNQKRLESLRELAGKENLEYPSVTLPPQPHTKEGVDAYNEVIARVRMWVNLNLWQKLKLSRDDAKPLLRLKGFPSFPLVERQANEVDWWDMVCNVKKLINEKKEDGKVFWQNLAGYKRQEALRPYLSSEEDVRKKGKKFARYQLGDLLLHLEKKHGEDWGKVYDEAWERIDKKVEGLSKHIKLEEERRSEDAQSKAALTDWLRAKASFVIEGLKEADKDEFCRCELKLQKWYGDLRGKPFAIEAENSILDISGFSKQYNCAFIWQKDGVKKLNLYLIINYFKGGKLRFKKIKPEAFEANRFYTVINKKSGEIVPMEVNFNFDDPNLIILPLAFGKRQGREFIWNDLLSLETGSLKLANGRVIEKTLYNRRTRQDEPALFVALTFERREVLDSSNIKPMNLIGVDRGENIPAVIALTDPEGCPLSRFKDSLGNPTHILRIGESYKEKQRTIQAKKEVEQRRAGGYSRKYASKAKNLADDMVRNTARDLLYYAVTQDAMLIFENLSRGFGRQGKRTFMAERQYTRMEDWLTAKLAYEGLPSKTYLSKTLAQYTSKTCSNCGFTITSADYDRVLEKLKKTATGWMTTINGKELKVEGQITYYNRYKRQNVVKDLSVELDRLSEESVNNDISSWTKGRSGEALSLLKKRFSHRPVQEKFVCLNCGFETHADEQAALNIARSWLFLRSQEYKKYQTNKTTGNTDKRAFVETWQSFYRKKLKEVWKPAV

SEQ ID NO: 40385 - protein, 978 aa, synthetic construct
  REGION 1..978: note = engineered CasX variant
QEIKRLNKIRRRLVKDSNTKKAGKTGPMKTLLVRVMTPDLRERLENLRKKPENIPQPISNTSRANLNKLLTDYTEMKKAILHVYWEEFQKDPVGLMSRVAQPASKKIDQNKLKPEMDEKGNLTTAGFACSQCGQPLFVYKLEQVSEKGKAYTNYFGRCNVAEHEKLILLAQLKPEKDSDEAVTYSLGKFGQRALDFYSIHVTKESTHPVKPLAQIAGNRYASGPVGKALRDACMGTIASFLSKYQDIIIEHQKVVKGNQKRLESLRELAGKENLEYPSVTLPPQPHTKEGVDAYNEVIARVRMWVNLNLWQKLKLSRDDAKPLLRLKGFPSFPLVERQANEVDWWDMVCNVKKLINEKKEDGKVFWQNLAGYKRQEALRPYLSSEEDRKKGKKFARYQLGDLLLHLEKKHGEDWGKVYDEAWERIDKKVEGLSKHIKLEEERRSEDAQSKAALTDWLRAKASFVIEGLKEADKDEFCRCELKLQKWYGDLRGKPFAIEAENSILDISGFSKQYNCAFIWQKDGVKKLNLYLIINYFKGGKLRFKKIKPEAFEANRFYTVINKKSGEIVPMEVNFNFDDPNLIILPLAFGKRQGREFIWNDLLSLETGSLKLANGRVIEKTLYNRRTRQDEPALFVALTFERREVLDSSNIKPMNLIGVDRGENIPAVIALTDPEGCPLSRFKDSLGNPTHILRIGESYKEKQRTIQAKKEVEQRRAGGYSRKYASKAKNLADDMVRNTARDLLYYAVTQDAMLIFENLSRGFGRQGKRTFMAERQYTRMEDWLTAKLAYEGLPSKTYLSKTLAQYTSKTCSNCGFTITSADYDRMLEKLKKTATGWMTTINGKELKVEGQITYYNRYKRQNVVKDLSVELDRLSEESVNNDISSWTKGRSGEALSLLKKRFSHRPVQEKFVCLNCGFETHADEQAALNIARSWLFLRSQEYKKYQTNKTTGNTDKRAFVETWQSFYRKKLKEVWKPAV

SEQ ID NO: 40386 - protein, 978 aa, synthetic construct
  REGION 1..978: note = engineered CasX variant
QEIKRLNKIRRRLVKDSNTKKAGKTGPMKTLLVRVMTPDLRERLENLRKKPENIPQPISNTSRANLNKLLTDYTEMKKAILHVYWEEFQKDPVGLMSRVAQPASKKIDQNKLKPEMDEKGNLTTAGFACSQCGQPLFVYKLEQVSEKGKAYTNYFGRCNVAEHEKLILLAQLKPEKDSDEAVTYSLGKFGQRALDFYSIHVTKESTHPVKPLAQIAGNRYASGPVGKALRDACMGTIASFLSKYQDIIIEHQKVVKGNQKRLESLRELAGKENLEYPSVTLPPQPHTKEGVDAYNEVIARVRMWVNLNLWQKLKLSRDDAKPLLRLKGFPSFPLVERQANEVDWWDMVCNVKKLINEKKEDGKVFWQNLAGYKRQEALRPYLSSEEDRKKGKKFARYQLGDLLLHLEKKHGEDWGKVYDEAWERIDKKVEGLSKHIKLEEERRSEDAQSKAALTDWLRAKASFVIEGLKEADKDEFCRCELKLQKWYGDLRGKPFAIEAENSILDISGFSKQYNCAFIWQKDGVKKLNLYLIINYFKGGKLRFKKIKPEAFEANRFYTVINKKSGEIVPMEVNFNFDDPNLIILPLAFGKRQGREFIWNDLLSLETGSLKLANGRVIEKTLYNRRTRQDEPALFVALTFERREVLDSSNIKPMNLIGVDRGENIPAVIALTDPEGCPLSRFKDSLGNPTHILRIGESYKEKQRTIQAKKEVEQRRAGGYSRKYASKAKNLADDMVRNTARDLLYYAVTQDAMLIFENLSRGFGRQGKRTFMAERQYTRMEDWLTAKLAYEGLPSKTYLSKTLAQYTSKTCSNCGFTITSADYDRVLEKLKKTATGWMTTINGKELKVEGQITYYNRYKRQNVVKDLSVELDRLSEESVNNDISSWTKGRQGEALSLLKKRFSHRPVQEKFVCLNCGFETHADEQAALNIARSWLFLRSQEYKKYQTNKTTGNTDKRAFVETWQSFYRKKLKEVWKPAV

SEQ ID NO: 40387 - protein, 978 aa, synthetic construct
  REGION 1..978: note = engineered CasX variant
QEIKRLNKIRRRLVKDSNTKKAGKTGPMKTLLVRVMTPDLRERLENLRKKPENIPQPISNTSRANLNKLLTDYTEMKKAILHVYWEEFQKDPVGLMSRVAQPASKKIDQNKLKPEMDEKGNLTTAGFACSQCGQPLFVYKLEQVSEKGKAYTNYFGRCNVAEHEKLILLAQLKPEKDSDEAVTYSLGKFGQRALDFYSIHVTKESTHPVKPLAQIAGNRYASGPVGKALRDACMGTIASFLSKYQDIIIEHQKVVKGNQKRLESLRELAGKENLEYPSVTLPPQPHTKEGVDAYNEVIARVRMWVNLNLWQKLKLSRDDAKPLLRLKGFPSFPLVERQANEVDWWDMVCNVKKLINEKKEDGKVFWQNLAGYKRQEALRPYLSSEEDRKKGKKFARYQLGDLLLHLEKKHGEDWGKVYDEAWERIDKKVEGLSKHIKLEEERRSEDAQSKAALTDWLRAKASFVIEGLKEADKDEFCRCELKLQKWYGDLRGKPFAIEAENSILDISGFSKQYNCAFIWQKDGVKKLNLYLIINYFKGGKLRFKKIKPEAFEANRFYTVINKKSGEIVPMEVNFNFDDPNLIILPLAFGKRQGREFIWNDLLSLETGSLKLANGRVIEKTLYNRRTRQDEPALFVALTFERREVLDSSNIKPMNLIGVDRGENIPAVIALTDPEGCPLSRFKDSLGNPTHILRIGESYKEKQRTIQAKKEVEQRRAGGYSRKYASKAKNLADDMVRNTARDLLYYAVTQDAMLIFENLSRGFGRQGKRTFMAERQYTRMEDWLTAKLAYEGLPSKTYLSKTLAQYTSKTCSNCGFTITSADYDRVLEKLKKTATGWMTTINGKELKVEGQITYYNRYKRQNVVKDLSVELDRLSEESVNNDISSWTKGRSGEALSLLKKRFSHRPVQEKFVCLNCEFETHADEQAALNIARSWLFLRSQEYKKYQTNKTTGNTDKRAFVETWQSFYRKKLKEVWKPAV

SEQ ID NO: 40388 - protein, 979 aa, synthetic construct
  REGION 1..979: note = engineered CasX variant
QEIKRLNKIRRRLVKDSNTKKAGKTGPMKTLLVRVMTPDLRERLENLRKKPENIPQPISNTSRANLNKLLTDYTEMKKAILHVYWEEFQKDPVGLMSRVAQPASKKIDQNKLKPEMDEKGNLTTAGFACSQCGQPLFVYKLEQVSEKGKAYTNYFGRCNVAEHEKLILLAQLKPEKDSDEAVTYSLGKFGQRALDFYSIHVTKESTHPVKPLAQIAGNRYASGPVGKALRDACMGTIASFLSKYQDIIIEHQKVVKGNQKRLESLRELAGKENLEYPSVTLPPQPHTKEGVDAYNEVIARVRMWVNLNLWQKLKLSRDDAKPLLRLKGFPSFPLVERQANEVDWWDMVCNVKKLINEKKEDGKVFWQNLAGYKRQEALRPYLSSEEDRKKGKKFARYQLGDLLLHLEKKHGEDWGKVYDEAWERIDKKVEGLSKHIKLEEERRSEDAQSKAALTDWLRAKASFVIEGLKEADKDEFCRCELKLQKWYGDLRGKPFAIEAENSILDISGFSKQYNCAFIWQKDGVKKLNLYLIINYFKGGKLRFKKIKPEAFEANRFYTVINKKSGEIVPMEVNFNFDDPNLIILPLAFGKRQGREFIWNDLLSLETGSLKLANGRVIEKTLYNRRTRQDEPALFVALTFERREVLDSSNIKPMNLIGVDRGENIPAVIALTDPEGCPLSRFKDSLGNPTHILRIGESYKEKQRTIQAKKEVEQRRAGGYSRKYASKAKNLADDMVRNTARDLLYYAVTQDAMLIFENLSRGFGRQGKRTFMAERQYTRMEDWLTAKLAYEGLPSKTYLSKTLAQYTSKTCSNCGFTITSADYDRVLEKLKKTATGWMTTINGKELKVEGQITYYNRYKRQNVVKDLSVELDRLSEESVNNDISSWTKGRSGEALSLLKKRFSHRPVQEKFVCLNCGFETHADEQAALNIARSWLFLRSQEYKKYQTNKTSTGNTDKRAFVETWQSFYRKKLKEVWKPAV

SEQ ID NO: 40389 - protein, 979 aa, synthetic construct
  REGION 1..979: note = engineered CasX variant
QEIKRLNKIRRRLVKDSNTKKAGKTGPMKTLLVRVMTPDLRERLENLRKKPENIPQPISNTSRANLNKLLTDYTEMKKAILHVYWEEFQKDPVGLMSRVAQPASKKIDQNKLKPEMDEKGNLTTAGFACSQCGQPLFVYKLEQVSEKGKAYTNYFGRCNVAEHEKLILLAQLKPEKDSDEAVTYSLGKFGQRALDFYSIHVTKESTHPVKPLAQIAGNRYASGPVGKALRDACMGTIASFLSKYQDIIIEHQKVVKGNQKRLESLRELAGKENLEYPSVTLPPQPHTKEGVDAYNEVIARVRMWVNLNLWQKLKLSRDDAKPLLRLKGFPSFPLVERQANEVDWWDMVCNVKKLINEKKEDGKVFWQNLAGYKRQEALRPYLSSEEDRKKGKKFARYQLGDLLLHLEKKHGEDWGKVYDEAWERIDKKVEGLSKHIKLEEERRSEDAQSKAALTDWLRAKASFVIEGLKEADKDEFCRCELKLQKWYGDLRGKPFAIEAENSILDISGFSKQYNCAFIWQKDGVKKLNLYLIINYFKGGKLRFKKIKPEAFEANRFYTVINKKSGEIVPMEVNFNFDDPNLIILPLAFGKRQGREFIWNDLLSLETGSLKLANGRVIEKTLYNRRTRQDEPALFVALTFERREVLDSSNIKPMNLIGVDRGENIPAVIALTDPEGCPLSRFKDSLGNPTHILRIGESYKEKQRTIQAKKEVEQRRAGGYSRKYASKAKNLADDMVRNTARDLLYYAVTQDAMLIFENLSRGFGRQGKRTFMAERQYTRMEDWLTAKLAYEGLPSKTYLSKTLAQYTSKTCSNCGFTITSADYDRVLEKLKKTATGWMTTINGKELKVEGQITYYNRYKRQNVVKDLSVELDRLSEESVNNDISSWTKGRSGEALSLLKKRFSHRPVQEKFVCLNCGFETHADEQAALNIARSWLFLRSQEYKKYQTNKTTGKNTDKRAFVETWQSFYRKKLKEVWKPAV

SEQ ID NO: 40390 - protein, 978 aa, synthetic construct
  REGION 1..978: note = engineered CasX variant
QEIKRLNKIRRRLVKDSNTKKAGKTGPMKTLLVRVMTPDLRERLENLRKKPENIPQPISNTSRANLNKLLTDYTEMKKAILHVYWEEFQKDPVGLMSRVAQPASKKIDQNKLKPEMDEKGNLTTAGFACSQCGQPLFVYKLEQVSEKGKAYTNYFGRCNVAEHEKLILLAQLKPEKDSDEAVTYSLGKFGQRALDFYSIHVTKESTHPVKPLAQIAGNRYASGPVGKALRDACMGTIASFLSKYQDIIIEHQKVVKGNQKRLESLRELAGKENLEYPSVTLPPQPHTKEGVDAYNEVIARVRMWVNLNLWQKLKLSRDDAKPLLRLKKFPSFPLVERQANEVDWWDMVCNVKKLINEKKEDGKVFWQNLAGYKRQEALRPYLSSEEDRKKGKKFARYQLGDLLLHLEKKHGEDWGKVYDEAWERIDKKVEGLSKHIKLEEERRSEDAQSKAALTDWLRAKASFVIEGLKEADKDEFCRCELKLQKWYGDLRGKPFAIEAENSILDISGFSKQYNCAFIWQKDGVKKLNLYLIINYFKGGKLRFKKIKPEAFEANRFYTVINKKSGEIVPMEVNFNFDDPNLIILPLAFGKRQGREFIWNDLLSLETGSLKLANGRVIEKTLYNRRTRQDEPALFVALTFERREVLDSSNIKPMNLIGVDRGENIPAVIALTDPEGCPLSRFKDSLGNPTHILRIGESYKEKQRTIQAKKEVEQRRAGGYSRKYASKAKNLADDMVRNTARDLLYYAVTQDAMLIFENLSRGFGRQGKRTFMAERQYTRMEDWLTAKLAYEGLPSKTYLSKTLAQYTSKTCSNCGFTITSADYDRVLEKLKKTATGWMTTINGKELKVEGQITYYNRYKRQNVVKDLSVELDRLSEESVNNDISSWTKGRSGEALSLLKKRFSHRPVQEKFVCLNCGFETHADEQAALNIARSWLFLRSQEYKKYQTNKTTGNTDKRAFVETWQSFYRKKLKEVWKPAV

SEQ ID NO: 40391 - protein, 978 aa, synthetic construct
  REGION 1..978: note = engineered CasX variant
QEIKRLNKIRRRLVKDSNTKKAGKTGPMKTLLVRVMTPDLRERLENLRKKPENIPQPISNTSRANLNKLLTDYTEMKKAILHVYWEEFQKDPVGLMSRVAQPASKKIDQNKLKPEMDEKGNLTTAGFACSQCGQPLFVYKLEQVSEKGKAYTNYFGRCNVAEHEKLILLAQLKPEKDSDEAVTYSLGKFGQRALDFYSIHVTKESTHPVKPLAQIAGNRYASGPVGKALRDACMGTIASFLSKYQDIIIEHQKVVKGNQKRLESLRELAGKENLEYPSVTLPPQPHTKEGVDAYNEVIARVRMWVNLNLWQKLKLSRDDAKPLLRLKGFPSFPLVERQANEVDWWDMVCNVKKLINEKKEDGKVFWQNLAGYKRQEALRPYLSSEEDRKKGKKFARYQLGDLLLHLEKKHGEDWGKVYDEAWERIDKKVEGLSKHIKLEEERRSEDAQSKAALTDWLRAKASFVIEGLKEADKDEFCRCELKLQKWYGDLRGKPFAIEAENSILDISGFSKQYNCAFIWQKDGVKKLNLYLIINYFKGGKLRFKKIKPEAFEANRFYTVINKKSGEIVPMEVNFNFDDPNLIILPLAFGKRQGREFIWNDLLSLETGSLKLANGRVIEKTLYNRRTRQDEPALFVALTFERREVLDSSNIKPMNLIGVDRGENIPAVIALTDPEGCPLSRFKDSLGNPTHILRIGERYKEKQRTIQAKKEVEQRRAGGYSRKYASKAKNLADDMVRNTARDLLYYAVTQDAMLIFENLSRGFGRQGKRTFMAERQYTRMEDWLTAKLAYEGLPSKTYLSKTLAQYTSKTCSNCGFTITSADYDRVLEKLKKTATGWMTTINGKELKVEGQITYYNRYKRQNVVKDLSVELDRLSEESVNNDISSWTKGRSGEALSLLKKRFSHRPVQEKFVCLNCGFETHADEQAALNIARSWLFLRSQEYKKYQTNKTTGNTDKRAFVETWQSFYRKKLKEVWKPAV

SEQ ID NO: 40392 - protein, 978 aa, synthetic construct
  REGION 1..978: note = engineered CasX variant
QEIKRLNKIRRRLVKDSNTKKAGKTGPMKTLLVRVMTPDLRERLENLRKKPENIPQPISNTSRANLNKLLTDYTEMKKAILHVYWEEFQKDPVGLMSRVAQPASKKIDQNKLKPEMDEKGNLTTAGFACSQCGQPLFVYKLEQVSEKGKAYTNYFGRCNVAEHEKLILLAQLKPEKDSDEAVTYSLGKFGQRALDFYSIHVTKESTHPVKPLAQIAGNRYASGPVGKALRDACMGTIASFLSKYQDIIIEHQKVVKGNQKRLESLRELAGKENLEYPSVTLPPQPHTKEGVDAYNEVIARVRMWVNLNLWQKLKLSRDDAKPLLRLKGFPSFPLVERQANEVDWWDMVCNVKKLINEKKEDGKVFWQNLAGYKRQEALRPYLSSEEDRKKGKKFARYQLGDLLLHLEKKHGEDWGKVYDEAWERIDKKVEGLSKHIKLEEERRSEDAQSKAALTDWLRAKASFVIEGLKEADKDEFCRCELKLQKWYGDLRGKPFAIEAENSILDISGFSKQYNCAFIWQKDGVKKLNLYLIINYFKGGKLRFKKIKPEAFEANRFYTVINKKSGEIVPMEVNFNFDDPNLIILPLAFGKRQGREFIWNDLLSLETGSLQLANGRVIEKTLYNRRTRQDEPALFVALTFERREVLDSSNIKPMNLIGVDRGENIPAVIALTDPEGCPLSRFKDSLGNPTHILRIGESYKEKQRTIQAKKEVEQRRAGGYSRKYASKAKNLADDMVRNTARDLLYYAVTQDAMLIFENLSRGFGRQGKRTFMAERQYTRMEDWLTAKLAYEGLPSKTYLSKTLAQYTSKTCSNCGFTITSADYDRVLEKLKKTATGWMTTINGKELKVEGQITYYNRYKRQNVVKDLSVELDRLSEESVNNDISSWTKGRSGEALSLLKKRFSHRPVQEKFVCLNCGFETHADEQAALNIARSWLFLRSQEYKKYQTNKTTGNTDKRAFVETWQSFYRKKLKEVWKPAV

SEQ ID NO: 40393 - protein, 978 aa, synthetic construct
  REGION 1..978: note = engineered CasX variant
QEIKRINKIRRRLVKDSNTKKAGKTGPMKTLLVRVMTPDLRERLENLRKKPENIPQPISNTSRANLNKLLTDYTEMKKAILHVYWEEFQKDPVGLMSRVAQPASKKIDQNKLKPEMDEKGNLTTAGFACSQCGQPLFVYKLEQVSEKGKAYTNYVGRCNVAEHEKLILLAQLKPEKDSDEAVTYSLGKFGQRALDFYSIHVTKESTHPVKPLAQIAGNRYASGPVGKALRDACMGTIASFLSKYQDIIIEHQKVVKGNQKRLESLRELAGKENLEYPSVTLPPQPHTKEGVDAYNEVIARVRMWVNLNLWQKLKLSRDDAKPLLRLKGFPSFPLVERQANEVDWWDMVCNVKKLINEKKEDGKVFWQNLAGYKRQEALRPYLSSEEDRKKGKKFARYQLGDLLLHLEKKHGEDWGKVYDEAWERIDKKVEGLSKHIKLEEERRSEDAQSKAALTDWLRAKASFVIEGLKEADKDEFCRCELKLQKWYGDLRGKPFAIEAENSILDISGFSKQYNCAFIWQKDGVKKLNLYLIINYFKGGKLRFKKIKPEAFEANRFYTVINKKSGEIVPMEVNFNFDDPNLIILPLAFGKRQGREFIWNDLLSLETGSLKLANGRVIEKTLYNRRTRQDEPALFVALTFERREVLDSSNIKPMNLIGVDRGENIPAVIALTDPEGCPLSRFKDSLGNPTHILRIGESYKEKQRTIQAKKEVEQRRAGGYSRKYASKAKNLADDMVRNTARDLLYYAVTQDAMLIFENLSRGFGRQGKRTFMAERQYTRMEDWLTAKLAYEGLASKTYLSKTLAQYTSKTCSNCGFTITSADYDRVLEKLKKTATGWMTTINGKELKVEGQITYYNRYKRQNVVKDLSVELDRLSEESVNNDISSWTKGRSGEALSLLKKRFSHRPVQEKFVCLNCGFETHADEQAALNIARSWLFLRSQEYKKYQTNKTTGNTDKRAFVETWQSFYRKKLKEVWKPAV

SEQ ID NO: 40394 - protein, 978 aa, synthetic construct
  REGION 1..978: note = engineered CasX variant
QEIKRINKIRRRLVKDSNTKKAGKTGPMKTLLVRVMTPDLRERLENLRKKPENIPQPISNTSRANLNKLLTDYTEMKKAILHVYWEEFQKDPVGLMSRVAQPASKKIDQNKLKPEMDEKGNLTTAGFACSQCGQPLFVYKLEQVSEKGKAYTNYVGRCNVAEHEKLILLAQLKPEKDSDEAVTYSLGKFGQRALDFYSIHVTKESTHPVKPLAQIAGNRYASGPVGKALRDACMGTIASFLSKYQDIIIEHQKVVKGNQKRLESLRELAGKENLEYPSVTLPPQPHTKEGVDAYNEVIARVRMWVNLNLWQKLKLSRDDAKPLLRLKGFPSFPLVERQANEVDWWDMVCNVKKLINEKKEDGKVFWQNLAGYKRQEALRPYLSSEEDRKKGKKFARYQLGDLLLHLEKKHGEDWGKVYDEAWERIDKKVEGLSKHIKLEEERRSEDAQSKAALTDWLRAKASFVIEGLKEADKDEFCRCELKLQKWYGDLRGKPFAIEAENSILDISGFSKQYNCAFIWQKDGVKKLNLYLIINYFKGGKLRFKKIKPEAFEANRFYTVINKKSGEIVPMEVNFNFDDPNLIILPLAFGKRQGREFIWNDLLSLETGSLKLANGRVIEKTLYNRRTRQDEPALFVALTFERREVLDSSNIKPMNLIGVDRGENIPAVIALTDPEGCPLSRFKDSLGNPTHILRIGESYKEKQRTIQAKKEVEQRRAGGYSRKYASKAKNLADDMVRNTARDLLYYAVTQDAMLIFENLSRGFGRQGKRTFMAERQYTRMEDWLTAKLAYEGLPSKVYLSKTLAQYTSKTCSNCGFTITSADYDRVLEKLKKTATGWMTTINGKELKVEGQITYYNRYKRQNVVKDLSVELDRLSEESVNNDISSWTKGRSGEALSLLKKRFSHRPVQEKFVCLNCGFETHADEQAALNIARSWLFLRSQEYKKYQTNKTTGNTDKRAFVETWQSFYRKKLKEVWKPAV

SEQ ID NO: 40395 - protein, 979 aa, synthetic construct
  REGION 1..979: note = engineered CasX variant
QEIKRINKIRRRLVKDSNTKKAGKTGPMKTLLVRVMTPDLRERLENLRKKPENIPQPISNTSRANLNKLLTDYTEMKKAILHVYWEEFQKDPVGLMSRVAQPASKKIDQNKLKPEMDEKGNLTTAGFACSQCGQPLFVYKLEQVSEKGKAYTNYVGRCNVAEHEKLILLAQLKPEKDSDEAVTYSLGKFGQRALDFYSIHVTKESTHPVKPLAQIAGNRYASGPVGKALRDACMGTIASFLSKYQDIIIEHQKVVKGNQKRLESLRELAGKENLEYPSVTLPPQPHTKEGVDAYNEVIARVRMWVNLNLWQKLKLSRDDAKPLLRLKGFPSFPLVERQANEVDWWDMVCNVKKLINEKKEDGKVFWQNLAGYKRQEALRPYLSSEEDRKKGKKFARYQLGDLLLHLEKKHGEDWGKVYDEAWERIDKKVEGLSKHIKLEEERRSEDAQSKAALTDWLRAKASFVIEGLKEADKDEFCRCELKLQKWYGDLRGKPFAIEAENSILDISGFSKQYNCAFIWQKDGVKKLNLYLIINYFKGGKLRFKKIKPEAFEANRFYTVINKKSGEIVPMEVNFNFDDPNLIILPLAFGKRQGREFIWNDLLSLETGSLKLANGRVIEKTLYNRRTRQDEPALFVALTFERREVLDSSNIKPMNLIGVDRGENIPAVIALTDPEGCPLSRFKDSLGNPTHILRIGESYKEKQRTIQAKKEVEQRRAGGYSRKYASKAKNLADDMVRNTARDLLYYAVTQDAMLIFENLSRGFGRQGKRTFMAERQYTRMEDWLTAKLAYEGPLPSKTYLSKTLAQYTSKTCSNCGFTITSADYDRVLEKLKKTATGWMTTINGKELKVEGQITYYNRYKRQNVVKDLSVELDRLSEESVNNDISSWTKGRSGEALSLLKKRFSHRPVQEKFVCLNCGFETHADEQAALNIARSWLFLRSQEYKKYQTNKTTGNTDKRAFVETWQSFYRKKLKEVWKPAV

SEQ ID NO: 40396 - protein, 979 aa, synthetic construct
  REGION 1..979: note = engineered CasX variant
QEIKRINKIRRRLVKDSNTKKAGKTGPMKTLLVRVMTPDLRERLENLRKKPENIPQPISNTSRANLNKLLTDYTEMKKAILHVYWEEFQKDPVGLMSRVAQPASKKIDQNKLKPEMDEKGNLTTAGFACSQCGQPLFVYKLEQVSEKGKAYTNYVGRCNVAEHEKLILLAQLKPEKDSDEAVTYSLGKFGQRALDFYSIHVTKESTHPVKPLAQIAGNRYASGPVGKALRDACMGTIASFLSKYQDIIIEHQKVVKGNQKRLESLRELAGKENLEYPSVTLPPQPHTKEGVDAYNEVIARVRMWVNLNLWQKLKLSRDDAKPLLRLKGFPSFPLVERQANEVDWWDMVCNVKKLINEKKEDGKVFWQNLAGYKRQEALRPYLSSEEDVRKKGKKFARYQLGDLLLHLEKKHGEDWGKVYDEAWERIDKKVEGLSKHIKLEEERRSEDAQSKAALTDWLRAKASFVIEGLKEADKDEFCRCELKLQKWYGDLRGKPFAIEAENSILDISGFSKQYNCAFIWQKDGVKKLNLYLIINYFKGGKLRFKKIKPEAFEANRFYTVINKKSGEIVPMEVNFNFDDPNLIILPLAFGKRQGREFIWNDLLSLETGSLKLANGRVIEKTLYNRRTRQDEPALFVALTFERREVLDSSNIKPMNLIGVDRGENIPAVIALTDPEGCPLSRFKDSLGNPTHILRIGESYKEKQRTIQAKKEVEQRRAGGYSRKYASKAKNLADDMVRNTARDLLYYAVTQDAMLIFENLSRGFGRQGKRTFMAERQYTRMEDWLTAKLAYEGLPSKTYLSKTLAQYTSKTCSNCGFTITSADYDRVLEKLKKTATGWMTTINGKELKVEGQITYYNRYKRQNVVKDLSVELDRLSEESVNNDISSWTKGRSGEALSLLKKRFSHRPVQEKFVCLNCGFETHADEQAALNIARSWLFLRSQEYKKYQTNKTTGNTDKRAFVETWQSFYRKKLKEVWKPAV

SEQ ID NO: 40397 - protein, 978 aa, synthetic construct
  REGION 1..978: note = engineered CasX variant
QEIKRINKIRRRLVKDSNTKKAGKTGPMKTLLVRVMTPDLRERLENLRKKPENIPQPISNTSRANLNKLLTDYTEMKKAILHVYWEEFQKDPVGLMSRVAQPASKKIDQNKLKPEMDEKGNLTTAGFACSQCGQPLFVYKLEQVSEKGKAYTNYVGRCNVAEHEKLILLAQLKPEKDSDEAVTYSLGKFGQRALDFYSIHVTKESTHPVKPLAQIAGNRYASGPVGKALRDACMGTIASFLSKYQDIIIEHQKVVKGNQKRLESLRELAGKENLEYPSVTLPPQPHTKEGVDAYNEVIARVRMWVNLNLWQKLKLSRDDAKPLLRLKGFPSFPLVERQANEVDWWDMVCNVKKLINEKKEDGKVFWQNLAGYKRQEALRPYLSSEEDRKKGKKFARYQLGDLLLHLEKKHGEDWGKVYDEAWERIDKKVEGLSKHIKLEEERRSEDAQSKAALTDWLRAKASFVIEGLKEADKDEFCRCELKLQKWYGDLRGKPFAIEAENSILDISGFSKQYNCAFIWQKDGVKKLNLYLIINYFKGGKLRFKKIKPEAFEANRFYTVINKKSGEIVPMEVNFNFDDPNLIILPLAFGKRQGREFIWNDLLSLETGSLKLANGRVIEKTLYNRRTRQDEPALFVALTFERREVLDSSNIKPMNLIGVDRGENIPAVIALTDPEGCPLSRFKDSLGNPTHILRIGESYKEKQRTIQAKKEVEQRRAGGYSRKYASKAKNLADDMVRNTARDLLYYAVTQDAMLIFENLSRGFGRQGKRTFMAERQYTRMEDWLTAKLAYEGLPSKTYLSKTLAQYTSKTCSNCGFTITSADYDRMLEKLKKTATGWMTTINGKELKVEGQITYYNRYKRQNVVKDLSVELDRLSEESVNNDISSWTKGRSGEALSLLKKRFSHRPVQEKFVCLNCGFETHADEQAALNIARSWLFLRSQEYKKYQTNKTTGNTDKRAFVETWQSFYRKKLKEVWKPAV

SEQ ID NO: 40398 - protein, 978 aa, synthetic construct
  REGION 1..978: note = engineered CasX variant
QEIKRINKIRRRLVKDSNTKKAGKTGPMKTLLVRVMTPDLRERLENLRKKPENIPQPISNTSRANLNKLLTDYTEMKKAILHVYWEEFQKDPVGLMSRVAQPASKKIDQNKLKPEMDEKGNLTTAGFACSQCGQPLFVYKLEQVSEKGKAYTNYVGRCNVAEHEKLILLAQLKPEKDSDEAVTYSLGKFGQRALDFYSIHVTKESTHPVKPLAQIAGNRYASGPVGKALRDACMGTIASFLSKYQDIIIEHQKVVKGNQKRLESLRELAGKENLEYPSVTLPPQPHTKEGVDAYNEVIARVRMWVNLNLWQKLKLSRDDAKPLLRLKGFPSFPLVERQANEVDWWDMVCNVKKLINEKKEDGKVFWQNLAGYKRQEALRPYLSSEEDRKKGKKFARYQLGDLLLHLEKKHGEDWGKVYDEAWERIDKKVEGLSKHIKLEEERRSEDAQSKAALTDWLRAKASFVIEGLKEADKDEFCRCELKLQKWYGDLRGKPFAIEAENSILDISGFSKQYNCAFIWQKDGVKKLNLYLIINYFKGGKLRFKKIKPEAFEANRFYTVINKKSGEIVPMEVNFNFDDPNLIILPLAFGKRQGREFIWNDLLSLETGSLKLANGRVIEKTLYNRRTRQDEPALFVALTFERREVLDSSNIKPMNLIGVDRGENIPAVIALTDPEGCPLSRFKDSLGNPTHILRIGESYKEKQRTIQAKKEVEQRRAGGYSRKYASKAKNLADDMVRNTARDLLYYAVTQDAMLIFENLSRGFGRQGKRTFMAERQYTRMEDWLTAKLAYEGLPSKTYLSKTLAQYTSKTCSNCGFTITSADYDRVLEKLKKTATGWMTTINGKELKVEGQITYYNRYKRQNVVKDLSVELDRLSEESVNNDISSWTKGRQGEALSLLKKRFSHRPVQEKFVCLNCGFETHADEQAALNIARSWLFLRSQEYKKYQTNKTTGNTDKRAFVETWQSFYRKKLKEVWKPAV

SEQ ID NO: 40399 - protein, 978 aa, synthetic construct
  REGION 1..978: note = engineered CasX variant
QEIKRINKIRRRLVKDSNTKKAGKTGPMKTLLVRVMTPDLRERLENLRKKPENIPQPISNTSRANLNKLLTDYTEMKKAILHVYWEEFQKDPVGLMSRVAQPASKKIDQNKLKPEMDEKGNLTTAGFACSQCGQPLFVYKLEQVSEKGKAYTNYVGRCNVAEHEKLILLAQLKPEKDSDEAVTYSLGKFGQRALDFYSIHVTKESTHPVKPLAQIAGNRYASGPVGKALRDACMGTIASFLSKYQDIIIEHQKVVKGNQKRLESLRELAGKENLEYPSVTLPPQPHTKEGVDAYNEVIARVRMWVNLNLWQKLKLSRDDAKPLLRLKGFPSFPLVERQANEVDWWDMVCNVKKLINEKKEDGKVFWQNLAGYKRQEALRPYLSSEEDRKKGKKFARYQLGDLLLHLEKKHGEDWGKVYDEAWERIDKKVEGLSKHIKLEEERRSEDAQSKAALTDWLRAKASFVIEGLKEADKDEFCRCELKLQKWYGDLRGKPFAIEAENSILDISGFSKQYNCAFIWQKDGVKKLNLYLIINYFKGGKLRFKKIKPEAFEANRFYTVINKKSGEIVPMEVNFNFDDPNLIILPLAFGKRQGREFIWNDLLSLETGSLKLANGRVIEKTLYNRRTRQDEPALFVALTFERREVLDSSNIKPMNLIGVDRGENIPAVIALTDPEGCPLSRFKDSLGNPTHILRIGESYKEKQRTIQAKKEVEQRRAGGYSRKYASKAKNLADDMVRNTARDLLYYAVTQDAMLIFENLSRGFGRQGKRTFMAERQYTRMEDWLTAKLAYEGLPSKTYLSKTLAQYTSKTCSNCGFTITSADYDRVLEKLKKTATGWMTTINGKELKVEGQITYYNRYKRQNVVKDLSVELDRLSEESVNNDISSWTKGRSGEALSLLKKRFSHRPVQEKFVCLNCEFETHADEQAALNIARSWLFLRSQEYKKYQTNKTTGNTDKRAFVETWQSFYRKKLKEVWKPAV

SEQ ID NO: 40400 - protein, 979 aa, synthetic construct
  REGION 1..979: note = engineered CasX variant
QEIKRINKIRRRLVKDSNTKKAGKTGPMKTLLVRVMTPDLRERLENLRKKPENIPQPISNTSRANLNKLLTDYTEMKKAILHVYWEEFQKDPVGLMSRVAQPASKKIDQNKLKPEMDEKGNLTTAGFACSQCGQPLFVYKLEQVSEKGKAYTNYVGRCNVAEHEKLILLAQLKPEKDSDEAVTYSLGKFGQRALDFYSIHVTKESTHPVKPLAQIAGNRYASGPVGKALRDACMGTIASFLSKYQDIIIEHQKVVKGNQKRLESLRELAGKENLEYPSVTLPPQPHTKEGVDAYNEVIARVRMWVNLNLWQKLKLSRDDAKPLLRLKGFPSFPLVERQANEVDWWDMVCNVKKLINEKKEDGKVFWQNLAGYKRQEALRPYLSSEEDRKKGKKFARYQLGDLLLHLEKKHGEDWGKVYDEAWERIDKKVEGLSKHIKLEEERRSEDAQSKAALTDWLRAKASFVIEGLKEADKDEFCRCELKLQKWYGDLRGKPFAIEAENSILDISGFSKQYNCAFIWQKDGVKKLNLYLIINYFKGGKLRFKKIKPEAFEANRFYTVINKKSGEIVPMEVNFNFDDPNLIILPLAFGKRQGREFIWNDLLSLETGSLKLANGRVIEKTLYNRRTRQDEPALFVALTFERREVLDSSNIKPMNLIGVDRGENIPAVIALTDPEGCPLSRFKDSLGNPTHILRIGESYKEKQRTIQAKKEVEQRRAGGYSRKYASKAKNLADDMVRNTARDLLYYAVTQDAMLIFENLSRGFGRQGKRTFMAERQYTRMEDWLTAKLAYEGLPSKTYLSKTLAQYTSKTCSNCGFTITSADYDRVLEKLKKTATGWMTTINGKELKVEGQITYYNRYKRQNVVKDLSVELDRLSEESVNNDISSWTKGRSGEALSLLKKRFSHRPVQEKFVCLNCGFETHADEQAALNIARSWLFLRSQEYKKYQTNKTSTGNTDKRAFVETWQSFYRKKLKEVWKPAV

SEQ ID NO: 40401 - protein, 979 aa, synthetic construct
  REGION 1..979: note = engineered CasX variant
QEIKRINKIRRRLVKDSNTKKAGKTGPMKTLLVRVMTPDLRERLENLRKKPENIPQPISNTSRANLNKLLTDYTEMKKAILHVYWEEFQKDPVGLMSRVAQPASKKIDQNKLKPEMDEKGNLTTAGFACSQCGQPLFVYKLEQVSEKGKAYTNYVGRCNVAEHEKLILLAQLKPEKDSDEAVTYSLGKFGQRALDFYSIHVTKESTHPVKPLAQIAGNRYASGPVGKALRDACMGTIASFLSKYQDIIIEHQKVVKGNQKRLESLRELAGKENLEYPSVTLPPQPHTKEGVDAYNEVIARVRMWVNLNLWQKLKLSRDDAKPLLRLKGFPSFPLVERQANEVDWWDMVCNVKKLINEKKEDGKVFWQNLAGYKRQEALRPYLSSEEDRKKGKKFARYQLGDLLLHLEKKHGEDWGKVYDEAWERIDKKVEGLSKHIKLEEERRSEDAQSKAALTDWLRAKASFVIEGLKEADKDEFCRCELKLQKWYGDLRGKPFAIEAENSILDISGFSKQYNCAFIWQKDGVKKLNLYLIINYFKGGKLRFKKIKPEAFEANRFYTVINKKSGEIVPMEVNFNFDDPNLIILPLAFGKRQGREFIWNDLLSLETGSLKLANGRVIEKTLYNRRTRQDEPALFVALTFERREVLDSSNIKPMNLIGVDRGENIPAVIALTDPEGCPLSRFKDSLGNPTHILRIGESYKEKQRTIQAKKEVEQRRAGGYSRKYASKAKNLADDMVRNTARDLLYYAVTQDAMLIFENLSRGFGRQGKRTFMAERQYTRMEDWLTAKLAYEGLPSKTYLSKTLAQYTSKTCSNCGFTITSADYDRVLEKLKKTATGWMTTINGKELKVEGQITYYNRYKRQNVVKDLSVELDRLSEESVNNDISSWTKGRSGEALSLLKKRFSHRPVQEKFVCLNCGFETHADEQAALNIARSWLFLRSQEYKKYQTNKTTGKNTDKRAFVETWQSFYRKKLKEVWKPAV

SEQ ID NO: 40402 - protein, 978 aa, synthetic construct
  REGION 1..978: note = engineered CasX variant
QEIKRINKIRRRLVKDSNTKKAGKTGPMKTLLVRVMTPDLRERLENLRKKPENIPQPISNTSRANLNKLLTDYTEMKKAILHVYWEEFQKDPVGLMSRVAQPASKKIDQNKLKPEMDEKGNLTTAGFACSQCGQPLFVYKLEQVSEKGKAYTNYVGRCNVAEHEKLILLAQLKPEKDSDEAVTYSLGKFGQRALDFYSIHVTKESTHPVKPLAQIAGNRYASGPVGKALRDACMGTIASFLSKYQDIIIEHQKVVKGNQKRLESLRELAGKENLEYPSVTLPPQPHTKEGVDAYNEVIARVRMWVNLNLWQKLKLSRDDAKPLLRLKKFPSFPLVERQANEVDWWDMVCNVKKLINEKKEDGKVFWQNLAGYKRQEALRPYLSSEEDRKKGKKFARYQLGDLLLHLEKKHGEDWGKVYDEAWERIDKKVEGLSKHIKLEEERRSEDAQSKAALTDWLRAKASFVIEGLKEADKDEFCRCELKLQKWYGDLRGKPFAIEAENSILDISGFSKQYNCAFIWQKDGVKKLNLYLIINYFKGGKLRFKKIKPEAFEANRFYTVINKKSGEIVPMEVNFNFDDPNLIILPLAFGKRQGREFIWNDLLSLETGSLKLANGRVIEKTLYNRRTRQDEPALFVALTFERREVLDSSNIKPMNLIGVDRGENIPAVIALTDPEGCPLSRFKDSLGNPTHILRIGESYKEKQRTIQAKKEVEQRRAGGYSRKYASKAKNLADDMVRNTARDLLYYAVTQDAMLIFENLSRGFGRQGKRTFMAERQYTRMEDWLTAKLAYEGLPSKTYLSKTLAQYTSKTCSNCGFTITSADYDRVLEKLKKTATGWMTTINGKELKVEGQITYYNRYKRQNVVKDLSVELDRLSEESVNNDISSWTKGRSGEALSLLKKRFSHRPVQEKFVCLNCGFETHADEQAALNIARSWLFLRSQEYKKYQTNKTTGNTDKRAFVETWQSFYRKKLKEVWKPAV

SEQ ID NO: 40403 - protein, 978 aa, synthetic construct
  REGION 1..978: note = engineered CasX variant
QEIKRINKIRRRLVKDSNTKKAGKTGPMKTLLVRVMTPDLRERLENLRKKPENIPQPISNTSRANLNKLLTDYTEMKKAILHVYWEEFQKDPVGLMSRVAQPASKKIDQNKLKPEMDEKGNLTTAGFACSQCGQPLFVYKLEQVSEKGKAYTNYVGRCNVAEHEKLILLAQLKPEKDSDEAVTYSLGKFGQRALDFYSIHVTKESTHPVKPLAQIAGNRYASGPVGKALRDACMGTIASFLSKYQDIIIEHQKVVKGNQKRLESLRELAGKENLEYPSVTLPPQPHTKEGVDAYNEVIARVRMWVNLNLWQKLKLSRDDAKPLLRLKGFPSFPLVERQANEVDWWDMVCNVKKLINEKKEDGKVFWQNLAGYKRQEALRPYLSSEEDRKKGKKFARYQLGDLLLHLEKKHGEDWGKVYDEAWERIDKKVEGLSKHIKLEEERRSEDAQSKAALTDWLRAKASFVIEGLKEADKDEFCRCELKLQKWYGDLRGKPFAIEAENSILDISGFSKQYNCAFIWQKDGVKKLNLYLIINYFKGGKLRFKKIKPEAFEANRFYTVINKKSGEIVPMEVNFNFDDPNLIILPLAFGKRQGREFIWNDLLSLETGSLKLANGRVIEKTLYNRRTRQDEPALFVALTFERREVLDSSNIKPMNLIGVDRGENIPAVIALTDPEGCPLSRFKDSLGNPTHILRIGERYKEKQRTIQAKKEVEQRRAGGYSRKYASKAKNLADDMVRNTARDLLYYAVTQDAMLIFENLSRGFGRQGKRTFMAERQYTRMEDWLTAKLAYEGLPSKTYLSKTLAQYTSKTCSNCGFTITSADYDRVLEKLKKTATGWMTTINGKELKVEGQITYYNRYKRQNVVKDLSVELDRLSEESVNNDISSWTKGRSGEALSLLKKRFSHRPVQEKFVCLNCGFETHADEQAALNIARSWLFLRSQEYKKYQTNKTTGNTDKRAFVETWQSFYRKKLKEVWKPAV

SEQ ID NO: 40404 - protein, 978 aa, synthetic construct
  REGION 1..978: note = engineered CasX variant
QEIKRINKIRRRLVKDSNTKKAGKTGPMKTLLVRVMTPDLRERLENLRKKPENIPQPISNTSRANLNKLLTDYTEMKKAILHVYWEEFQKDPVGLMSRVAQPASKKIDQNKLKPEMDEKGNLTTAGFACSQCGQPLFVYKLEQVSEKGKAYTNYVGRCNVAEHEKLILLAQLKPEKDSDEAVTYSLGKFGQRALDFYSIHVTKESTHPVKPLAQIAGNRYASGPVGKALRDACMGTIASFLSKYQDIIIEHQKVVKGNQKRLESLRELAGKENLEYPSVTLPPQPHTKEGVDAYNEVIARVRMWVNLNLWQKLKLSRDDAKPLLRLKGFPSFPLVERQANEVDWWDMVCNVKKLINEKKEDGKVFWQNLAGYKRQEALRPYLSSEEDRKKGKKFARYQLGDLLLHLEKKHGEDWGKVYDEAWERIDKKVEGLSKHIKLEEERRSEDAQSKAALTDWLRAKASFVIEGLKEADKDEFCRCELKLQKWYGDLRGKPFAIEAENSILDISGFSKQYNCAFIWQKDGVKKLNLYLIINYFKGGKLRFKKIKPEAFEANRFYTVINKKSGEIVPMEVNFNFDDPNLIILPLAFGKRQGREFIWNDLLSLETGSLQLANGRVIEKTLYNRRTRQDEPALFVALTFERREVLDSSNIKPMNLIGVDRGENIPAVIALTDPEGCPLSRFKDSLGNPTHILRIGESYKEKQRTIQAKKEVEQRRAGGYSRKYASKAKNLADDMVRNTARDLLYYAVTQDAMLIFENLSRGFGRQGKRTFMAERQYTRMEDWLTAKLAYEGLPSKTYLSKTLAQYTSKTCSNCGFTITSADYDRVLEKLKKTATGWMTTINGKELKVEGQITYYNRYKRQNVVKDLSVELDRLSEESVNNDISSWTKGRSGEALSLLKKRFSHRPVQEKFVCLNCGFETHADEQAALNIARSWLFLRSQEYKKYQTNKTTGNTDKRAFVETWQSFYRKKLKEVWKPAV

SEQ ID NO: 40405 - protein, 978 aa, synthetic construct
  REGION 1..978: note = engineered CasX variant
QEIKRINKIRRRLVKDSNTKKAGKTGPMKTLLVRVMTPDLRERLENLRKKPENIPQPISNTSRANLNKLLTDYTEMKKAILHVYWEEFQKDPVGLMSRVAQPASKKIDQNKLKPEMDEKGNLTTAGFACSQCGQPLFVYKLEQVSEKGKAYTNYFGRCNVAEHEKLILLAQLKPEKDSDEAVTYSLGKFGQRALDFYSIHVTKESTHPVKPLAQIAGNRYASGPVGKALRDACMGTIASFLSKYQDIIIEHQKVVKGNQKRLESLRELAGKENLEYPSVTLPPQPHTKEGVDAYNEVIARVRMWVNLNLWQKLKLSRDDAKPLLRLKGFPSFPLVERQANEVDWWDMVCNVKKLINEKKEDGKVFWQNLAGYKRQEALRPYLSSEEDRKKGKKFARYQLGDLLLHLEKKHGEDWGKVYDEAWERIDKKVEGLSKHIKLEEERRSEDAQSKAALTDWLRAKASFVIEGLKEADKDEFCRCELKLQKWYGDLRGKPFAIEAENSILDISGFSKQYNCAFIWQKDGVKKLNLYLIINYFKGGKLRFKKIKPEAFEANRFYTVINKKSGEIVPMEVNFNFDDPNLIILPLAFGKRQGREFIWNDLLSLETGSLKLANGRVIEKTLYNRRTRQDEPALFVALTFERREVLDSSNIKPMNLIGVDRGENIPAVIALTDPEGCPLSRFKDSLGNPTHILRIGESYKEKQRTIQAKKEVEQRRAGGYSRKYASKAKNLADDMVRNTARDLLYYAVTQDAMLIFENLSRGFGRQGKRTFMAERQYTRMEDWLTAKLAYEGLASKVYLSKTLAQYTSKTCSNCGFTITSADYDRVLEKLKKTATGWMTTINGKELKVEGQITYYNRYKRQNVVKDLSVELDRLSEESVNNDISSWTKGRSGEALSLLKKRFSHRPVQEKFVCLNCGFETHADEQAALNIARSWLFLRSQEYKKYQTNKTTGNTDKRAFVETWQSFYRKKLKEVWKPAV

SEQ ID NO: 40406 - protein, 979 aa, synthetic construct
  REGION 1..979: note = engineered CasX variant
QEIKRINKIRRRLVKDSNTKKAGKTGPMKTLLVRVMTPDLRERLENLRKKPENIPQPISNTSRANLNKLLTDYTEMKKAILHVYWEEFQKDPVGLMSRVAQPASKKIDQNKLKPEMDEKGNLTTAGFACSQCGQPLFVYKLEQVSEKGKAYTNYFGRCNVAEHEKLILLAQLKPEKDSDEAVTYSLGKFGQRALDFYSIHVTKESTHPVKPLAQIAGNRYASGPVGKALRDACMGTIASFLSKYQDIIIEHQKVVKGNQKRLESLRELAGKENLEYPSVTLPPQPHTKEGVDAYNEVIARVRMWVNLNLWQKLKLSRDDAKPLLRLKGFPSFPLVERQANEVDWWDMVCNVKKLINEKKEDGKVFWQNLAGYKRQEALRPYLSSEEDRKKGKKFARYQLGDLLLHLEKKHGEDWGKVYDEAWERIDKKVEGLSKHIKLEEERRSEDAQSKAALTDWLRAKASFVIEGLKEADKDEFCRCELKLQKWYGDLRGKPFAIEAENSILDISGFSKQYNCAFIWQKDGVKKLNLYLIINYFKGGKLRFKKIKPEAFEANRFYTVINKKSGEIVPMEVNFNFDDPNLIILPLAFGKRQGREFIWNDLLSLETGSLKLANGRVIEKTLYNRRTRQDEPALFVALTFERREVLDSSNIKPMNLIGVDRGENIPAVIALTDPEGCPLSRFKDSLGNPTHILRIGESYKEKQRTIQAKKEVEQRRAGGYSRKYASKAKNLADDMVRNTARDLLYYAVTQDAMLIFENLSRGFGRQGKRTFMAERQYTRMEDWLTAKLAYEGPLASKTYLSKTLAQYTSKTCSNCGFTITSADYDRVLEKLKKTATGWMTTINGKELKVEGQITYYNRYKRQNVVKDLSVELDRLSEESVNNDISSWTKGRSGEALSLLKKRFSHRPVQEKFVCLNCGFETHADEQAALNIARSWLFLRSQEYKKYQTNKTTGNTDKRAFVETWQSFYRKKLKEVWKPAV

SEQ ID NO: 40407 - protein, 979 aa, synthetic construct
  REGION 1..979: note = engineered CasX variant
QEIKRINKIRRRLVKDSNTKKAGKTGPMKTLLVRVMTPDLRERLENLRKKPENIPQPISNTSRANLNKLLTDYTEMKKAILHVYWEEFQKDPVGLMSRVAQPASKKIDQNKLKPEMDEKGNLTTAGFACSQCGQPLFVYKLEQVSEKGKAYTNYFGRCNVAEHEKLILLAQLKPEKDSDEAVTYSLGKFGQRALDFYSIHVTKESTHPVKPLAQIAGNRYASGPVGKALRDACMGTIASFLSKYQDIIIEHQKVVKGNQKRLESLRELAGKENLEYPSVTLPPQPHTKEGVDAYNEVIARVRMWVNLNLWQKLKLSRDDAKPLLRLKGFPSFPLVERQANEVDWWDMVCNVKKLINEKKEDGKVFWQNLAGYKRQEALRPYLSSEEDVRKKGKKFARYQLGDLLLHLEKKHGEDWGKVYDEAWERIDKKVEGLSKHIKLEEERRSEDAQSKAALTDWLRAKASFVIEGLKEADKDEFCRCELKLQKWYGDLRGKPFAIEAENSILDISGFSKQYNCAFIWQKDGVKKLNLYLIINYFKGGKLRFKKIKPEAFEANRFYTVINKKSGEIVPMEVNFNFDDPNLIILPLAFGKRQGREFIWNDLLSLETGSLKLANGRVIEKTLYNRRTRQDEPALFVALTFERREVLDSSNIKPMNLIGVDRGENIPAVIALTDPEGCPLSRFKDSLGNPTHILRIGESYKEKQRTIQAKKEVEQRRAGGYSRKYASKAKNLADDMVRNTARDLLYYAVTQDAMLIFENLSRGFGRQGKRTFMAERQYTRMEDWLTAKLAYEGLASKTYLSKTLAQYTSKTCSNCGFTITSADYDRVLEKLKKTATGWMTTINGKELKVEGQITYYNRYKRQNVVKDLSVELDRLSEESVNNDISSWTKGRSGEALSLLKKRFSHRPVQEKFVCLNCGFETHADEQAALNIARSWLFLRSQEYKKYQTNKTTGNTDKRAFVETWQSFYRKKLKEVWKPAV

SEQ ID NO: 40408 - protein, 978 aa, synthetic construct
  REGION 1..978: note = engineered CasX variant
QEIKRINKIRRRLVKDSNTKKAGKTGPMKTLLVRVMTPDLRERLENLRKKPENIPQPISNTSRANLNKLLTDYTEMKKAILHVYWEEFQKDPVGLMSRVAQPASKKIDQNKLKPEMDEKGNLTTAGFACSQCGQPLFVYKLEQVSEKGKAYTNYFGRCNVAEHEKLILLAQLKPEKDSDEAVTYSLGKFGQRALDFYSIHVTKESTHPVKPLAQIAGNRYASGPVGKALRDACMGTIASFLSKYQDIIIEHQKVVKGNQKRLESLRELAGKENLEYPSVTLPPQPHTKEGVDAYNEVIARVRMWVNLNLWQKLKLSRDDAKPLLRLKGFPSFPLVERQANEVDWWDMVCNVKKLINEKKEDGKVFWQNLAGYKRQEALRPYLSSEEDRKKGKKFARYQLGDLLLHLEKKHGEDWGKVYDEAWERIDKKVEGLSKHIKLEEERRSEDAQSKAALTDWLRAKASFVIEGLKEADKDEFCRCELKLQKWYGDLRGKPFAIEAENSILDISGFSKQYNCAFIWQKDGVKKLNLYLIINYFKGGKLRFKKIKPEAFEANRFYTVINKKSGEIVPMEVNFNFDDPNLIILPLAFGKRQGREFIWNDLLSLETGSLKLANGRVIEKTLYNRRTRQDEPALFVALTFERREVLDSSNIKPMNLIGVDRGENIPAVIALTDPEGCPLSRFKDSLGNPTHILRIGESYKEKQRTIQAKKEVEQRRAGGYSRKYASKAKNLADDMVRNTARDLLYYAVTQDAMLIFENLSRGFGRQGKRTFMAERQYTRMEDWLTAKLAYEGLASKTYLSKTLAQYTSKTCSNCGFTITSADYDRMLEKLKKTATGWMTTINGKELKVEGQITYYNRYKRQNVVKDLSVELDRLSEESVNNDISSWTKGRSGEALSLLKKRFSHRPVQEKFVCLNCGFETHADEQAALNIARSWLFLRSQEYKKYQTNKTTGNTDKRAFVETWQSFYRKKLKEVWKPAV

SEQ ID NO: 40409 - protein, 978 aa, synthetic construct
  REGION 1..978: note = engineered CasX variant
QEIKRINKIRRRLVKDSNTKKAGKTGPMKTLLVRVMTPDLRERLENLRKKPENIPQPISNTSRANLNKLLTDYTEMKKAILHVYWEEFQKDPVGLMSRVAQPASKKIDQNKLKPEMDEKGNLTTAGFACSQCGQPLFVYKLEQVSEKGKAYTNYFGRCNVAEHEKLILLAQLKPEKDSDEAVTYSLGKFGQRALDFYSIHVTKESTHPVKPLAQIAGNRYASGPVGKALRDACMGTIASFLSKYQDIIIEHQKVVKGNQKRLESLRELAGKENLEYPSVTLPPQPHTKEGVDAYNEVIARVRMWVNLNLWQKLKLSRDDAKPLLRLKGFPSFPLVERQANEVDWWDMVCNVKKLINEKKEDGKVFWQNLAGYKRQEALRPYLSSEEDRKKGKKFARYQLGDLLLHLEKKHGEDWGKVYDEAWERIDKKVEGLSKHIKLEEERRSEDAQSKAALTDWLRAKASFVIEGLKEADKDEFCRCELKLQKWYGDLRGKPFAIEAENSILDISGFSKQYNCAFIWQKDGVKKLNLYLIINYFKGGKLRFKKIKPEAFEANRFYTVINKKSGEIVPMEVNFNFDDPNLIILPLAFGKRQGREFIWNDLLSLETGSLKLANGRVIEKTLYNRRTRQDEPALFVALTFERREVLDSSNIKPMNLIGVDRGENIPAVIALTDPEGCPLSRFKDSLGNPTHILRIGESYKEKQRTIQAKKEVEQRRAGGYSRKYASKAKNLADDMVRNTARDLLYYAVTQDAMLIFENLSRGFGRQGKRTFMAERQYTRMEDWLTAKLAYEGLASKTYLSKTLAQYTSKTCSNCGFTITSADYDRVLEKLKKTATGWMTTINGKELKVEGQITYYNRYKRQNVVKDLSVELDRLSEESVNNDISSWTKGRQGEALSLLKKRFSHRPVQEKFVCLNCGFETHADEQAALNIARSWLFLRSQEYKKYQTNKTTGNTDKRAFVETWQSFYRKKLKEVWKPAV

SEQ ID NO: 40410 - protein, 978 aa, synthetic construct
  REGION 1..978: note = engineered CasX variant
QEIKRINKIRRRLVKDSNTKKAGKTGPMKTLLVRVMTPDLRERLENLRKKPENIPQPISNTSRANLNKLLTDYTEMKKAILHVYWEEFQKDPVGLMSRVAQPASKKIDQNKLKPEMDEKGNLTTAGFACSQCGQPLFVYKLEQVSEKGKAYTNYFGRCNVAEHEKLILLAQLKPEKDSDEAVTYSLGKFGQRALDFYSIHVTKESTHPVKPLAQIAGNRYASGPVGKALRDACMGTIASFLSKYQDIIIEHQKVVKGNQKRLESLRELAGKENLEYPSVTLPPQPHTKEGVDAYNEVIARVRMWVNLNLWQKLKLSRDDAKPLLRLKGFPSFPLVERQANEVDWWDMVCNVKKLINEKKEDGKVFWQNLAGYKRQEALRPYLSSEEDRKKGKKFARYQLGDLLLHLEKKHGEDWGKVYDEAWERIDKKVEGLSKHIKLEEERRSEDAQSKAALTDWLRAKASFVIEGLKEADKDEFCRCELKLQKWYGDLRGKPFAIEAENSILDISGFSKQYNCAFIWQKDGVKKLNLYLIINYFKGGKLRFKKIKPEAFEANRFYTVINKKSGEIVPMEVNFNFDDPNLIILPLAFGKRQGREFIWNDLLSLETGSLKLANGRVIEKTLYNRRTRQDEPALFVALTFERREVLDSSNIKPMNLIGVDRGENIPAVIALTDPEGCPLSRFKDSLGNPTHILRIGESYKEKQRTIQAKKEVEQRRAGGYSRKYASKAKNLADDMVRNTARDLLYYAVTQDAMLIFENLSRGFGRQGKRTFMAERQYTRMEDWLTAKLAYEGLASKTYLSKTLAQYTSKTCSNCGFTITSADYDRVLEKLKKTATGWMTTINGKELKVEGQITYYNRYKRQNVVKDLSVELDRLSEESVNNDISSWTKGRSGEALSLLKKRFSHRPVQEKFVCLNCEFETHADEQAALNIARSWLFLRSQEYKKYQTNKTTGNTDKRAFVETWQSFYRKKLKEVWKPAV

SEQ ID NO: 40411 - protein, 979 aa, synthetic construct
  REGION 1..979: note = engineered CasX variant
QEIKRINKIRRRLVKDSNTKKAGKTGPMKTLLVRVMTPDLRERLENLRKKPENIPQPISNTSRANLNKLLTDYTEMKKAILHVYWEEFQKDPVGLMSRVAQPASKKIDQNKLKPEMDEKGNLTTAGFACSQCGQPLFVYKLEQVSEKGKAYTNYFGRCNVAEHEKLILLAQLKPEKDSDEAVTYSLGKFGQRALDFYSIHVTKESTHPVKPLAQIAGNRYASGPVGKALRDACMGTIASFLSKYQDIIIEHQKVVKGNQKRLESLRELAGKENLEYPSVTLPPQPHTKEGVDAYNEVIARVRMWVNLNLWQKLKLSRDDAKPLLRLKGFPSFPLVERQANEVDWWDMVCNVKKLINEKKEDGKVFWQNLAGYKRQEALRPYLSSEEDRKKGKKFARYQLGDLLLHLEKKHGEDWGKVYDEAWERIDKKVEGLSKHIKLEEERRSEDAQSKAALTDWLRAKASFVIEGLKEADKDEFCRCELKLQKWYGDLRGKPFAIEAENSILDISGFSKQYNCAFIWQKDGVKKLNLYLIINYFKGGKLRFKKIKPEAFEANRFYTVINKKSGEIVPMEVNFNFDDPNLIILPLAFGKRQGREFIWNDLLSLETGSLKLANGRVIEKTLYNRRTRQDEPALFVALTFERREVLDSSNIKPMNLIGVDRGENIPAVIALTDPEGCPLSRFKDSLGNPTHILRIGESYKEKQRTIQAKKEVEQRRAGGYSRKYASKAKNLADDMVRNTARDLLYYAVTQDAMLIFENLSRGFGRQGKRTFMAERQYTRMEDWLTAKLAYEGLASKTYLSKTLAQYTSKTCSNCGFTITSADYDRVLEKLKKTATGWMTTINGKELKVEGQITYYNRYKRQNVVKDLSVELDRLSEESVNNDISSWTKGRSGEALSLLKKRFSHRPVQEKFVCLNCGFETHADEQAALNIARSWLFLRSQEYKKYQTNKTSTGNTDKRAFVETWQSFYRKKLKEVWKPAV

SEQ ID NO: 40412 - protein, 979 aa, synthetic construct
  REGION 1..979: note = engineered CasX variant
QEIKRINKIRRRLVKDSNTKKAGKTGPMKTLLVRVMTPDLRERLENLRKKPENIPQPISNTSRANLNKLLTDYTEMKKAILHVYWEEFQKDPVGLMSRVAQPASKKIDQNKLKPEMDEKGNLTTAGFACSQCGQPLFVYKLEQVSEKGKAYTNYFGRCNVAEHEKLILLAQLKPEKDSDEAVTYSLGKFGQRALDFYSIHVTKESTHPVKPLAQIAGNRYASGPVGKALRDACMGTIASFLSKYQDIIIEHQKVVKGNQKRLESLRELAGKENLEYPSVTLPPQPHTKEGVDAYNEVIARVRMWVNLNLWQKLKLSRDDAKPLLRLKGFPSFPLVERQANEVDWWDMVCNVKKLINEKKEDGKVFWQNLAGYKRQEALRPYLSSEEDRKKGKKFARYQLGDLLLHLEKKHGEDWGKVYDEAWERIDKKVEGLSKHIKLEEERRSEDAQSKAALTDWLRAKASFVIEGLKEADKDEFCRCELKLQKWYGDLRGKPFAIEAENSILDISGFSKQYNCAFIWQKDGVKKLNLYLIINYFKGGKLRFKKIKPEAFEANRFYTVINKKSGEIVPMEVNFNFDDPNLIILPLAFGKRQGREFIWNDLLSLETGSLKLANGRVIEKTLYNRRTRQDEPALFVALTFERREVLDSSNIKPMNLIGVDRGENIPAVIALTDPEGCPLSRFKDSLGNPTHILRIGESYKEKQRTIQAKKEVEQRRAGGYSRKYASKAKNLADDMVRNTARDLLYYAVTQDAMLIFENLSRGFGRQGKRTFMAERQYTRMEDWLTAKLAYEGLASKTYLSKTLAQYTSKTCSNCGFTITSADYDRVLEKLKKTATGWMTTINGKELKVEGQITYYNRYKRQNVVKDLSVELDRLSEESVNNDISSWTKGRSGEALSLLKKRFSHRPVQEKFVCLNCGFETHADEQAALNIARSWLFLRSQEYKKYQTNKTTGKNTDKRAFVETWQSFYRKKLKEVWKPAV

SEQ ID NO: 40413 - protein, 978 aa, synthetic construct
  REGION 1..978: note = engineered CasX variant
QEIKRINKIRRRLVKDSNTKKAGKTGPMKTLLVRVMTPDLRERLENLRKKPENIPQPISNTSRANLNKLLTDYTEMKKAILHVYWEEFQKDPVGLMSRVAQPASKKIDQNKLKPEMDEKGNLTTAGFACSQCGQPLFVYKLEQVSEKGKAYTNYFGRCNVAEHEKLILLAQLKPEKDSDEAVTYSLGKFGQRALDFYSIHVTKESTHPVKPLAQIAGNRYASGPVGKALRDACMGTIASFLSKYQDIIIEHQKVVKGNQKRLESLRELAGKENLEYPSVTLPPQPHTKEGVDAYNEVIARVRMWVNLNLWQKLKLSRDDAKPLLRLKKFPSFPLVERQANEVDWWDMVCNVKKLINEKKEDGKVFWQNLAGYKRQEALRPYLSSEEDRKKGKKFARYQLGDLLLHLEKKHGEDWGKVYDEAWERIDKKVEGLSKHIKLEEERRSEDAQSKAALTDWLRAKASFVIEGLKEADKDEFCRCELKLQKWYGDLRGKPFAIEAENSILDISGFSKQYNCAFIWQKDGVKKLNLYLIINYFKGGKLRFKKIKPEAFEANRFYTVINKKSGEIVPMEVNFNFDDPNLIILPLAFGKRQGREFIWNDLLSLETGSLKLANGRVIEKTLYNRRTRQDEPALFVALTFERREVLDSSNIKPMNLIGVDRGENIPAVIALTDPEGCPLSRFKDSLGNPTHILRIGESYKEKQRTIQAKKEVEQRRAGGYSRKYASKAKNLADDMVRNTARDLLYYAVTQDAMLIFENLSRGFGRQGKRTFMAERQYTRMEDWLTAKLAYEGLASKTYLSKTLAQYTSKTCSNCGFTITSADYDRVLEKLKKTATGWMTTINGKELKVEGQITYYNRYKRQNVVKDLSVELDRLSEESVNNDISSWTKGRSGEALSLLKKRFSHRPVQEKFVCLNCGFETHADEQAALNIARSWLFLRSQEYKKYQTNKTTGNTDKRAFVETWQSFYRKKLKEVWKPAV

SEQ ID NO: 40414 - protein, 978 aa, synthetic construct
  REGION 1..978: note = engineered CasX variant
QEIKRINKIRRRLVKDSNTKKAGKTGPMKTLLVRVMTPDLRERLENLRKKPENIPQPISNTSRANLNKLLTDYTEMKKAILHVYWEEFQKDPVGLMSRVAQPASKKIDQNKLKPEMDEKGNLTTAGFACSQCGQPLFVYKLEQVSEKGKAYTNYFGRCNVAEHEKLILLAQLKPEKDSDEAVTYSLGKFGQRALDFYSIHVTKESTHPVKPLAQIAGNRYASGPVGKALRDACMGTIASFLSKYQDIIIEHQKVVKGNQKRLESLRELAGKENLEYPSVTLPPQPHTKEGVDAYNEVIARVRMWVNLNLWQKLKLSRDDAKPLLRLKGFPSFPLVERQANEVDWWDMVCNVKKLINEKKEDGKVFWQNLAGYKRQEALRPYLSSEEDRKKGKKFARYQLGDLLLHLEKKHGEDWGKVYDEAWERIDKKVEGLSKHIKLEEERRSEDAQSKAALTDWLRAKASFVIEGLKEADKDEFCRCELKLQKWYGDLRGKPFAIEAENSILDISGFSKQYNCAFIWQKDGVKKLNLYLIINYFKGGKLRFKKIKPEAFEANRFYTVINKKSGEIVPMEVNFNFDDPNLIILPLAFGKRQGREFIWNDLLSLETGSLKLANGRVIEKTLYNRRTRQDEPALFVALTFERREVLDSSNIKPMNLIGVDRGENIPAVIALTDPEGCPLSRFKDSLGNPTHILRIGERYKEKQRTIQAKKEVEQRRAGGYSRKYASKAKNLADDMVRNTARDLLYYAVTQDAMLIFENLSRGFGRQGKRTFMAERQYTRMEDWLTAKLAYEGLASKTYLSKTLAQYTSKTCSNCGFTITSADYDRVLEKLKKTATGWMTTINGKELKVEGQITYYNRYKRQNVVKDLSVELDRLSEESVNNDISSWTKGRSGEALSLLKKRFSHRPVQEKFVCLNCGFETHADEQAALNIARSWLFLRSQEYKKYQTNKTTGNTDKRAFVETWQSFYRKKLKEVWKPAV

SEQ ID NO: 40415 - protein, 978 aa, synthetic construct
  REGION 1..978: note = engineered CasX variant
QEIKRINKIRRRLVKDSNTKKAGKTGPMKTLLVRVMTPDLRERLENLRKKPENIPQPISNTSRANLNKLLTDYTEMKKAILHVYWEEFQKDPVGLMSRVAQPASKKIDQNKLKPEMDEKGNLTTAGFACSQCGQPLFVYKLEQVSEKGKAYTNYFGRCNVAEHEKLILLAQLKPEKDSDEAVTYSLGKFGQRALDFYSIHVTKESTHPVKPLAQIAGNRYASGPVGKALRDACMGTIASFLSKYQDIIIEHQKVVKGNQKRLESLRELAGKENLEYPSVTLPPQPHTKEGVDAYNEVIARVRMWVNLNLWQKLKLSRDDAKPLLRLKGFPSFPLVERQANEVDWWDMVCNVKKLINEKKEDGKVFWQNLAGYKRQEALRPYLSSEEDRKKGKKFARYQLGDLLLHLEKKHGEDWGKVYDEAWERIDKKVEGLSKHIKLEEERRSEDAQSKAALTDWLRAKASFVIEGLKEADKDEFCRCELKLQKWYGDLRGKPFAIEAENSILDISGFSKQYNCAFIWQKDGVKKLNLYLIINYFKGGKLRFKKIKPEAFEANRFYTVINKKSGEIVPMEVNFNFDDPNLIILPLAFGKRQGREFIWNDLLSLETGSLQLANGRVIEKTLYNRRTRQDEPALFVALTFERREVLDSSNIKPMNLIGVDRGENIPAVIALTDPEGCPLSRFKDSLGNPTHILRIGESYKEKQRTIQAKKEVEQRRAGGYSRKYASKAKNLADDMVRNTARDLLYYAVTQDAMLIFENLSRGFGRQGKRTFMAERQYTRMEDWLTAKLAYEGLASKTYLSKTLAQYTSKTCSNCGFTITSADYDRVLEKLKKTATGWMTTINGKELKVEGQITYYNRYKRQNVVKDLSVELDRLSEESVNNDISSWTKGRSGEALSLLKKRFSHRPVQEKFVCLNCGFETHADEQAALNIARSWLFLRSQEYKKYQTNKTTGNTDKRAFVETWQSFYRKKLKEVWKPAV

SEQ ID NO: 40416 - protein, 979 aa, synthetic construct
  REGION 1..979: note = engineered CasX variant
QEIKRINKIRRRLVKDSNTKKAGKTGPMKTLLVRVMTPDLRERLENLRKKPENIPQPISNTSRANLNKLLTDYTEMKKAILHVYWEEFQKDPVGLMSRVAQPASKKIDQNKLKPEMDEKGNLTTAGFACSQCGQPLFVYKLEQVSEKGKAYTNYFGRCNVAEHEKLILLAQLKPEKDSDEAVTYSLGKFGQRALDFYSIHVTKESTHPVKPLAQIAGNRYASGPVGKALRDACMGTIASFLSKYQDIIIEHQKVVKGNQKRLESLRELAGKENLEYPSVTLPPQPHTKEGVDAYNEVIARVRMWVNLNLWQKLKLSRDDAKPLLRLKGFPSFPLVERQANEVDWWDMVCNVKKLINEKKEDGKVFWQNLAGYKRQEALRPYLSSEEDRKKGKKFARYQLGDLLLHLEKKHGEDWGKVYDEAWERIDKKVEGLSKHIKLEEERRSEDAQSKAALTDWLRAKASFVIEGLKEADKDEFCRCELKLQKWYGDLRGKPFAIEAENSILDISGFSKQYNCAFIWQKDGVKKLNLYLIINYFKGGKLRFKKIKPEAFEANRFYTVINKKSGEIVPMEVNFNFDDPNLIILPLAFGKRQGREFIWNDLLSLETGSLKLANGRVIEKTLYNRRTRQDEPALFVALTFERREVLDSSNIKPMNLIGVDRGENIPAVIALTDPEGCPLSRFKDSLGNPTHILRIGESYKEKQRTIQAKKEVEQRRAGGYSRKYASKAKNLADDMVRNTARDLLYYAVTQDAMLIFENLSRGFGRQGKRTFMAERQYTRMEDWLTAKLAYEGPLPSKVYLSKTLAQYTSKTCSNCGFTITSADYDRVLEKLKKTATGWMTTINGKELKVEGQITYYNRYKRQNVVKDLSVELDRLSEESVNNDISSWTKGRSGEALSLLKKRFSHRPVQEKFVCLNCGFETHADEQAALNIARSWLFLRSQEYKKYQTNKTTGNTDKRAFVETWQSFYRKKLKEVWKPAV

SEQ ID NO: 40417 - protein, 979 aa, synthetic construct
  REGION 1..979: note = engineered CasX variant
QEIKRINKIRRRLVKDSNTKKAGKTGPMKTLLVRVMTPDLRERLENLRKKPENIPQPISNTSRANLNKLLTDYTEMKKAILHVYWEEFQKDPVGLMSRVAQPASKKIDQNKLKPEMDEKGNLTTAGFACSQCGQPLFVYKLEQVSEKGKAYTNYFGRCNVAEHEKLILLAQLKPEKDSDEAVTYSLGKFGQRALDFYSIHVTKESTHPVKPLAQIAGNRYASGPVGKALRDACMGTIASFLSKYQDIIIEHQKVVKGNQKRLESLRELAGKENLEYPSVTLPPQPHTKEGVDAYNEVIARVRMWVNLNLWQKLKLSRDDAKPLLRLKGFPSFPLVERQANEVDWWDMVCNVKKLINEKKEDGKVFWQNLAGYKRQEALRPYLSSEEDVRKKGKKFARYQLGDLLLHLEKKHGEDWGKVYDEAWERIDKKVEGLSKHIKLEEERRSEDAQSKAALTDWLRAKASFVIEGLKEADKDEFCRCELKLQKWYGDLRGKPFAIEAENSILDISGFSKQYNCAFIWQKDGVKKLNLYLIINYFKGGKLRFKKIKPEAFEANRFYTVINKKSGEIVPMEVNFNFDDPNLIILPLAFGKRQGREFIWNDLLSLETGSLKLANGRVIEKTLYNRRTRQDEPALFVALTFERREVLDSSNIKPMNLIGVDRGENIPAVIALTDPEGCPLSRFKDSLGNPTHILRIGESYKEKQRTIQAKKEVEQRRAGGYSRKYASKAKNLADDMVRNTARDLLYYAVTQDAMLIFENLSRGFGRQGKRTFMAERQYTRMEDWLTAKLAYEGLPSKVYLSKTLAQYTSKTCSNCGFTITSADYDRVLEKLKKTATGWMTTINGKELKVEGQITYYNRYKRQNVVKDLSVELDRLSEESVNNDISSWTKGRSGEALSLLKKRFSHRPVQEKFVCLNCGFETHADEQAALNIARSWLFLRSQEYKKYQTNKTTGNTDKRAFVETWQSFYRKKLKEVWKPAV

SEQ ID NO: 40418 - protein, 978 aa, synthetic construct
  REGION 1..978: note = engineered CasX variant
QEIKRINKIRRRLVKDSNTKKAGKTGPMKTLLVRVMTPDLRERLENLRKKPENIPQPISNTSRANLNKLLTDYTEMKKAILHVYWEEFQKDPVGLMSRVAQPASKKIDQNKLKPEMDEKGNLTTAGFACSQCGQPLFVYKLEQVSEKGKAYTNYFGRCNVAEHEKLILLAQLKPEKDSDEAVTYSLGKFGQRALDFYSIHVTKESTHPVKPLAQIAGNRYASGPVGKALRDACMGTIASFLSKYQDIIIEHQKVVKGNQKRLESLRELAGKENLEYPSVTLPPQPHTKEGVDAYNEVIARVRMWVNLNLWQKLKLSRDDAKPLLRLKGFPSFPLVERQANEVDWWDMVCNVKKLINEKKEDGKVFWQNLAGYKRQEALRPYLSSEEDRKKGKKFARYQLGDLLLHLEKKHGEDWGKVYDEAWERIDKKVEGLSKHIKLEEERRSEDAQSKAALTDWLRAKASFVIEGLKEADKDEFCRCELKLQKWYGDLRGKPFAIEAENSILDISGFSKQYNCAFIWQKDGVKKLNLYLIINYFKGGKLRFKKIKPEAFEANRFYTVINKKSGEIVPMEVNFNFDDPNLIILPLAFGKRQGREFIWNDLLSLETGSLKLANGRVIEKTLYNRRTRQDEPALFVALTFERREVLDSSNIKPMNLIGVDRGENIPAVIALTDPEGCPLSRFKDSLGNPTHILRIGESYKEKQRTIQAKKEVEQRRAGGYSRKYASKAKNLADDMVRNTARDLLYYAVTQDAMLIFENLSRGFGRQGKRTFMAERQYTRMEDWLTAKLAYEGLPSKVYLSKTLAQYTSKTCSNCGFTITSADYDRMLEKLKKTATGWMTTINGKELKVEGQITYYNRYKRQNVVKDLSVELDRLSEESVNNDISSWTKGRSGEALSLLKKRFSHRPVQEKFVCLNCGFETHADEQAALNIARSWLFLRSQEYKKYQTNKTTGNTDKRAFVETWQSFYRKKLKEVWKPAV

SEQ ID NO: 40419 - protein, 978 aa, synthetic construct
  REGION 1..978: note = engineered CasX variant
QEIKRINKIRRRLVKDSNTKKAGKTGPMKTLLVRVMTPDLRERLENLRKKPENIPQPISNTSRANLNKLLTDYTEMKKAILHVYWEEFQKDPVGLMSRVAQPASKKIDQNKLKPEMDEKGNLTTAGFACSQCGQPLFVYKLEQVSEKGKAYTNYFGRCNVAEHEKLILLAQLKPEKDSDEAVTYSLGKFGQRALDFYSIHVTKESTHPVKPLAQIAGNRYASGPVGKALRDACMGTIASFLSKYQDIIIEHQKVVKGNQKRLESLRELAGKENLEYPSVTLPPQPHTKEGVDAYNEVIARVRMWVNLNLWQKLKLSRDDAKPLLRLKGFPSFPLVERQANEVDWWDMVCNVKKLINEKKEDGKVFWQNLAGYKRQEALRPYLSSEEDRKKGKKFARYQLGDLLLHLEKKHGEDWGKVYDEAWERIDKKVEGLSKHIKLEEERRSEDAQSKAALTDWLRAKASFVIEGLKEADKDEFCRCELKLQKWYGDLRGKPFAIEAENSILDISGFSKQYNCAFIWQKDGVKKLNLYLIINYFKGGKLRFKKIKPEAFEANRFYTVINKKSGEIVPMEVNFNFDDPNLIILPLAFGKRQGREFIWNDLLSLETGSLKLANGRVIEKTLYNRRTRQDEPALFVALTFERREVLDSSNIKPMNLIGVDRGENIPAVIALTDPEGCPLSRFKDSLGNPTHILRIGESYKEKQRTIQAKKEVEQRRAGGYSRKYASKAKNLADDMVRNTARDLLYYAVTQDAMLIFENLSRGFGRQGKRTFMAERQYTRMEDWLTAKLAYEGLPSKVYLSKTLAQYTSKTCSNCGFTITSADYDRVLEKLKKTATGWMTTINGKELKVEGQITYYNRYKRQNVVKDLSVELDRLSEESVNNDISSWTKGRQGEALSLLKKRFSHRPVQEKFVCLNCGFETHADEQAALNIARSWLFLRSQEYKKYQTNKTTGNTDKRAFVETWQSFYRKKLKEVWKPAV

SEQ ID NO: 40420 - protein, 978 aa, synthetic construct
  REGION 1..978: note = engineered CasX variant
QEIKRINKIRRRLVKDSNTKKAGKTGPMKTLLVRVMTPDLRERLENLRKKPENIPQPISNTSRANLNKLLTDYTEMKKAILHVYWEEFQKDPVGLMSRVAQPASKKIDQNKLKPEMDEKGNLTTAGFACSQCGQPLFVYKLEQVSEKGKAYTNYFGRCNVAEHEKLILLAQLKPEKDSDEAVTYSLGKFGQRALDFYSIHVTKESTHPVKPLAQIAGNRYASGPVGKALRDACMGTIASFLSKYQDIIIEHQKVVKGNQKRLESLRELAGKENLEYPSVTLPPQPHTKEGVDAYNEVIARVRMWVNLNLWQKLKLSRDDAKPLLRLKGFPSFPLVERQANEVDWWDMVCNVKKLINEKKEDGKVFWQNLAGYKRQEALRPYLSSEEDRKKGKKFARYQLGDLLLHLEKKHGEDWGKVYDEAWERIDKKVEGLSKHIKLEEERRSEDAQSKAALTDWLRAKASFVIEGLKEADKDEFCRCELKLQKWYGDLRGKPFAIEAENSILDISGFSKQYNCAFIWQKDGVKKLNLYLIINYFKGGKLRFKKIKPEAFEANRFYTVINKKSGEIVPMEVNFNFDDPNLIILPLAFGKRQGREFIWNDLLSLETGSLKLANGRVIEKTLYNRRTRQDEPALFVALTFERREVLDSSNIKPMNLIGVDRGENIPAVIALTDPEGCPLSRFKDSLGNPTHILRIGESYKEKQRTIQAKKEVEQRRAGGYSRKYASKAKNLADDMVRNTARDLLYYAVTQDAMLIFENLSRGFGRQGKRTFMAERQYTRMEDWLTAKLAYEGLPSKVYLSKTLAQYTSKTCSNCGFTITSADYDRVLEKLKKTATGWMTTINGKELKVEGQITYYNRYKRQNVVKDLSVELDRLSEESVNNDISSWTKGRSGEALSLLKKRFSHRPVQEKFVCLNCEFETHADEQAALNIARSWLFLRSQEYKKYQTNKTTGNTDKRAFVETWQSFYRKKLKEVWKPAV

SEQ ID NO: 40421 - protein, 979 aa, synthetic construct
  REGION 1..979: note = engineered CasX variant
QEIKRINKIRRRLVKDSNTKKAGKTGPMKTLLVRVMTPDLRERLENLRKKPENIPQPISNTSRANLNKLLTDYTEMKKAILHVYWEEFQKDPVGLMSRVAQPASKKIDQNKLKPEMDEKGNLTTAGFACSQCGQPLFVYKLEQVSEKGKAYTNYFGRCNVAEHEKLILLAQLKPEKDSDEAVTYSLGKFGQRALDFYSIHVTKESTHPVKPLAQIAGNRYASGPVGKALRDACMGTIASFLSKYQDIIIEHQKVVKGNQKRLESLRELAGKENLEYPSVTLPPQPHTKEGVDAYNEVIARVRMWVNLNLWQKLKLSRDDAKPLLRLKGFPSFPLVERQANEVDWWDMVCNVKKLINEKKEDGKVFWQNLAGYKRQEALRPYLSSEEDRKKGKKFARYQLGDLLLHLEKKHGEDWGKVYDEAWERIDKKVEGLSKHIKLEEERRSEDAQSKAALTDWLRAKASFVIEGLKEADKDEFCRCELKLQKWYGDLRGKPFAIEAENSILDISGFSKQYNCAFIWQKDGVKKLNLYLIINYFKGGKLRFKKIKPEAFEANRFYTVINKKSGEIVPMEVNFNFDDPNLIILPLAFGKRQGREFIWNDLLSLETGSLKLANGRVIEKTLYNRRTRQDEPALFVALTFERREVLDSSNIKPMNLIGVDRGENIPAVIALTDPEGCPLSRFKDSLGNPTHILRIGESYKEKQRTIQAKKEVEQRRAGGYSRKYASKAKNLADDMVRNTARDLLYYAVTQDAMLIFENLSRGFGRQGKRTFMAERQYTRMEDWLTAKLAYEGLPSKVYLSKTLAQYTSKTCSNCGFTITSADYDRVLEKLKKTATGWMTTINGKELKVEGQITYYNRYKRQNVVKDLSVELDRLSEESVNNDISSWTKGRSGEALSLLKKRFSHRPVQEKFVCLNCGFETHADEQAALNIARSWLFLRSQEYKKYQTNKTSTGNTDKRAFVETWQSFYRKKLKEVWKPAV

SEQ ID NO: 40422 - protein, 979 aa, synthetic construct
  REGION 1..979: note = engineered CasX variant
QEIKRINKIRRRLVKDSNTKKAGKTGPMKTLLVRVMTPDLRERLENLRKKPENIPQPISNTSRANLNKLLTDYTEMKKAILHVYWEEFQKDPVGLMSRVAQPASKKIDQNKLKPEMDEKGNLTTAGFACSQCGQPLFVYKLEQVSEKGKAYTNYFGRCNVAEHEKLILLAQLKPEKDSDEAVTYSLGKFGQRALDFYSIHVTKESTHPVKPLAQIAGNRYASGPVGKALRDACMGTIASFLSKYQDIIIEHQKVVKGNQKRLESLRELAGKENLEYPSVTLPPQPHTKEGVDAYNEVIARVRMWVNLNLWQKLKLSRDDAKPLLRLKGFPSFPLVERQANEVDWWDMVCNVKKLINEKKEDGKVFWQNLAGYKRQEALRPYLSSEEDRKKGKKFARYQLGDLLLHLEKKHGEDWGKVYDEAWERIDKKVEGLSKHIKLEEERRSEDAQSKAALTDWLRAKASFVIEGLKEADKDEFCRCELKLQKWYGDLRGKPFAIEAENSILDISGFSKQYNCAFIWQKDGVKKLNLYLIINYFKGGKLRFKKIKPEAFEANRFYTVINKKSGEIVPMEVNFNFDDPNLIILPLAFGKRQGREFIWNDLLSLETGSLKLANGRVIEKTLYNRRTRQDEPALFVALTFERREVLDSSNIKPMNLIGVDRGENIPAVIALTDPEGCPLSRFKDSLGNPTHILRIGESYKEKQRTIQAKKEVEQRRAGGYSRKYASKAKNLADDMVRNTARDLLYYAVTQDAMLIFENLSRGFGRQGKRTFMAERQYTRMEDWLTAKLAYEGLPSKVYLSKTLAQYTSKTCSNCGFTITSADYDRVLEKLKKTATGWMTTINGKELKVEGQITYYNRYKRQNVVKDLSVELDRLSEESVNNDISSWTKGRSGEALSLLKKRFSHRPVQEKFVCLNCGFETHADEQAALNIARSWLFLRSQEYKKYQTNKTTGKNTDKRAFVETWQSFYRKKLKEVWKPAV

SEQ ID NO: 40423 - protein, 978 aa, synthetic construct
  REGION 1..978: note = engineered CasX variant
QEIKRINKIRRRLVKDSNTKKAGKTGPMKTLLVRVMTPDLRERLENLRKKPENIPQPISNTSRANLNKLLTDYTEMKKAILHVYWEEFQKDPVGLMSRVAQPASKKIDQNKLKPEMDEKGNLTTAGFACSQCGQPLFVYKLEQVSEKGKAYTNYFGRCNVAEHEKLILLAQLKPEKDSDEAVTYSLGKFGQRALDFYSIHVTKESTHPVKPLAQIAGNRYASGPVGKALRDACMGTIASFLSKYQDIIIEHQKVVKGNQKRLESLRELAGKENLEYPSVTLPPQPHTKEGVDAYNEVIARVRMWVNLNLWQKLKLSRDDAKPLLRLKKFPSFPLVERQANEVDWWDMVCNVKKLINEKKEDGKVFWQNLAGYKRQEALRPYLSSEEDRKKGKKFARYQLGDLLLHLEKKHGEDWGKVYDEAWERIDKKVEGLSKHIKLEEERRSEDAQSKAALTDWLRAKASFVIEGLKEADKDEFCRCELKLQKWYGDLRGKPFAIEAENSILDISGFSKQYNCAFIWQKDGVKKLNLYLIINYFKGGKLRFKKIKPEAFEANRFYTVINKKSGEIVPMEVNFNFDDPNLIILPLAFGKRQGREFIWNDLLSLETGSLKLANGRVIEKTLYNRRTRQDEPALFVALTFERREVLDSSNIKPMNLIGVDRGENIPAVIALTDPEGCPLSRFKDSLGNPTHILRIGESYKEKQRTIQAKKEVEQRRAGGYSRKYASKAKNLADDMVRNTARDLLYYAVTQDAMLIFENLSRGFGRQGKRTFMAERQYTRMEDWLTAKLAYEGLPSKVYLSKTLAQYTSKTCSNCGFTITSADYDRVLEKLKKTATGWMTTINGKELKVEGQITYYNRYKRQNVVKDLSVELDRLSEESVNNDISSWTKGRSGEALSLLKKRFSHRPVQEKFVCLNCGFETHADEQAALNIARSWLFLRSQEYKKYQTNKTTGNTDKRAFVETWQSFYRKKLKEVWKPAV

SEQ ID NO: 40424 - protein, 978 aa, synthetic construct
  REGION 1..978: note = engineered CasX variant
QEIKRINKIRRRLVKDSNTKKAGKTGPMKTLLVRVMTPDLRERLENLRKKPENIPQPISNTSRANLNKLLTDYTEMKKAILHVYWEEFQKDPVGLMSRVAQPASKKIDQNKLKPEMDEKGNLTTAGFACSQCGQPLFVYKLEQVSEKGKAYTNYFGRCNVAEHEKLILLAQLKPEKDSDEAVTYSLGKFGQRALDFYSIHVTKESTHPVKPLAQIAGNRYASGPVGKALRDACMGTIASFLSKYQDIIIEHQKVVKGNQKRLESLRELAGKENLEYPSVTLPPQPHTKEGVDAYNEVIARVRMWVNLNLWQKLKLSRDDAKPLLRLKGFPSFPLVERQANEVDWWDMVCNVKKLINEKKEDGKVFWQNLAGYKRQEALRPYLSSEEDRKKGKKFARYQLGDLLLHLEKKHGEDWGKVYDEAWERIDKKVEGLSKHIKLEEERRSEDAQSKAALTDWLRAKASFVIEGLKEADKDEFCRCELKLQKWYGDLRGKPFAIEAENSILDISGFSKQYNCAFIWQKDGVKKLNLYLIINYFKGGKLRFKKIKPEAFEANRFYTVINKKSGEIVPMEVNFNFDDPNLIILPLAFGKRQGREFIWNDLLSLETGSLKLANGRVIEKTLYNRRTRQDEPALFVALTFERREVLDSSNIKPMNLIGVDRGENIPAVIALTDPEGCPLSRFKDSLGNPTHILRIGERYKEKQRTIQAKKEVEQRRAGGYSRKYASKAKNLADDMVRNTARDLLYYAVTQDAMLIFENLSRGFGRQGKRTFMAERQYTRMEDWLTAKLAYEGLPSKVYLSKTLAQYTSKTCSNCGFTITSADYDRVLEKLKKTATGWMTTINGKELKVEGQITYYNRYKRQNVVKDLSVELDRLSEESVNNDISSWTKGRSGEALSLLKKRFSHRPVQEKFVCLNCGFETHADEQAALNIARSWLFLRSQEYKKYQTNKTTGNTDKRAFVETWQSFYRKKLKEVWKPAV

SEQ ID NO: 40425 - protein, 978 aa, synthetic construct
  REGION 1..978: note = engineered CasX variant
QEIKRINKIRRRLVKDSNTKKAGKTGPMKTLLVRVMTPDLRERLENLRKKPENIPQPISNTSRANLNKLLTDYTEMKKAILHVYWEEFQKDPVGLMSRVAQPASKKIDQNKLKPEMDEKGNLTTAGFACSQCGQPLFVYKLEQVSEKGKAYTNYFGRCNVAEHEKLILLAQLKPEKDSDEAVTYSLGKFGQRALDFYSIHVTKESTHPVKPLAQIAGNRYASGPVGKALRDACMGTIASFLSKYQDIIIEHQKVVKGNQKRLESLRELAGKENLEYPSVTLPPQPHTKEGVDAYNEVIARVRMWVNLNLWQKLKLSRDDAKPLLRLKGFPSFPLVERQANEVDWWDMVCNVKKLINEKKEDGKVFWQNLAGYKRQEALRPYLSSEEDRKKGKKFARYQLGDLLLHLEKKHGEDWGKVYDEAWERIDKKVEGLSKHIKLEEERRSEDAQSKAALTDWLRAKASFVIEGLKEADKDEFCRCELKLQKWYGDLRGKPFAIEAENSILDISGFSKQYNCAFIWQKDGVKKLNLYLIINYFKGGKLRFKKIKPEAFEANRFYTVINKKSGEIVPMEVNFNFDDPNLIILPLAFGKRQGREFIWNDLLSLETGSLQLANGRVIEKTLYNRRTRQDEPALFVALTFERREVLDSSNIKPMNLIGVDRGENIPAVIALTDPEGCPLSRFKDSLGNPTHILRIGESYKEKQRTIQAKKEVEQRRAGGYSRKYASKAKNLADDMVRNTARDLLYYAVTQDAMLIFENLSRGFGRQGKRTFMAERQYTRMEDWLTAKLAYEGLPSKVYLSKTLAQYTSKTCSNCGFTITSADYDRVLEKLKKTATGWMTTINGKELKVEGQITYYNRYKRQNVVKDLSVELDRLSEESVNNDISSWTKGRSGEALSLLKKRFSHRPVQEKFVCLNCGFETHADEQAALNIARSWLFLRSQEYKKYQTNKTTGNTDKRAFVETWQSFYRKKLKEVWKPAV

SEQ ID NO: 40426 - protein, 980 aa, synthetic construct
  REGION 1..980: note = engineered CasX variant
QEIKRINKIRRRLVKDSNTKKAGKTGPMKTLLVRVMTPDLRERLENLRKKPENIPQPISNTSRANLNKLLTDYTEMKKAILHVYWEEFQKDPVGLMSRVAQPASKKIDQNKLKPEMDEKGNLTTAGFACSQCGQPLFVYKLEQVSEKGKAYTNYFGRCNVAEHEKLILLAQLKPEKDSDEAVTYSLGKFGQRALDFYSIHVTKESTHPVKPLAQIAGNRYASGPVGKALRDACMGTIASFLSKYQDIIIEHQKVVKGNQKRLESLRELAGKENLEYPSVTLPPQPHTKEGVDAYNEVIARVRMWVNLNLWQKLKLSRDDAKPLLRLKGFPSFPLVERQANEVDWWDMVCNVKKLINEKKEDGKVFWQNLAGYKRQEALRPYLSSEEDVRKKGKKFARYQLGDLLLHLEKKHGEDWGKVYDEAWERIDKKVEGLSKHIKLEEERRSEDAQSKAALTDWLRAKASFVIEGLKEADKDEFCRCELKLQKWYGDLRGKPFAIEAENSILDISGFSKQYNCAFIWQKDGVKKLNLYLIINYFKGGKLRFKKIKPEAFEANRFYTVINKKSGEIVPMEVNFNFDDPNLIILPLAFGKRQGREFIWNDLLSLETGSLKLANGRVIEKTLYNRRTRQDEPALFVALTFERREVLDSSNIKPMNLIGVDRGENIPAVIALTDPEGCPLSRFKDSLGNPTHILRIGESYKEKQRTIQAKKEVEQRRAGGYSRKYASKAKNLADDMVRNTARDLLYYAVTQDAMLIFENLSRGFGRQGKRTFMAERQYTRMEDWLTAKLAYEGPLPSKTYLSKTLAQYTSKTCSNCGFTITSADYDRVLEKLKKTATGWMTTINGKELKVEGQITYYNRYKRQNVVKDLSVELDRLSEESVNNDISSWTKGRSGEALSLLKKRFSHRPVQEKFVCLNCGFETHADEQAALNIARSWLFLRSQEYKKYQTNKTTGNTDKRAFVETWQSFYRKKLKEVWKPAV

SEQ ID NO: 40427 - protein, 979 aa, synthetic construct
  REGION 1..979: note = engineered CasX variant
QEIKRINKIRRRLVKDSNTKKAGKTGPMKTLLVRVMTPDLRERLENLRKKPENIPQPISNTSRANLNKLLTDYTEMKKAILHVYWEEFQKDPVGLMSRVAQPASKKIDQNKLKPEMDEKGNLTTAGFACSQCGQPLFVYKLEQVSEKGKAYTNYFGRCNVAEHEKLILLAQLKPEKDSDEAVTYSLGKFGQRALDFYSIHVTKESTHPVKPLAQIAGNRYASGPVGKALRDACMGTIASFLSKYQDIIIEHQKVVKGNQKRLESLRELAGKENLEYPSVTLPPQPHTKEGVDAYNEVIARVRMWVNLNLWQKLKLSRDDAKPLLRLKGFPSFPLVERQANEVDWWDMVCNVKKLINEKKEDGKVFWQNLAGYKRQEALRPYLSSEEDRKKGKKFARYQLGDLLLHLEKKHGEDWGKVYDEAWERIDKKVEGLSKHIKLEEERRSEDAQSKAALTDWLRAKASFVIEGLKEADKDEFCRCELKLQKWYGDLRGKPFAIEAENSILDISGFSKQYNCAFIWQKDGVKKLNLYLIINYFKGGKLRFKKIKPEAFEANRFYTVINKKSGEIVPMEVNFNFDDPNLIILPLAFGKRQGREFIWNDLLSLETGSLKLANGRVIEKTLYNRRTRQDEPALFVALTFERREVLDSSNIKPMNLIGVDRGENIPAVIALTDPEGCPLSRFKDSLGNPTHILRIGESYKEKQRTIQAKKEVEQRRAGGYSRKYASKAKNLADDMVRNTARDLLYYAVTQDAMLIFENLSRGFGRQGKRTFMAERQYTRMEDWLTAKLAYEGPLPSKTYLSKTLAQYTSKTCSNCGFTITSADYDRMLEKLKKTATGWMTTINGKELKVEGQITYYNRYKRQNVVKDLSVELDRLSEESVNNDISSWTKGRSGEALSLLKKRFSHRPVQEKFVCLNCGFETHADEQAALNIARSWLFLRSQEYKKYQTNKTTGNTDKRAFVETWQSFYRKKLKEVWKPAV

SEQ ID NO: 40428 - protein, 979 aa, synthetic construct
  REGION 1..979: note = engineered CasX variant
QEIKRINKIRRRLVKDSNTKKAGKTGPMKTLLVRVMTPDLRERLENLRKKPENIPQPISNTSRANLNKLLTDYTEMKKAILHVYWEEFQKDPVGLMSRVAQPASKKIDQNKLKPEMDEKGNLTTAGFACSQCGQPLFVYKLEQVSEKGKAYTNYFGRCNVAEHEKLILLAQLKPEKDSDEAVTYSLGKFGQRALDFYSIHVTKESTHPVKPLAQIAGNRYASGPVGKALRDACMGTIASFLSKYQDIIIEHQKVVKGNQKRLESLRELAGKENLEYPSVTLPPQPHTKEGVDAYNEVIARVRMWVNLNLWQKLKLSRDDAKPLLRLKGFPSFPLVERQANEVDWWDMVCNVKKLINEKKEDGKVFWQNLAGYKRQEALRPYLSSEEDRKKGKKFARYQLGDLLLHLEKKHGEDWGKVYDEAWERIDKKVEGLSKHIKLEEERRSEDAQSKAALTDWLRAKASFVIEGLKEADKDEFCRCELKLQKWYGDLRGKPFAIEAENSILDISGFSKQYNCAFIWQKDGVKKLNLYLIINYFKGGKLRFKKIKPEAFEANRFYTVINKKSGEIVPMEVNFNFDDPNLIILPLAFGKRQGREFIWNDLLSLETGSLKLANGRVIEKTLYNRRTRQDEPALFVALTFERREVLDSSNIKPMNLIGVDRGENIPAVIALTDPEGCPLSRFKDSLGNPTHILRIGESYKEKQRTIQAKKEVEQRRAGGYSRKYASKAKNLADDMVRNTARDLLYYAVTQDAMLIFENLSRGFGRQGKRTFMAERQYTRMEDWLTAKLAYEGPLPSKTYLSKTLAQYTSKTCSNCGFTITSADYDRVLEKLKKTATGWMTTINGKELKVEGQITYYNRYKRQNVVKDLSVELDRLSEESVNNDISSWTKGRQGEALSLLKKRFSHRPVQEKFVCLNCGFETHADEQAALNIARSWLFLRSQEYKKYQTNKTTGNTDKRAFVETWQSFYRKKLKEVWKPAV

SEQ ID NO: 40429 - protein, 979 aa, synthetic construct
  REGION 1..979: note = engineered CasX variant
QEIKRINKIRRRLVKDSNTKKAGKTGPMKTLLVRVMTPDLRERLENLRKKPENIPQPISNTSRANLNKLLTDYTEMKKAILHVYWEEFQKDPVGLMSRVAQPASKKIDQNKLKPEMDEKGNLTTAGFACSQCGQPLFVYKLEQVSEKGKAYTNYFGRCNVAEHEKLILLAQLKPEKDSDEAVTYSLGKFGQRALDFYSIHVTKESTHPVKPLAQIAGNRYASGPVGKALRDACMGTIASFLSKYQDIIIEHQKVVKGNQKRLESLRELAGKENLEYPSVTLPPQPHTKEGVDAYNEVIARVRMWVNLNLWQKLKLSRDDAKPLLRLKGFPSFPLVERQANEVDWWDMVCNVKKLINEKKEDGKVFWQNLAGYKRQEALRPYLSSEEDRKKGKKFARYQLGDLLLHLEKKHGEDWGKVYDEAWERIDKKVEGLSKHIKLEEERRSEDAQSKAALTDWLRAKASFVIEGLKEADKDEFCRCELKLQKWYGDLRGKPFAIEAENSILDISGFSKQYNCAFIWQKDGVKKLNLYLIINYFKGGKLRFKKIKPEAFEANRFYTVINKKSGEIVPMEVNFNFDDPNLIILPLAFGKRQGREFIWNDLLSLETGSLKLANGRVIEKTLYNRRTRQDEPALFVALTFERREVLDSSNIKPMNLIGVDRGENIPAVIALTDPEGCPLSRFKDSLGNPTHILRIGESYKEKQRTIQAKKEVEQRRAGGYSRKYASKAKNLADDMVRNTARDLLYYAVTQDAMLIFENLSRGFGRQGKRTFMAERQYTRMEDWLTAKLAYEGPLPSKTYLSKTLAQYTSKTCSNCGFTITSADYDRVLEKLKKTATGWMTTINGKELKVEGQITYYNRYKRQNVVKDLSVELDRLSEESVNNDISSWTKGRSGEALSLLKKRFSHRPVQEKFVCLNCEFETHADEQAALNIARSWLFLRSQEYKKYQTNKTTGNTDKRAFVETWQSFYRKKLKEVWKPAV

SEQ ID NO: 40430 - protein, 980 aa, synthetic construct
  REGION 1..980: note = engineered CasX variant
QEIKRINKIRRRLVKDSNTKKAGKTGPMKTLLVRVMTPDLRERLENLRKKPENIPQPISNTSRANLNKLLTDYTEMKKAILHVYWEEFQKDPVGLMSRVAQPASKKIDQNKLKPEMDEKGNLTTAGFACSQCGQPLFVYKLEQVSEKGKAYTNYFGRCNVAEHEKLILLAQLKPEKDSDEAVTYSLGKFGQRALDFYSIHVTKESTHPVKPLAQIAGNRYASGPVGKALRDACMGTIASFLSKYQDIIIEHQKVVKGNQKRLESLRELAGKENLEYPSVTLPPQPHTKEGVDAYNEVIARVRMWVNLNLWQKLKLSRDDAKPLLRLKGFPSFPLVERQANEVDWWDMVCNVKKLINEKKEDGKVFWQNLAGYKRQEALRPYLSSEEDRKKGKKFARYQLGDLLLHLEKKHGEDWGKVYDEAWERIDKKVEGLSKHIKLEEERRSEDAQSKAALTDWLRAKASFVIEGLKEADKDEFCRCELKLQKWYGDLRGKPFAIEAENSILDISGFSKQYNCAFIWQKDGVKKLNLYLIINYFKGGKLRFKKIKPEAFEANRFYTVINKKSGEIVPMEVNFNFDDPNLIILPLAFGKRQGREFIWNDLLSLETGSLKLANGRVIEKTLYNRRTRQDEPALFVALTFERREVLDSSNIKPMNLIGVDRGENIPAVIALTDPEGCPLSRFKDSLGNPTHILRIGESYKEKQRTIQAKKEVEQRRAGGYSRKYASKAKNLADDMVRNTARDLLYYAVTQDAMLIFENLSRGFGRQGKRTFMAERQYTRMEDWLTAKLAYEGPLPSKTYLSKTLAQYTSKTCSNCGFTITSADYDRVLEKLKKTATGWMTTINGKELKVEGQITYYNRYKRQNVVKDLSVELDRLSEESVNNDISSWTKGRSGEALSLLKKRFSHRPVQEKFVCLNCGFETHADEQAALNIARSWLFLRSQEYKKYQTNKTSTGNTDKRAFVETWQSFYRKKLKEVWKPAV

SEQ ID NO: 40431 - protein, 980 aa, synthetic construct
  REGION 1..980: note = engineered CasX variant
QEIKRINKIRRRLVKDSNTKKAGKTGPMKTLLVRVMTPDLRERLENLRKKPENIPQPISNTSRANLNKLLTDYTEMKKAILHVYWEEFQKDPVGLMSRVAQPASKKIDQNKLKPEMDEKGNLTTAGFACSQCGQPLFVYKLEQVSEKGKAYTNYFGRCNVAEHEKLILLAQLKPEKDSDEAVTYSLGKFGQRALDFYSIHVTKESTHPVKPLAQIAGNRYASGPVGKALRDACMGTIASFLSKYQDIIIEHQKVVKGNQKRLESLRELAGKENLEYPSVTLPPQPHTKEGVDAYNEVIARVRMWVNLNLWQKLKLSRDDAKPLLRLKGFPSFPLVERQANEVDWWDMVCNVKKLINEKKEDGKVFWQNLAGYKRQEALRPYLSSEEDRKKGKKFARYQLGDLLLHLEKKHGEDWGKVYDEAWERIDKKVEGLSKHIKLEEERRSEDAQSKAALTDWLRAKASFVIEGLKEADKDEFCRCELKLQKWYGDLRGKPFAIEAENSILDISGFSKQYNCAFIWQKDGVKKLNLYLIINYFKGGKLRFKKIKPEAFEANRFYTVINKKSGEIVPMEVNFNFDDPNLIILPLAFGKRQGREFIWNDLLSLETGSLKLANGRVIEKTLYNRRTRQDEPALFVALTFERREVLDSSNIKPMNLIGVDRGENIPAVIALTDPEGCPLSRFKDSLGNPTHILRIGESYKEKQRTIQAKKEVEQRRAGGYSRKYASKAKNLADDMVRNTARDLLYYAVTQDAMLIFENLSRGFGRQGKRTFMAERQYTRMEDWLTAKLAYEGPLPSKTYLSKTLAQYTSKTCSNCGFTITSADYDRVLEKLKKTATGWMTTINGKELKVEGQITYYNRYKRQNVVKDLSVELDRLSEESVNNDISSWTKGRSGEALSLLKKRFSHRPVQEKFVCLNCGFETHADEQAALNIARSWLFLRSQEYKKYQTNKTTGKNTDKRAFVETWQSFYRKKLKEVWKPAV

SEQ ID NO: 40432 - protein, 979 aa, synthetic construct
  REGION 1..979: note = engineered CasX variant
QEIKRINKIRRRLVKDSNTKKAGKTGPMKTLLVRVMTPDLRERLENLRKKPENIPQPISNTSRANLNKLLTDYTEMKKAILHVYWEEFQKDPVGLMSRVAQPASKKIDQNKLKPEMDEKGNLTTAGFACSQCGQPLFVYKLEQVSEKGKAYTNYFGRCNVAEHEKLILLAQLKPEKDSDEAVTYSLGKFGQRALDFYSIHVTKESTHPVKPLAQIAGNRYASGPVGKALRDACMGTIASFLSKYQDIIIEHQKVVKGNQKRLESLRELAGKENLEYPSVTLPPQPHTKEGVDAYNEVIARVRMWVNLNLWQKLKLSRDDAKPLLRLKKFPSFPLVERQANEVDWWDMVCNVKKLINEKKEDGKVFWQNLAGYKRQEALRPYLSSEEDRKKGKKFARYQLGDLLLHLEKKHGEDWGKVYDEAWERIDKKVEGLSKHIKLEEERRSEDAQSKAALTDWLRAKASFVIEGLKEADKDEFCRCELKLQKWYGDLRGKPFAIEAENSILDISGFSKQYNCAFIWQKDGVKKLNLYLIINYFKGGKLRFKKIKPEAFEANRFYTVINKKSGEIVPMEVNFNFDDPNLIILPLAFGKRQGREFIWNDLLSLETGSLKLANGRVIEKTLYNRRTRQDEPALFVALTFERREVLDSSNIKPMNLIGVDRGENIPAVIALTDPEGCPLSRFKDSLGNPTHILRIGESYKEKQRTIQAKKEVEQRRAGGYSRKYASKAKNLADDMVRNTARDLLYYAVTQDAMLIFENLSRGFGRQGKRTFMAERQYTRMEDWLTAKLAYEGPLPSKTYLSKTLAQYTSKTCSNCGFTITSADYDRVLEKLKKTATGWMTTINGKELKVEGQITYYNRYKRQNVVKDLSVELDRLSEESVNNDISSWTKGRSGEALSLLKKRFSHRPVQEKFVCLNCGFETHADEQAALNIARSWLFLRSQEYKKYQTNKTTGNTDKRAFVETWQSFYRKKLKEVWKPAV

SEQ ID NO: 40433 - protein, 979 aa, synthetic construct
  REGION 1..979: note = engineered CasX variant
QEIKRINKIRRRLVKDSNTKKAGKTGPMKTLLVRVMTPDLRERLENLRKKPENIPQPISNTSRANLNKLLTDYTEMKKAILHVYWEEFQKDPVGLMSRVAQPASKKIDQNKLKPEMDEKGNLTTAGFACSQCGQPLFVYKLEQVSEKGKAYTNYFGRCNVAEHEKLILLAQLKPEKDSDEAVTYSLGKFGQRALDFYSIHVTKESTHPVKPLAQIAGNRYASGPVGKALRDACMGTIASFLSKYQDIIIEHQKVVKGNQKRLESLRELAGKENLEYPSVTLPPQPHTKEGVDAYNEVIARVRMWVNLNLWQKLKLSRDDAKPLLRLKGFPSFPLVERQANEVDWWDMVCNVKKLINEKKEDGKVFWQNLAGYKRQEALRPYLSSEEDRKKGKKFARYQLGDLLLHLEKKHGEDWGKVYDEAWERIDKKVEGLSKHIKLEEERRSEDAQSKAALTDWLRAKASFVIEGLKEADKDEFCRCELKLQKWYGDLRGKPFAIEAENSILDISGFSKQYNCAFIWQKDGVKKLNLYLIINYFKGGKLRFKKIKPEAFEANRFYTVINKKSGEIVPMEVNFNFDDPNLIILPLAFGKRQGREFIWNDLLSLETGSLKLANGRVIEKTLYNRRTRQDEPALFVALTFERREVLDSSNIKPMNLIGVDRGENIPAVIALTDPEGCPLSRFKDSLGNPTHILRIGERYKEKQRTIQAKKEVEQRRAGGYSRKYASKAKNLADDMVRNTARDLLYYAVTQDAMLIFENLSRGFGRQGKRTFMAERQYTRMEDWLTAKLAYEGPLPSKTYLSKTLAQYTSKTCSNCGFTITSADYDRVLEKLKKTATGWMTTINGKELKVEGQITYYNRYKRQNVVKDLSVELDRLSEESVNNDISSWTKGRSGEALSLLKKRFSHRPVQEKFVCLNCGFETHADEQAALNIARSWLFLRSQEYKKYQTNKTTGNTDKRAFVETWQSFYRKKLKEVWKPAV

SEQ ID NO: 40434 - protein, 979 aa, synthetic construct
  REGION 1..979: note = engineered CasX variant
QEIKRINKIRRRLVKDSNTKKAGKTGPMKTLLVRVMTPDLRERLENLRKKPENIPQPISNTSRANLNKLLTDYTEMKKAILHVYWEEFQKDPVGLMSRVAQPASKKIDQNKLKPEMDEKGNLTTAGFACSQCGQPLFVYKLEQVSEKGKAYTNYFGRCNVAEHEKLILLAQLKPEKDSDEAVTYSLGKFGQRALDFYSIHVTKESTHPVKPLAQIAGNRYASGPVGKALRDACMGTIASFLSKYQDIIIEHQKVVKGNQKRLESLRELAGKENLEYPSVTLPPQPHTKEGVDAYNEVIARVRMWVNLNLWQKLKLSRDDAKPLLRLKGFPSFPLVERQANEVDWWDMVCNVKKLINEKKEDGKVFWQNLAGYKRQEALRPYLSSEEDRKKGKKFARYQLGDLLLHLEKKHGEDWGKVYDEAWERIDKKVEGLSKHIKLEEERRSEDAQSKAALTDWLRAKASFVIEGLKEADKDEFCRCELKLQKWYGDLRGKPFAIEAENSILDISGFSKQYNCAFIWQKDGVKKLNLYLIINYFKGGKLRFKKIKPEAFEANRFYTVINKKSGEIVPMEVNFNFDDPNLIILPLAFGKRQGREFIWNDLLSLETGSLQLANGRVIEKTLYNRRTRQDEPALFVALTFERREVLDSSNIKPMNLIGVDRGENIPAVIALTDPEGCPLSRFKDSLGNPTHILRIGESYKEKQRTIQAKKEVEQRRAGGYSRKYASKAKNLADDMVRNTARDLLYYAVTQDAMLIFENLSRGFGRQGKRTFMAERQYTRMEDWLTAKLAYEGPLPSKTYLSKTLAQYTSKTCSNCGFTITSADYDRVLEKLKKTATGWMTTINGKELKVEGQITYYNRYKRQNVVKDLSVELDRLSEESVNNDISSWTKGRSGEALSLLKKRFSHRPVQEKFVCLNCGFETHADEQAALNIARSWLFLRSQEYKKYQTNKTTGNTDKRAFVETWQSFYRKKLKEVWKPAV

SEQ ID NO: 40435 - protein, 979 aa, synthetic construct
  REGION 1..979: note = engineered CasX variant
QEIKRINKIRRRLVKDSNTKKAGKTGPMKTLLVRVMTPDLRERLENLRKKPENIPQPISNTSRANLNKLLTDYTEMKKAILHVYWEEFQKDPVGLMSRVAQPASKKIDQNKLKPEMDEKGNLTTAGFACSQCGQPLFVYKLEQVSEKGKAYTNYFGRCNVAEHEKLILLAQLKPEKDSDEAVTYSLGKFGQRALDFYSIHVTKESTHPVKPLAQIAGNRYASGPVGKALRDACMGTIASFLSKYQDIIIEHQKVVKGNQKRLESLRELAGKENLEYPSVTLPPQPHTKEGVDAYNEVIARVRMWVNLNLWQKLKLSRDDAKPLLRLKGFPSFPLVERQANEVDWWDMVCNVKKLINEKKEDGKVFWQNLAGYKRQEALRPYLSSEEDVRKKGKKFARYQLGDLLLHLEKKHGEDWGKVYDEAWERIDKKVEGLSKHIKLEEERRSEDAQSKAALTDWLRAKASFVIEGLKEADKDEFCRCELKLQKWYGDLRGKPFAIEAENSILDISGFSKQYNCAFIWQKDGVKKLNLYLIINYFKGGKLRFKKIKPEAFEANRFYTVINKKSGEIVPMEVNFNFDDPNLIILPLAFGKRQGREFIWNDLLSLETGSLKLANGRVIEKTLYNRRTRQDEPALFVALTFERREVLDSSNIKPMNLIGVDRGENIPAVIALTDPEGCPLSRFKDSLGNPTHILRIGESYKEKQRTIQAKKEVEQRRAGGYSRKYASKAKNLADDMVRNTARDLLYYAVTQDAMLIFENLSRGFGRQGKRTFMAERQYTRMEDWLTAKLAYEGLPSKTYLSKTLAQYTSKTCSNCGFTITSADYDRMLEKLKKTATGWMTTINGKELKVEGQITYYNRYKRQNVVKDLSVELDRLSEESVNNDISSWTKGRSGEALSLLKKRFSHRPVQEKFVCLNCGFETHADEQAALNIARSWLFLRSQEYKKYQTNKTTGNTDKRAFVETWQSFYRKKLKEVWKPAV

SEQ ID NO: 40436 - protein, 979 aa, synthetic construct
  REGION 1..979: note = engineered CasX variant
QEIKRINKIRRRLVKDSNTKKAGKTGPMKTLLVRVMTPDLRERLENLRKKPENIPQPISNTSRANLNKLLTDYTEMKKAILHVYWEEFQKDPVGLMSRVAQPASKKIDQNKLKPEMDEKGNLTTAGFACSQCGQPLFVYKLEQVSEKGKAYTNYFGRCNVAEHEKLILLAQLKPEKDSDEAVTYSLGKFGQRALDFYSIHVTKESTHPVKPLAQIAGNRYASGPVGKALRDACMGTIASFLSKYQDIIIEHQKVVKGNQKRLESLRELAGKENLEYPSVTLPPQPHTKEGVDAYNEVIARVRMWVNLNLWQKLKLSRDDAKPLLRLKGFPSFPLVERQANEVDWWDMVCNVKKLINEKKEDGKVFWQNLAGYKRQEALRPYLSSEEDVRKKGKKFARYQLGDLLLHLEKKHGEDWGKVYDEAWERIDKKVEGLSKHIKLEEERRSEDAQSKAALTDWLRAKASFVIEGLKEADKDEFCRCELKLQKWYGDLRGKPFAIEAENSILDISGFSKQYNCAFIWQKDGVKKLNLYLIINYFKGGKLRFKKIKPEAFEANRFYTVINKKSGEIVPMEVNFNFDDPNLIILPLAFGKRQGREFIWNDLLSLETGSLKLANGRVIEKTLYNRRTRQDEPALFVALTFERREVLDSSNIKPMNLIGVDRGENIPAVIALTDPEGCPLSRFKDSLGNPTHILRIGESYKEKQRTIQAKKEVEQRRAGGYSRKYASKAKNLADDMVRNTARDLLYYAVTQDAMLIFENLSRGFGRQGKRTFMAERQYTRMEDWLTAKLAYEGLPSKTYLSKTLAQYTSKTCSNCGFTITSADYDRVLEKLKKTATGWMTTINGKELKVEGQITYYNRYKRQNVVKDLSVELDRLSEESVNNDISSWTKGRQGEALSLLKKRFSHRPVQEKFVCLNCGFETHADEQAALNIARSWLFLRSQEYKKYQTNKTTGNTDKRAFVETWQSFYRKKLKEVWKPAV

SEQ ID NO: 40437 - protein, 979 aa, synthetic construct
  REGION 1..979: note = engineered CasX variant
QEIKRINKIRRRLVKDSNTKKAGKTGPMKTLLVRVMTPDLRERLENLRKKPENIPQPISNTSRANLNKLLTDYTEMKKAILHVYWEEFQKDPVGLMSRVAQPASKKIDQNKLKPEMDEKGNLTTAGFACSQCGQPLFVYKLEQVSEKGKAYTNYFGRCNVAEHEKLILLAQLKPEKDSDEAVTYSLGKFGQRALDFYSIHVTKESTHPVKPLAQIAGNRYASGPVGKALRDACMGTIASFLSKYQDIIIEHQKVVKGNQKRLESLRELAGKENLEYPSVTLPPQPHTKEGVDAYNEVIARVRMWVNLNLWQKLKLSRDDAKPLLRLKGFPSFPLVERQANEVDWWDMVCNVKKLINEKKEDGKVFWQNLAGYKRQEALRPYLSSEEDVRKKGKKFARYQLGDLLLHLEKKHGEDWGKVYDEAWERIDKKVEGLSKHIKLEEERRSEDAQSKAALTDWLRAKASFVIEGLKEADKDEFCRCELKLQKWYGDLRGKPFAIEAENSILDISGFSKQYNCAFIWQKDGVKKLNLYLIINYFKGGKLRFKKIKPEAFEANRFYTVINKKSGEIVPMEVNFNFDDPNLIILPLAFGKRQGREFIWNDLLSLETGSLKLANGRVIEKTLYNRRTRQDEPALFVALTFERREVLDSSNIKPMNLIGVDRGENIPAVIALTDPEGCPLSRFKDSLGNPTHILRIGESYKEKQRTIQAKKEVEQRRAGGYSRKYASKAKNLADDMVRNTARDLLYYAVTQDAMLIFENLSRGFGRQGKRTFMAERQYTRMEDWLTAKLAYEGLPSKTYLSKTLAQYTSKTCSNCGFTITSADYDRVLEKLKKTATGWMTTINGKELKVEGQITYYNRYKRQNVVKDLSVELDRLSEESVNNDISSWTKGRSGEALSLLKKRFSHRPVQEKFVCLNCEFETHADEQAALNIARSWLFLRSQEYKKYQTNKTTGNTDKRAFVETWQSFYRKKLKEVWKPAV

SEQ ID NO: 40438 - protein, 980 aa, synthetic construct
  REGION 1..980: note = engineered CasX variant
QEIKRINKIRRRLVKDSNTKKAGKTGPMKTLLVRVMTPDLRERLENLRKKPENIPQPISNTSRANLNKLLTDYTEMKKAILHVYWEEFQKDPVGLMSRVAQPASKKIDQNKLKPEMDEKGNLTTAGFACSQCGQPLFVYKLEQVSEKGKAYTNYFGRCNVAEHEKLILLAQLKPEKDSDEAVTYSLGKFGQRALDFYSIHVTKESTHPVKPLAQIAGNRYASGPVGKALRDACMGTIASFLSKYQDIIIEHQKVVKGNQKRLESLRELAGKENLEYPSVTLPPQPHTKEGVDAYNEVIARVRMWVNLNLWQKLKLSRDDAKPLLRLKGFPSFPLVERQANEVDWWDMVCNVKKLINEKKEDGKVFWQNLAGYKRQEALRPYLSSEEDVRKKGKKFARYQLGDLLLHLEKKHGEDWGKVYDEAWERIDKKVEGLSKHIKLEEERRSEDAQSKAALTDWLRAKASFVIEGLKEADKDEFCRCELKLQKWYGDLRGKPFAIEAENSILDISGFSKQYNCAFIWQKDGVKKLNLYLIINYFKGGKLRFKKIKPEAFEANRFYTVINKKSGEIVPMEVNFNFDDPNLIILPLAFGKRQGREFIWNDLLSLETGSLKLANGRVIEKTLYNRRTRQDEPALFVALTFERREVLDSSNIKPMNLIGVDRGENIPAVIALTDPEGCPLSRFKDSLGNPTHILRIGESYKEKQRTIQAKKEVEQRRAGGYSRKYASKAKNLADDMVRNTARDLLYYAVTQDAMLIFENLSRGFGRQGKRTFMAERQYTRMEDWLTAKLAYEGLPSKTYLSKTLAQYTSKTCSNCGFTITSADYDRVLEKLKKTATGWMTTINGKELKVEGQITYYNRYKRQNVVKDLSVELDRLSEESVNNDISSWTKGRSGEALSLLKKRFSHRPVQEKFVCLNCGFETHADEQAALNIARSWLFLRSQEYKKYQTNKTSTGNTDKRAFVETWQSFYRKKLKEVWKPAV

SEQ ID NO: 40439 - protein, 980 aa, synthetic construct
  REGION 1..980: note = engineered CasX variant
QEIKRINKIRRRLVKDSNTKKAGKTGPMKTLLVRVMTPDLRERLENLRKKPENIPQPISNTSRANLNKLLTDYTEMKKAILHVYWEEFQKDPVGLMSRVAQPASKKIDQNKLKPEMDEKGNLTTAGFACSQCGQPLFVYKLEQVSEKGKAYTNYFGRCNVAEHEKLILLAQLKPEKDSDEAVTYSLGKFGQRALDFYSIHVTKESTHPVKPLAQIAGNRYASGPVGKALRDACMGTIASFLSKYQDIIIEHQKVVKGNQKRLESLRELAGKENLEYPSVTLPPQPHTKEGVDAYNEVIARVRMWVNLNLWQKLKLSRDDAKPLLRLKGFPSFPLVERQANEVDWWDMVCNVKKLINEKKEDGKVFWQNLAGYKRQEALRPYLSSEEDVRKKGKKFARYQLGDLLLHLEKKHGEDWGKVYDEAWERIDKKVEGLSKHIKLEEERRSEDAQSKAALTDWLRAKASFVIEGLKEADKDEFCRCELKLQKWYGDLRGKPFAIEAENSILDISGFSKQYNCAFIWQKDGVKKLNLYLIINYFKGGKLRFKKIKPEAFEANRFYTVINKKSGEIVPMEVNFNFDDPNLIILPLAFGKRQGREFIWNDLLSLETGSLKLANGRVIEKTLYNRRTRQDEPALFVALTFERREVLDSSNIKPMNLIGVDRGENIPAVIALTDPEGCPLSRFKDSLGNPTHILRIGESYKEKQRTIQAKKEVEQRRAGGYSRKYASKAKNLADDMVRNTARDLLYYAVTQDAMLIFENLSRGFGRQGKRTFMAERQYTRMEDWLTAKLAYEGLPSKTYLSKTLAQYTSKTCSNCGFTITSADYDRVLEKLKKTATGWMTTINGKELKVEGQITYYNRYKRQNVVKDLSVELDRLSEESVNNDISSWTKGRSGEALSLLKKRFSHRPVQEKFVCLNCGFETHADEQAALNIARSWLFLRSQEYKKYQTNKTTGKNTDKRAFVETWQSFYRKKLKEVWKPAV

SEQ ID NO: 40440 - protein, 979 aa, synthetic construct
  REGION 1..979: note = engineered CasX variant
QEIKRINKIRRRLVKDSNTKKAGKTGPMKTLLVRVMTPDLRERLENLRKKPENIPQPISNTSRANLNKLLTDYTEMKKAILHVYWEEFQKDPVGLMSRVAQPASKKIDQNKLKPEMDEKGNLTTAGFACSQCGQPLFVYKLEQVSEKGKAYTNYFGRCNVAEHEKLILLAQLKPEKDSDEAVTYSLGKFGQRALDFYSIHVTKESTHPVKPLAQIAGNRYASGPVGKALRDACMGTIASFLSKYQDIIIEHQKVVKGNQKRLESLRELAGKENLEYPSVTLPPQPHTKEGVDAYNEVIARVRMWVNLNLWQKLKLSRDDAKPLLRLKKFPSFPLVERQANEVDWWDMVCNVKKLINEKKEDGKVFWQNLAGYKRQEALRPYLSSEEDVRKKGKKFARYQLGDLLLHLEKKHGEDWGKVYDEAWERIDKKVEGLSKHIKLEEERRSEDAQSKAALTDWLRAKASFVIEGLKEADKDEFCRCELKLQKWYGDLRGKPFAIEAENSILDISGFSKQYNCAFIWQKDGVKKLNLYLIINYFKGGKLRFKKIKPEAFEANRFYTVINKKSGEIVPMEVNFNFDDPNLIILPLAFGKRQGREFIWNDLLSLETGSLKLANGRVIEKTLYNRRTRQDEPALFVALTFERREVLDSSNIKPMNLIGVDRGENIPAVIALTDPEGCPLSRFKDSLGNPTHILRIGESYKEKQRTIQAKKEVEQRRAGGYSRKYASKAKNLADDMVRNTARDLLYYAVTQDAMLIFENLSRGFGRQGKRTFMAERQYTRMEDWLTAKLAYEGLPSKTYLSKTLAQYTSKTCSNCGFTITSADYDRVLEKLKKTATGWMTTINGKELKVEGQITYYNRYKRQNVVKDLSVELDRLSEESVNNDISSWTKGRSGEALSLLKKRFSHRPVQEKFVCLNCGFETHADEQAALNIARSWLFLRSQEYKKYQTNKTTGNTDKRAFVETWQSFYRKKLKEVWKPAV

SEQ ID NO: 40441 - protein, 979 aa, synthetic construct
  REGION 1..979: note = engineered CasX variant
QEIKRINKIRRRLVKDSNTKKAGKTGPMKTLLVRVMTPDLRERLENLRKKPENIPQPISNTSRANLNKLLTDYTEMKKAILHVYWEEFQKDPVGLMSRVAQPASKKIDQNKLKPEMDEKGNLTTAGFACSQCGQPLFVYKLEQVSEKGKAYTNYFGRCNVAEHEKLILLAQLKPEKDSDEAVTYSLGKFGQRALDFYSIHVTKESTHPVKPLAQIAGNRYASGPVGKALRDACMGTIASFLSKYQDIIIEHQKVVKGNQKRLESLRELAGKENLEYPSVTLPPQPHTKEGVDAYNEVIARVRMWVNLNLWQKLKLSRDDAKPLLRLKGFPSFPLVERQANEVDWWDMVCNVKKLINEKKEDGKVFWQNLAGYKRQEALRPYLSSEEDVRKKGKKFARYQLGDLLLHLEKKHGEDWGKVYDEAWERIDKKVEGLSKHIKLEEERRSEDAQSKAALTDWLRAKASFVIEGLKEADKDEFCRCELKLQKWYGDLRGKPFAIEAENSILDISGFSKQYNCAFIWQKDGVKKLNLYLIINYFKGGKLRFKKIKPEAFEANRFYTVINKKSGEIVPMEVNFNFDDPNLIILPLAFGKRQGREFIWNDLLSLETGSLKLANGRVIEKTLYNRRTRQDEPALFVALTFERREVLDSSNIKPMNLIGVDRGENIPAVIALTDPEGCPLSRFKDSLGNPTHILRIGERYKEKQRTIQAKKEVEQRRAGGYSRKYASKAKNLADDMVRNTARDLLYYAVTQDAMLIFENLSRGFGRQGKRTFMAERQYTRMEDWLTAKLAYEGLPSKTYLSKTLAQYTSKTCSNCGFTITSADYDRVLEKLKKTATGWMTTINGKELKVEGQITYYNRYKRQNVVKDLSVELDRLSEESVNNDISSWTKGRSGEALSLLKKRFSHRPVQEKFVCLNCGFETHADEQAALNIARSWLFLRSQEYKKYQTNKTTGNTDKRAFVETWQSFYRKKLKEVWKPAV

SEQ ID NO: 40442 - protein, 979 aa, synthetic construct
  REGION 1..979: note = engineered CasX variant
QEIKRINKIRRRLVKDSNTKKAGKTGPMKTLLVRVMTPDLRERLENLRKKPENIPQPISNTSRANLNKLLTDYTEMKKAILHVYWEEFQKDPVGLMSRVAQPASKKIDQNKLKPEMDEKGNLTTAGFACSQCGQPLFVYKLEQVSEKGKAYTNYFGRCNVAEHEKLILLAQLKPEKDSDEAVTYSLGKFGQRALDFYSIHVTKESTHPVKPLAQIAGNRYASGPVGKALRDACMGTIASFLSKYQDIIIEHQKVVKGNQKRLESLRELAGKENLEYPSVTLPPQPHTKEGVDAYNEVIARVRMWVNLNLWQKLKLSRDDAKPLLRLKGFPSFPLVERQANEVDWWDMVCNVKKLINEKKEDGKVFWQNLAGYKRQEALRPYLSSEEDVRKKGKKFARYQLGDLLLHLEKKHGEDWGKVYDEAWERIDKKVEGLSKHIKLEEERRSEDAQSKAALTDWLRAKASFVIEGLKEADKDEFCRCELKLQKWYGDLRGKPFAIEAENSILDISGFSKQYNCAFIWQKDGVKKLNLYLIINYFKGGKLRFKKIKPEAFEANRFYTVINKKSGEIVPMEVNFNFDDPNLIILPLAFGKRQGREFIWNDLLSLETGSLQLANGRVIEKTLYNRRTRQDEPALFVALTFERREVLDSSNIKPMNLIGVDRGENIPAVIALTDPEGCPLSRFKDSLGNPTHILRIGESYKEKQRTIQAKKEVEQRRAGGYSRKYASKAKNLADDMVRNTARDLLYYAVTQDAMLIFENLSRGFGRQGKRTFMAERQYTRMEDWLTAKLAYEGLPSKTYLSKTLAQYTSKTCSNCGFTITSADYDRVLEKLKKTATGWMTTINGKELKVEGQITYYNRYKRQNVVKDLSVELDRLSEESVNNDISSWTKGRSGEALSLLKKRFSHRPVQEKFVCLNCGFETHADEQAALNIARSWLFLRSQEYKKYQTNKTTGNTDKRAFVETWQSFYRKKLKEVWKPAV

SEQ ID NO: 40443 - protein, 978 aa, synthetic construct
  REGION 1..978: note = engineered CasX variant
QEIKRINKIRRRLVKDSNTKKAGKTGPMKTLLVRVMTPDLRERLENLRKKPENIPQPISNTSRANLNKLLTDYTEMKKAILHVYWEEFQKDPVGLMSRVAQPASKKIDQNKLKPEMDEKGNLTTAGFACSQCGQPLFVYKLEQVSEKGKAYTNYFGRCNVAEHEKLILLAQLKPEKDSDEAVTYSLGKFGQRALDFYSIHVTKESTHPVKPLAQIAGNRYASGPVGKALRDACMGTIASFLSKYQDIIIEHQKVVKGNQKRLESLRELAGKENLEYPSVTLPPQPHTKEGVDAYNEVIARVRMWVNLNLWQKLKLSRDDAKPLLRLKGFPSFPLVERQANEVDWWDMVCNVKKLINEKKEDGKVFWQNLAGYKRQEALRPYLSSEEDRKKGKKFARYQLGDLLLHLEKKHGEDWGKVYDEAWERIDKKVEGLSKHIKLEEERRSEDAQSKAALTDWLRAKASFVIEGLKEADKDEFCRCELKLQKWYGDLRGKPFAIEAENSILDISGFSKQYNCAFIWQKDGVKKLNLYLIINYFKGGKLRFKKIKPEAFEANRFYTVINKKSGEIVPMEVNFNFDDPNLIILPLAFGKRQGREFIWNDLLSLETGSLKLANGRVIEKTLYNRRTRQDEPALFVALTFERREVLDSSNIKPMNLIGVDRGENIPAVIALTDPEGCPLSRFKDSLGNPTHILRIGESYKEKQRTIQAKKEVEQRRAGGYSRKYASKAKNLADDMVRNTARDLLYYAVTQDAMLIFENLSRGFGRQGKRTFMAERQYTRMEDWLTAKLAYEGLPSKTYLSKTLAQYTSKTCSNCGFTITSADYDRMLEKLKKTATGWMTTINGKELKVEGQITYYNRYKRQNVVKDLSVELDRLSEESVNNDISSWTKGRQGEALSLLKKRFSHRPVQEKFVCLNCGFETHADEQAALNIARSWLFLRSQEYKKYQTNKTTGNTDKRAFVETWQSFYRKKLKEVWKPAV

SEQ ID NO: 40444 - protein, 978 aa, synthetic construct
  REGION 1..978: note = engineered CasX variant
QEIKRINKIRRRLVKDSNTKKAGKTGPMKTLLVRVMTPDLRERLENLRKKPENIPQPISNTSRANLNKLLTDYTEMKKAILHVYWEEFQKDPVGLMSRVAQPASKKIDQNKLKPEMDEKGNLTTAGFACSQCGQPLFVYKLEQVSEKGKAYTNYFGRCNVAEHEKLILLAQLKPEKDSDEAVTYSLGKFGQRALDFYSIHVTKESTHPVKPLAQIAGNRYASGPVGKALRDACMGTIASFLSKYQDIIIEHQKVVKGNQKRLESLRELAGKENLEYPSVTLPPQPHTKEGVDAYNEVIARVRMWVNLNLWQKLKLSRDDAKPLLRLKGFPSFPLVERQANEVDWWDMVCNVKKLINEKKEDGKVFWQNLAGYKRQEALRPYLSSEEDRKKGKKFARYQLGDLLLHLEKKHGEDWGKVYDEAWERIDKKVEGLSKHIKLEEERRSEDAQSKAALTDWLRAKASFVIEGLKEADKDEFCRCELKLQKWYGDLRGKPFAIEAENSILDISGFSKQYNCAFIWQKDGVKKLNLYLIINYFKGGKLRFKKIKPEAFEANRFYTVINKKSGEIVPMEVNFNFDDPNLIILPLAFGKRQGREFIWNDLLSLETGSLKLANGRVIEKTLYNRRTRQDEPALFVALTFERREVLDSSNIKPMNLIGVDRGENIPAVIALTDPEGCPLSRFKDSLGNPTHILRIGESYKEKQRTIQAKKEVEQRRAGGYSRKYASKAKNLADDMVRNTARDLLYYAVTQDAMLIFENLSRGFGRQGKRTFMAERQYTRMEDWLTAKLAYEGLPSKTYLSKTLAQYTSKTCSNCGFTITSADYDRMLEKLKKTATGWMTTINGKELKVEGQITYYNRYKRQNVVKDLSVELDRLSEESVNNDISSWTKGRSGEALSLLKKRFSHRPVQEKFVCLNCEFETHADEQAALNIARSWLFLRSQEYKKYQTNKTTGNTDKRAFVETWQSFYRKKLKEVWKPAV

SEQ ID NO: 40445 - protein, 979 aa, synthetic construct
  REGION 1..979: note = engineered CasX variant
QEIKRINKIRRRLVKDSNTKKAGKTGPMKTLLVRVMTPDLRERLENLRKKPENIPQPISNTSRANLNKLLTDYTEMKKAILHVYWEEFQKDPVGLMSRVAQPASKKIDQNKLKPEMDEKGNLTTAGFACSQCGQPLFVYKLEQVSEKGKAYTNYFGRCNVAEHEKLILLAQLKPEKDSDEAVTYSLGKFGQRALDFYSIHVTKESTHPVKPLAQIAGNRYASGPVGKALRDACMGTIASFLSKYQDIIIEHQKVVKGNQKRLESLRELAGKENLEYPSVTLPPQPHTKEGVDAYNEVIARVRMWVNLNLWQKLKLSRDDAKPLLRLKGFPSFPLVERQANEVDWWDMVCNVKKLINEKKEDGKVFWQNLAGYKRQEALRPYLSSEEDRKKGKKFARYQLGDLLLHLEKKHGEDWGKVYDEAWERIDKKVEGLSKHIKLEEERRSEDAQSKAALTDWLRAKASFVIEGLKEADKDEFCRCELKLQKWYGDLRGKPFAIEAENSILDISGFSKQYNCAFIWQKDGVKKLNLYLIINYFKGGKLRFKKIKPEAFEANRFYTVINKKSGEIVPMEVNFNFDDPNLIILPLAFGKRQGREFIWNDLLSLETGSLKLANGRVIEKTLYNRRTRQDEPALFVALTFERREVLDSSNIKPMNLIGVDRGENIPAVIALTDPEGCPLSRFKDSLGNPTHILRIGESYKEKQRTIQAKKEVEQRRAGGYSRKYASKAKNLADDMVRNTARDLLYYAVTQDAMLIFENLSRGFGRQGKRTFMAERQYTRMEDWLTAKLAYEGLPSKTYLSKTLAQYTSKTCSNCGFTITSADYDRMLEKLKKTATGWMTTINGKELKVEGQITYYNRYKRQNVVKDLSVELDRLSEESVNNDISSWTKGRSGEALSLLKKRFSHRPVQEKFVCLNCGFETHADEQAALNIARSWLFLRSQEYKKYQTNKTSTGNTDKRAFVETWQSFYRKKLKEVWKPAV

SEQ ID NO: 40446 - protein, 979 aa, synthetic construct
  REGION 1..979: note = engineered CasX variant
QEIKRINKIRRRLVKDSNTKKAGKTGPMKTLLVRVMTPDLRERLENLRKKPENIPQPISNTSRANLNKLLTDYTEMKKAILHVYWEEFQKDPVGLMSRVAQPASKKIDQNKLKPEMDEKGNLTTAGFACSQCGQPLFVYKLEQVSEKGKAYTNYFGRCNVAEHEKLILLAQLKPEKDSDEAVTYSLGKFGQRALDFYSIHVTKESTHPVKPLAQIAGNRYASGPVGKALRDACMGTIASFLSKYQDIIIEHQKVVKGNQKRLESLRELAGKENLEYPSVTLPPQPHTKEGVDAYNEVIARVRMWVNLNLWQKLKLSRDDAKPLLRLKGFPSFPLVERQANEVDWWDMVCNVKKLINEKKEDGKVFWQNLAGYKRQEALRPYLSSEEDRKKGKKFARYQLGDLLLHLEKKHGEDWGKVYDEAWERIDKKVEGLSKHIKLEEERRSEDAQSKAALTDWLRAKASFVIEGLKEADKDEFCRCELKLQKWYGDLRGKPFAIEAENSILDISGFSKQYNCAFIWQKDGVKKLNLYLIINYFKGGKLRFKKIKPEAFEANRFYTVINKKSGEIVPMEVNFNFDDPNLIILPLAFGKRQGREFIWNDLLSLETGSLKLANGRVIEKTLYNRRTRQDEPALFVALTFERREVLDSSNIKPMNLIGVDRGENIPAVIALTDPEGCPLSRFKDSLGNPTHILRIGESYKEKQRTIQAKKEVEQRRAGGYSRKYASKAKNLADDMVRNTARDLLYYAVTQDAMLIFENLSRGFGRQGKRTFMAERQYTRMEDWLTAKLAYEGLPSKTYLSKTLAQYTSKTCSNCGFTITSADYDRMLEKLKKTATGWMTTINGKELKVEGQITYYNRYKRQNVVKDLSVELDRLSEESVNNDISSWTKGRSGEALSLLKKRFSHRPVQEKFVCLNCGFETHADEQAALNIARSWLFLRSQEYKKYQTNKTTGKNTDKRAFVETWQSFYRKKLKEVWKPAV

SEQ ID NO: 40447 - protein, 978 aa, synthetic construct
  REGION 1..978: note = engineered CasX variant
QEIKRINKIRRRLVKDSNTKKAGKTGPMKTLLVRVMTPDLRERLENLRKKPENIPQPISNTSRANLNKLLTDYTEMKKAILHVYWEEFQKDPVGLMSRVAQPASKKIDQNKLKPEMDEKGNLTTAGFACSQCGQPLFVYKLEQVSEKGKAYTNYFGRCNVAEHEKLILLAQLKPEKDSDEAVTYSLGKFGQRALDFYSIHVTKESTHPVKPLAQIAGNRYASGPVGKALRDACMGTIASFLSKYQDIIIEHQKVVKGNQKRLESLRELAGKENLEYPSVTLPPQPHTKEGVDAYNEVIARVRMWVNLNLWQKLKLSRDDAKPLLRLKKFPSFPLVERQANEVDWWDMVCNVKKLINEKKEDGKVFWQNLAGYKRQEALRPYLSSEEDRKKGKKFARYQLGDLLLHLEKKHGEDWGKVYDEAWERIDKKVEGLSKHIKLEEERRSEDAQSKAALTDWLRAKASFVIEGLKEADKDEFCRCELKLQKWYGDLRGKPFAIEAENSILDISGFSKQYNCAFIWQKDGVKKLNLYLIINYFKGGKLRFKKIKPEAFEANRFYTVINKKSGEIVPMEVNFNFDDPNLIILPLAFGKRQGREFIWNDLLSLETGSLKLANGRVIEKTLYNRRTRQDEPALFVALTFERREVLDSSNIKPMNLIGVDRGENIPAVIALTDPEGCPLSRFKDSLGNPTHILRIGESYKEKQRTIQAKKEVEQRRAGGYSRKYASKAKNLADDMVRNTARDLLYYAVTQDAMLIFENLSRGFGRQGKRTFMAERQYTRMEDWLTAKLAYEGLPSKTYLSKTLAQYTSKTCSNCGFTITSADYDRMLEKLKKTATGWMTTINGKELKVEGQITYYNRYKRQNVVKDLSVELDRLSEESVNNDISSWTKGRSGEALSLLKKRFSHRPVQEKFVCLNCGFETHADEQAALNIARSWLFLRSQEYKKYQTNKTTGNTDKRAFVETWQSFYRKKLKEVWKPAV

SEQ ID NO: 40448 - protein, 978 aa, synthetic construct
  REGION 1..978: note = engineered CasX variant
QEIKRINKIRRRLVKDSNTKKAGKTGPMKTLLVRVMTPDLRERLENLRKKPENIPQPISNTSRANLNKLLTDYTEMKKAILHVYWEEFQKDPVGLMSRVAQPASKKIDQNKLKPEMDEKGNLTTAGFACSQCGQPLFVYKLEQVSEKGKAYTNYFGRCNVAEHEKLILLAQLKPEKDSDEAVTYSLGKFGQRALDFYSIHVTKESTHPVKPLAQIAGNRYASGPVGKALRDACMGTIASFLSKYQDIIIEHQKVVKGNQKRLESLRELAGKENLEYPSVTLPPQPHTKEGVDAYNEVIARVRMWVNLNLWQKLKLSRDDAKPLLRLKGFPSFPLVERQANEVDWWDMVCNVKKLINEKKEDGKVFWQNLAGYKRQEALRPYLSSEEDRKKGKKFARYQLGDLLLHLEKKHGEDWGKVYDEAWERIDKKVEGLSKHIKLEEERRSEDAQSKAALTDWLRAKASFVIEGLKEADKDEFCRCELKLQKWYGDLRGKPFAIEAENSILDISGFSKQYNCAFIWQKDGVKKLNLYLIINYFKGGKLRFKKIKPEAFEANRFYTVINKKSGEIVPMEVNFNFDDPNLIILPLAFGKRQGREFIWNDLLSLETGSLKLANGRVIEKTLYNRRTRQDEPALFVALTFERREVLDSSNIKPMNLIGVDRGENIPAVIALTDPEGCPLSRFKDSLGNPTHILRIGERYKEKQRTIQAKKEVEQRRAGGYSRKYASKAKNLADDMVRNTARDLLYYAVTQDAMLIFENLSRGFGRQGKRTFMAERQYTRMEDWLTAKLAYEGLPSKTYLSKTLAQYTSKTCSNCGFTITSADYDRMLEKLKKTATGWMTTINGKELKVEGQITYYNRYKRQNVVKDLSVELDRLSEESVNNDISSWTKGRSGEALSLLKKRFSHRPVQEKFVCLNCGFETHADEQAALNIARSWLFLRSQEYKKYQTNKTTGNTDKRAFVETWQSFYRKKLKEVWKPAV

SEQ ID NO: 40449 - protein, 978 aa, synthetic construct
  REGION 1..978: note = engineered CasX variant
QEIKRINKIRRRLVKDSNTKKAGKTGPMKTLLVRVMTPDLRERLENLRKKPENIPQPISNTSRANLNKLLTDYTEMKKAILHVYWEEFQKDPVGLMSRVAQPASKKIDQNKLKPEMDEKGNLTTAGFACSQCGQPLFVYKLEQVSEKGKAYTNYFGRCNVAEHEKLILLAQLKPEKDSDEAVTYSLGKFGQRALDFYSIHVTKESTHPVKPLAQIAGNRYASGPVGKALRDACMGTIASFLSKYQDIIIEHQKVVKGNQKRLESLRELAGKENLEYPSVTLPPQPHTKEGVDAYNEVIARVRMWVNLNLWQKLKLSRDDAKPLLRLKGFPSFPLVERQANEVDWWDMVCNVKKLINEKKEDGKVFWQNLAGYKRQEALRPYLSSEEDRKKGKKFARYQLGDLLLHLEKKHGEDWGKVYDEAWERIDKKVEGLSKHIKLEEERRSEDAQSKAALTDWLRAKASFVIEGLKEADKDEFCRCELKLQKWYGDLRGKPFAIEAENSILDISGFSKQYNCAFIWQKDGVKKLNLYLIINYFKGGKLRFKKIKPEAFEANRFYTVINKKSGEIVPMEVNFNFDDPNLIILPLAFGKRQGREFIWNDLLSLETGSLQLANGRVIEKTLYNRRTRQDEPALFVALTFERREVLDSSNIKPMNLIGVDRGENIPAVIALTDPEGCPLSRFKDSLGNPTHILRIGESYKEKQRTIQAKKEVEQRRAGGYSRKYASKAKNLADDMVRNTARDLLYYAVTQDAMLIFENLSRGFGRQGKRTFMAERQYTRMEDWLTAKLAYEGLPSKTYLSKTLAQYTSKTCSNCGFTITSADYDRMLEKLKKTATGWMTTINGKELKVEGQITYYNRYKRQNVVKDLSVELDRLSEESVNNDISSWTKGRSGEALSLLKKRFSHRPVQEKFVCLNCGFETHADEQAALNIARSWLFLRSQEYKKYQTNKTTGNTDKRAFVETWQSFYRKKLKEVWKPAV

SEQ ID NO: 40450 - protein, 978 aa, synthetic construct
  REGION 1..978: note = engineered CasX variant
QEIKRINKIRRRLVKDSNTKKAGKTGPMKTLLVRVMTPDLRERLENLRKKPENIPQPISNTSRANLNKLLTDYTEMKKAILHVYWEEFQKDPVGLMSRVAQPASKKIDQNKLKPEMDEKGNLTTAGFACSQCGQPLFVYKLEQVSEKGKAYTNYFGRCNVAEHEKLILLAQLKPEKDSDEAVTYSLGKFGQRALDFYSIHVTKESTHPVKPLAQIAGNRYASGPVGKALRDACMGTIASFLSKYQDIIIEHQKVVKGNQKRLESLRELAGKENLEYPSVTLPPQPHTKEGVDAYNEVIARVRMWVNLNLWQKLKLSRDDAKPLLRLKGFPSFPLVERQANEVDWWDMVCNVKKLINEKKEDGKVFWQNLAGYKRQEALRPYLSSEEDRKKGKKFARYQLGDLLLHLEKKHGEDWGKVYDEAWERIDKKVEGLSKHIKLEEERRSEDAQSKAALTDWLRAKASFVIEGLKEADKDEFCRCELKLQKWYGDLRGKPFAIEAENSILDISGFSKQYNCAFIWQKDGVKKLNLYLIINYFKGGKLRFKKIKPEAFEANRFYTVINKKSGEIVPMEVNFNFDDPNLIILPLAFGKRQGREFIWNDLLSLETGSLKLANGRVIEKTLYNRRTRQDEPALFVALTFERREVLDSSNIKPMNLIGVDRGENIPAVIALTDPEGCPLSRFKDSLGNPTHILRIGESYKEKQRTIQAKKEVEQRRAGGYSRKYASKAKNLADDMVRNTARDLLYYAVTQDAMLIFENLSRGFGRQGKRTFMAERQYTRMEDWLTAKLAYEGLPSKTYLSKTLAQYTSKTCSNCGFTITSADYDRVLEKLKKTATGWMTTINGKELKVEGQITYYNRYKRQNVVKDLSVELDRLSEESVNNDISSWTKGRQGEALSLLKKRFSHRPVQEKFVCLNCEFETHADEQAALNIARSWLFLRSQEYKKYQTNKTTGNTDKRAFVETWQSFYRKKLKEVWKPAV

SEQ ID NO: 40451 - protein, 979 aa, synthetic construct
  REGION 1..979: note = engineered CasX variant
QEIKRINKIRRRLVKDSNTKKAGKTGPMKTLLVRVMTPDLRERLENLRKKPENIPQPISNTSRANLNKLLTDYTEMKKAILHVYWEEFQKDPVGLMSRVAQPASKKIDQNKLKPEMDEKGNLTTAGFACSQCGQPLFVYKLEQVSEKGKAYTNYFGRCNVAEHEKLILLAQLKPEKDSDEAVTYSLGKFGQRALDFYSIHVTKESTHPVKPLAQIAGNRYASGPVGKALRDACMGTIASFLSKYQDIIIEHQKVVKGNQKRLESLRELAGKENLEYPSVTLPPQPHTKEGVDAYNEVIARVRMWVNLNLWQKLKLSRDDAKPLLRLKGFPSFPLVERQANEVDWWDMVCNVKKLINEKKEDGKVFWQNLAGYKRQEALRPYLSSEEDRKKGKKFARYQLGDLLLHLEKKHGEDWGKVYDEAWERIDKKVEGLSKHIKLEEERRSEDAQSKAALTDWLRAKASFVIEGLKEADKDEFCRCELKLQKWYGDLRGKPFAIEAENSILDISGFSKQYNCAFIWQKDGVKKLNLYLIINYFKGGKLRFKKIKPEAFEANRFYTVINKKSGEIVPMEVNFNFDDPNLIILPLAFGKRQGREFIWNDLLSLETGSLKLANGRVIEKTLYNRRTRQDEPALFVALTFERREVLDSSNIKPMNLIGVDRGENIPAVIALTDPEGCPLSRFKDSLGNPTHILRIGESYKEKQRTIQAKKEVEQRRAGGYSRKYASKAKNLADDMVRNTARDLLYYAVTQDAMLIFENLSRGFGRQGKRTFMAERQYTRMEDWLTAKLAYEGLPSKTYLSKTLAQYTSKTCSNCGFTITSADYDRVLEKLKKTATGWMTTINGKELKVEGQITYYNRYKRQNVVKDLSVELDRLSEESVNNDISSWTKGRQGEALSLLKKRFSHRPVQEKFVCLNCGFETHADEQAALNIARSWLFLRSQEYKKYQTNKTSTGNTDKRAFVETWQSFYRKKLKEVWKPAV

SEQ ID NO: 40452 - protein, 979 aa, synthetic construct
  REGION 1..979: note = engineered CasX variant
QEIKRINKIRRRLVKDSNTKKAGKTGPMKTLLVRVMTPDLRERLENLRKKPENIPQPISNTSRANLNKLLTDYTEMKKAILHVYWEEFQKDPVGLMSRVAQPASKKIDQNKLKPEMDEKGNLTTAGFACSQCGQPLFVYKLEQVSEKGKAYTNYFGRCNVAEHEKLILLAQLKPEKDSDEAVTYSLGKFGQRALDFYSIHVTKESTHPVKPLAQIAGNRYASGPVGKALRDACMGTIASFLSKYQDIIIEHQKVVKGNQKRLESLRELAGKENLEYPSVTLPPQPHTKEGVDAYNEVIARVRMWVNLNLWQKLKLSRDDAKPLLRLKGFPSFPLVERQANEVDWWDMVCNVKKLINEKKEDGKVFWQNLAGYKRQEALRPYLSSEEDRKKGKKFARYQLGDLLLHLEKKHGEDWGKVYDEAWERIDKKVEGLSKHIKLEEERRSEDAQSKAALTDWLRAKASFVIEGLKEADKDEFCRCELKLQKWYGDLRGKPFAIEAENSILDISGFSKQYNCAFIWQKDGVKKLNLYLIINYFKGGKLRFKKIKPEAFEANRFYTVINKKSGEIVPMEVNFNFDDPNLIILPLAFGKRQGREFIWNDLLSLETGSLKLANGRVIEKTLYNRRTRQDEPALFVALTFERREVLDSSNIKPMNLIGVDRGENIPAVIALTDPEGCPLSRFKDSLGNPTHILRIGESYKEKQRTIQAKKEVEQRRAGGYSRKYASKAKNLADDMVRNTARDLLYYAVTQDAMLIFENLSRGFGRQGKRTFMAERQYTRMEDWLTAKLAYEGLPSKTYLSKTLAQYTSKTCSNCGFTITSADYDRVLEKLKKTATGWMTTINGKELKVEGQITYYNRYKRQNVVKDLSVELDRLSEESVNNDISSWTKGRQGEALSLLKKRFSHRPVQEKFVCLNCGFETHADEQAALNIARSWLFLRSQEYKKYQTNKTTGKNTDKRAFVETWQSFYRKKLKEVWKPAV

SEQ ID NO: 40453 - protein, 978 aa, synthetic construct
  REGION 1..978: note = engineered CasX variant
QEIKRINKIRRRLVKDSNTKKAGKTGPMKTLLVRVMTPDLRERLENLRKKPENIPQPISNTSRANLNKLLTDYTEMKKAILHVYWEEFQKDPVGLMSRVAQPASKKIDQNKLKPEMDEKGNLTTAGFACSQCGQPLFVYKLEQVSEKGKAYTNYFGRCNVAEHEKLILLAQLKPEKDSDEAVTYSLGKFGQRALDFYSIHVTKESTHPVKPLAQIAGNRYASGPVGKALRDACMGTIASFLSKYQDIIIEHQKVVKGNQKRLESLRELAGKENLEYPSVTLPPQPHTKEGVDAYNEVIARVRMWVNLNLWQKLKLSRDDAKPLLRLKKFPSFPLVERQANEVDWWDMVCNVKKLINEKKEDGKVFWQNLAGYKRQEALRPYLSSEEDRKKGKKFARYQLGDLLLHLEKKHGEDWGKVYDEAWERIDKKVEGLSKHIKLEEERRSEDAQSKAALTDWLRAKASFVIEGLKEADKDEFCRCELKLQKWYGDLRGKPFAIEAENSILDISGFSKQYNCAFIWQKDGVKKLNLYLIINYFKGGKLRFKKIKPEAFEANRFYTVINKKSGEIVPMEVNFNFDDPNLIILPLAFGKRQGREFIWNDLLSLETGSLKLANGRVIEKTLYNRRTRQDEPALFVALTFERREVLDSSNIKPMNLIGVDRGENIPAVIALTDPEGCPLSRFKDSLGNPTHILRIGESYKEKQRTIQAKKEVEQRRAGGYSRKYASKAKNLADDMVRNTARDLLYYAVTQDAMLIFENLSRGFGRQGKRTFMAERQYTRMEDWLTAKLAYEGLPSKTYLSKTLAQYTSKTCSNCGFTITSADYDRVLEKLKKTATGWMTTINGKELKVEGQITYYNRYKRQNVVKDLSVELDRLSEESVNNDISSWTKGRQGEALSLLKKRFSHRPVQEKFVCLNCGFETHADEQAALNIARSWLFLRSQEYKKYQTNKTTGNTDKRAFVETWQSFYRKKLKEVWKPAV

SEQ ID NO: 40454 - protein, 978 aa, synthetic construct
  REGION 1..978: note = engineered CasX variant
QEIKRINKIRRRLVKDSNTKKAGKTGPMKTLLVRVMTPDLRERLENLRKKPENIPQPISNTSRANLNKLLTDYTEMKKAILHVYWEEFQKDPVGLMSRVAQPASKKIDQNKLKPEMDEKGNLTTAGFACSQCGQPLFVYKLEQVSEKGKAYTNYFGRCNVAEHEKLILLAQLKPEKDSDEAVTYSLGKFGQRALDFYSIHVTKESTHPVKPLAQIAGNRYASGPVGKALRDACMGTIASFLSKYQDIIIEHQKVVKGNQKRLESLRELAGKENLEYPSVTLPPQPHTKEGVDAYNEVIARVRMWVNLNLWQKLKLSRDDAKPLLRLKGFPSFPLVERQANEVDWWDMVCNVKKLINEKKEDGKVFWQNLAGYKRQEALRPYLSSEEDRKKGKKFARYQLGDLLLHLEKKHGEDWGKVYDEAWERIDKKVEGLSKHIKLEEERRSEDAQSKAALTDWLRAKASFVIEGLKEADKDEFCRCELKLQKWYGDLRGKPFAIEAENSILDISGFSKQYNCAFIWQKDGVKKLNLYLIINYFKGGKLRFKKIKPEAFEANRFYTVINKKSGEIVPMEVNFNFDDPNLIILPLAFGKRQGREFIWNDLLSLETGSLKLANGRVIEKTLYNRRTRQDEPALFVALTFERREVLDSSNIKPMNLIGVDRGENIPAVIALTDPEGCPLSRFKDSLGNPTHILRIGERYKEKQRTIQAKKEVEQRRAGGYSRKYASKAKNLADDMVRNTARDLLYYAVTQDAMLIFENLSRGFGRQGKRTFMAERQYTRMEDWLTAKLAYEGLPSKTYLSKTLAQYTSKTCSNCGFTITSADYDRVLEKLKKTATGWMTTINGKELKVEGQITYYNRYKRQNVVKDLSVELDRLSEESVNNDISSWTKGRQGEALSLLKKRFSHRPVQEKFVCLNCGFETHADEQAALNIARSWLFLRSQEYKKYQTNKTTGNTDKRAFVETWQSFYRKKLKEVWKPAV

SEQ ID NO: 40455 - protein, 978 aa, synthetic construct
  REGION 1..978: note = engineered CasX variant
QEIKRINKIRRRLVKDSNTKKAGKTGPMKTLLVRVMTPDLRERLENLRKKPENIPQPISNTSRANLNKLLTDYTEMKKAILHVYWEEFQKDPVGLMSRVAQPASKKIDQNKLKPEMDEKGNLTTAGFACSQCGQPLFVYKLEQVSEKGKAYTNYFGRCNVAEHEKLILLAQLKPEKDSDEAVTYSLGKFGQRALDFYSIHVTKESTHPVKPLAQIAGNRYASGPVGKALRDACMGTIASFLSKYQDIIIEHQKVVKGNQKRLESLRELAGKENLEYPSVTLPPQPHTKEGVDAYNEVIARVRMWVNLNLWQKLKLSRDDAKPLLRLKGFPSFPLVERQANEVDWWDMVCNVKKLINEKKEDGKVFWQNLAGYKRQEALRPYLSSEEDRKKGKKFARYQLGDLLLHLEKKHGEDWGKVYDEAWERIDKKVEGLSKHIKLEEERRSEDAQSKAALTDWLRAKASFVIEGLKEADKDEFCRCELKLQKWYGDLRGKPFAIEAENSILDISGFSKQYNCAFIWQKDGVKKLNLYLIINYFKGGKLRFKKIKPEAFEANRFYTVINKKSGEIVPMEVNFNFDDPNLIILPLAFGKRQGREFIWNDLLSLETGSLQLANGRVIEKTLYNRRTRQDEPALFVALTFERREVLDSSNIKPMNLIGVDRGENIPAVIALTDPEGCPLSRFKDSLGNPTHILRIGESYKEKQRTIQAKKEVEQRRAGGYSRKYASKAKNLADDMVRNTARDLLYYAVTQDAMLIFENLSRGFGRQGKRTFMAERQYTRMEDWLTAKLAYEGLPSKTYLSKTLAQYTSKTCSNCGFTITSADYDRVLEKLKKTATGWMTTINGKELKVEGQITYYNRYKRQNVVKDLSVELDRLSEESVNNDISSWTKGRQGEALSLLKKRFSHRPVQEKFVCLNCGFETHADEQAALNIARSWLFLRSQEYKKYQTNKTTGNTDKRAFVETWQSFYRKKLKEVWKPAV

SEQ ID NO: 40456 - protein, 979 aa, synthetic construct
  REGION 1..979: note = engineered CasX variant
QEIKRINKIRRRLVKDSNTKKAGKTGPMKTLLVRVMTPDLRERLENLRKKPENIPQPISNTSRANLNKLLTDYTEMKKAILHVYWEEFQKDPVGLMSRVAQPASKKIDQNKLKPEMDEKGNLTTAGFACSQCGQPLFVYKLEQVSEKGKAYTNYFGRCNVAEHEKLILLAQLKPEKDSDEAVTYSLGKFGQRALDFYSIHVTKESTHPVKPLAQIAGNRYASGPVGKALRDACMGTIASFLSKYQDIIIEHQKVVKGNQKRLESLRELAGKENLEYPSVTLPPQPHTKEGVDAYNEVIARVRMWVNLNLWQKLKLSRDDAKPLLRLKGFPSFPLVERQANEVDWWDMVCNVKKLINEKKEDGKVFWQNLAGYKRQEALRPYLSSEEDRKKGKKFARYQLGDLLLHLEKKHGEDWGKVYDEAWERIDKKVEGLSKHIKLEEERRSEDAQSKAALTDWLRAKASFVIEGLKEADKDEFCRCELKLQKWYGDLRGKPFAIEAENSILDISGFSKQYNCAFIWQKDGVKKLNLYLIINYFKGGKLRFKKIKPEAFEANRFYTVINKKSGEIVPMEVNFNFDDPNLIILPLAFGKRQGREFIWNDLLSLETGSLKLANGRVIEKTLYNRRTRQDEPALFVALTFERREVLDSSNIKPMNLIGVDRGENIPAVIALTDPEGCPLSRFKDSLGNPTHILRIGESYKEKQRTIQAKKEVEQRRAGGYSRKYASKAKNLADDMVRNTARDLLYYAVTQDAMLIFENLSRGFGRQGKRTFMAERQYTRMEDWLTAKLAYEGLPSKTYLSKTLAQYTSKTCSNCGFTITSADYDRVLEKLKKTATGWMTTINGKELKVEGQITYYNRYKRQNVVKDLSVELDRLSEESVNNDISSWTKGRSGEALSLLKKRFSHRPVQEKFVCLNCEFETHADEQAALNIARSWLFLRSQEYKKYQTNKTSTGNTDKRAFVETWQSFYRKKLKEVWKPAV

SEQ ID NO: 40457 - protein, 979 aa, synthetic construct
  REGION 1..979: note = engineered CasX variant
QEIKRINKIRRRLVKDSNTKKAGKTGPMKTLLVRVMTPDLRERLENLRKKPENIPQPISNTSRANLNKLLTDYTEMKKAILHVYWEEFQKDPVGLMSRVAQPASKKIDQNKLKPEMDEKGNLTTAGFACSQCGQPLFVYKLEQVSEKGKAYTNYFGRCNVAEHEKLILLAQLKPEKDSDEAVTYSLGKFGQRALDFYSIHVTKESTHPVKPLAQIAGNRYASGPVGKALRDACMGTIASFLSKYQDIIIEHQKVVKGNQKRLESLRELAGKENLEYPSVTLPPQPHTKEGVDAYNEVIARVRMWVNLNLWQKLKLSRDDAKPLLRLKGFPSFPLVERQANEVDWWDMVCNVKKLINEKKEDGKVFWQNLAGYKRQEALRPYLSSEEDRKKGKKFARYQLGDLLLHLEKKHGEDWGKVYDEAWERIDKKVEGLSKHIKLEEERRSEDAQSKAALTDWLRAKASFVIEGLKEADKDEFCRCELKLQKWYGDLRGKPFAIEAENSILDISGFSKQYNCAFIWQKDGVKKLNLYLIINYFKGGKLRFKKIKPEAFEANRFYTVINKKSGEIVPMEVNFNFDDPNLIILPLAFGKRQGREFIWNDLLSLETGSLKLANGRVIEKTLYNRRTRQDEPALFVALTFERREVLDSSNIKPMNLIGVDRGENIPAVIALTDPEGCPLSRFKDSLGNPTHILRIGESYKEKQRTIQAKKEVEQRRAGGYSRKYASKAKNLADDMVRNTARDLLYYAVTQDAMLIFENLSRGFGRQGKRTFMAERQYTRMEDWLTAKLAYEGLPSKTYLSKTLAQYTSKTCSNCGFTITSADYDRVLEKLKKTATGWMTTINGKELKVEGQITYYNRYKRQNVVKDLSVELDRLSEESVNNDISSWTKGRSGEALSLLKKRFSHRPVQEKFVCLNCEFETHADEQAALNIARSWLFLRSQEYKKYQTNKTTGKNTDKRAFVETWQSFYRKKLKEVWKPAV

SEQ ID NO: 40458 - protein, 978 aa, synthetic construct
  REGION 1..978: note = engineered CasX variant
QEIKRINKIRRRLVKDSNTKKAGKTGPMKTLLVRVMTPDLRERLENLRKKPENIPQPISNTSRANLNKLLTDYTEMKKAILHVYWEEFQKDPVGLMSRVAQPASKKIDQNKLKPEMDEKGNLTTAGFACSQCGQPLFVYKLEQVSEKGKAYTNYFGRCNVAEHEKLILLAQLKPEKDSDEAVTYSLGKFGQRALDFYSIHVTKESTHPVKPLAQIAGNRYASGPVGKALRDACMGTIASFLSKYQDIIIEHQKVVKGNQKRLESLRELAGKENLEYPSVTLPPQPHTKEGVDAYNEVIARVRMWVNLNLWQKLKLSRDDAKPLLRLKKFPSFPLVERQANEVDWWDMVCNVKKLINEKKEDGKVFWQNLAGYKRQEALRPYLSSEEDRKKGKKFARYQLGDLLLHLEKKHGEDWGKVYDEAWERIDKKVEGLSKHIKLEEERRSEDAQSKAALTDWLRAKASFVIEGLKEADKDEFCRCELKLQKWYGDLRGKPFAIEAENSILDISGFSKQYNCAFIWQKDGVKKLNLYLIINYFKGGKLRFKKIKPEAFEANRFYTVINKKSGEIVPMEVNFNFDDPNLIILPLAFGKRQGREFIWNDLLSLETGSLKLANGRVIEKTLYNRRTRQDEPALFVALTFERREVLDSSNIKPMNLIGVDRGENIPAVIALTDPEGCPLSRFKDSLGNPTHILRIGESYKEKQRTIQAKKEVEQRRAGGYSRKYASKAKNLADDMVRNTARDLLYYAVTQDAMLIFENLSRGFGRQGKRTFMAERQYTRMEDWLTAKLAYEGLPSKTYLSKTLAQYTSKTCSNCGFTITSADYDRVLEKLKKTATGWMTTINGKELKVEGQITYYNRYKRQNVVKDLSVELDRLSEESVNNDISSWTKGRSGEALSLLKKRFSHRPVQEKFVCLNCEFETHADEQAALNIARSWLFLRSQEYKKYQTNKTTGNTDKRAFVETWQSFYRKKLKEVWKPAV

SEQ ID NO: 40459 - protein, 978 aa, synthetic construct
  REGION 1..978: note = engineered CasX variant
QEIKRINKIRRRLVKDSNTKKAGKTGPMKTLLVRVMTPDLRERLENLRKKPENIPQPISNTSRANLNKLLTDYTEMKKAILHVYWEEFQKDPVGLMSRVAQPASKKIDQNKLKPEMDEKGNLTTAGFACSQCGQPLFVYKLEQVSEKGKAYTNYFGRCNVAEHEKLILLAQLKPEKDSDEAVTYSLGKFGQRALDFYSIHVTKESTHPVKPLAQIAGNRYASGPVGKALRDACMGTIASFLSKYQDIIIEHQKVVKGNQKRLESLRELAGKENLEYPSVTLPPQPHTKEGVDAYNEVIARVRMWVNLNLWQKLKLSRDDAKPLLRLKGFPSFPLVERQANEVDWWDMVCNVKKLINEKKEDGKVFWQNLAGYKRQEALRPYLSSEEDRKKGKKFARYQLGDLLLHLEKKHGEDWGKVYDEAWERIDKKVEGLSKHIKLEEERRSEDAQSKAALTDWLRAKASFVIEGLKEADKDEFCRCELKLQKWYGDLRGKPFAIEAENSILDISGFSKQYNCAFIWQKDGVKKLNLYLIINYFKGGKLRFKKIKPEAFEANRFYTVINKKSGEIVPMEVNFNFDDPNLIILPLAFGKRQGREFIWNDLLSLETGSLKLANGRVIEKTLYNRRTRQDEPALFVALTFERREVLDSSNIKPMNLIGVDRGENIPAVIALTDPEGCPLSRFKDSLGNPTHILRIGERYKEKQRTIQAKKEVEQRRAGGYSRKYASKAKNLADDMVRNTARDLLYYAVTQDAMLIFENLSRGFGRQGKRTFMAERQYTRMEDWLTAKLAYEGLPSKTYLSKTLAQYTSKTCSNCGFTITSADYDRVLEKLKKTATGWMTTINGKELKVEGQITYYNRYKRQNVVKDLSVELDRLSEESVNNDISSWTKGRSGEALSLLKKRFSHRPVQEKFVCLNCEFETHADEQAALNIARSWLFLRSQEYKKYQTNKTTGNTDKRAFVETWQSFYRKKLKEVWKPAV

SEQ ID NO: 40460 - protein, 978 aa, synthetic construct
  REGION 1..978: note = engineered CasX variant
QEIKRINKIRRRLVKDSNTKKAGKTGPMKTLLVRVMTPDLRERLENLRKKPENIPQPISNTSRANLNKLLTDYTEMKKAILHVYWEEFQKDPVGLMSRVAQPASKKIDQNKLKPEMDEKGNLTTAGFACSQCGQPLFVYKLEQVSEKGKAYTNYFGRCNVAEHEKLILLAQLKPEKDSDEAVTYSLGKFGQRALDFYSIHVTKESTHPVKPLAQIAGNRYASGPVGKALRDACMGTIASFLSKYQDIIIEHQKVVKGNQKRLESLRELAGKENLEYPSVTLPPQPHTKEGVDAYNEVIARVRMWVNLNLWQKLKLSRDDAKPLLRLKGFPSFPLVERQANEVDWWDMVCNVKKLINEKKEDGKVFWQNLAGYKRQEALRPYLSSEEDRKKGKKFARYQLGDLLLHLEKKHGEDWGKVYDEAWERIDKKVEGLSKHIKLEEERRSEDAQSKAALTDWLRAKASFVIEGLKEADKDEFCRCELKLQKWYGDLRGKPFAIEAENSILDISGFSKQYNCAFIWQKDGVKKLNLYLIINYFKGGKLRFKKIKPEAFEANRFYTVINKKSGEIVPMEVNFNFDDPNLIILPLAFGKRQGREFIWNDLLSLETGSLQLANGRVIEKTLYNRRTRQDEPALFVALTFERREVLDSSNIKPMNLIGVDRGENIPAVIALTDPEGCPLSRFKDSLGNPTHILRIGESYKEKQRTIQAKKEVEQRRAGGYSRKYASKAKNLADDMVRNTARDLLYYAVTQDAMLIFENLSRGFGRQGKRTFMAERQYTRMEDWLTAKLAYEGLPSKTYLSKTLAQYTSKTCSNCGFTITSADYDRVLEKLKKTATGWMTTINGKELKVEGQITYYNRYKRQNVVKDLSVELDRLSEESVNNDISSWTKGRSGEALSLLKKRFSHRPVQEKFVCLNCEFETHADEQAALNIARSWLFLRSQEYKKYQTNKTTGNTDKRAFVETWQSFYRKKLKEVWKPAV

SEQ ID NO: 40461 - protein, 980 aa, synthetic construct
  REGION 1..980: note = engineered CasX variant
QEIKRINKIRRRLVKDSNTKKAGKTGPMKTLLVRVMTPDLRERLENLRKKPENIPQPISNTSRANLNKLLTDYTEMKKAILHVYWEEFQKDPVGLMSRVAQPASKKIDQNKLKPEMDEKGNLTTAGFACSQCGQPLFVYKLEQVSEKGKAYTNYFGRCNVAEHEKLILLAQLKPEKDSDEAVTYSLGKFGQRALDFYSIHVTKESTHPVKPLAQIAGNRYASGPVGKALRDACMGTIASFLSKYQDIIIEHQKVVKGNQKRLESLRELAGKENLEYPSVTLPPQPHTKEGVDAYNEVIARVRMWVNLNLWQKLKLSRDDAKPLLRLKGFPSFPLVERQANEVDWWDMVCNVKKLINEKKEDGKVFWQNLAGYKRQEALRPYLSSEEDRKKGKKFARYQLGDLLLHLEKKHGEDWGKVYDEAWERIDKKVEGLSKHIKLEEERRSEDAQSKAALTDWLRAKASFVIEGLKEADKDEFCRCELKLQKWYGDLRGKPFAIEAENSILDISGFSKQYNCAFIWQKDGVKKLNLYLIINYFKGGKLRFKKIKPEAFEANRFYTVINKKSGEIVPMEVNFNFDDPNLIILPLAFGKRQGREFIWNDLLSLETGSLKLANGRVIEKTLYNRRTRQDEPALFVALTFERREVLDSSNIKPMNLIGVDRGENIPAVIALTDPEGCPLSRFKDSLGNPTHILRIGESYKEKQRTIQAKKEVEQRRAGGYSRKYASKAKNLADDMVRNTARDLLYYAVTQDAMLIFENLSRGFGRQGKRTFMAERQYTRMEDWLTAKLAYEGLPSKTYLSKTLAQYTSKTCSNCGFTITSADYDRVLEKLKKTATGWMTTINGKELKVEGQITYYNRYKRQNVVKDLSVELDRLSEESVNNDISSWTKGRSGEALSLLKKRFSHRPVQEKFVCLNCGFETHADEQAALNIARSWLFLRSQEYKKYQTNKTSTGKNTDKRAFVETWQSFYRKKLKEVWKPAV

SEQ ID NO: 40462 - protein, 979 aa, synthetic construct
  REGION 1..979: note = engineered CasX variant
QEIKRINKIRRRLVKDSNTKKAGKTGPMKTLLVRVMTPDLRERLENLRKKPENIPQPISNTSRANLNKLLTDYTEMKKAILHVYWEEFQKDPVGLMSRVAQPASKKIDQNKLKPEMDEKGNLTTAGFACSQCGQPLFVYKLEQVSEKGKAYTNYFGRCNVAEHEKLILLAQLKPEKDSDEAVTYSLGKFGQRALDFYSIHVTKESTHPVKPLAQIAGNRYASGPVGKALRDACMGTIASFLSKYQDIIIEHQKVVKGNQKRLESLRELAGKENLEYPSVTLPPQPHTKEGVDAYNEVIARVRMWVNLNLWQKLKLSRDDAKPLLRLKKFPSFPLVERQANEVDWWDMVCNVKKLINEKKEDGKVFWQNLAGYKRQEALRPYLSSEEDRKKGKKFARYQLGDLLLHLEKKHGEDWGKVYDEAWERIDKKVEGLSKHIKLEEERRSEDAQSKAALTDWLRAKASFVIEGLKEADKDEFCRCELKLQKWYGDLRGKPFAIEAENSILDISGFSKQYNCAFIWQKDGVKKLNLYLIINYFKGGKLRFKKIKPEAFEANRFYTVINKKSGEIVPMEVNFNFDDPNLIILPLAFGKRQGREFIWNDLLSLETGSLKLANGRVIEKTLYNRRTRQDEPALFVALTFERREVLDSSNIKPMNLIGVDRGENIPAVIALTDPEGCPLSRFKDSLGNPTHILRIGESYKEKQRTIQAKKEVEQRRAGGYSRKYASKAKNLADDMVRNTARDLLYYAVTQDAMLIFENLSRGFGRQGKRTFMAERQYTRMEDWLTAKLAYEGLPSKTYLSKTLAQYTSKTCSNCGFTITSADYDRVLEKLKKTATGWMTTINGKELKVEGQITYYNRYKRQNVVKDLSVELDRLSEESVNNDISSWTKGRSGEALSLLKKRFSHRPVQEKFVCLNCGFETHADEQAALNIARSWLFLRSQEYKKYQTNKTSTGNTDKRAFVETWQSFYRKKLKEVWKPAV

SEQ ID NO: 40463 - protein, 979 aa, synthetic construct
  REGION 1..979: note = engineered CasX variant
QEIKRINKIRRRLVKDSNTKKAGKTGPMKTLLVRVMTPDLRERLENLRKKPENIPQPISNTSRANLNKLLTDYTEMKKAILHVYWEEFQKDPVGLMSRVAQPASKKIDQNKLKPEMDEKGNLTTAGFACSQCGQPLFVYKLEQVSEKGKAYTNYFGRCNVAEHEKLILLAQLKPEKDSDEAVTYSLGKFGQRALDFYSIHVTKESTHPVKPLAQIAGNRYASGPVGKALRDACMGTIASFLSKYQDIIIEHQKVVKGNQKRLESLRELAGKENLEYPSVTLPPQPHTKEGVDAYNEVIARVRMWVNLNLWQKLKLSRDDAKPLLRLKGFPSFPLVERQANEVDWWDMVCNVKKLINEKKEDGKVFWQNLAGYKRQEALRPYLSSEEDRKKGKKFARYQLGDLLLHLEKKHGEDWGKVYDEAWERIDKKVEGLSKHIKLEEERRSEDAQSKAALTDWLRAKASFVIEGLKEADKDEFCRCELKLQKWYGDLRGKPFAIEAENSILDISGFSKQYNCAFIWQKDGVKKLNLYLIINYFKGGKLRFKKIKPEAFEANRFYTVINKKSGEIVPMEVNFNFDDPNLIILPLAFGKRQGREFIWNDLLSLETGSLKLANGRVIEKTLYNRRTRQDEPALFVALTFERREVLDSSNIKPMNLIGVDRGENIPAVIALTDPEGCPLSRFKDSLGNPTHILRIGERYKEKQRTIQAKKEVEQRRAGGYSRKYASKAKNLADDMVRNTARDLLYYAVTQDAMLIFENLSRGFGRQGKRTFMAERQYTRMEDWLTAKLAYEGLPSKTYLSKTLAQYTSKTCSNCGFTITSADYDRVLEKLKKTATGWMTTINGKELKVEGQITYYNRYKRQNVVKDLSVELDRLSEESVNNDISSWTKGRSGEALSLLKKRFSHRPVQEKFVCLNCGFETHADEQAALNIARSWLFLRSQEYKKYQTNKTSTGNTDKRAFVETWQSFYRKKLKEVWKPAV

SEQ ID NO: 40464 - protein, 979 aa, synthetic construct
  REGION 1..979: note = engineered CasX variant
QEIKRINKIRRRLVKDSNTKKAGKTGPMKTLLVRVMTPDLRERLENLRKKPENIPQPISNTSRANLNKLLTDYTEMKKAILHVYWEEFQKDPVGLMSRVAQPASKKIDQNKLKPEMDEKGNLTTAGFACSQCGQPLFVYKLEQVSEKGKAYTNYFGRCNVAEHEKLILLAQLKPEKDSDEAVTYSLGKFGQRALDFYSIHVTKESTHPVKPLAQIAGNRYASGPVGKALRDACMGTIASFLSKYQDIIIEHQKVVKGNQKRLESLRELAGKENLEYPSVTLPPQPHTKEGVDAYNEVIARVRMWVNLNLWQKLKLSRDDAKPLLRLKGFPSFPLVERQANEVDWWDMVCNVKKLINEKKEDGKVFWQNLAGYKRQEALRPYLSSEEDRKKGKKFARYQLGDLLLHLEKKHGEDWGKVYDEAWERIDKKVEGLSKHIKLEEERRSEDAQSKAALTDWLRAKASFVIEGLKEADKDEFCRCELKLQKWYGDLRGKPFAIEAENSILDISGFSKQYNCAFIWQKDGVKKLNLYLIINYFKGGKLRFKKIKPEAFEANRFYTVINKKSGEIVPMEVNFNFDDPNLIILPLAFGKRQGREFIWNDLLSLETGSLQLANGRVIEKTLYNRRTRQDEPALFVALTFERREVLDSSNIKPMNLIGVDRGENIPAVIALTDPEGCPLSRFKDSLGNPTHILRIGESYKEKQRTIQAKKEVEQRRAGGYSRKYASKAKNLADDMVRNTARDLLYYAVTQDAMLIFENLSRGFGRQGKRTFMAERQYTRMEDWLTAKLAYEGLPSKTYLSKTLAQYTSKTCSNCGFTITSADYDRVLEKLKKTATGWMTTINGKELKVEGQITYYNRYKRQNVVKDLSVELDRLSEESVNNDISSWTKGRSGEALSLLKKRFSHRPVQEKFVCLNCGFETHADEQAALNIARSWLFLRSQEYKKYQTNKTSTGNTDKRAFVETWQSFYRKKLKEVWKPAV

SEQ ID NO: 40465 - protein, 979 aa, synthetic construct
  REGION 1..979: note = engineered CasX variant
QEIKRINKIRRRLVKDSNTKKAGKTGPMKTLLVRVMTPDLRERLENLRKKPENIPQPISNTSRANLNKLLTDYTEMKKAILHVYWEEFQKDPVGLMSRVAQPASKKIDQNKLKPEMDEKGNLTTAGFACSQCGQPLFVYKLEQVSEKGKAYTNYFGRCNVAEHEKLILLAQLKPEKDSDEAVTYSLGKFGQRALDFYSIHVTKESTHPVKPLAQIAGNRYASGPVGKALRDACMGTIASFLSKYQDIIIEHQKVVKGNQKRLESLRELAGKENLEYPSVTLPPQPHTKEGVDAYNEVIARVRMWVNLNLWQKLKLSRDDAKPLLRLKKFPSFPLVERQANEVDWWDMVCNVKKLINEKKEDGKVFWQNLAGYKRQEALRPYLSSEEDRKKGKKFARYQLGDLLLHLEKKHGEDWGKVYDEAWERIDKKVEGLSKHIKLEEERRSEDAQSKAALTDWLRAKASFVIEGLKEADKDEFCRCELKLQKWYGDLRGKPFAIEAENSILDISGFSKQYNCAFIWQKDGVKKLNLYLIINYFKGGKLRFKKIKPEAFEANRFYTVINKKSGEIVPMEVNFNFDDPNLIILPLAFGKRQGREFIWNDLLSLETGSLKLANGRVIEKTLYNRRTRQDEPALFVALTFERREVLDSSNIKPMNLIGVDRGENIPAVIALTDPEGCPLSRFKDSLGNPTHILRIGESYKEKQRTIQAKKEVEQRRAGGYSRKYASKAKNLADDMVRNTARDLLYYAVTQDAMLIFENLSRGFGRQGKRTFMAERQYTRMEDWLTAKLAYEGLPSKTYLSKTLAQYTSKTCSNCGFTITSADYDRVLEKLKKTATGWMTTINGKELKVEGQITYYNRYKRQNVVKDLSVELDRLSEESVNNDISSWTKGRSGEALSLLKKRFSHRPVQEKFVCLNCGFETHADEQAALNIARSWLFLRSQEYKKYQTNKTTGKNTDKRAFVETWQSFYRKKLKEVWKPAV

SEQ ID NO: 40466 - protein, 979 aa, synthetic construct
  REGION 1..979: note = engineered CasX variant
QEIKRINKIRRRLVKDSNTKKAGKTGPMKTLLVRVMTPDLRERLENLRKKPENIPQPISNTSRANLNKLLTDYTEMKKAILHVYWEEFQKDPVGLMSRVAQPASKKIDQNKLKPEMDEKGNLTTAGFACSQCGQPLFVYKLEQVSEKGKAYTNYFGRCNVAEHEKLILLAQLKPEKDSDEAVTYSLGKFGQRALDFYSIHVTKESTHPVKPLAQIAGNRYASGPVGKALRDACMGTIASFLSKYQDIIIEHQKVVKGNQKRLESLRELAGKENLEYPSVTLPPQPHTKEGVDAYNEVIARVRMWVNLNLWQKLKLSRDDAKPLLRLKGFPSFPLVERQANEVDWWDMVCNVKKLINEKKEDGKVFWQNLAGYKRQEALRPYLSSEEDRKKGKKFARYQLGDLLLHLEKKHGEDWGKVYDEAWERIDKKVEGLSKHIKLEEERRSEDAQSKAALTDWLRAKASFVIEGLKEADKDEFCRCELKLQKWYGDLRGKPFAIEAENSILDISGFSKQYNCAFIWQKDGVKKLNLYLIINYFKGGKLRFKKIKPEAFEANRFYTVINKKSGEIVPMEVNFNFDDPNLIILPLAFGKRQGREFIWNDLLSLETGSLKLANGRVIEKTLYNRRTRQDEPALFVALTFERREVLDSSNIKPMNLIGVDRGENIPAVIALTDPEGCPLSRFKDSLGNPTHILRIGERYKEKQRTIQAKKEVEQRRAGGYSRKYASKAKNLADDMVRNTARDLLYYAVTQDAMLIFENLSRGFGRQGKRTFMAERQYTRMEDWLTAKLAYEGLPSKTYLSKTLAQYTSKTCSNCGFTITSADYDRVLEKLKKTATGWMTTINGKELKVEGQITYYNRYKRQNVVKDLSVELDRLSEESVNNDISSWTKGRSGEALSLLKKRFSHRPVQEKFVCLNCGFETHADEQAALNIARSWLFLRSQEYKKYQTNKTTGKNTDKRAFVETWQSFYRKKLKEVWKPAV

SEQ ID NO: 40467 - protein, 979 aa, synthetic construct
  REGION 1..979: note = engineered CasX variant
QEIKRINKIRRRLVKDSNTKKAGKTGPMKTLLVRVMTPDLRERLENLRKKPENIPQPISNTSRANLNKLLTDYTEMKKAILHVYWEEFQKDPVGLMSRVAQPASKKIDQNKLKPEMDEKGNLTTAGFACSQCGQPLFVYKLEQVSEKGKAYTNYFGRCNVAEHEKLILLAQLKPEKDSDEAVTYSLGKFGQRALDFYSIHVTKESTHPVKPLAQIAGNRYASGPVGKALRDACMGTIASFLSKYQDIIIEHQKVVKGNQKRLESLRELAGKENLEYPSVTLPPQPHTKEGVDAYNEVIARVRMWVNLNLWQKLKLSRDDAKPLLRLKGFPSFPLVERQANEVDWWDMVCNVKKLINEKKEDGKVFWQNLAGYKRQEALRPYLSSEEDRKKGKKFARYQLGDLLLHLEKKHGEDWGKVYDEAWERIDKKVEGLSKHIKLEEERRSEDAQSKAALTDWLRAKASFVIEGLKEADKDEFCRCELKLQKWYGDLRGKPFAIEAENSILDISGFSKQYNCAFIWQKDGVKKLNLYLIINYFKGGKLRFKKIKPEAFEANRFYTVINKKSGEIVPMEVNFNFDDPNLIILPLAFGKRQGREFIWNDLLSLETGSLQLANGRVIEKTLYNRRTRQDEPALFVALTFERREVLDSSNIKPMNLIGVDRGENIPAVIALTDPEGCPLSRFKDSLGNPTHILRIGESYKEKQRTIQAKKEVEQRRAGGYSRKYASKAKNLADDMVRNTARDLLYYAVTQDAMLIFENLSRGFGRQGKRTFMAERQYTRMEDWLTAKLAYEGLPSKTYLSKTLAQYTSKTCSNCGFTITSADYDRVLEKLKKTATGWMTTINGKELKVEGQITYYNRYKRQNVVKDLSVELDRLSEESVNNDISSWTKGRSGEALSLLKKRFSHRPVQEKFVCLNCGFETHADEQAALNIARSWLFLRSQEYKKYQTNKTTGKNTDKRAFVETWQSFYRKKLKEVWKPAV

SEQ ID NO: 40468 - protein, 978 aa, synthetic construct
  REGION 1..978: note = engineered CasX variant
QEIKRINKIRRRLVKDSNTKKAGKTGPMKTLLVRVMTPDLRERLENLRKKPENIPQPISNTSRANLNKLLTDYTEMKKAILHVYWEEFQKDPVGLMSRVAQPASKKIDQNKLKPEMDEKGNLTTAGFACSQCGQPLFVYKLEQVSEKGKAYTNYFGRCNVAEHEKLILLAQLKPEKDSDEAVTYSLGKFGQRALDFYSIHVTKESTHPVKPLAQIAGNRYASGPVGKALRDACMGTIASFLSKYQDIIIEHQKVVKGNQKRLESLRELAGKENLEYPSVTLPPQPHTKEGVDAYNEVIARVRMWVNLNLWQKLKLSRDDAKPLLRLKKFPSFPLVERQANEVDWWDMVCNVKKLINEKKEDGKVFWQNLAGYKRQEALRPYLSSEEDRKKGKKFARYQLGDLLLHLEKKHGEDWGKVYDEAWERIDKKVEGLSKHIKLEEERRSEDAQSKAALTDWLRAKASFVIEGLKEADKDEFCRCELKLQKWYGDLRGKPFAIEAENSILDISGFSKQYNCAFIWQKDGVKKLNLYLIINYFKGGKLRFKKIKPEAFEANRFYTVINKKSGEIVPMEVNFNFDDPNLIILPLAFGKRQGREFIWNDLLSLETGSLKLANGRVIEKTLYNRRTRQDEPALFVALTFERREVLDSSNIKPMNLIGVDRGENIPAVIALTDPEGCPLSRFKDSLGNPTHILRIGERYKEKQRTIQAKKEVEQRRAGGYSRKYASKAKNLADDMVRNTARDLLYYAVTQDAMLIFENLSRGFGRQGKRTFMAERQYTRMEDWLTAKLAYEGLPSKTYLSKTLAQYTSKTCSNCGFTITSADYDRVLEKLKKTATGWMTTINGKELKVEGQITYYNRYKRQNVVKDLSVELDRLSEESVNNDISSWTKGRSGEALSLLKKRFSHRPVQEKFVCLNCGFETHADEQAALNIARSWLFLRSQEYKKYQTNKTTGNTDKRAFVETWQSFYRKKLKEVWKPAV

SEQ ID NO: 40469 - protein, 978 aa, synthetic construct
  REGION 1..978: note = engineered CasX variant
QEIKRINKIRRRLVKDSNTKKAGKTGPMKTLLVRVMTPDLRERLENLRKKPENIPQPISNTSRANLNKLLTDYTEMKKAILHVYWEEFQKDPVGLMSRVAQPASKKIDQNKLKPEMDEKGNLTTAGFACSQCGQPLFVYKLEQVSEKGKAYTNYFGRCNVAEHEKLILLAQLKPEKDSDEAVTYSLGKFGQRALDFYSIHVTKESTHPVKPLAQIAGNRYASGPVGKALRDACMGTIASFLSKYQDIIIEHQKVVKGNQKRLESLRELAGKENLEYPSVTLPPQPHTKEGVDAYNEVIARVRMWVNLNLWQKLKLSRDDAKPLLRLKKFPSFPLVERQANEVDWWDMVCNVKKLINEKKEDGKVFWQNLAGYKRQEALRPYLSSEEDRKKGKKFARYQLGDLLLHLEKKHGEDWGKVYDEAWERIDKKVEGLSKHIKLEEERRSEDAQSKAALTDWLRAKASFVIEGLKEADKDEFCRCELKLQKWYGDLRGKPFAIEAENSILDISGFSKQYNCAFIWQKDGVKKLNLYLIINYFKGGKLRFKKIKPEAFEANRFYTVINKKSGEIVPMEVNFNFDDPNLIILPLAFGKRQGREFIWNDLLSLETGSLQLANGRVIEKTLYNRRTRQDEPALFVALTFERREVLDSSNIKPMNLIGVDRGENIPAVIALTDPEGCPLSRFKDSLGNPTHILRIGESYKEKQRTIQAKKEVEQRRAGGYSRKYASKAKNLADDMVRNTARDLLYYAVTQDAMLIFENLSRGFGRQGKRTFMAERQYTRMEDWLTAKLAYEGLPSKTYLSKTLAQYTSKTCSNCGFTITSADYDRVLEKLKKTATGWMTTINGKELKVEGQITYYNRYKRQNVVKDLSVELDRLSEESVNNDISSWTKGRSGEALSLLKKRFSHRPVQEKFVCLNCGFETHADEQAALNIARSWLFLRSQEYKKYQTNKTTGNTDKRAFVETWQSFYRKKLKEVWKPAV

SEQ ID NO: 40470 - protein, 978 aa, synthetic construct
  REGION 1..978: note = engineered CasX variant
QEIKRINKIRRRLVKDSNTKKAGKTGPMKTLLVRVMTPDLRERLENLRKKPENIPQPISNTSRANLNKLLTDYTEMKKAILHVYWEEFQKDPVGLMSRVAQPASKKIDQNKLKPEMDEKGNLTTAGFACSQCGQPLFVYKLEQVSEKGKAYTNYFGRCNVAEHEKLILLAQLKPEKDSDEAVTYSLGKFGQRALDFYSIHVTKESTHPVKPLAQIAGNRYASGPVGKALRDACMGTIASFLSKYQDIIIEHQKVVKGNQKRLESLRELAGKENLEYPSVTLPPQPHTKEGVDAYNEVIARVRMWVNLNLWQKLKLSRDDAKPLLRLKGFPSFPLVERQANEVDWWDMVCNVKKLINEKKEDGKVFWQNLAGYKRQEALRPYLSSEEDRKKGKKFARYQLGDLLLHLEKKHGEDWGKVYDEAWERIDKKVEGLSKHIKLEEERRSEDAQSKAALTDWLRAKASFVIEGLKEADKDEFCRCELKLQKWYGDLRGKPFAIEAENSILDISGFSKQYNCAFIWQKDGVKKLNLYLIINYFKGGKLRFKKIKPEAFEANRFYTVINKKSGEIVPMEVNFNFDDPNLIILPLAFGKRQGREFIWNDLLSLETGSLQLANGRVIEKTLYNRRTRQDEPALFVALTFERREVLDSSNIKPMNLIGVDRGENIPAVIALTDPEGCPLSRFKDSLGNPTHILRIGERYKEKQRTIQAKKEVEQRRAGGYSRKYASKAKNLADDMVRNTARDLLYYAVTQDAMLIFENLSRGFGRQGKRTFMAERQYTRMEDWLTAKLAYEGLPSKTYLSKTLAQYTSKTCSNCGFTITSADYDRVLEKLKKTATGWMTTINGKELKVEGQITYYNRYKRQNVVKDLSVELDRLSEESVNNDISSWTKGRSGEALSLLKKRFSHRPVQEKFVCLNCGFETHADEQAALNIARSWLFLRSQEYKKYQTNKTTGNTDKRAFVETWQSFYRKKLKEVWKPAV

SEQ ID NO: 40471 - protein, 979 aa, synthetic construct
  REGION 1..979: note = engineered CasX variant
QEIKRINKIRRRLVKDSNTKKAGKTRGPMKTLLVRVMTPDLRERLENLRKKPENIPQPISNTSRANLNKLLTDYTEMKKAILHVYWEEFQKDPVGLMSRVAQPASKKIDQNKLKPEMDEKGNLTTAGFACSQCGQPLFVYKLEQVSEKGKAYTNYFGRCNVAEHEKLILLAQLKPEKDSDEAVTYSLGKFGQRALDFYSIHVTKESTHPVKPLAQIAGNRYASYPVGKALSGACMGTIASFLSKYQDIIIEHQKVVKGNQKRLESLRELAGKENLEYPSVTLPPQPHTKEGVDAYNEVIARVRMWVNLNLWQKLKLSRDDAKPLLRLKGFPSFPLVERQANEVDWWDMVCNVKKLINEKKEDGKVFWQNLAGYKRQEALRPYLSSEEDRKKGKKFARYQLGDLLLHLEKKHGEDWGKVYDEAWERIDKKVEGLSKHIKLEEERRSEDAQSKAALTDWLRAKASFVIEGLKEADKDEFCRCELKLQKWYGDLRGKPFAIEAENSILDISGFSKQYNCAFIWQKDGVKKLNLYLIINYFKGGKLRFKKIKPEAFEANRFYTVINKKSGEIVPMEVNFNFDDPNLIILPLAFGKRQGREFIWNDLLSLETGSLKLANGRVIEKTLYNRRTRQDEPALFVALTFERREVLDSSNIKPMNLIGVDRGENIPAVIALTDPEGCPLSRFKDSLGNPTHILRIGESYKEKQRTIQAKKEVEQRRAGGYSRKYASKAKNLADDMVRNTARDLLYYAVTQDAMLIFENLSRGFGRQGKRTFMAERQYTRMEDWLTAKLAYEGLPSKTYLSKTLAQYTSKTCSNCGFTITSADYDRVLEKLKKTATGWMTTINGKELKVEGQITYYNRYKRQNVVKDLSVELDRLSEESVNNDISSWTKGRSGEALSLLKKRFSHRPVQEKFVCLNCGFETHADEQAALNIARSWLFLRSQEYKKYQTNKTTGNTDKRAFVETWQSFYRKKLKEVWKPAV

SEQ ID NO: 40472 - protein, 979 aa, synthetic construct
  REGION 1..979: note = engineered CasX variant
QEIKRINKIRRRLVKDSNTKKAGKTRGPMKTLLVRVMTPDLRERLENLRKKPENIPQPISNTSRANLNKLLTDYTEMKKAILHVYWEEFQKDPVGLMSRVAQPASKKIDQNKLKPEMDEKGNLTTAGFACSQCGQPLFVYKLEQVSEKGKAYTNYFGRCNVAEHEKLILLAQLKPEKDSDEAVTYSLGKFGQRALDFYSIHVTKESTHPVKPLAQIAGNRYASHPVGKALSGACMGTIASFLSKYQDIIIEHQKVVKGNQKRLESLRELAGKENLEYPSVTLPPQPHTKEGVDAYNEVIARVRMWVNLNLWQKLKLSRDDAKPLLRLKGFPSFPLVERQANEVDWWDMVCNVKKLINEKKEDGKVFWQNLAGYKRQEALRPYLSSEEDRKKGKKFARYQLGDLLLHLEKKHGEDWGKVYDEAWERIDKKVEGLSKHIKLEEERRSEDAQSKAALTDWLRAKASFVIEGLKEADKDEFCRCELKLQKWYGDLRGKPFAIEAENSILDISGFSKQYNCAFIWQKDGVKKLNLYLIINYFKGGKLRFKKIKPEAFEANRFYTVINKKSGEIVPMEVNFNFDDPNLIILPLAFGKRQGREFIWNDLLSLETGSLKLANGRVIEKTLYNRRTRQDEPALFVALTFERREVLDSSNIKPMNLIGVDRGENIPAVIALTDPEGCPLSRFKDSLGNPTHILRIGESYKEKQRTIQAKKEVEQRRAGGYSRKYASKAKNLADDMVRNTARDLLYYAVTQDAMLIFENLSRGFGRQGKRTFMAERQYTRMEDWLTAKLAYEGLPSKTYLSKTLAQYTSKTCSNCGFTITSADYDRVLEKLKKTATGWMTTINGKELKVEGQITYYNRYKRQNVVKDLSVELDRLSEESVNNDISSWTKGRSGEALSLLKKRFSHRPVQEKFVCLNCGFETHADEQAALNIARSWLFLRSQEYKKYQTNKTTGNTDKRAFVETWQSFYRKKLKEVWKPAV

SEQ ID NO: 40473 - protein, 979 aa, synthetic construct
  REGION 1..979: note = engineered CasX variant
QEIKRINKIRRRLVKDSNTKKAGKTRGPMKTLLVRVMTPDLRERLENLRKKPENIPQPISNTSRANLNKLLTDYTEMKKAILHVYWEEFQKDPVGLMSRVAQPASKKIDQNKLKPEMDEKGNLTTAGFACSQCGQPLFVYKLEQVSEKGKAYTNYFGRCNVAEHEKLILLAQLKPEKDSDEAVTYSLGKFGQRALDFYSIHVTKESTHPVKPLAQIAGNRYASSPVGKALSGACMGTIASFLSKYQDIIIEHQKVVKGNQKRLESLRELAGKENLEYPSVTLPPQPHTKEGVDAYNEVIARVRMWVNLNLWQKLKLSRDDAKPLLRLKGFPSFPLVERQANEVDWWDMVCNVKKLINEKKEDGKVFWQNLAGYKRQEALRPYLSSEEDRKKGKKFARYQLGDLLLHLEKKHGEDWGKVYDEAWERIDKKVEGLSKHIKLEEERRSEDAQSKAALTDWLRAKASFVIEGLKEADKDEFCRCELKLQKWYGDLRGKPFAIEAENSILDISGFSKQYNCAFIWQKDGVKKLNLYLIINYFKGGKLRFKKIKPEAFEANRFYTVINKKSGEIVPMEVNFNFDDPNLIILPLAFGKRQGREFIWNDLLSLETGSLKLANGRVIEKTLYNRRTRQDEPALFVALTFERREVLDSSNIKPMNLIGVDRGENIPAVIALTDPEGCPLSRFKDSLGNPTHILRIGESYKEKQRTIQAKKEVEQRRAGGYSRKYASKAKNLADDMVRNTARDLLYYAVTQDAMLIFENLSRGFGRQGKRTFMAERQYTRMEDWLTAKLAYEGLPSKTYLSKTLAQYTSKTCSNCGFTITSADYDRVLEKLKKTATGWMTTINGKELKVEGQITYYNRYKRQNVVKDLSVELDRLSEESVNNDISSWTKGRSGEALSLLKKRFSHRPVQEKFVCLNCGFETHADEQAALNIARSWLFLRSQEYKKYQTNKTTGNTDKRAFVETWQSFYRKKLKEVWKPAV

SEQ ID NO: 40474 - protein, 979 aa, synthetic construct
  REGION 1..979: note = engineered CasX variant
QEIKRINKIRRRLVKDSNTKKAGKTRGPMKTLLVRVMTPDLRERLENLRKKPENIPQPISNTSRANLNKLLTDYTEMKKAILHVYWEEFQKDPVGLMSRVAQPASKKIDQNKLKPEMDEKGNLTTAGFACSQCGQPLFVYKLEQVSEKGKAYTNYFGRCNVAEHEKLILLAQLKPEKDSDEAVTYSLGKFGQRALDFYSIHVTKESTHPVKPLAQIAGNRYASTPVGKALSGACMGTIASFLSKYQDIIIEHQKVVKGNQKRLESLRELAGKENLEYPSVTLPPQPHTKEGVDAYNEVIARVRMWVNLNLWQKLKLSRDDAKPLLRLKGFPSFPLVERQANEVDWWDMVCNVKKLINEKKEDGKVFWQNLAGYKRQEALRPYLSSEEDRKKGKKFARYQLGDLLLHLEKKHGEDWGKVYDEAWERIDKKVEGLSKHIKLEEERRSEDAQSKAALTDWLRAKASFVIEGLKEADKDEFCRCELKLQKWYGDLRGKPFAIEAENSILDISGFSKQYNCAFIWQKDGVKKLNLYLIINYFKGGKLRFKKIKPEAFEANRFYTVINKKSGEIVPMEVNFNFDDPNLIILPLAFGKRQGREFIWNDLLSLETGSLKLANGRVIEKTLYNRRTRQDEPALFVALTFERREVLDSSNIKPMNLIGVDRGENIPAVIALTDPEGCPLSRFKDSLGNPTHILRIGESYKEKQRTIQAKKEVEQRRAGGYSRKYASKAKNLADDMVRNTARDLLYYAVTQDAMLIFENLSRGFGRQGKRTFMAERQYTRMEDWLTAKLAYEGLPSKTYLSKTLAQYTSKTCSNCGFTITSADYDRVLEKLKKTATGWMTTINGKELKVEGQITYYNRYKRQNVVKDLSVELDRLSEESVNNDISSWTKGRSGEALSLLKKRFSHRPVQEKFVCLNCGFETHADEQAALNIARSWLFLRSQEYKKYQTNKTTGNTDKRAFVETWQSFYRKKLKEVWKPAV

SEQ ID NO: 40475 - protein, 979 aa, synthetic construct
  REGION 1..979: note = engineered CasX variant
QEIKRINKIRRRLVKDSNTKKAGKTRGPMKTLLVRVMTPDLRERLENLRKKPENIPQPISNTSRANLNKLLTDYTEMKKAILHVYWEEFQKDPVGLMSRVAQPASKKIDQNKLKPEMDEKGNLTTAGFACSQCGQPLFVYKLEQVSEKGKAYTNYFGRCNVAEHEKLILLAQLKPEKDSDEAVTYSLGKFGQRALDFYSIHVTKESTHPVKPLAQIAGNRYASAPVGKALSGACMGTIASFLSKYQDIIIEHQKVVKGNQKRLESLRELAGKENLEYPSVTLPPQPHTKEGVDAYNEVIARVRMWVNLNLWQKLKLSRDDAKPLLRLKGFPSFPLVERQANEVDWWDMVCNVKKLINEKKEDGKVFWQNLAGYKRQEALRPYLSSEEDRKKGKKFARYQLGDLLLHLEKKHGEDWGKVYDEAWERIDKKVEGLSKHIKLEEERRSEDAQSKAALTDWLRAKASFVIEGLKEADKDEFCRCELKLQKWYGDLRGKPFAIEAENSILDISGFSKQYNCAFIWQKDGVKKLNLYLIINYFKGGKLRFKKIKPEAFEANRFYTVINKKSGEIVPMEVNFNFDDPNLIILPLAFGKRQGREFIWNDLLSLETGSLKLANGRVIEKTLYNRRTRQDEPALFVALTFERREVLDSSNIKPMNLIGVDRGENIPAVIALTDPEGCPLSRFKDSLGNPTHILRIGESYKEKQRTIQAKKEVEQRRAGGYSRKYASKAKNLADDMVRNTARDLLYYAVTQDAMLIFENLSRGFGRQGKRTFMAERQYTRMEDWLTAKLAYEGLPSKTYLSKTLAQYTSKTCSNCGFTITSADYDRVLEKLKKTATGWMTTINGKELKVEGQITYYNRYKRQNVVKDLSVELDRLSEESVNNDISSWTKGRSGEALSLLKKRFSHRPVQEKFVCLNCGFETHADEQAALNIARSWLFLRSQEYKKYQTNKTTGNTDKRAFVETWQSFYRKKLKEVWKPAV

SEQ ID NO: 40476 - protein, 979 aa, synthetic construct
  REGION 1..979: note = engineered CasX variant
QEIKRINKIRRRLVKDSNTKKAGKTRGPMKTLLVRVMTPDLRERLENLRKKPENIPQPISNTSRANLNKLLTDYTEMKKAILHVYWEEFQKDPVGLMSRVAQPASKKIDQNKLKPEMDEKGNLTTAGFACSQCGQPLFVYKLEQVSEKGKAYTNYFGRCNVAEHEKLILLAQLKPEKDSDEAVTYSLGKFGQRALDFYSIHVTKESTHPVKPLAQIAGNRYASVPVGKALSGACMGTIASFLSKYQDIIIEHQKVVKGNQKRLESLRELAGKENLEYPSVTLPPQPHTKEGVDAYNEVIARVRMWVNLNLWQKLKLSRDDAKPLLRLKGFPSFPLVERQANEVDWWDMVCNVKKLINEKKEDGKVFWQNLAGYKRQEALRPYLSSEEDRKKGKKFARYQLGDLLLHLEKKHGEDWGKVYDEAWERIDKKVEGLSKHIKLEEERRSEDAQSKAALTDWLRAKASFVIEGLKEADKDEFCRCELKLQKWYGDLRGKPFAIEAENSILDISGFSKQYNCAFIWQKDGVKKLNLYLIINYFKGGKLRFKKIKPEAFEANRFYTVINKKSGEIVPMEVNFNFDDPNLIILPLAFGKRQGREFIWNDLLSLETGSLKLANGRVIEKTLYNRRTRQDEPALFVALTFERREVLDSSNIKPMNLIGVDRGENIPAVIALTDPEGCPLSRFKDSLGNPTHILRIGESYKEKQRTIQAKKEVEQRRAGGYSRKYASKAKNLADDMVRNTARDLLYYAVTQDAMLIFENLSRGFGRQGKRTFMAERQYTRMEDWLTAKLAYEGLPSKTYLSKTLAQYTSKTCSNCGFTITSADYDRVLEKLKKTATGWMTTINGKELKVEGQITYYNRYKRQNVVKDLSVELDRLSEESVNNDISSWTKGRSGEALSLLKKRFSHRPVQEKFVCLNCGFETHADEQAALNIARSWLFLRSQEYKKYQTNKTTGNTDKRAFVETWQSFYRKKLKEVWKPAV

SEQ ID NO: 40477 - protein, 979 aa, synthetic construct
  REGION 1..979: note = engineered CasX variant
QEIKRINKIRRRLVKDSNTKKAGKTRGPMKTLLVRVMTPDLRERLENLRKKPENIPQPISNTSRANLNKLLTDYTEMKKAILHVYWEEFQKDPVGLMSRVAQPASKKIDQNKLKPEMDEKGNLTTAGFACSQCGQPLFVYKLEQVSEKGKAYTNYFGRCNVAEHEKLIKLAQLKPEKDSDEAVTYSLGKFGQRALDFYSIHVTKESTHPVKPLAQIAGNRYASGPVGKALSGACMGTIASFLSKYQDIIIEHQKVVKGNQKRLESLRELAGKENLEYPSVTLPPQPHTKEGVDAYNEVIARVRMWVNLNLWQKLKLSRDDAKPLLRLKGFPSFPLVERQANEVDWWDMVCNVKKLINEKKEDGKVFWQNLAGYKRQEALRPYLSSEEDRKKGKKFARYQLGDLLLHLEKKHGEDWGKVYDEAWERIDKKVEGLSKHIKLEEERRSEDAQSKAALTDWLRAKASFVIEGLKEADKDEFCRCELKLQKWYGDLRGKPFAIEAENSILDISGFSKQYNCAFIWQKDGVKKLNLYLIINYFKGGKLRFKKIKPEAFEANRFYTVINKKSGEIVPMEVNFNFDDPNLIILPLAFGKRQGREFIWNDLLSLETGSLKLANGRVIEKTLYNRRTRQDEPALFVALTFERREVLDSSNIKPMNLIGVDRGENIPAVIALTDPEGCPLSRFKDSLGNPTHILRIGESYKEKQRTIQAKKEVEQRRAGGYSRKYASKAKNLADDMVRNTARDLLYYAVTQDAMLIFENLSRGFGRQGKRTFMAERQYTRMEDWLTAKLAYEGLPSKTYLSKTLAQYTSKTCSNCGFTITSADYDRVLEKLKKTATGWMTTINGKELKVEGQITYYNRYKRQNVVKDLSVELDRLSEESVNNDISSWTKGRSGEALSLLKKRFSHRPVQEKFVCLNCGFETHADEQAALNIARSWLFLRSQEYKKYQTNKTTGNTDKRAFVETWQSFYRKKLKEVWKPAV

SEQ ID NO: 40478 - protein, 978 aa, synthetic construct
  REGION 1..978: note = engineered CasX variant
QEIKRINKIRRRLVKDSNTKKAGKTRGPMKTLLVRVMTPDLRERLENLRKKPENIPQPISNTSRANLNKLLTDYTEMKKAILHVYWEEFQKDPVGLMSRVAQPASKKIDQNKLKPEMDEKGNLTTAGFACSQCGQPLFVYKLEQVSEKGKAYTNYFGRCNVAEHEKLILLAQLKPEKDSDEAVTYSLGKFGQRALDFYSIHVTKESTHPVKPLAQIAGNRYASPVGKALSGACMGTIASFLSKYQDIIIEHQKVVKGNQKRLESLRELAGKENLEYPSVTLPPQPHTKEGVDAYNEVIARVRMWVNLNLWQKLKLSRDDAKPLLRLKGFPSFPLVERQANEVDWWDMVCNVKKLINEKKEDGKVFWQNLAGYKRQEALRPYLSSEEDRKKGKKFARYQLGDLLLHLEKKHGEDWGKVYDEAWERIDKKVEGLSKHIKLEEERRSEDAQSKAALTDWLRAKASFVIEGLKEADKDEFCRCELKLQKWYGDLRGKPFAIEAENSILDISGFSKQYNCAFIWQKDGVKKLNLYLIINYFKGGKLRFKKIKPEAFEANRFYTVINKKSGEIVPMEVNFNFDDPNLIILPLAFGKRQGREFIWNDLLSLETGSLKLANGRVIEKTLYNRRTRQDEPALFVALTFERREVLDSSNIKPMNLIGVDRGENIPAVIALTDPEGCPLSRFKDSLGNPTHILRIGESYKEKQRTIQAKKEVEQRRAGGYSRKYASKAKNLADDMVRNTARDLLYYAVTQDAMLIFENLSRGFGRQGKRTFMAERQYTRMEDWLTAKLAYEGLPSKTYLSKTLAQYTSKTCSNCGFTITSADYDRVLEKLKKTATGWMTTINGKELKVEGQITYYNRYKRQNVVKDLSVELDRLSEESVNNDISSWTKGRSGEALSLLKKRFSHRPVQEKFVCLNCGFETHADEQAALNIARSWLFLRSQEYKKYQTNKTTGNTDKRAFVETWQSFYRKKLKEVWKPAV

SEQ ID NO: 40479 - protein, 979 aa, synthetic construct
  REGION 1..979: note = engineered CasX variant
QEIKRINKIRRRLVKDSNTKKAGKTRGPMKTLLVRVMTPDLRERLENLRKKPENIPQPISNTSRANLNKLLTDYTEMKKAILHVYWEEFQKDPVGLMSRVAQPASKKIDQNKLKPEMDEKGNLTTAGFACSQCGQPLFVYKLEQVSEKGKAYTNYFGRCNVAEHEKLILLAQLKPEKDSDEAVTYSLGKFGQRALDFYSIHVTKESTHPVKPLAQIAGNRYASYPVGKALSDACMGTIASFLSKYQDIIIEHQKVVKGNQKRLESLRELAGKENLEYPSVTLPPQPHTKEGVDAYNEVIARVRMWVNLNLWQKLKLSRDDAKPLLRLKNFPSFPLVERQANEVDWWDMVCNVKKLINEKKEDGKVFWQNLAGYKRQEALRPYLSSEEDRKKGKKFARYQLGDLLLHLEKKHGEDWGKVYDEAWERIDKKVEGLSKHIKLEEERRSEDAQSKAALTDWLRAKASFVIEGLKEADKDEFCRCELKLQKWYGDLRGKPFAIEAENSILDISGFSKQYNCAFIWQKDGVKKLNLYLIINYFKGGKLRFKKIKPEAFEANRFYTVINKKSGEIVPMEVNFNFDDPNLIILPLAFGKRQGREFIWNDLLSLETGSLKLANGRVIEKTLYNRRTRQDEPALFVALTFERREVLDSSNIKPMNLIGVDRGENIPAVIALTDPEGCPLSRFKDSLGNPTHILRIGESYKEKQRTIQAKKEVEQRRAGGYSRKYASKAKNLADDMVRNTARDLLYYAVTQDAMLIFENLSRGFGRQGKRTFMAERQYTRMEDWLTAKLAYEGLPSKTYLSKTLAQYTSKTCSNCGFTITSADYDRVLEKLKKTATGWMTTINGKELKVEGQITYYNRYKRQNVVKDLSVELDRLSEESVNNDISSWTKGRSGEALSLLKKRFSHRPVQEKFVCLNCGFETHADEQAALNIARSWLFLRSQEYKKYQTNKTTGNTDKRAFVETWQSFYRKKLKEVWKPAV

SEQ ID NO: 40480 - protein, 979 aa, synthetic construct
  REGION 1..979: note = engineered CasX variant
QEIKRINKIRRRLVKDSNTKKAGKTRGPMKTLLVRVMTPDLRERLENLRKKPENIPQPISNTSRANLNKLLTDYTEMKKAILHVYWEEFQKDPVGLMSRVAQPASKKIDQNKLKPEMDEKGNLTTAGFACSQCGQPLFVYKLEQVSEKGKAYTNYFGRCNVAEHEKLILLAQLKPEKDSDEAVTYSLGKFGQRALDFYSIHVTKESTHPVKPLAQIAGNRYASHPVGKALSDACMGTIASFLSKYQDIIIEHQKVVKGNQKRLESLRELAGKENLEYPSVTLPPQPHTKEGVDAYNEVIARVRMWVNLNLWQKLKLSRDDAKPLLRLKNFPSFPLVERQANEVDWWDMVCNVKKLINEKKEDGKVFWQNLAGYKRQEALRPYLSSEEDRKKGKKFARYQLGDLLLHLEKKHGEDWGKVYDEAWERIDKKVEGLSKHIKLEEERRSEDAQSKAALTDWLRAKASFVIEGLKEADKDEFCRCELKLQKWYGDLRGKPFAIEAENSILDISGFSKQYNCAFIWQKDGVKKLNLYLIINYFKGGKLRFKKIKPEAFEANRFYTVINKKSGEIVPMEVNFNFDDPNLIILPLAFGKRQGREFIWNDLLSLETGSLKLANGRVIEKTLYNRRTRQDEPALFVALTFERREVLDSSNIKPMNLIGVDRGENIPAVIALTDPEGCPLSRFKDSLGNPTHILRIGESYKEKQRTIQAKKEVEQRRAGGYSRKYASKAKNLADDMVRNTARDLLYYAVTQDAMLIFENLSRGFGRQGKRTFMAERQYTRMEDWLTAKLAYEGLPSKTYLSKTLAQYTSKTCSNCGFTITSADYDRVLEKLKKTATGWMTTINGKELKVEGQITYYNRYKRQNVVKDLSVELDRLSEESVNNDISSWTKGRSGEALSLLKKRFSHRPVQEKFVCLNCGFETHADEQAALNIARSWLFLRSQEYKKYQTNKTTGNTDKRAFVETWQSFYRKKLKEVWKPAV

SEQ ID NO: 40481 - protein, 979 aa, synthetic construct
  REGION 1..979: note = engineered CasX variant
QEIKRINKIRRRLVKDSNTKKAGKTRGPMKTLLVRVMTPDLRERLENLRKKPENIPQPISNTSRANLNKLLTDYTEMKKAILHVYWEEFQKDPVGLMSRVAQPASKKIDQNKLKPEMDEKGNLTTAGFACSQCGQPLFVYKLEQVSEKGKAYTNYFGRCNVAEHEKLILLAQLKPEKDSDEAVTYSLGKFGQRALDFYSIHVTKESTHPVKPLAQIAGNRYASSPVGKALSDACMGTIASFLSKYQDIIIEHQKVVKGNQKRLESLRELAGKENLEYPSVTLPPQPHTKEGVDAYNEVIARVRMWVNLNLWQKLKLSRDDAKPLLRLKNFPSFPLVERQANEVDWWDMVCNVKKLINEKKEDGKVFWQNLAGYKRQEALRPYLSSEEDRKKGKKFARYQLGDLLLHLEKKHGEDWGKVYDEAWERIDKKVEGLSKHIKLEEERRSEDAQSKAALTDWLRAKASFVIEGLKEADKDEFCRCELKLQKWYGDLRGKPFAIEAENSILDISGFSKQYNCAFIWQKDGVKKLNLYLIINYFKGGKLRFKKIKPEAFEANRFYTVINKKSGEIVPMEVNFNFDDPNLIILPLAFGKRQGREFIWNDLLSLETGSLKLANGRVIEKTLYNRRTRQDEPALFVALTFERREVLDSSNIKPMNLIGVDRGENIPAVIALTDPEGCPLSRFKDSLGNPTHILRIGESYKEKQRTIQAKKEVEQRRAGGYSRKYASKAKNLADDMVRNTARDLLYYAVTQDAMLIFENLSRGFGRQGKRTFMAERQYTRMEDWLTAKLAYEGLPSKTYLSKTLAQYTSKTCSNCGFTITSADYDRVLEKLKKTATGWMTTINGKELKVEGQITYYNRYKRQNVVKDLSVELDRLSEESVNNDISSWTKGRSGEALSLLKKRFSHRPVQEKFVCLNCGFETHADEQAALNIARSWLFLRSQEYKKYQTNKTTGNTDKRAFVETWQSFYRKKLKEVWKPAV

SEQ ID NO: 40482 - protein, 979 aa, synthetic construct
  REGION 1..979: note = engineered CasX variant
QEIKRINKIRRRLVKDSNTKKAGKTRGPMKTLLVRVMTPDLRERLENLRKKPENIPQPISNTSRANLNKLLTDYTEMKKAILHVYWEEFQKDPVGLMSRVAQPASKKIDQNKLKPEMDEKGNLTTAGFACSQCGQPLFVYKLEQVSEKGKAYTNYFGRCNVAEHEKLILLAQLKPEKDSDEAVTYSLGKFGQRALDFYSIHVTKESTHPVKPLAQIAGNRYASTPVGKALSDACMGTIASFLSKYQDIIIEHQKVVKGNQKRLESLRELAGKENLEYPSVTLPPQPHTKEGVDAYNEVIARVRMWVNLNLWQKLKLSRDDAKPLLRLKNFPSFPLVERQANEVDWWDMVCNVKKLINEKKEDGKVFWQNLAGYKRQEALRPYLSSEEDRKKGKKFARYQLGDLLLHLEKKHGEDWGKVYDEAWERIDKKVEGLSKHIKLEEERRSEDAQSKAALTDWLRAKASFVIEGLKEADKDEFCRCELKLQKWYGDLRGKPFAIEAENSILDISGFSKQYNCAFIWQKDGVKKLNLYLIINYFKGGKLRFKKIKPEAFEANRFYTVINKKSGEIVPMEVNFNFDDPNLIILPLAFGKRQGREFIWNDLLSLETGSLKLANGRVIEKTLYNRRTRQDEPALFVALTFERREVLDSSNIKPMNLIGVDRGENIPAVIALTDPEGCPLSRFKDSLGNPTHILRIGESYKEKQRTIQAKKEVEQRRAGGYSRKYASKAKNLADDMVRNTARDLLYYAVTQDAMLIFENLSRGFGRQGKRTFMAERQYTRMEDWLTAKLAYEGLPSKTYLSKTLAQYTSKTCSNCGFTITSADYDRVLEKLKKTATGWMTTINGKELKVEGQITYYNRYKRQNVVKDLSVELDRLSEESVNNDISSWTKGRSGEALSLLKKRFSHRPVQEKFVCLNCGFETHADEQAALNIARSWLFLRSQEYKKYQTNKTTGNTDKRAFVETWQSFYRKKLKEVWKPAV

SEQ ID NO: 40483 - protein, 979 aa, synthetic construct
  REGION 1..979: note = engineered CasX variant
QEIKRINKIRRRLVKDSNTKKAGKTRGPMKTLLVRVMTPDLRERLENLRKKPENIPQPISNTSRANLNKLLTDYTEMKKAILHVYWEEFQKDPVGLMSRVAQPASKKIDQNKLKPEMDEKGNLTTAGFACSQCGQPLFVYKLEQVSEKGKAYTNYFGRCNVAEHEKLILLAQLKPEKDSDEAVTYSLGKFGQRALDFYSIHVTKESTHPVKPLAQIAGNRYASAPVGKALSDACMGTIASFLSKYQDIIIEHQKVVKGNQKRLESLRELAGKENLEYPSVTLPPQPHTKEGVDAYNEVIARVRMWVNLNLWQKLKLSRDDAKPLLRLKNFPSFPLVERQANEVDWWDMVCNVKKLINEKKEDGKVFWQNLAGYKRQEALRPYLSSEEDRKKGKKFARYQLGDLLLHLEKKHGEDWGKVYDEAWERIDKKVEGLSKHIKLEEERRSEDAQSKAALTDWLRAKASFVIEGLKEADKDEFCRCELKLQKWYGDLRGKPFAIEAENSILDISGFSKQYNCAFIWQKDGVKKLNLYLIINYFKGGKLRFKKIKPEAFEANRFYTVINKKSGEIVPMEVNFNFDDPNLIILPLAFGKRQGREFIWNDLLSLETGSLKLANGRVIEKTLYNRRTRQDEPALFVALTFERREVLDSSNIKPMNLIGVDRGENIPAVIALTDPEGCPLSRFKDSLGNPTHILRIGESYKEKQRTIQAKKEVEQRRAGGYSRKYASKAKNLADDMVRNTARDLLYYAVTQDAMLIFENLSRGFGRQGKRTFMAERQYTRMEDWLTAKLAYEGLPSKTYLSKTLAQYTSKTCSNCGFTITSADYDRVLEKLKKTATGWMTTINGKELKVEGQITYYNRYKRQNVVKDLSVELDRLSEESVNNDISSWTKGRSGEALSLLKKRFSHRPVQEKFVCLNCGFETHADEQAALNIARSWLFLRSQEYKKYQTNKTTGNTDKRAFVETWQSFYRKKLKEVWKPAV

SEQ ID NO: 40484 - protein, 979 aa, synthetic construct
  REGION 1..979: note = engineered CasX variant
QEIKRINKIRRRLVKDSNTKKAGKTRGPMKTLLVRVMTPDLRERLENLRKKPENIPQPISNTSRANLNKLLTDYTEMKKAILHVYWEEFQKDPVGLMSRVAQPASKKIDQNKLKPEMDEKGNLTTAGFACSQCGQPLFVYKLEQVSEKGKAYTNYFGRCNVAEHEKLILLAQLKPEKDSDEAVTYSLGKFGQRALDFYSIHVTKESTHPVKPLAQIAGNRYASVPVGKALSDACMGTIASFLSKYQDIIIEHQKVVKGNQKRLESLRELAGKENLEYPSVTLPPQPHTKEGVDAYNEVIARVRMWVNLNLWQKLKLSRDDAKPLLRLKNFPSFPLVERQANEVDWWDMVCNVKKLINEKKEDGKVFWQNLAGYKRQEALRPYLSSEEDRKKGKKFARYQLGDLLLHLEKKHGEDWGKVYDEAWERIDKKVEGLSKHIKLEEERRSEDAQSKAALTDWLRAKASFVIEGLKEADKDEFCRCELKLQKWYGDLRGKPFAIEAENSILDISGFSKQYNCAFIWQKDGVKKLNLYLIINYFKGGKLRFKKIKPEAFEANRFYTVINKKSGEIVPMEVNFNFDDPNLIILPLAFGKRQGREFIWNDLLSLETGSLKLANGRVIEKTLYNRRTRQDEPALFVALTFERREVLDSSNIKPMNLIGVDRGENIPAVIALTDPEGCPLSRFKDSLGNPTHILRIGESYKEKQRTIQAKKEVEQRRAGGYSRKYASKAKNLADDMVRNTARDLLYYAVTQDAMLIFENLSRGFGRQGKRTFMAERQYTRMEDWLTAKLAYEGLPSKTYLSKTLAQYTSKTCSNCGFTITSADYDRVLEKLKKTATGWMTTINGKELKVEGQITYYNRYKRQNVVKDLSVELDRLSEESVNNDISSWTKGRSGEALSLLKKRFSHRPVQEKFVCLNCGFETHADEQAALNIARSWLFLRSQEYKKYQTNKTTGNTDKRAFVETWQSFYRKKLKEVWKPAV

SEQ ID NO: 40485 - protein, 979 aa, synthetic construct
  REGION 1..979: note = engineered CasX variant
QEIKRINKIRRRLVKDSNTKKAGKTRGPMKTLLVRVMTPDLRERLENLRKKPENIPQPISNTSRANLNKLLTDYTEMKKAILHVYWEEFQKDPVGLMSRVAQPASKKIDQNKLKPEMDEKGNLTTAGFACSQCGQPLFVYKLEQVSEKGKAYTNYFGRCNVAEHEKLIKLAQLKPEKDSDEAVTYSLGKFGQRALDFYSIHVTKESTHPVKPLAQIAGNRYASGPVGKALSDACMGTIASFLSKYQDIIIEHQKVVKGNQKRLESLRELAGKENLEYPSVTLPPQPHTKEGVDAYNEVIARVRMWVNLNLWQKLKLSRDDAKPLLRLKNFPSFPLVERQANEVDWWDMVCNVKKLINEKKEDGKVFWQNLAGYKRQEALRPYLSSEEDRKKGKKFARYQLGDLLLHLEKKHGEDWGKVYDEAWERIDKKVEGLSKHIKLEEERRSEDAQSKAALTDWLRAKASFVIEGLKEADKDEFCRCELKLQKWYGDLRGKPFAIEAENSILDISGFSKQYNCAFIWQKDGVKKLNLYLIINYFKGGKLRFKKIKPEAFEANRFYTVINKKSGEIVPMEVNFNFDDPNLIILPLAFGKRQGREFIWNDLLSLETGSLKLANGRVIEKTLYNRRTRQDEPALFVALTFERREVLDSSNIKPMNLIGVDRGENIPAVIALTDPEGCPLSRFKDSLGNPTHILRIGESYKEKQRTIQAKKEVEQRRAGGYSRKYASKAKNLADDMVRNTARDLLYYAVTQDAMLIFENLSRGFGRQGKRTFMAERQYTRMEDWLTAKLAYEGLPSKTYLSKTLAQYTSKTCSNCGFTITSADYDRVLEKLKKTATGWMTTINGKELKVEGQITYYNRYKRQNVVKDLSVELDRLSEESVNNDISSWTKGRSGEALSLLKKRFSHRPVQEKFVCLNCGFETHADEQAALNIARSWLFLRSQEYKKYQTNKTTGNTDKRAFVETWQSFYRKKLKEVWKPAV

SEQ ID NO: 40486 - protein, 978 aa, synthetic construct
  REGION 1..978: note = engineered CasX variant
QEIKRINKIRRRLVKDSNTKKAGKTRGPMKTLLVRVMTPDLRERLENLRKKPENIPQPISNTSRANLNKLLTDYTEMKKAILHVYWEEFQKDPVGLMSRVAQPASKKIDQNKLKPEMDEKGNLTTAGFACSQCGQPLFVYKLEQVSEKGKAYTNYFGRCNVAEHEKLILLAQLKPEKDSDEAVTYSLGKFGQRALDFYSIHVTKESTHPVKPLAQIAGNRYASPVGKALSDACMGTIASFLSKYQDIIIEHQKVVKGNQKRLESLRELAGKENLEYPSVTLPPQPHTKEGVDAYNEVIARVRMWVNLNLWQKLKLSRDDAKPLLRLKNFPSFPLVERQANEVDWWDMVCNVKKLINEKKEDGKVFWQNLAGYKRQEALRPYLSSEEDRKKGKKFARYQLGDLLLHLEKKHGEDWGKVYDEAWERIDKKVEGLSKHIKLEEERRSEDAQSKAALTDWLRAKASFVIEGLKEADKDEFCRCELKLQKWYGDLRGKPFAIEAENSILDISGFSKQYNCAFIWQKDGVKKLNLYLIINYFKGGKLRFKKIKPEAFEANRFYTVINKKSGEIVPMEVNFNFDDPNLIILPLAFGKRQGREFIWNDLLSLETGSLKLANGRVIEKTLYNRRTRQDEPALFVALTFERREVLDSSNIKPMNLIGVDRGENIPAVIALTDPEGCPLSRFKDSLGNPTHILRIGESYKEKQRTIQAKKEVEQRRAGGYSRKYASKAKNLADDMVRNTARDLLYYAVTQDAMLIFENLSRGFGRQGKRTFMAERQYTRMEDWLTAKLAYEGLPSKTYLSKTLAQYTSKTCSNCGFTITSADYDRVLEKLKKTATGWMTTINGKELKVEGQITYYNRYKRQNVVKDLSVELDRLSEESVNNDISSWTKGRSGEALSLLKKRFSHRPVQEKFVCLNCGFETHADEQAALNIARSWLFLRSQEYKKYQTNKTTGNTDKRAFVETWQSFYRKKLKEVWKPAV

SEQ ID NO: 40487 - protein, 979 aa, synthetic construct
  REGION 1..979: note = engineered CasX variant
QEIKRINKIRRRLVKDSNTKKAGKTRGPMKTLLVRVMTPDLRERLENLRKKPENIPQPISNTSRANLNKLLTDYTEMKKAILHVYWEEFQKDPVGLMSRVAQPASKKIDQNKLKPEMDEKGNLTTAGFACSQCGQPLFVYKLEQVSEKGKAYTNYFGRCNVAEHEKLILLAQLKPEKDSDEAVTYSLGKFGQRALDFYSIHVTKESTHPVKPLAQIAGNRYASYPVGKALSDACMGTIASFLSKYQDIIIEHQKVVKGNQKRLESLRELAGKENLEYPSVTLPPQPHTKEGVDAYNEVIARVRMWVNLNLWQKLKLSRDDAKPLLRLKGFPSFPLVERQANEVDWWDMVCNVKKLINEKKEDGKVFWQNLAGYKRQEALRPYLSSEEDRKKGKKFARYQLGDLLNHLEKKHGEDWGKVYDEAWERIDKKVEGLSKHIKLEEERRSEDAQSKAALTDWLRAKASFVIEGLKEADKDEFCRCELKLQKWYGDLRGKPFAIEAENSILDISGFSKQYNCAFIWQKDGVKKLNLYLIINYFKGGKLRFKKIKPEAFEANRFYTVINKKSGEIVPMEVNFNFDDPNLIILPLAFGKRQGREFIWNDLLSLETGSLKLANGRVIEKTLYNRRTRQDEPALFVALTFERREVLDSSNIKPMNLIGVDRGENIPAVIALTDPEGCPLSRFKDSLGNPTHILRIGESYKEKQRTIQAKKEVEQRRAGGYSRKYASKAKNLADDMVRNTARDLLYYAVTQDAMLIFENLSRGFGRQGKRTFMAERQYTRMEDWLTAKLAYEGLPSKTYLSKTLAQYTSKTCSNCGFTITSADYDRVLEKLKKTATGWMTTINGKELKVEGQITYYNRYKRQNVVKDLSVELDRLSEESVNNDISSWTKGRSGEALSLLKKRFSHRPVQEKFVCLNCGFETHADEQAALNIARSWLFLRSQEYKKYQTNKTTGNTDKRAFVETWQSFYRKKLKEVWKPAV

SEQ ID NO: 40488 - protein, 979 aa, synthetic construct
  REGION 1..979: note = engineered CasX variant
QEIKRINKIRRRLVKDSNTKKAGKTRGPMKTLLVRVMTPDLRERLENLRKKPENIPQPISNTSRANLNKLLTDYTEMKKAILHVYWEEFQKDPVGLMSRVAQPASKKIDQNKLKPEMDEKGNLTTAGFACSQCGQPLFVYKLEQVSEKGKAYTNYFGRCNVAEHEKLILLAQLKPEKDSDEAVTYSLGKFGQRALDFYSIHVTKESTHPVKPLAQIAGNRYASHPVGKALSDACMGTIASFLSKYQDIIIEHQKVVKGNQKRLESLRELAGKENLEYPSVTLPPQPHTKEGVDAYNEVIARVRMWVNLNLWQKLKLSRDDAKPLLRLKGFPSFPLVERQANEVDWWDMVCNVKKLINEKKEDGKVFWQNLAGYKRQEALRPYLSSEEDRKKGKKFARYQLGDLLNHLEKKHGEDWGKVYDEAWERIDKKVEGLSKHIKLEEERRSEDAQSKAALTDWLRAKASFVIEGLKEADKDEFCRCELKLQKWYGDLRGKPFAIEAENSILDISGFSKQYNCAFIWQKDGVKKLNLYLIINYFKGGKLRFKKIKPEAFEANRFYTVINKKSGEIVPMEVNFNFDDPNLIILPLAFGKRQGREFIWNDLLSLETGSLKLANGRVIEKTLYNRRTRQDEPALFVALTFERREVLDSSNIKPMNLIGVDRGENIPAVIALTDPEGCPLSRFKDSLGNPTHILRIGESYKEKQRTIQAKKEVEQRRAGGYSRKYASKAKNLADDMVRNTARDLLYYAVTQDAMLIFENLSRGFGRQGKRTFMAERQYTRMEDWLTAKLAYEGLPSKTYLSKTLAQYTSKTCSNCGFTITSADYDRVLEKLKKTATGWMTTINGKELKVEGQITYYNRYKRQNVVKDLSVELDRLSEESVNNDISSWTKGRSGEALSLLKKRFSHRPVQEKFVCLNCGFETHADEQAALNIARSWLFLRSQEYKKYQTNKTTGNTDKRAFVETWQSFYRKKLKEVWKPAV

SEQ ID NO: 40489 - protein, 979 aa, synthetic construct
  REGION 1..979: note = engineered CasX variant
QEIKRINKIRRRLVKDSNTKKAGKTRGPMKTLLVRVMTPDLRERLENLRKKPENIPQPISNTSRANLNKLLTDYTEMKKAILHVYWEEFQKDPVGLMSRVAQPASKKIDQNKLKPEMDEKGNLTTAGFACSQCGQPLFVYKLEQVSEKGKAYTNYFGRCNVAEHEKLILLAQLKPEKDSDEAVTYSLGKFGQRALDFYSIHVTKESTHPVKPLAQIAGNRYASSPVGKALSDACMGTIASFLSKYQDIIIEHQKVVKGNQKRLESLRELAGKENLEYPSVTLPPQPHTKEGVDAYNEVIARVRMWVNLNLWQKLKLSRDDAKPLLRLKGFPSFPLVERQANEVDWWDMVCNVKKLINEKKEDGKVFWQNLAGYKRQEALRPYLSSEEDRKKGKKFARYQLGDLLNHLEKKHGEDWGKVYDEAWERIDKKVEGLSKHIKLEEERRSEDAQSKAALTDWLRAKASFVIEGLKEADKDEFCRCELKLQKWYGDLRGKPFAIEAENSILDISGFSKQYNCAFIWQKDGVKKLNLYLIINYFKGGKLRFKKIKPEAFEANRFYTVINKKSGEIVPMEVNFNFDDPNLIILPLAFGKRQGREFIWNDLLSLETGSLKLANGRVIEKTLYNRRTRQDEPALFVALTFERREVLDSSNIKPMNLIGVDRGENIPAVIALTDPEGCPLSRFKDSLGNPTHILRIGESYKEKQRTIQAKKEVEQRRAGGYSRKYASKAKNLADDMVRNTARDLLYYAVTQDAMLIFENLSRGFGRQGKRTFMAERQYTRMEDWLTAKLAYEGLPSKTYLSKTLAQYTSKTCSNCGFTITSADYDRVLEKLKKTATGWMTTINGKELKVEGQITYYNRYKRQNVVKDLSVELDRLSEESVNNDISSWTKGRSGEALSLLKKRFSHRPVQEKFVCLNCGFETHADEQAALNIARSWLFLRSQEYKKYQTNKTTGNTDKRAFVETWQSFYRKKLKEVWKPAV

SEQ ID NO: 40490 - protein, 979 aa, synthetic construct
  REGION 1..979: note = engineered CasX variant
QEIKRINKIRRRLVKDSNTKKAGKTRGPMKTLLVRVMTPDLRERLENLRKKPENIPQPISNTSRANLNKLLTDYTEMKKAILHVYWEEFQKDPVGLMSRVAQPASKKIDQNKLKPEMDEKGNLTTAGFACSQCGQPLFVYKLEQVSEKGKAYTNYFGRCNVAEHEKLILLAQLKPEKDSDEAVTYSLGKFGQRALDFYSIHVTKESTHPVKPLAQIAGNRYASTPVGKALSDACMGTIASFLSKYQDIIIEHQKVVKGNQKRLESLRELAGKENLEYPSVTLPPQPHTKEGVDAYNEVIARVRMWVNLNLWQKLKLSRDDAKPLLRLKGFPSFPLVERQANEVDWWDMVCNVKKLINEKKEDGKVFWQNLAGYKRQEALRPYLSSEEDRKKGKKFARYQLGDLLNHLEKKHGEDWGKVYDEAWERIDKKVEGLSKHIKLEEERRSEDAQSKAALTDWLRAKASFVIEGLKEADKDEFCRCELKLQKWYGDLRGKPFAIEAENSILDISGFSKQYNCAFIWQKDGVKKLNLYLIINYFKGGKLRFKKIKPEAFEANRFYTVINKKSGEIVPMEVNFNFDDPNLIILPLAFGKRQGREFIWNDLLSLETGSLKLANGRVIEKTLYNRRTRQDEPALFVALTFERREVLDSSNIKPMNLIGVDRGENIPAVIALTDPEGCPLSRFKDSLGNPTHILRIGESYKEKQRTIQAKKEVEQRRAGGYSRKYASKAKNLADDMVRNTARDLLYYAVTQDAMLIFENLSRGFGRQGKRTFMAERQYTRMEDWLTAKLAYEGLPSKTYLSKTLAQYTSKTCSNCGFTITSADYDRVLEKLKKTATGWMTTINGKELKVEGQITYYNRYKRQNVVKDLSVELDRLSEESVNNDISSWTKGRSGEALSLLKKRFSHRPVQEKFVCLNCGFETHADEQAALNIARSWLFLRSQEYKKYQTNKTTGNTDKRAFVETWQSFYRKKLKEVWKPAV

SEQ ID NO: 40491 - protein, 979 aa, synthetic construct
  REGION 1..979: note = engineered CasX variant
QEIKRINKIRRRLVKDSNTKKAGKTRGPMKTLLVRVMTPDLRERLENLRKKPENIPQPISNTSRANLNKLLTDYTEMKKAILHVYWEEFQKDPVGLMSRVAQPASKKIDQNKLKPEMDEKGNLTTAGFACSQCGQPLFVYKLEQVSEKGKAYTNYFGRCNVAEHEKLILLAQLKPEKDSDEAVTYSLGKFGQRALDFYSIHVTKESTHPVKPLAQIAGNRYASAPVGKALSDACMGTIASFLSKYQDIIIEHQKVVKGNQKRLESLRELAGKENLEYPSVTLPPQPHTKEGVDAYNEVIARVRMWVNLNLWQKLKLSRDDAKPLLRLKGFPSFPLVERQANEVDWWDMVCNVKKLINEKKEDGKVFWQNLAGYKRQEALRPYLSSEEDRKKGKKFARYQLGDLLNHLEKKHGEDWGKVYDEAWERIDKKVEGLSKHIKLEEERRSEDAQSKAALTDWLRAKASFVIEGLKEADKDEFCRCELKLQKWYGDLRGKPFAIEAENSILDISGFSKQYNCAFIWQKDGVKKLNLYLIINYFKGGKLRFKKIKPEAFEANRFYTVINKKSGEIVPMEVNFNFDDPNLIILPLAFGKRQGREFIWNDLLSLETGSLKLANGRVIEKTLYNRRTRQDEPALFVALTFERREVLDSSNIKPMNLIGVDRGENIPAVIALTDPEGCPLSRFKDSLGNPTHILRIGESYKEKQRTIQAKKEVEQRRAGGYSRKYASKAKNLADDMVRNTARDLLYYAVTQDAMLIFENLSRGFGRQGKRTFMAERQYTRMEDWLTAKLAYEGLPSKTYLSKTLAQYTSKTCSNCGFTITSADYDRVLEKLKKTATGWMTTINGKELKVEGQITYYNRYKRQNVVKDLSVELDRLSEESVNNDISSWTKGRSGEALSLLKKRFSHRPVQEKFVCLNCGFETHADEQAALNIARSWLFLRSQEYKKYQTNKTTGNTDKRAFVETWQSFYRKKLKEVWKPAV

SEQ ID NO: 40492 - protein, 979 aa, synthetic construct
  REGION 1..979: note = engineered CasX variant
QEIKRINKIRRRLVKDSNTKKAGKTRGPMKTLLVRVMTPDLRERLENLRKKPENIPQPISNTSRANLNKLLTDYTEMKKAILHVYWEEFQKDPVGLMSRVAQPASKKIDQNKLKPEMDEKGNLTTAGFACSQCGQPLFVYKLEQVSEKGKAYTNYFGRCNVAEHEKLILLAQLKPEKDSDEAVTYSLGKFGQRALDFYSIHVTKESTHPVKPLAQIAGNRYASVPVGKALSDACMGTIASFLSKYQDIIIEHQKVVKGNQKRLESLRELAGKENLEYPSVTLPPQPHTKEGVDAYNEVIARVRMWVNLNLWQKLKLSRDDAKPLLRLKGFPSFPLVERQANEVDWWDMVCNVKKLINEKKEDGKVFWQNLAGYKRQEALRPYLSSEEDRKKGKKFARYQLGDLLNHLEKKHGEDWGKVYDEAWERIDKKVEGLSKHIKLEEERRSEDAQSKAALTDWLRAKASFVIEGLKEADKDEFCRCELKLQKWYGDLRGKPFAIEAENSILDISGFSKQYNCAFIWQKDGVKKLNLYLIINYFKGGKLRFKKIKPEAFEANRFYTVINKKSGEIVPMEVNFNFDDPNLIILPLAFGKRQGREFIWNDLLSLETGSLKLANGRVIEKTLYNRRTRQDEPALFVALTFERREVLDSSNIKPMNLIGVDRGENIPAVIALTDPEGCPLSRFKDSLGNPTHILRIGESYKEKQRTIQAKKEVEQRRAGGYSRKYASKAKNLADDMVRNTARDLLYYAVTQDAMLIFENLSRGFGRQGKRTFMAERQYTRMEDWLTAKLAYEGLPSKTYLSKTLAQYTSKTCSNCGFTITSADYDRVLEKLKKTATGWMTTINGKELKVEGQITYYNRYKRQNVVKDLSVELDRLSEESVNNDISSWTKGRSGEALSLLKKRFSHRPVQEKFVCLNCGFETHADEQAALNIARSWLFLRSQEYKKYQTNKTTGNTDKRAFVETWQSFYRKKLKEVWKPAV

SEQ ID NO: 40493 - protein, 979 aa, synthetic construct
  REGION 1..979: note = engineered CasX variant
QEIKRINKIRRRLVKDSNTKKAGKTRGPMKTLLVRVMTPDLRERLENLRKKPENIPQPISNTSRANLNKLLTDYTEMKKAILHVYWEEFQKDPVGLMSRVAQPASKKIDQNKLKPEMDEKGNLTTAGFACSQCGQPLFVYKLEQVSEKGKAYTNYFGRCNVAEHEKLIKLAQLKPEKDSDEAVTYSLGKFGQRALDFYSIHVTKESTHPVKPLAQIAGNRYASGPVGKALSDACMGTIASFLSKYQDIIIEHQKVVKGNQKRLESLRELAGKENLEYPSVTLPPQPHTKEGVDAYNEVIARVRMWVNLNLWQKLKLSRDDAKPLLRLKGFPSFPLVERQANEVDWWDMVCNVKKLINEKKEDGKVFWQNLAGYKRQEALRPYLSSEEDRKKGKKFARYQLGDLLNHLEKKHGEDWGKVYDEAWERIDKKVEGLSKHIKLEEERRSEDAQSKAALTDWLRAKASFVIEGLKEADKDEFCRCELKLQKWYGDLRGKPFAIEAENSILDISGFSKQYNCAFIWQKDGVKKLNLYLIINYFKGGKLRFKKIKPEAFEANRFYTVINKKSGEIVPMEVNFNFDDPNLIILPLAFGKRQGREFIWNDLLSLETGSLKLANGRVIEKTLYNRRTRQDEPALFVALTFERREVLDSSNIKPMNLIGVDRGENIPAVIALTDPEGCPLSRFKDSLGNPTHILRIGESYKEKQRTIQAKKEVEQRRAGGYSRKYASKAKNLADDMVRNTARDLLYYAVTQDAMLIFENLSRGFGRQGKRTFMAERQYTRMEDWLTAKLAYEGLPSKTYLSKTLAQYTSKTCSNCGFTITSADYDRVLEKLKKTATGWMTTINGKELKVEGQITYYNRYKRQNVVKDLSVELDRLSEESVNNDISSWTKGRSGEALSLLKKRFSHRPVQEKFVCLNCGFETHADEQAALNIARSWLFLRSQEYKKYQTNKTTGNTDKRAFVETWQSFYRKKLKEVWKPAV

SEQ ID NO: 40494 - protein, 978 aa, synthetic construct
  REGION 1..978: note = engineered CasX variant
QEIKRINKIRRRLVKDSNTKKAGKTRGPMKTLLVRVMTPDLRERLENLRKKPENIPQPISNTSRANLNKLLTDYTEMKKAILHVYWEEFQKDPVGLMSRVAQPASKKIDQNKLKPEMDEKGNLTTAGFACSQCGQPLFVYKLEQVSEKGKAYTNYFGRCNVAEHEKLILLAQLKPEKDSDEAVTYSLGKFGQRALDFYSIHVTKESTHPVKPLAQIAGNRYASPVGKALSDACMGTIASFLSKYQDIIIEHQKVVKGNQKRLESLRELAGKENLEYPSVTLPPQPHTKEGVDAYNEVIARVRMWVNLNLWQKLKLSRDDAKPLLRLKGFPSFPLVERQANEVDWWDMVCNVKKLINEKKEDGKVFWQNLAGYKRQEALRPYLSSEEDRKKGKKFARYQLGDLLNHLEKKHGEDWGKVYDEAWERIDKKVEGLSKHIKLEEERRSEDAQSKAALTDWLRAKASFVIEGLKEADKDEFCRCELKLQKWYGDLRGKPFAIEAENSILDISGFSKQYNCAFIWQKDGVKKLNLYLIINYFKGGKLRFKKIKPEAFEANRFYTVINKKSGEIVPMEVNFNFDDPNLIILPLAFGKRQGREFIWNDLLSLETGSLKLANGRVIEKTLYNRRTRQDEPALFVALTFERREVLDSSNIKPMNLIGVDRGENIPAVIALTDPEGCPLSRFKDSLGNPTHILRIGESYKEKQRTIQAKKEVEQRRAGGYSRKYASKAKNLADDMVRNTARDLLYYAVTQDAMLIFENLSRGFGRQGKRTFMAERQYTRMEDWLTAKLAYEGLPSKTYLSKTLAQYTSKTCSNCGFTITSADYDRVLEKLKKTATGWMTTINGKELKVEGQITYYNRYKRQNVVKDLSVELDRLSEESVNNDISSWTKGRSGEALSLLKKRFSHRPVQEKFVCLNCGFETHADEQAALNIARSWLFLRSQEYKKYQTNKTTGNTDKRAFVETWQSFYRKKLKEVWKPAV

SEQ ID NO: 40495 - protein, 979 aa, synthetic construct
  REGION 1..979: note = engineered CasX variant
QEIKRINKIRRRLVKDSNTKKAGKTRGPMKTLLVRVMTPDLRERLENLRKKPENIPQPISNTSRANLNKLLTDYTEMKKAILHVYWEEFQKDPVGLMSRVAQPASKKIDQNKLKPEMDEKGNLTTAGFACSQCGQPLFVYKLEQVSEKGKAYTNYFGRCNVAEHEKLILLAQLKPEKDSDEAVTYSLGKFGQRALDFYSIHVTKESTHPVKPLAQIAGNRYASYPVGKALSDACMGTIASFLSKYQDIIIEHQKVVKGNQKRLESLRELAGKENLEYPSVTLPPQPHTKEGVDAYNEVIARVRMWVNLNLWQKLKLSRDDAKPLLRLKGFPSFPLVERQANEVDWWDMVCNVKKLINEKKEDGKVFWQNLAGYKRQEALRPYLSSEEDRKKGKKFARYQLGDLLWHLEKKHGEDWGKVYDEAWERIDKKVEGLSKHIKLEEERRSEDAQSKAALTDWLRAKASFVIEGLKEADKDEFCRCELKLQKWYGDLRGKPFAIEAENSILDISGFSKQYNCAFIWQKDGVKKLNLYLIINYFKGGKLRFKKIKPEAFEANRFYTVINKKSGEIVPMEVNFNFDDPNLIILPLAFGKRQGREFIWNDLLSLETGSLKLANGRVIEKTLYNRRTRQDEPALFVALTFERREVLDSSNIKPMNLIGVDRGENIPAVIALTDPEGCPLSRFKDSLGNPTHILRIGESYKEKQRTIQAKKEVEQRRAGGYSRKYASKAKNLADDMVRNTARDLLYYAVTQDAMLIFENLSRGFGRQGKRTFMAERQYTRMEDWLTAKLAYEGLPSKTYLSKTLAQYTSKTCSNCGFTITSADYDRVLEKLKKTATGWMTTINGKELKVEGQITYYNRYKRQNVVKDLSVELDRLSEESVNNDISSWTKGRSGEALSLLKKRFSHRPVQEKFVCLNCGFETHADEQAALNIARSWLFLRSQEYKKYQTNKTTGNTDKRAFVETWQSFYRKKLKEVWKPAV

SEQ ID NO: 40496 - protein, 979 aa, synthetic construct
  REGION 1..979: note = engineered CasX variant
QEIKRINKIRRRLVKDSNTKKAGKTRGPMKTLLVRVMTPDLRERLENLRKKPENIPQPISNTSRANLNKLLTDYTEMKKAILHVYWEEFQKDPVGLMSRVAQPASKKIDQNKLKPEMDEKGNLTTAGFACSQCGQPLFVYKLEQVSEKGKAYTNYFGRCNVAEHEKLILLAQLKPEKDSDEAVTYSLGKFGQRALDFYSIHVTKESTHPVKPLAQIAGNRYASHPVGKALSDACMGTIASFLSKYQDIIIEHQKVVKGNQKRLESLRELAGKENLEYPSVTLPPQPHTKEGVDAYNEVIARVRMWVNLNLWQKLKLSRDDAKPLLRLKGFPSFPLVERQANEVDWWDMVCNVKKLINEKKEDGKVFWQNLAGYKRQEALRPYLSSEEDRKKGKKFARYQLGDLLWHLEKKHGEDWGKVYDEAWERIDKKVEGLSKHIKLEEERRSEDAQSKAALTDWLRAKASFVIEGLKEADKDEFCRCELKLQKWYGDLRGKPFAIEAENSILDISGFSKQYNCAFIWQKDGVKKLNLYLIINYFKGGKLRFKKIKPEAFEANRFYTVINKKSGEIVPMEVNFNFDDPNLIILPLAFGKRQGREFIWNDLLSLETGSLKLANGRVIEKTLYNRRTRQDEPALFVALTFERREVLDSSNIKPMNLIGVDRGENIPAVIALTDPEGCPLSRFKDSLGNPTHILRIGESYKEKQRTIQAKKEVEQRRAGGYSRKYASKAKNLADDMVRNTARDLLYYAVTQDAMLIFENLSRGFGRQGKRTFMAERQYTRMEDWLTAKLAYEGLPSKTYLSKTLAQYTSKTCSNCGFTITSADYDRVLEKLKKTATGWMTTINGKELKVEGQITYYNRYKRQNVVKDLSVELDRLSEESVNNDISSWTKGRSGEALSLLKKRFSHRPVQEKFVCLNCGFETHADEQAALNIARSWLFLRSQEYKKYQTNKTTGNTDKRAFVETWQSFYRKKLKEVWKPAV

SEQ ID NO: 40497 - protein, 979 aa, synthetic construct
  REGION 1..979: note = engineered CasX variant
QEIKRINKIRRRLVKDSNTKKAGKTRGPMKTLLVRVMTPDLRERLENLRKKPENIPQPISNTSRANLNKLLTDYTEMKKAILHVYWEEFQKDPVGLMSRVAQPASKKIDQNKLKPEMDEKGNLTTAGFACSQCGQPLFVYKLEQVSEKGKAYTNYFGRCNVAEHEKLILLAQLKPEKDSDEAVTYSLGKFGQRALDFYSIHVTKESTHPVKPLAQIAGNRYASSPVGKALSDACMGTIASFLSKYQDIIIEHQKVVKGNQKRLESLRELAGKENLEYPSVTLPPQPHTKEGVDAYNEVIARVRMWVNLNLWQKLKLSRDDAKPLLRLKGFPSFPLVERQANEVDWWDMVCNVKKLINEKKEDGKVFWQNLAGYKRQEALRPYLSSEEDRKKGKKFARYQLGDLLWHLEKKHGEDWGKVYDEAWERIDKKVEGLSKHIKLEEERRSEDAQSKAALTDWLRAKASFVIEGLKEADKDEFCRCELKLQKWYGDLRGKPFAIEAENSILDISGFSKQYNCAFIWQKDGVKKLNLYLIINYFKGGKLRFKKIKPEAFEANRFYTVINKKSGEIVPMEVNFNFDDPNLIILPLAFGKRQGREFIWNDLLSLETGSLKLANGRVIEKTLYNRRTRQDEPALFVALTFERREVLDSSNIKPMNLIGVDRGENIPAVIALTDPEGCPLSRFKDSLGNPTHILRIGESYKEKQRTIQAKKEVEQRRAGGYSRKYASKAKNLADDMVRNTARDLLYYAVTQDAMLIFENLSRGFGRQGKRTFMAERQYTRMEDWLTAKLAYEGLPSKTYLSKTLAQYTSKTCSNCGFTITSADYDRVLEKLKKTATGWMTTINGKELKVEGQITYYNRYKRQNVVKDLSVELDRLSEESVNNDISSWTKGRSGEALSLLKKRFSHRPVQEKFVCLNCGFETHADEQAALNIARSWLFLRSQEYKKYQTNKTTGNTDKRAFVETWQSFYRKKLKEVWKPAV

SEQ ID NO: 40498 - protein, 979 aa, synthetic construct
  REGION 1..979: note = engineered CasX variant
QEIKRINKIRRRLVKDSNTKKAGKTRGPMKTLLVRVMTPDLRERLENLRKKPENIPQPISNTSRANLNKLLTDYTEMKKAILHVYWEEFQKDPVGLMSRVAQPASKKIDQNKLKPEMDEKGNLTTAGFACSQCGQPLFVYKLEQVSEKGKAYTNYFGRCNVAEHEKLILLAQLKPEKDSDEAVTYSLGKFGQRALDFYSIHVTKESTHPVKPLAQIAGNRYASTPVGKALSDACMGTIASFLSKYQDIIIEHQKVVKGNQKRLESLRELAGKENLEYPSVTLPPQPHTKEGVDAYNEVIARVRMWVNLNLWQKLKLSRDDAKPLLRLKGFPSFPLVERQANEVDWWDMVCNVKKLINEKKEDGKVFWQNLAGYKRQEALRPYLSSEEDRKKGKKFARYQLGDLLWHLEKKHGEDWGKVYDEAWERIDKKVEGLSKHIKLEEERRSEDAQSKAALTDWLRAKASFVIEGLKEADKDEFCRCELKLQKWYGDLRGKPFAIEAENSILDISGFSKQYNCAFIWQKDGVKKLNLYLIINYFKGGKLRFKKIKPEAFEANRFYTVINKKSGEIVPMEVNFNFDDPNLIILPLAFGKRQGREFIWNDLLSLETGSLKLANGRVIEKTLYNRRTRQDEPALFVALTFERREVLDSSNIKPMNLIGVDRGENIPAVIALTDPEGCPLSRFKDSLGNPTHILRIGESYKEKQRTIQAKKEVEQRRAGGYSRKYASKAKNLADDMVRNTARDLLYYAVTQDAMLIFENLSRGFGRQGKRTFMAERQYTRMEDWLTAKLAYEGLPSKTYLSKTLAQYTSKTCSNCGFTITSADYDRVLEKLKKTATGWMTTINGKELKVEGQITYYNRYKRQNVVKDLSVELDRLSEESVNNDISSWTKGRSGEALSLLKKRFSHRPVQEKFVCLNCGFETHADEQAALNIARSWLFLRSQEYKKYQTNKTTGNTDKRAFVETWQSFYRKKLKEVWKPAV

SEQ ID NO: 40499 - protein, 979 aa, synthetic construct
  REGION 1..979: note = engineered CasX variant
QEIKRINKIRRRLVKDSNTKKAGKTRGPMKTLLVRVMTPDLRERLENLRKKPENIPQPISNTSRANLNKLLTDYTEMKKAILHVYWEEFQKDPVGLMSRVAQPASKKIDQNKLKPEMDEKGNLTTAGFACSQCGQPLFVYKLEQVSEKGKAYTNYFGRCNVAEHEKLILLAQLKPEKDSDEAVTYSLGKFGQRALDFYSIHVTKESTHPVKPLAQIAGNRYASAPVGKALSDACMGTIASFLSKYQDIIIEHQKVVKGNQKRLESLRELAGKENLEYPSVTLPPQPHTKEGVDAYNEVIARVRMWVNLNLWQKLKLSRDDAKPLLRLKGFPSFPLVERQANEVDWWDMVCNVKKLINEKKEDGKVFWQNLAGYKRQEALRPYLSSEEDRKKGKKFARYQLGDLLWHLEKKHGEDWGKVYDEAWERIDKKVEGLSKHIKLEEERRSEDAQSKAALTDWLRAKASFVIEGLKEADKDEFCRCELKLQKWYGDLRGKPFAIEAENSILDISGFSKQYNCAFIWQKDGVKKLNLYLIINYFKGGKLRFKKIKPEAFEANRFYTVINKKSGEIVPMEVNFNFDDPNLIILPLAFGKRQGREFIWNDLLSLETGSLKLANGRVIEKTLYNRRTRQDEPALFVALTFERREVLDSSNIKPMNLIGVDRGENIPAVIALTDPEGCPLSRFKDSLGNPTHILRIGESYKEKQRTIQAKKEVEQRRAGGYSRKYASKAKNLADDMVRNTARDLLYYAVTQDAMLIFENLSRGFGRQGKRTFMAERQYTRMEDWLTAKLAYEGLPSKTYLSKTLAQYTSKTCSNCGFTITSADYDRVLEKLKKTATGWMTTINGKELKVEGQITYYNRYKRQNVVKDLSVELDRLSEESVNNDISSWTKGRSGEALSLLKKRFSHRPVQEKFVCLNCGFETHADEQAALNIARSWLFLRSQEYKKYQTNKTTGNTDKRAFVETWQSFYRKKLKEVWKPAV

SEQ ID NO: 40500 - protein, 979 aa, synthetic construct
  REGION 1..979: note = engineered CasX variant
QEIKRINKIRRRLVKDSNTKKAGKTRGPMKTLLVRVMTPDLRERLENLRKKPENIPQPISNTSRANLNKLLTDYTEMKKAILHVYWEEFQKDPVGLMSRVAQPASKKIDQNKLKPEMDEKGNLTTAGFACSQCGQPLFVYKLEQVSEKGKAYTNYFGRCNVAEHEKLILLAQLKPEKDSDEAVTYSLGKFGQRALDFYSIHVTKESTHPVKPLAQIAGNRYASVPVGKALSDACMGTIASFLSKYQDIIIEHQKVVKGNQKRLESLRELAGKENLEYPSVTLPPQPHTKEGVDAYNEVIARVRMWVNLNLWQKLKLSRDDAKPLLRLKGFPSFPLVERQANEVDWWDMVCNVKKLINEKKEDGKVFWQNLAGYKRQEALRPYLSSEEDRKKGKKFARYQLGDLLWHLEKKHGEDWGKVYDEAWERIDKKVEGLSKHIKLEEERRSEDAQSKAALTDWLRAKASFVIEGLKEADKDEFCRCELKLQKWYGDLRGKPFAIEAENSILDISGFSKQYNCAFIWQKDGVKKLNLYLIINYFKGGKLRFKKIKPEAFEANRFYTVINKKSGEIVPMEVNFNFDDPNLIILPLAFGKRQGREFIWNDLLSLETGSLKLANGRVIEKTLYNRRTRQDEPALFVALTFERREVLDSSNIKPMNLIGVDRGENIPAVIALTDPEGCPLSRFKDSLGNPTHILRIGESYKEKQRTIQAKKEVEQRRAGGYSRKYASKAKNLADDMVRNTARDLLYYAVTQDAMLIFENLSRGFGRQGKRTFMAERQYTRMEDWLTAKLAYEGLPSKTYLSKTLAQYTSKTCSNCGFTITSADYDRVLEKLKKTATGWMTTINGKELKVEGQITYYNRYKRQNVVKDLSVELDRLSEESVNNDISSWTKGRSGEALSLLKKRFSHRPVQEKFVCLNCGFETHADEQAALNIARSWLFLRSQEYKKYQTNKTTGNTDKRAFVETWQSFYRKKLKEVWKPAV

SEQ ID NO: 40501 - protein, 979 aa, synthetic construct
  REGION 1..979: note = engineered CasX variant
QEIKRINKIRRRLVKDSNTKKAGKTRGPMKTLLVRVMTPDLRERLENLRKKPENIPQPISNTSRANLNKLLTDYTEMKKAILHVYWEEFQKDPVGLMSRVAQPASKKIDQNKLKPEMDEKGNLTTAGFACSQCGQPLFVYKLEQVSEKGKAYTNYFGRCNVAEHEKLIKLAQLKPEKDSDEAVTYSLGKFGQRALDFYSIHVTKESTHPVKPLAQIAGNRYASGPVGKALSDACMGTIASFLSKYQDIIIEHQKVVKGNQKRLESLRELAGKENLEYPSVTLPPQPHTKEGVDAYNEVIARVRMWVNLNLWQKLKLSRDDAKPLLRLKGFPSFPLVERQANEVDWWDMVCNVKKLINEKKEDGKVFWQNLAGYKRQEALRPYLSSEEDRKKGKKFARYQLGDLLWHLEKKHGEDWGKVYDEAWERIDKKVEGLSKHIKLEEERRSEDAQSKAALTDWLRAKASFVIEGLKEADKDEFCRCELKLQKWYGDLRGKPFAIEAENSILDISGFSKQYNCAFIWQKDGVKKLNLYLIINYFKGGKLRFKKIKPEAFEANRFYTVINKKSGEIVPMEVNFNFDDPNLIILPLAFGKRQGREFIWNDLLSLETGSLKLANGRVIEKTLYNRRTRQDEPALFVALTFERREVLDSSNIKPMNLIGVDRGENIPAVIALTDPEGCPLSRFKDSLGNPTHILRIGESYKEKQRTIQAKKEVEQRRAGGYSRKYASKAKNLADDMVRNTARDLLYYAVTQDAMLIFENLSRGFGRQGKRTFMAERQYTRMEDWLTAKLAYEGLPSKTYLSKTLAQYTSKTCSNCGFTITSADYDRVLEKLKKTATGWMTTINGKELKVEGQITYYNRYKRQNVVKDLSVELDRLSEESVNNDISSWTKGRSGEALSLLKKRFSHRPVQEKFVCLNCGFETHADEQAALNIARSWLFLRSQEYKKYQTNKTTGNTDKRAFVETWQSFYRKKLKEVWKPAV

SEQ ID NO: 40502 - protein, 978 aa, synthetic construct
  REGION 1..978: note = engineered CasX variant
QEIKRINKIRRRLVKDSNTKKAGKTRGPMKTLLVRVMTPDLRERLENLRKKPENIPQPISNTSRANLNKLLTDYTEMKKAILHVYWEEFQKDPVGLMSRVAQPASKKIDQNKLKPEMDEKGNLTTAGFACSQCGQPLFVYKLEQVSEKGKAYTNYFGRCNVAEHEKLILLAQLKPEKDSDEAVTYSLGKFGQRALDFYSIHVTKESTHPVKPLAQIAGNRYASPVGKALSDACMGTIASFLSKYQDIIIEHQKVVKGNQKRLESLRELAGKENLEYPSVTLPPQPHTKEGVDAYNEVIARVRMWVNLNLWQKLKLSRDDAKPLLRLKGFPSFPLVERQANEVDWWDMVCNVKKLINEKKEDGKVFWQNLAGYKRQEALRPYLSSEEDRKKGKKFARYQLGDLLWHLEKKHGEDWGKVYDEAWERIDKKVEGLSKHIKLEEERRSEDAQSKAALTDWLRAKASFVIEGLKEADKDEFCRCELKLQKWYGDLRGKPFAIEAENSILDISGFSKQYNCAFIWQKDGVKKLNLYLIINYFKGGKLRFKKIKPEAFEANRFYTVINKKSGEIVPMEVNFNFDDPNLIILPLAFGKRQGREFIWNDLLSLETGSLKLANGRVIEKTLYNRRTRQDEPALFVALTFERREVLDSSNIKPMNLIGVDRGENIPAVIALTDPEGCPLSRFKDSLGNPTHILRIGESYKEKQRTIQAKKEVEQRRAGGYSRKYASKAKNLADDMVRNTARDLLYYAVTQDAMLIFENLSRGFGRQGKRTFMAERQYTRMEDWLTAKLAYEGLPSKTYLSKTLAQYTSKTCSNCGFTITSADYDRVLEKLKKTATGWMTTINGKELKVEGQITYYNRYKRQNVVKDLSVELDRLSEESVNNDISSWTKGRSGEALSLLKKRFSHRPVQEKFVCLNCGFETHADEQAALNIARSWLFLRSQEYKKYQTNKTTGNTDKRAFVETWQSFYRKKLKEVWKPAV

SEQ ID NO: 40503 - protein, 979 aa, synthetic construct
  REGION 1..979: note = engineered CasX variant
QEIKRINKIRRRLVKDSNTKKAGKTRGPMKTLLVRVMTPDLRERLENLRKKPENIPQPISNTSRANLNKLLTDYTEMKKAILHVYWEEFQKDPVGLMSRVAQPASKKIDQNKLKPEMDEKGNLTTAGFACSQCGQPLFVYKLEQVSEKGKAYTNYFGRCNVAEHEKLILLAQLKPEKDSDEAVTYSLGKFGQRALDFYSIHVTKESTHPVKPLAQIAGNRYASYPVGKALSDACMGTIASFLSKYQDIIIEHQKVVKGNQKRLESLRELAGKENLEYPSVTLPPQPHTKEGVDAYNEVIARVRMWVNLNLWQKLKLSRDDAKPLLRLKGFPSFPLVERQANEVDWWDMVCNVKKLINEKKEDGKVFWQNLAGYKRQEALRPYLSSEEDRKKGKKFARYQLGDLLLHLYKKHGEDWGKVYDEAWERIDKKVEGLSKHIKLEEERRSEDAQSKAALTDWLRAKASFVIEGLKEADKDEFCRCELKLQKWYGDLRGKPFAIEAENSILDISGFSKQYNCAFIWQKDGVKKLNLYLIINYFKGGKLRFKKIKPEAFEANRFYTVINKKSGEIVPMEVNFNFDDPNLIILPLAFGKRQGREFIWNDLLSLETGSLKLANGRVIEKTLYNRRTRQDEPALFVALTFERREVLDSSNIKPMNLIGVDRGENIPAVIALTDPEGCPLSRFKDSLGNPTHILRIGESYKEKQRTIQAKKEVEQRRAGGYSRKYASKAKNLADDMVRNTARDLLYYAVTQDAMLIFENLSRGFGRQGKRTFMAERQYTRMEDWLTAKLAYEGLPSKTYLSKTLAQYTSKTCSNCGFTITSADYDRVLEKLKKTATGWMTTINGKELKVEGQITYYNRYKRQNVVKDLSVELDRLSEESVNNDISSWTKGRSGEALSLLKKRFSHRPVQEKFVCLNCGFETHADEQAALNIARSWLFLRSQEYKKYQTNKTTGNTDKRAFVETWQSFYRKKLKEVWKPAV

SEQ ID NO: 40504 - protein, 979 aa, synthetic construct
  REGION 1..979: note = engineered CasX variant
QEIKRINKIRRRLVKDSNTKKAGKTRGPMKTLLVRVMTPDLRERLENLRKKPENIPQPISNTSRANLNKLLTDYTEMKKAILHVYWEEFQKDPVGLMSRVAQPASKKIDQNKLKPEMDEKGNLTTAGFACSQCGQPLFVYKLEQVSEKGKAYTNYFGRCNVAEHEKLILLAQLKPEKDSDEAVTYSLGKFGQRALDFYSIHVTKESTHPVKPLAQIAGNRYASHPVGKALSDACMGTIASFLSKYQDIIIEHQKVVKGNQKRLESLRELAGKENLEYPSVTLPPQPHTKEGVDAYNEVIARVRMWVNLNLWQKLKLSRDDAKPLLRLKGFPSFPLVERQANEVDWWDMVCNVKKLINEKKEDGKVFWQNLAGYKRQEALRPYLSSEEDRKKGKKFARYQLGDLLLHLYKKHGEDWGKVYDEAWERIDKKVEGLSKHIKLEEERRSEDAQSKAALTDWLRAKASFVIEGLKEADKDEFCRCELKLQKWYGDLRGKPFAIEAENSILDISGFSKQYNCAFIWQKDGVKKLNLYLIINYFKGGKLRFKKIKPEAFEANRFYTVINKKSGEIVPMEVNFNFDDPNLIILPLAFGKRQGREFIWNDLLSLETGSLKLANGRVIEKTLYNRRTRQDEPALFVALTFERREVLDSSNIKPMNLIGVDRGENIPAVIALTDPEGCPLSRFKDSLGNPTHILRIGESYKEKQRTIQAKKEVEQRRAGGYSRKYASKAKNLADDMVRNTARDLLYYAVTQDAMLIFENLSRGFGRQGKRTFMAERQYTRMEDWLTAKLAYEGLPSKTYLSKTLAQYTSKTCSNCGFTITSADYDRVLEKLKKTATGWMTTINGKELKVEGQITYYNRYKRQNVVKDLSVELDRLSEESVNNDISSWTKGRSGEALSLLKKRFSHRPVQEKFVCLNCGFETHADEQAALNIARSWLFLRSQEYKKYQTNKTTGNTDKRAFVETWQSFYRKKLKEVWKPAV

SEQ ID NO: 40505 - protein, 979 aa, synthetic construct
  REGION 1..979: note = engineered CasX variant
QEIKRINKIRRRLVKDSNTKKAGKTRGPMKTLLVRVMTPDLRERLENLRKKPENIPQPISNTSRANLNKLLTDYTEMKKAILHVYWEEFQKDPVGLMSRVAQPASKKIDQNKLKPEMDEKGNLTTAGFACSQCGQPLFVYKLEQVSEKGKAYTNYFGRCNVAEHEKLILLAQLKPEKDSDEAVTYSLGKFGQRALDFYSIHVTKESTHPVKPLAQIAGNRYASSPVGKALSDACMGTIASFLSKYQDIIIEHQKVVKGNQKRLESLRELAGKENLEYPSVTLPPQPHTKEGVDAYNEVIARVRMWVNLNLWQKLKLSRDDAKPLLRLKGFPSFPLVERQANEVDWWDMVCNVKKLINEKKEDGKVFWQNLAGYKRQEALRPYLSSEEDRKKGKKFARYQLGDLLLHLYKKHGEDWGKVYDEAWERIDKKVEGLSKHIKLEEERRSEDAQSKAALTDWLRAKASFVIEGLKEADKDEFCRCELKLQKWYGDLRGKPFAIEAENSILDISGFSKQYNCAFIWQKDGVKKLNLYLIINYFKGGKLRFKKIKPEAFEANRFYTVINKKSGEIVPMEVNFNFDDPNLIILPLAFGKRQGREFIWNDLLSLETGSLKLANGRVIEKTLYNRRTRQDEPALFVALTFERREVLDSSNIKPMNLIGVDRGENIPAVIALTDPEGCPLSRFKDSLGNPTHILRIGESYKEKQRTIQAKKEVEQRRAGGYSRKYASKAKNLADDMVRNTARDLLYYAVTQDAMLIFENLSRGFGRQGKRTFMAERQYTRMEDWLTAKLAYEGLPSKTYLSKTLAQYTSKTCSNCGFTITSADYDRVLEKLKKTATGWMTTINGKELKVEGQITYYNRYKRQNVVKDLSVELDRLSEESVNNDISSWTKGRSGEALSLLKKRFSHRPVQEKFVCLNCGFETHADEQAALNIARSWLFLRSQEYKKYQTNKTTGNTDKRAFVETWQSFYRKKLKEVWKPAV

SEQ ID NO: 40506 - protein, 979 aa, synthetic construct
  REGION 1..979: note = engineered CasX variant
QEIKRINKIRRRLVKDSNTKKAGKTRGPMKTLLVRVMTPDLRERLENLRKKPENIPQPISNTSRANLNKLLTDYTEMKKAILHVYWEEFQKDPVGLMSRVAQPASKKIDQNKLKPEMDEKGNLTTAGFACSQCGQPLFVYKLEQVSEKGKAYTNYFGRCNVAEHEKLILLAQLKPEKDSDEAVTYSLGKFGQRALDFYSIHVTKESTHPVKPLAQIAGNRYASTPVGKALSDACMGTIASFLSKYQDIIIEHQKVVKGNQKRLESLRELAGKENLEYPSVTLPPQPHTKEGVDAYNEVIARVRMWVNLNLWQKLKLSRDDAKPLLRLKGFPSFPLVERQANEVDWWDMVCNVKKLINEKKEDGKVFWQNLAGYKRQEALRPYLSSEEDRKKGKKFARYQLGDLLLHLYKKHGEDWGKVYDEAWERIDKKVEGLSKHIKLEEERRSEDAQSKAALTDWLRAKASFVIEGLKEADKDEFCRCELKLQKWYGDLRGKPFAIEAENSILDISGFSKQYNCAFIWQKDGVKKLNLYLIINYFKGGKLRFKKIKPEAFEANRFYTVINKKSGEIVPMEVNFNFDDPNLIILPLAFGKRQGREFIWNDLLSLETGSLKLANGRVIEKTLYNRRTRQDEPALFVALTFERREVLDSSNIKPMNLIGVDRGENIPAVIALTDPEGCPLSRFKDSLGNPTHILRIGESYKEKQRTIQAKKEVEQRRAGGYSRKYASKAKNLADDMVRNTARDLLYYAVTQDAMLIFENLSRGFGRQGKRTFMAERQYTRMEDWLTAKLAYEGLPSKTYLSKTLAQYTSKTCSNCGFTITSADYDRVLEKLKKTATGWMTTINGKELKVEGQITYYNRYKRQNVVKDLSVELDRLSEESVNNDISSWTKGRSGEALSLLKKRFSHRPVQEKFVCLNCGFETHADEQAALNIARSWLFLRSQEYKKYQTNKTTGNTDKRAFVETWQSFYRKKLKEVWKPAV

SEQ ID NO: 40507 - protein, 979 aa, synthetic construct
  REGION 1..979: note = engineered CasX variant
QEIKRINKIRRRLVKDSNTKKAGKTRGPMKTLLVRVMTPDLRERLENLRKKPENIPQPISNTSRANLNKLLTDYTEMKKAILHVYWEEFQKDPVGLMSRVAQPASKKIDQNKLKPEMDEKGNLTTAGFACSQCGQPLFVYKLEQVSEKGKAYTNYFGRCNVAEHEKLILLAQLKPEKDSDEAVTYSLGKFGQRALDFYSIHVTKESTHPVKPLAQIAGNRYASAPVGKALSDACMGTIASFLSKYQDIIIEHQKVVKGNQKRLESLRELAGKENLEYPSVTLPPQPHTKEGVDAYNEVIARVRMWVNLNLWQKLKLSRDDAKPLLRLKGFPSFPLVERQANEVDWWDMVCNVKKLINEKKEDGKVFWQNLAGYKRQEALRPYLSSEEDRKKGKKFARYQLGDLLLHLYKKHGEDWGKVYDEAWERIDKKVEGLSKHIKLEEERRSEDAQSKAALTDWLRAKASFVIEGLKEADKDEFCRCELKLQKWYGDLRGKPFAIEAENSILDISGFSKQYNCAFIWQKDGVKKLNLYLIINYFKGGKLRFKKIKPEAFEANRFYTVINKKSGEIVPMEVNFNFDDPNLIILPLAFGKRQGREFIWNDLLSLETGSLKLANGRVIEKTLYNRRTRQDEPALFVALTFERREVLDSSNIKPMNLIGVDRGENIPAVIALTDPEGCPLSRFKDSLGNPTHILRIGESYKEKQRTIQAKKEVEQRRAGGYSRKYASKAKNLADDMVRNTARDLLYYAVTQDAMLIFENLSRGFGRQGKRTFMAERQYTRMEDWLTAKLAYEGLPSKTYLSKTLAQYTSKTCSNCGFTITSADYDRVLEKLKKTATGWMTTINGKELKVEGQITYYNRYKRQNVVKDLSVELDRLSEESVNNDISSWTKGRSGEALSLLKKRFSHRPVQEKFVCLNCGFETHADEQAALNIARSWLFLRSQEYKKYQTNKTTGNTDKRAFVETWQSFYRKKLKEVWKPAV

SEQ ID NO: 40508 - protein, 979 aa, synthetic construct
  REGION 1..979: note = engineered CasX variant
QEIKRINKIRRRLVKDSNTKKAGKTRGPMKTLLVRVMTPDLRERLENLRKKPENIPQPISNTSRANLNKLLTDYTEMKKAILHVYWEEFQKDPVGLMSRVAQPASKKIDQNKLKPEMDEKGNLTTAGFACSQCGQPLFVYKLEQVSEKGKAYTNYFGRCNVAEHEKLILLAQLKPEKDSDEAVTYSLGKFGQRALDFYSIHVTKESTHPVKPLAQIAGNRYASVPVGKALSDACMGTIASFLSKYQDIIIEHQKVVKGNQKRLESLRELAGKENLEYPSVTLPPQPHTKEGVDAYNEVIARVRMWVNLNLWQKLKLSRDDAKPLLRLKGFPSFPLVERQANEVDWWDMVCNVKKLINEKKEDGKVFWQNLAGYKRQEALRPYLSSEEDRKKGKKFARYQLGDLLLHLYKKHGEDWGKVYDEAWERIDKKVEGLSKHIKLEEERRSEDAQSKAALTDWLRAKASFVIEGLKEADKDEFCRCELKLQKWYGDLRGKPFAIEAENSILDISGFSKQYNCAFIWQKDGVKKLNLYLIINYFKGGKLRFKKIKPEAFEANRFYTVINKKSGEIVPMEVNFNFDDPNLIILPLAFGKRQGREFIWNDLLSLETGSLKLANGRVIEKTLYNRRTRQDEPALFVALTFERREVLDSSNIKPMNLIGVDRGENIPAVIALTDPEGCPLSRFKDSLGNPTHILRIGESYKEKQRTIQAKKEVEQRRAGGYSRKYASKAKNLADDMVRNTARDLLYYAVTQDAMLIFENLSRGFGRQGKRTFMAERQYTRMEDWLTAKLAYEGLPSKTYLSKTLAQYTSKTCSNCGFTITSADYDRVLEKLKKTATGWMTTINGKELKVEGQITYYNRYKRQNVVKDLSVELDRLSEESVNNDISSWTKGRSGEALSLLKKRFSHRPVQEKFVCLNCGFETHADEQAALNIARSWLFLRSQEYKKYQTNKTTGNTDKRAFVETWQSFYRKKLKEVWKPAV

SEQ ID NO: 40509 - protein, 979 aa, synthetic construct
  REGION 1..979: note = engineered CasX variant
QEIKRINKIRRRLVKDSNTKKAGKTRGPMKTLLVRVMTPDLRERLENLRKKPENIPQPISNTSRANLNKLLTDYTEMKKAILHVYWEEFQKDPVGLMSRVAQPASKKIDQNKLKPEMDEKGNLTTAGFACSQCGQPLFVYKLEQVSEKGKAYTNYFGRCNVAEHEKLIKLAQLKPEKDSDEAVTYSLGKFGQRALDFYSIHVTKESTHPVKPLAQIAGNRYASGPVGKALSDACMGTIASFLSKYQDIIIEHQKVVKGNQKRLESLRELAGKENLEYPSVTLPPQPHTKEGVDAYNEVIARVRMWVNLNLWQKLKLSRDDAKPLLRLKGFPSFPLVERQANEVDWWDMVCNVKKLINEKKEDGKVFWQNLAGYKRQEALRPYLSSEEDRKKGKKFARYQLGDLLLHLYKKHGEDWGKVYDEAWERIDKKVEGLSKHIKLEEERRSEDAQSKAALTDWLRAKASFVIEGLKEADKDEFCRCELKLQKWYGDLRGKPFAIEAENSILDISGFSKQYNCAFIWQKDGVKKLNLYLIINYFKGGKLRFKKIKPEAFEANRFYTVINKKSGEIVPMEVNFNFDDPNLIILPLAFGKRQGREFIWNDLLSLETGSLKLANGRVIEKTLYNRRTRQDEPALFVALTFERREVLDSSNIKPMNLIGVDRGENIPAVIALTDPEGCPLSRFKDSLGNPTHILRIGESYKEKQRTIQAKKEVEQRRAGGYSRKYASKAKNLADDMVRNTARDLLYYAVTQDAMLIFENLSRGFGRQGKRTFMAERQYTRMEDWLTAKLAYEGLPSKTYLSKTLAQYTSKTCSNCGFTITSADYDRVLEKLKKTATGWMTTINGKELKVEGQITYYNRYKRQNVVKDLSVELDRLSEESVNNDISSWTKGRSGEALSLLKKRFSHRPVQEKFVCLNCGFETHADEQAALNIARSWLFLRSQEYKKYQTNKTTGNTDKRAFVETWQSFYRKKLKEVWKPAV

SEQ ID NO: 40510 - protein, 978 aa, synthetic construct
  REGION 1..978: note = engineered CasX variant
QEIKRINKIRRRLVKDSNTKKAGKTRGPMKTLLVRVMTPDLRERLENLRKKPENIPQPISNTSRANLNKLLTDYTEMKKAILHVYWEEFQKDPVGLMSRVAQPASKKIDQNKLKPEMDEKGNLTTAGFACSQCGQPLFVYKLEQVSEKGKAYTNYFGRCNVAEHEKLILLAQLKPEKDSDEAVTYSLGKFGQRALDFYSIHVTKESTHPVKPLAQIAGNRYASPVGKALSDACMGTIASFLSKYQDIIIEHQKVVKGNQKRLESLRELAGKENLEYPSVTLPPQPHTKEGVDAYNEVIARVRMWVNLNLWQKLKLSRDDAKPLLRLKGFPSFPLVERQANEVDWWDMVCNVKKLINEKKEDGKVFWQNLAGYKRQEALRPYLSSEEDRKKGKKFARYQLGDLLLHLYKKHGEDWGKVYDEAWERIDKKVEGLSKHIKLEEERRSEDAQSKAALTDWLRAKASFVIEGLKEADKDEFCRCELKLQKWYGDLRGKPFAIEAENSILDISGFSKQYNCAFIWQKDGVKKLNLYLIINYFKGGKLRFKKIKPEAFEANRFYTVINKKSGEIVPMEVNFNFDDPNLIILPLAFGKRQGREFIWNDLLSLETGSLKLANGRVIEKTLYNRRTRQDEPALFVALTFERREVLDSSNIKPMNLIGVDRGENIPAVIALTDPEGCPLSRFKDSLGNPTHILRIGESYKEKQRTIQAKKEVEQRRAGGYSRKYASKAKNLADDMVRNTARDLLYYAVTQDAMLIFENLSRGFGRQGKRTFMAERQYTRMEDWLTAKLAYEGLPSKTYLSKTLAQYTSKTCSNCGFTITSADYDRVLEKLKKTATGWMTTINGKELKVEGQITYYNRYKRQNVVKDLSVELDRLSEESVNNDISSWTKGRSGEALSLLKKRFSHRPVQEKFVCLNCGFETHADEQAALNIARSWLFLRSQEYKKYQTNKTTGNTDKRAFVETWQSFYRKKLKEVWKPAV

SEQ ID NO: 40511 - protein, 979 aa, synthetic construct
  REGION 1..979: note = engineered CasX variant
QEIKRINKIRRRLVKDSNTKKAGKTRGPMKTLLVRVMTPDLRERLENLRKKPENIPQPISNTSRANLNKLLTDYTEMKKAILHVYWEEFQKDPVGLMSRVAQPASKKIDQNKLKPEMDEKGNLTTAGFACSQCGQPLFVYKLEQVSEKGKAYTNYFGRCNVAEHEKLILLAQLKPEKDSDEAVTYSLGKFGQRALDFYSIHVTKESTHPVKPLAQIAGNRYASYPVGKALSDACMGTIASFLSKYQDIIIEHQKVVKGNQKRLESLRELAGKENLEYPSVTLPPQPHTKEGVDAYNEVIARVRMWVNLNLWQKLKLSRDDAKPLLRLKGFPSFPLVERQANEVDWWDMVCNVKKLINEKKEDGKVFWQNLAGYKRQEALRPYLSSEEDRKKGKKFARYQLGDLLLHLEKKHPEDWGKVYDEAWERIDKKVEGLSKHIKLEEERRSEDAQSKAALTDWLRAKASFVIEGLKEADKDEFCRCELKLQKWYGDLRGKPFAIEAENSILDISGFSKQYNCAFIWQKDGVKKLNLYLIINYFKGGKLRFKKIKPEAFEANRFYTVINKKSGEIVPMEVNFNFDDPNLIILPLAFGKRQGREFIWNDLLSLETGSLKLANGRVIEKTLYNRRTRQDEPALFVALTFERREVLDSSNIKPMNLIGVDRGENIPAVIALTDPEGCPLSRFKDSLGNPTHILRIGESYKEKQRTIQAKKEVEQRRAGGYSRKYASKAKNLADDMVRNTARDLLYYAVTQDAMLIFENLSRGFGRQGKRTFMAERQYTRMEDWLTAKLAYEGLPSKTYLSKTLAQYTSKTCSNCGFTITSADYDRVLEKLKKTATGWMTTINGKELKVEGQITYYNRYKRQNVVKDLSVELDRLSEESVNNDISSWTKGRSGEALSLLKKRFSHRPVQEKFVCLNCGFETHADEQAALNIARSWLFLRSQEYKKYQTNKTTGNTDKRAFVETWQSFYRKKLKEVWKPAV

SEQ ID NO: 40512 - protein, 979 aa, synthetic construct
  REGION 1..979: note = engineered CasX variant
QEIKRINKIRRRLVKDSNTKKAGKTRGPMKTLLVRVMTPDLRERLENLRKKPENIPQPISNTSRANLNKLLTDYTEMKKAILHVYWEEFQKDPVGLMSRVAQPASKKIDQNKLKPEMDEKGNLTTAGFACSQCGQPLFVYKLEQVSEKGKAYTNYFGRCNVAEHEKLILLAQLKPEKDSDEAVTYSLGKFGQRALDFYSIHVTKESTHPVKPLAQIAGNRYASHPVGKALSDACMGTIASFLSKYQDIIIEHQKVVKGNQKRLESLRELAGKENLEYPSVTLPPQPHTKEGVDAYNEVIARVRMWVNLNLWQKLKLSRDDAKPLLRLKGFPSFPLVERQANEVDWWDMVCNVKKLINEKKEDGKVFWQNLAGYKRQEALRPYLSSEEDRKKGKKFARYQLGDLLLHLEKKHPEDWGKVYDEAWERIDKKVEGLSKHIKLEEERRSEDAQSKAALTDWLRAKASFVIEGLKEADKDEFCRCELKLQKWYGDLRGKPFAIEAENSILDISGFSKQYNCAFIWQKDGVKKLNLYLIINYFKGGKLRFKKIKPEAFEANRFYTVINKKSGEIVPMEVNFNFDDPNLIILPLAFGKRQGREFIWNDLLSLETGSLKLANGRVIEKTLYNRRTRQDEPALFVALTFERREVLDSSNIKPMNLIGVDRGENIPAVIALTDPEGCPLSRFKDSLGNPTHILRIGESYKEKQRTIQAKKEVEQRRAGGYSRKYASKAKNLADDMVRNTARDLLYYAVTQDAMLIFENLSRGFGRQGKRTFMAERQYTRMEDWLTAKLAYEGLPSKTYLSKTLAQYTSKTCSNCGFTITSADYDRVLEKLKKTATGWMTTINGKELKVEGQITYYNRYKRQNVVKDLSVELDRLSEESVNNDISSWTKGRSGEALSLLKKRFSHRPVQEKFVCLNCGFETHADEQAALNIARSWLFLRSQEYKKYQTNKTTGNTDKRAFVETWQSFYRKKLKEVWKPAV

SEQ ID NO: 40513 - protein, 979 aa, synthetic construct
  REGION 1..979: note = engineered CasX variant
QEIKRINKIRRRLVKDSNTKKAGKTRGPMKTLLVRVMTPDLRERLENLRKKPENIPQPISNTSRANLNKLLTDYTEMKKAILHVYWEEFQKDPVGLMSRVAQPASKKIDQNKLKPEMDEKGNLTTAGFACSQCGQPLFVYKLEQVSEKGKAYTNYFGRCNVAEHEKLILLAQLKPEKDSDEAVTYSLGKFGQRALDFYSIHVTKESTHPVKPLAQIAGNRYASSPVGKALSDACMGTIASFLSKYQDIIIEHQKVVKGNQKRLESLRELAGKENLEYPSVTLPPQPHTKEGVDAYNEVIARVRMWVNLNLWQKLKLSRDDAKPLLRLKGFPSFPLVERQANEVDWWDMVCNVKKLINEKKEDGKVFWQNLAGYKRQEALRPYLSSEEDRKKGKKFARYQLGDLLLHLEKKHPEDWGKVYDEAWERIDKKVEGLSKHIKLEEERRSEDAQSKAALTDWLRAKASFVIEGLKEADKDEFCRCELKLQKWYGDLRGKPFAIEAENSILDISGFSKQYNCAFIWQKDGVKKLNLYLIINYFKGGKLRFKKIKPEAFEANRFYTVINKKSGEIVPMEVNFNFDDPNLIILPLAFGKRQGREFIWNDLLSLETGSLKLANGRVIEKTLYNRRTRQDEPALFVALTFERREVLDSSNIKPMNLIGVDRGENIPAVIALTDPEGCPLSRFKDSLGNPTHILRIGESYKEKQRTIQAKKEVEQRRAGGYSRKYASKAKNLADDMVRNTARDLLYYAVTQDAMLIFENLSRGFGRQGKRTFMAERQYTRMEDWLTAKLAYEGLPSKTYLSKTLAQYTSKTCSNCGFTITSADYDRVLEKLKKTATGWMTTINGKELKVEGQITYYNRYKRQNVVKDLSVELDRLSEESVNNDISSWTKGRSGEALSLLKKRFSHRPVQEKFVCLNCGFETHADEQAALNIARSWLFLRSQEYKKYQTNKTTGNTDKRAFVETWQSFYRKKLKEVWKPAV

SEQ ID NO: 40514 - protein, 979 aa, synthetic construct
  REGION 1..979: note = engineered CasX variant
QEIKRINKIRRRLVKDSNTKKAGKTRGPMKTLLVRVMTPDLRERLENLRKKPENIPQPISNTSRANLNKLLTDYTEMKKAILHVYWEEFQKDPVGLMSRVAQPASKKIDQNKLKPEMDEKGNLTTAGFACSQCGQPLFVYKLEQVSEKGKAYTNYFGRCNVAEHEKLILLAQLKPEKDSDEAVTYSLGKFGQRALDFYSIHVTKESTHPVKPLAQIAGNRYASTPVGKALSDACMGTIASFLSKYQDIIIEHQKVVKGNQKRLESLRELAGKENLEYPSVTLPPQPHTKEGVDAYNEVIARVRMWVNLNLWQKLKLSRDDAKPLLRLKGFPSFPLVERQANEVDWWDMVCNVKKLINEKKEDGKVFWQNLAGYKRQEALRPYLSSEEDRKKGKKFARYQLGDLLLHLEKKHPEDWGKVYDEAWERIDKKVEGLSKHIKLEEERRSEDAQSKAALTDWLRAKASFVIEGLKEADKDEFCRCELKLQKWYGDLRGKPFAIEAENSILDISGFSKQYNCAFIWQKDGVKKLNLYLIINYFKGGKLRFKKIKPEAFEANRFYTVINKKSGEIVPMEVNFNFDDPNLIILPLAFGKRQGREFIWNDLLSLETGSLKLANGRVIEKTLYNRRTRQDEPALFVALTFERREVLDSSNIKPMNLIGVDRGENIPAVIALTDPEGCPLSRFKDSLGNPTHILRIGESYKEKQRTIQAKKEVEQRRAGGYSRKYASKAKNLADDMVRNTARDLLYYAVTQDAMLIFENLSRGFGRQGKRTFMAERQYTRMEDWLTAKLAYEGLPSKTYLSKTLAQYTSKTCSNCGFTITSADYDRVLEKLKKTATGWMTTINGKELKVEGQITYYNRYKRQNVVKDLSVELDRLSEESVNNDISSWTKGRSGEALSLLKKRFSHRPVQEKFVCLNCGFETHADEQAALNIARSWLFLRSQEYKKYQTNKTTGNTDKRAFVETWQSFYRKKLKEVWKPAV

SEQ ID NO: 40515 - protein, 979 aa, synthetic construct
  REGION 1..979: note = engineered CasX variant
QEIKRINKIRRRLVKDSNTKKAGKTRGPMKTLLVRVMTPDLRERLENLRKKPENIPQPISNTSRANLNKLLTDYTEMKKAILHVYWEEFQKDPVGLMSRVAQPASKKIDQNKLKPEMDEKGNLTTAGFACSQCGQPLFVYKLEQVSEKGKAYTNYFGRCNVAEHEKLILLAQLKPEKDSDEAVTYSLGKFGQRALDFYSIHVTKESTHPVKPLAQIAGNRYASAPVGKALSDACMGTIASFLSKYQDIIIEHQKVVKGNQKRLESLRELAGKENLEYPSVTLPPQPHTKEGVDAYNEVIARVRMWVNLNLWQKLKLSRDDAKPLLRLKGFPSFPLVERQANEVDWWDMVCNVKKLINEKKEDGKVFWQNLAGYKRQEALRPYLSSEEDRKKGKKFARYQLGDLLLHLEKKHPEDWGKVYDEAWERIDKKVEGLSKHIKLEEERRSEDAQSKAALTDWLRAKASFVIEGLKEADKDEFCRCELKLQKWYGDLRGKPFAIEAENSILDISGFSKQYNCAFIWQKDGVKKLNLYLIINYFKGGKLRFKKIKPEAFEANRFYTVINKKSGEIVPMEVNFNFDDPNLIILPLAFGKRQGREFIWNDLLSLETGSLKLANGRVIEKTLYNRRTRQDEPALFVALTFERREVLDSSNIKPMNLIGVDRGENIPAVIALTDPEGCPLSRFKDSLGNPTHILRIGESYKEKQRTIQAKKEVEQRRAGGYSRKYASKAKNLADDMVRNTARDLLYYAVTQDAMLIFENLSRGFGRQGKRTFMAERQYTRMEDWLTAKLAYEGLPSKTYLSKTLAQYTSKTCSNCGFTITSADYDRVLEKLKKTATGWMTTINGKELKVEGQITYYNRYKRQNVVKDLSVELDRLSEESVNNDISSWTKGRSGEALSLLKKRFSHRPVQEKFVCLNCGFETHADEQAALNIARSWLFLRSQEYKKYQTNKTTGNTDKRAFVETWQSFYRKKLKEVWKPAV

SEQ ID NO: 40516 - protein, 979 aa, synthetic construct
  REGION 1..979: note = engineered CasX variant
QEIKRINKIRRRLVKDSNTKKAGKTRGPMKTLLVRVMTPDLRERLENLRKKPENIPQPISNTSRANLNKLLTDYTEMKKAILHVYWEEFQKDPVGLMSRVAQPASKKIDQNKLKPEMDEKGNLTTAGFACSQCGQPLFVYKLEQVSEKGKAYTNYFGRCNVAEHEKLILLAQLKPEKDSDEAVTYSLGKFGQRALDFYSIHVTKESTHPVKPLAQIAGNRYASVPVGKALSDACMGTIASFLSKYQDIIIEHQKVVKGNQKRLESLRELAGKENLEYPSVTLPPQPHTKEGVDAYNEVIARVRMWVNLNLWQKLKLSRDDAKPLLRLKGFPSFPLVERQANEVDWWDMVCNVKKLINEKKEDGKVFWQNLAGYKRQEALRPYLSSEEDRKKGKKFARYQLGDLLLHLEKKHPEDWGKVYDEAWERIDKKVEGLSKHIKLEEERRSEDAQSKAALTDWLRAKASFVIEGLKEADKDEFCRCELKLQKWYGDLRGKPFAIEAENSILDISGFSKQYNCAFIWQKDGVKKLNLYLIINYFKGGKLRFKKIKPEAFEANRFYTVINKKSGEIVPMEVNFNFDDPNLIILPLAFGKRQGREFIWNDLLSLETGSLKLANGRVIEKTLYNRRTRQDEPALFVALTFERREVLDSSNIKPMNLIGVDRGENIPAVIALTDPEGCPLSRFKDSLGNPTHILRIGESYKEKQRTIQAKKEVEQRRAGGYSRKYASKAKNLADDMVRNTARDLLYYAVTQDAMLIFENLSRGFGRQGKRTFMAERQYTRMEDWLTAKLAYEGLPSKTYLSKTLAQYTSKTCSNCGFTITSADYDRVLEKLKKTATGWMTTINGKELKVEGQITYYNRYKRQNVVKDLSVELDRLSEESVNNDISSWTKGRSGEALSLLKKRFSHRPVQEKFVCLNCGFETHADEQAALNIARSWLFLRSQEYKKYQTNKTTGNTDKRAFVETWQSFYRKKLKEVWKPAV

SEQ ID NO: 40517 - protein, 979 aa, synthetic construct
  REGION 1..979: note = engineered CasX variant
QEIKRINKIRRRLVKDSNTKKAGKTRGPMKTLLVRVMTPDLRERLENLRKKPENIPQPISNTSRANLNKLLTDYTEMKKAILHVYWEEFQKDPVGLMSRVAQPASKKIDQNKLKPEMDEKGNLTTAGFACSQCGQPLFVYKLEQVSEKGKAYTNYFGRCNVAEHEKLIKLAQLKPEKDSDEAVTYSLGKFGQRALDFYSIHVTKESTHPVKPLAQIAGNRYASGPVGKALSDACMGTIASFLSKYQDIIIEHQKVVKGNQKRLESLRELAGKENLEYPSVTLPPQPHTKEGVDAYNEVIARVRMWVNLNLWQKLKLSRDDAKPLLRLKGFPSFPLVERQANEVDWWDMVCNVKKLINEKKEDGKVFWQNLAGYKRQEALRPYLSSEEDRKKGKKFARYQLGDLLLHLEKKHPEDWGKVYDEAWERIDKKVEGLSKHIKLEEERRSEDAQSKAALTDWLRAKASFVIEGLKEADKDEFCRCELKLQKWYGDLRGKPFAIEAENSILDISGFSKQYNCAFIWQKDGVKKLNLYLIINYFKGGKLRFKKIKPEAFEANRFYTVINKKSGEIVPMEVNFNFDDPNLIILPLAFGKRQGREFIWNDLLSLETGSLKLANGRVIEKTLYNRRTRQDEPALFVALTFERREVLDSSNIKPMNLIGVDRGENIPAVIALTDPEGCPLSRFKDSLGNPTHILRIGESYKEKQRTIQAKKEVEQRRAGGYSRKYASKAKNLADDMVRNTARDLLYYAVTQDAMLIFENLSRGFGRQGKRTFMAERQYTRMEDWLTAKLAYEGLPSKTYLSKTLAQYTSKTCSNCGFTITSADYDRVLEKLKKTATGWMTTINGKELKVEGQITYYNRYKRQNVVKDLSVELDRLSEESVNNDISSWTKGRSGEALSLLKKRFSHRPVQEKFVCLNCGFETHADEQAALNIARSWLFLRSQEYKKYQTNKTTGNTDKRAFVETWQSFYRKKLKEVWKPAV

SEQ ID NO: 40518 - protein, 978 aa, synthetic construct
  REGION 1..978: note = engineered CasX variant
QEIKRINKIRRRLVKDSNTKKAGKTRGPMKTLLVRVMTPDLRERLENLRKKPENIPQPISNTSRANLNKLLTDYTEMKKAILHVYWEEFQKDPVGLMSRVAQPASKKIDQNKLKPEMDEKGNLTTAGFACSQCGQPLFVYKLEQVSEKGKAYTNYFGRCNVAEHEKLILLAQLKPEKDSDEAVTYSLGKFGQRALDFYSIHVTKESTHPVKPLAQIAGNRYASPVGKALSDACMGTIASFLSKYQDIIIEHQKVVKGNQKRLESLRELAGKENLEYPSVTLPPQPHTKEGVDAYNEVIARVRMWVNLNLWQKLKLSRDDAKPLLRLKGFPSFPLVERQANEVDWWDMVCNVKKLINEKKEDGKVFWQNLAGYKRQEALRPYLSSEEDRKKGKKFARYQLGDLLLHLEKKHPEDWGKVYDEAWERIDKKVEGLSKHIKLEEERRSEDAQSKAALTDWLRAKASFVIEGLKEADKDEFCRCELKLQKWYGDLRGKPFAIEAENSILDISGFSKQYNCAFIWQKDGVKKLNLYLIINYFKGGKLRFKKIKPEAFEANRFYTVINKKSGEIVPMEVNFNFDDPNLIILPLAFGKRQGREFIWNDLLSLETGSLKLANGRVIEKTLYNRRTRQDEPALFVALTFERREVLDSSNIKPMNLIGVDRGENIPAVIALTDPEGCPLSRFKDSLGNPTHILRIGESYKEKQRTIQAKKEVEQRRAGGYSRKYASKAKNLADDMVRNTARDLLYYAVTQDAMLIFENLSRGFGRQGKRTFMAERQYTRMEDWLTAKLAYEGLPSKTYLSKTLAQYTSKTCSNCGFTITSADYDRVLEKLKKTATGWMTTINGKELKVEGQITYYNRYKRQNVVKDLSVELDRLSEESVNNDISSWTKGRSGEALSLLKKRFSHRPVQEKFVCLNCGFETHADEQAALNIARSWLFLRSQEYKKYQTNKTTGNTDKRAFVETWQSFYRKKLKEVWKPAV

SEQ ID NO: 40519 - protein, 980 aa, synthetic construct
  REGION 1..980: note = engineered CasX variant
QEIKRINKIRRRLVKDSNTKKAGKTRGPMKTLLVRVMTPDLRERLENLRKKPENIPQPISNTSRANLNKLLTDYTEMKKAILHVYWEEFQKDPVGLMSRVAQPASKKIDQNKLKPEMDEKGNLTTAGFACSQCGQPLFVYKLEQVSEKGKAYTNYFGRCNVAEHEKLILLAQLKPEKDSDEAVTYSLGKFGQRALDFYSIHVTKESTHPVKPLAQIAGNRYASYPVGKALSDACMGTIASFLSKYQDIIIEHQKVVKGNQKRLESLRELAGKENLEYPSVTLPPQPHTKEGVDAYNEVIARVRMWVNLNLWQKLKLSRDDAKPLLRLKGFPSFPLVERQANEVDWWDMVCNVKKLINEKKEDGKVFWQNLAGYKRQEALRPYLSSEEDRKKGKKFARYQLGDLLLHLEKKHGERDWGKVYDEAWERIDKKVEGLSKHIKLEEERRSEDAQSKAALTDWLRAKASFVIEGLKEADKDEFCRCELKLQKWYGDLRGKPFAIEAENSILDISGFSKQYNCAFIWQKDGVKKLNLYLIINYFKGGKLRFKKIKPEAFEANRFYTVINKKSGEIVPMEVNFNFDDPNLIILPLAFGKRQGREFIWNDLLSLETGSLKLANGRVIEKTLYNRRTRQDEPALFVALTFERREVLDSSNIKPMNLIGVDRGENIPAVIALTDPEGCPLSRFKDSLGNPTHILRIGESYKEKQRTIQAKKEVEQRRAGGYSRKYASKAKNLADDMVRNTARDLLYYAVTQDAMLIFENLSRGFGRQGKRTFMAERQYTRMEDWLTAKLAYEGLPSKTYLSKTLAQYTSKTCSNCGFTITSADYDRVLEKLKKTATGWMTTINGKELKVEGQITYYNRYKRQNVVKDLSVELDRLSEESVNNDISSWTKGRSGEALSLLKKRFSHRPVQEKFVCLNCGFETHADEQAALNIARSWLFLRSQEYKKYQTNKTTGNTDKRAFVETWQSFYRKKLKEVWKPAV

SEQ ID NO: 40520 - protein, 980 aa, synthetic construct
  REGION 1..980: note = engineered CasX variant
QEIKRINKIRRRLVKDSNTKKAGKTRGPMKTLLVRVMTPDLRERLENLRKKPENIPQPISNTSRANLNKLLTDYTEMKKAILHVYWEEFQKDPVGLMSRVAQPASKKIDQNKLKPEMDEKGNLTTAGFACSQCGQPLFVYKLEQVSEKGKAYTNYFGRCNVAEHEKLILLAQLKPEKDSDEAVTYSLGKFGQRALDFYSIHVTKESTHPVKPLAQIAGNRYASHPVGKALSDACMGTIASFLSKYQDIIIEHQKVVKGNQKRLESLRELAGKENLEYPSVTLPPQPHTKEGVDAYNEVIARVRMWVNLNLWQKLKLSRDDAKPLLRLKGFPSFPLVERQANEVDWWDMVCNVKKLINEKKEDGKVFWQNLAGYKRQEALRPYLSSEEDRKKGKKFARYQLGDLLLHLEKKHGERDWGKVYDEAWERIDKKVEGLSKHIKLEEERRSEDAQSKAALTDWLRAKASFVIEGLKEADKDEFCRCELKLQKWYGDLRGKPFAIEAENSILDISGFSKQYNCAFIWQKDGVKKLNLYLIINYFKGGKLRFKKIKPEAFEANRFYTVINKKSGEIVPMEVNFNFDDPNLIILPLAFGKRQGREFIWNDLLSLETGSLKLANGRVIEKTLYNRRTRQDEPALFVALTFERREVLDSSNIKPMNLIGVDRGENIPAVIALTDPEGCPLSRFKDSLGNPTHILRIGESYKEKQRTIQAKKEVEQRRAGGYSRKYASKAKNLADDMVRNTARDLLYYAVTQDAMLIFENLSRGFGRQGKRTFMAERQYTRMEDWLTAKLAYEGLPSKTYLSKTLAQYTSKTCSNCGFTITSADYDRVLEKLKKTATGWMTTINGKELKVEGQITYYNRYKRQNVVKDLSVELDRLSEESVNNDISSWTKGRSGEALSLLKKRFSHRPVQEKFVCLNCGFETHADEQAALNIARSWLFLRSQEYKKYQTNKTTGNTDKRAFVETWQSFYRKKLKEVWKPAV

SEQ ID NO: 40521 - protein, 980 aa, synthetic construct
  REGION 1..980: note = engineered CasX variant
QEIKRINKIRRRLVKDSNTKKAGKTRGPMKTLLVRVMTPDLRERLENLRKKPENIPQPISNTSRANLNKLLTDYTEMKKAILHVYWEEFQKDPVGLMSRVAQPASKKIDQNKLKPEMDEKGNLTTAGFACSQCGQPLFVYKLEQVSEKGKAYTNYFGRCNVAEHEKLILLAQLKPEKDSDEAVTYSLGKFGQRALDFYSIHVTKESTHPVKPLAQIAGNRYASSPVGKALSDACMGTIASFLSKYQDIIIEHQKVVKGNQKRLESLRELAGKENLEYPSVTLPPQPHTKEGVDAYNEVIARVRMWVNLNLWQKLKLSRDDAKPLLRLKGFPSFPLVERQANEVDWWDMVCNVKKLINEKKEDGKVFWQNLAGYKRQEALRPYLSSEEDRKKGKKFARYQLGDLLLHLEKKHGERDWGKVYDEAWERIDKKVEGLSKHIKLEEERRSEDAQSKAALTDWLRAKASFVIEGLKEADKDEFCRCELKLQKWYGDLRGKPFAIEAENSILDISGFSKQYNCAFIWQKDGVKKLNLYLIINYFKGGKLRFKKIKPEAFEANRFYTVINKKSGEIVPMEVNFNFDDPNLIILPLAFGKRQGREFIWNDLLSLETGSLKLANGRVIEKTLYNRRTRQDEPALFVALTFERREVLDSSNIKPMNLIGVDRGENIPAVIALTDPEGCPLSRFKDSLGNPTHILRIGESYKEKQRTIQAKKEVEQRRAGGYSRKYASKAKNLADDMVRNTARDLLYYAVTQDAMLIFENLSRGFGRQGKRTFMAERQYTRMEDWLTAKLAYEGLPSKTYLSKTLAQYTSKTCSNCGFTITSADYDRVLEKLKKTATGWMTTINGKELKVEGQITYYNRYKRQNVVKDLSVELDRLSEESVNNDISSWTKGRSGEALSLLKKRFSHRPVQEKFVCLNCGFETHADEQAALNIARSWLFLRSQEYKKYQTNKTTGNTDKRAFVETWQSFYRKKLKEVWKPAV

SEQ ID NO: 40522 - protein, 980 aa, synthetic construct
  REGION 1..980: note = engineered CasX variant
QEIKRINKIRRRLVKDSNTKKAGKTRGPMKTLLVRVMTPDLRERLENLRKKPENIPQPISNTSRANLNKLLTDYTEMKKAILHVYWEEFQKDPVGLMSRVAQPASKKIDQNKLKPEMDEKGNLTTAGFACSQCGQPLFVYKLEQVSEKGKAYTNYFGRCNVAEHEKLILLAQLKPEKDSDEAVTYSLGKFGQRALDFYSIHVTKESTHPVKPLAQIAGNRYASTPVGKALSDACMGTIASFLSKYQDIIIEHQKVVKGNQKRLESLRELAGKENLEYPSVTLPPQPHTKEGVDAYNEVIARVRMWVNLNLWQKLKLSRDDAKPLLRLKGFPSFPLVERQANEVDWWDMVCNVKKLINEKKEDGKVFWQNLAGYKRQEALRPYLSSEEDRKKGKKFARYQLGDLLLHLEKKHGERDWGKVYDEAWERIDKKVEGLSKHIKLEEERRSEDAQSKAALTDWLRAKASFVIEGLKEADKDEFCRCELKLQKWYGDLRGKPFAIEAENSILDISGFSKQYNCAFIWQKDGVKKLNLYLIINYFKGGKLRFKKIKPEAFEANRFYTVINKKSGEIVPMEVNFNFDDPNLIILPLAFGKRQGREFIWNDLLSLETGSLKLANGRVIEKTLYNRRTRQDEPALFVALTFERREVLDSSNIKPMNLIGVDRGENIPAVIALTDPEGCPLSRFKDSLGNPTHILRIGESYKEKQRTIQAKKEVEQRRAGGYSRKYASKAKNLADDMVRNTARDLLYYAVTQDAMLIFENLSRGFGRQGKRTFMAERQYTRMEDWLTAKLAYEGLPSKTYLSKTLAQYTSKTCSNCGFTITSADYDRVLEKLKKTATGWMTTINGKELKVEGQITYYNRYKRQNVVKDLSVELDRLSEESVNNDISSWTKGRSGEALSLLKKRFSHRPVQEKFVCLNCGFETHADEQAALNIARSWLFLRSQEYKKYQTNKTTGNTDKRAFVETWQSFYRKKLKEVWKPAV

SEQ ID NO: 40523 - protein, 980 aa, synthetic construct
  REGION 1..980: note = engineered CasX variant
QEIKRINKIRRRLVKDSNTKKAGKTRGPMKTLLVRVMTPDLRERLENLRKKPENIPQPISNTSRANLNKLLTDYTEMKKAILHVYWEEFQKDPVGLMSRVAQPASKKIDQNKLKPEMDEKGNLTTAGFACSQCGQPLFVYKLEQVSEKGKAYTNYFGRCNVAEHEKLILLAQLKPEKDSDEAVTYSLGKFGQRALDFYSIHVTKESTHPVKPLAQIAGNRYASAPVGKALSDACMGTIASFLSKYQDIIIEHQKVVKGNQKRLESLRELAGKENLEYPSVTLPPQPHTKEGVDAYNEVIARVRMWVNLNLWQKLKLSRDDAKPLLRLKGFPSFPLVERQANEVDWWDMVCNVKKLINEKKEDGKVFWQNLAGYKRQEALRPYLSSEEDRKKGKKFARYQLGDLLLHLEKKHGERDWGKVYDEAWERIDKKVEGLSKHIKLEEERRSEDAQSKAALTDWLRAKASFVIEGLKEADKDEFCRCELKLQKWYGDLRGKPFAIEAENSILDISGFSKQYNCAFIWQKDGVKKLNLYLIINYFKGGKLRFKKIKPEAFEANRFYTVINKKSGEIVPMEVNFNFDDPNLIILPLAFGKRQGREFIWNDLLSLETGSLKLANGRVIEKTLYNRRTRQDEPALFVALTFERREVLDSSNIKPMNLIGVDRGENIPAVIALTDPEGCPLSRFKDSLGNPTHILRIGESYKEKQRTIQAKKEVEQRRAGGYSRKYASKAKNLADDMVRNTARDLLYYAVTQDAMLIFENLSRGFGRQGKRTFMAERQYTRMEDWLTAKLAYEGLPSKTYLSKTLAQYTSKTCSNCGFTITSADYDRVLEKLKKTATGWMTTINGKELKVEGQITYYNRYKRQNVVKDLSVELDRLSEESVNNDISSWTKGRSGEALSLLKKRFSHRPVQEKFVCLNCGFETHADEQAALNIARSWLFLRSQEYKKYQTNKTTGNTDKRAFVETWQSFYRKKLKEVWKPAV

SEQ ID NO: 40524 - protein, 980 aa, synthetic construct
  REGION 1..980: note = engineered CasX variant
QEIKRINKIRRRLVKDSNTKKAGKTRGPMKTLLVRVMTPDLRERLENLRKKPENIPQPISNTSRANLNKLLTDYTEMKKAILHVYWEEFQKDPVGLMSRVAQPASKKIDQNKLKPEMDEKGNLTTAGFACSQCGQPLFVYKLEQVSEKGKAYTNYFGRCNVAEHEKLILLAQLKPEKDSDEAVTYSLGKFGQRALDFYSIHVTKESTHPVKPLAQIAGNRYASVPVGKALSDACMGTIASFLSKYQDIIIEHQKVVKGNQKRLESLRELAGKENLEYPSVTLPPQPHTKEGVDAYNEVIARVRMWVNLNLWQKLKLSRDDAKPLLRLKGFPSFPLVERQANEVDWWDMVCNVKKLINEKKEDGKVFWQNLAGYKRQEALRPYLSSEEDRKKGKKFARYQLGDLLLHLEKKHGERDWGKVYDEAWERIDKKVEGLSKHIKLEEERRSEDAQSKAALTDWLRAKASFVIEGLKEADKDEFCRCELKLQKWYGDLRGKPFAIEAENSILDISGFSKQYNCAFIWQKDGVKKLNLYLIINYFKGGKLRFKKIKPEAFEANRFYTVINKKSGEIVPMEVNFNFDDPNLIILPLAFGKRQGREFIWNDLLSLETGSLKLANGRVIEKTLYNRRTRQDEPALFVALTFERREVLDSSNIKPMNLIGVDRGENIPAVIALTDPEGCPLSRFKDSLGNPTHILRIGESYKEKQRTIQAKKEVEQRRAGGYSRKYASKAKNLADDMVRNTARDLLYYAVTQDAMLIFENLSRGFGRQGKRTFMAERQYTRMEDWLTAKLAYEGLPSKTYLSKTLAQYTSKTCSNCGFTITSADYDRVLEKLKKTATGWMTTINGKELKVEGQITYYNRYKRQNVVKDLSVELDRLSEESVNNDISSWTKGRSGEALSLLKKRFSHRPVQEKFVCLNCGFETHADEQAALNIARSWLFLRSQEYKKYQTNKTTGNTDKRAFVETWQSFYRKKLKEVWKPAV

SEQ ID NO: 40525 - protein, 980 aa, synthetic construct
  REGION 1..980: note = engineered CasX variant
QEIKRINKIRRRLVKDSNTKKAGKTRGPMKTLLVRVMTPDLRERLENLRKKPENIPQPISNTSRANLNKLLTDYTEMKKAILHVYWEEFQKDPVGLMSRVAQPASKKIDQNKLKPEMDEKGNLTTAGFACSQCGQPLFVYKLEQVSEKGKAYTNYFGRCNVAEHEKLIKLAQLKPEKDSDEAVTYSLGKFGQRALDFYSIHVTKESTHPVKPLAQIAGNRYASGPVGKALSDACMGTIASFLSKYQDIIIEHQKVVKGNQKRLESLRELAGKENLEYPSVTLPPQPHTKEGVDAYNEVIARVRMWVNLNLWQKLKLSRDDAKPLLRLKGFPSFPLVERQANEVDWWDMVCNVKKLINEKKEDGKVFWQNLAGYKRQEALRPYLSSEEDRKKGKKFARYQLGDLLLHLEKKHGERDWGKVYDEAWERIDKKVEGLSKHIKLEEERRSEDAQSKAALTDWLRAKASFVIEGLKEADKDEFCRCELKLQKWYGDLRGKPFAIEAENSILDISGFSKQYNCAFIWQKDGVKKLNLYLIINYFKGGKLRFKKIKPEAFEANRFYTVINKKSGEIVPMEVNFNFDDPNLIILPLAFGKRQGREFIWNDLLSLETGSLKLANGRVIEKTLYNRRTRQDEPALFVALTFERREVLDSSNIKPMNLIGVDRGENIPAVIALTDPEGCPLSRFKDSLGNPTHILRIGESYKEKQRTIQAKKEVEQRRAGGYSRKYASKAKNLADDMVRNTARDLLYYAVTQDAMLIFENLSRGFGRQGKRTFMAERQYTRMEDWLTAKLAYEGLPSKTYLSKTLAQYTSKTCSNCGFTITSADYDRVLEKLKKTATGWMTTINGKELKVEGQITYYNRYKRQNVVKDLSVELDRLSEESVNNDISSWTKGRSGEALSLLKKRFSHRPVQEKFVCLNCGFETHADEQAALNIARSWLFLRSQEYKKYQTNKTTGNTDKRAFVETWQSFYRKKLKEVWKPAV

SEQ ID NO: 40526 - protein, 979 aa, synthetic construct
  REGION 1..979: note = engineered CasX variant
QEIKRINKIRRRLVKDSNTKKAGKTRGPMKTLLVRVMTPDLRERLENLRKKPENIPQPISNTSRANLNKLLTDYTEMKKAILHVYWEEFQKDPVGLMSRVAQPASKKIDQNKLKPEMDEKGNLTTAGFACSQCGQPLFVYKLEQVSEKGKAYTNYFGRCNVAEHEKLILLAQLKPEKDSDEAVTYSLGKFGQRALDFYSIHVTKESTHPVKPLAQIAGNRYASPVGKALSDACMGTIASFLSKYQDIIIEHQKVVKGNQKRLESLRELAGKENLEYPSVTLPPQPHTKEGVDAYNEVIARVRMWVNLNLWQKLKLSRDDAKPLLRLKGFPSFPLVERQANEVDWWDMVCNVKKLINEKKEDGKVFWQNLAGYKRQEALRPYLSSEEDRKKGKKFARYQLGDLLLHLEKKHGERDWGKVYDEAWERIDKKVEGLSKHIKLEEERRSEDAQSKAALTDWLRAKASFVIEGLKEADKDEFCRCELKLQKWYGDLRGKPFAIEAENSILDISGFSKQYNCAFIWQKDGVKKLNLYLIINYFKGGKLRFKKIKPEAFEANRFYTVINKKSGEIVPMEVNFNFDDPNLIILPLAFGKRQGREFIWNDLLSLETGSLKLANGRVIEKTLYNRRTRQDEPALFVALTFERREVLDSSNIKPMNLIGVDRGENIPAVIALTDPEGCPLSRFKDSLGNPTHILRIGESYKEKQRTIQAKKEVEQRRAGGYSRKYASKAKNLADDMVRNTARDLLYYAVTQDAMLIFENLSRGFGRQGKRTFMAERQYTRMEDWLTAKLAYEGLPSKTYLSKTLAQYTSKTCSNCGFTITSADYDRVLEKLKKTATGWMTTINGKELKVEGQITYYNRYKRQNVVKDLSVELDRLSEESVNNDISSWTKGRSGEALSLLKKRFSHRPVQEKFVCLNCGFETHADEQAALNIARSWLFLRSQEYKKYQTNKTTGNTDKRAFVETWQSFYRKKLKEVWKPAV

SEQ ID NO: 40527 - protein, 980 aa, synthetic construct
  REGION 1..980: note = engineered CasX variant
QEIKRINKIRRRLVKDSNTKKAGKTRGPMKTLLVRVMTPDLRERLENLRKKPENIPQPISNTSRANLNKLLTDYTEMKKAILHVYWEEFQKDPVGLMSRVAQPASKKIDQNKLKPEMDEKGNLTTAGFACSQCGQPLFVYKLEQVSEKGKAYTNYFGRCNVAEHEKLILLAQLKPEKDSDEAVTYSLGKFGQRALDFYSIHVTKESTHPVKPLAQIAGNRYASYPVGKALSDACMGTIASFLSKYQDIIIEHQKVVKGNQKRLESLRELAGKENLEYPSVTLPPQPHTKEGVDAYNEVIARVRMWVNLNLWQKLKLSRDDAKPLLRLKGFPSFPLVERQANEVDWWDMVCNVKKLINEKKEDGKVFWQNLAGYKRQEALRPYLSSEEDRKKGKKFARYQLGDLLLHLEKKHGEYDWGKVYDEAWERIDKKVEGLSKHIKLEEERRSEDAQSKAALTDWLRAKASFVIEGLKEADKDEFCRCELKLQKWYGDLRGKPFAIEAENSILDISGFSKQYNCAFIWQKDGVKKLNLYLIINYFKGGKLRFKKIKPEAFEANRFYTVINKKSGEIVPMEVNFNFDDPNLIILPLAFGKRQGREFIWNDLLSLETGSLKLANGRVIEKTLYNRRTRQDEPALFVALTFERREVLDSSNIKPMNLIGVDRGENIPAVIALTDPEGCPLSRFKDSLGNPTHILRIGESYKEKQRTIQAKKEVEQRRAGGYSRKYASKAKNLADDMVRNTARDLLYYAVTQDAMLIFENLSRGFGRQGKRTFMAERQYTRMEDWLTAKLAYEGLPSKTYLSKTLAQYTSKTCSNCGFTITSADYDRVLEKLKKTATGWMTTINGKELKVEGQITYYNRYKRQNVVKDLSVELDRLSEESVNNDISSWTKGRSGEALSLLKKRFSHRPVQEKFVCLNCGFETHADEQAALNIARSWLFLRSQEYKKYQTNKTTGNTDKRAFVETWQSFYRKKLKEVWKPAV

SEQ ID NO: 40528 - protein, 980 aa, synthetic construct
  REGION 1..980: note = engineered CasX variant
QEIKRINKIRRRLVKDSNTKKAGKTRGPMKTLLVRVMTPDLRERLENLRKKPENIPQPISNTSRANLNKLLTDYTEMKKAILHVYWEEFQKDPVGLMSRVAQPASKKIDQNKLKPEMDEKGNLTTAGFACSQCGQPLFVYKLEQVSEKGKAYTNYFGRCNVAEHEKLILLAQLKPEKDSDEAVTYSLGKFGQRALDFYSIHVTKESTHPVKPLAQIAGNRYASHPVGKALSDACMGTIASFLSKYQDIIIEHQKVVKGNQKRLESLRELAGKENLEYPSVTLPPQPHTKEGVDAYNEVIARVRMWVNLNLWQKLKLSRDDAKPLLRLKGFPSFPLVERQANEVDWWDMVCNVKKLINEKKEDGKVFWQNLAGYKRQEALRPYLSSEEDRKKGKKFARYQLGDLLLHLEKKHGEYDWGKVYDEAWERIDKKVEGLSKHIKLEEERRSEDAQSKAALTDWLRAKASFVIEGLKEADKDEFCRCELKLQKWYGDLRGKPFAIEAENSILDISGFSKQYNCAFIWQKDGVKKLNLYLIINYFKGGKLRFKKIKPEAFEANRFYTVINKKSGEIVPMEVNFNFDDPNLIILPLAFGKRQGREFIWNDLLSLETGSLKLANGRVIEKTLYNRRTRQDEPALFVALTFERREVLDSSNIKPMNLIGVDRGENIPAVIALTDPEGCPLSRFKDSLGNPTHILRIGESYKEKQRTIQAKKEVEQRRAGGYSRKYASKAKNLADDMVRNTARDLLYYAVTQDAMLIFENLSRGFGRQGKRTFMAERQYTRMEDWLTAKLAYEGLPSKTYLSKTLAQYTSKTCSNCGFTITSADYDRVLEKLKKTATGWMTTINGKELKVEGQITYYNRYKRQNVVKDLSVELDRLSEESVNNDISSWTKGRSGEALSLLKKRFSHRPVQEKFVCLNCGFETHADEQAALNIARSWLFLRSQEYKKYQTNKTTGNTDKRAFVETWQSFYRKKLKEVWKPAV

SEQ ID NO: 40529 - protein, 980 aa, synthetic construct
  REGION 1..980: note = engineered CasX variant
QEIKRINKIRRRLVKDSNTKKAGKTRGPMKTLLVRVMTPDLRERLENLRKKPENIPQPISNTSRANLNKLLTDYTEMKKAILHVYWEEFQKDPVGLMSRVAQPASKKIDQNKLKPEMDEKGNLTTAGFACSQCGQPLFVYKLEQVSEKGKAYTNYFGRCNVAEHEKLILLAQLKPEKDSDEAVTYSLGKFGQRALDFYSIHVTKESTHPVKPLAQIAGNRYASSPVGKALSDACMGTIASFLSKYQDIIIEHQKVVKGNQKRLESLRELAGKENLEYPSVTLPPQPHTKEGVDAYNEVIARVRMWVNLNLWQKLKLSRDDAKPLLRLKGFPSFPLVERQANEVDWWDMVCNVKKLINEKKEDGKVFWQNLAGYKRQEALRPYLSSEEDRKKGKKFARYQLGDLLLHLEKKHGEYDWGKVYDEAWERIDKKVEGLSKHIKLEEERRSEDAQSKAALTDWLRAKASFVIEGLKEADKDEFCRCELKLQKWYGDLRGKPFAIEAENSILDISGFSKQYNCAFIWQKDGVKKLNLYLIINYFKGGKLRFKKIKPEAFEANRFYTVINKKSGEIVPMEVNFNFDDPNLIILPLAFGKRQGREFIWNDLLSLETGSLKLANGRVIEKTLYNRRTRQDEPALFVALTFERREVLDSSNIKPMNLIGVDRGENIPAVIALTDPEGCPLSRFKDSLGNPTHILRIGESYKEKQRTIQAKKEVEQRRAGGYSRKYASKAKNLADDMVRNTARDLLYYAVTQDAMLIFENLSRGFGRQGKRTFMAERQYTRMEDWLTAKLAYEGLPSKTYLSKTLAQYTSKTCSNCGFTITSADYDRVLEKLKKTATGWMTTINGKELKVEGQITYYNRYKRQNVVKDLSVELDRLSEESVNNDISSWTKGRSGEALSLLKKRFSHRPVQEKFVCLNCGFETHADEQAALNIARSWLFLRSQEYKKYQTNKTTGNTDKRAFVETWQSFYRKKLKEVWKPAV

SEQ ID NO: 40530 - protein, 980 aa, synthetic construct
  REGION 1..980: note = engineered CasX variant
QEIKRINKIRRRLVKDSNTKKAGKTRGPMKTLLVRVMTPDLRERLENLRKKPENIPQPISNTSRANLNKLLTDYTEMKKAILHVYWEEFQKDPVGLMSRVAQPASKKIDQNKLKPEMDEKGNLTTAGFACSQCGQPLFVYKLEQVSEKGKAYTNYFGRCNVAEHEKLILLAQLKPEKDSDEAVTYSLGKFGQRALDFYSIHVTKESTHPVKPLAQIAGNRYASTPVGKALSDACMGTIASFLSKYQDIIIEHQKVVKGNQKRLESLRELAGKENLEYPSVTLPPQPHTKEGVDAYNEVIARVRMWVNLNLWQKLKLSRDDAKPLLRLKGFPSFPLVERQANEVDWWDMVCNVKKLINEKKEDGKVFWQNLAGYKRQEALRPYLSSEEDRKKGKKFARYQLGDLLLHLEKKHGEYDWGKVYDEAWERIDKKVEGLSKHIKLEEERRSEDAQSKAALTDWLRAKASFVIEGLKEADKDEFCRCELKLQKWYGDLRGKPFAIEAENSILDISGFSKQYNCAFIWQKDGVKKLNLYLIINYFKGGKLRFKKIKPEAFEANRFYTVINKKSGEIVPMEVNFNFDDPNLIILPLAFGKRQGREFIWNDLLSLETGSLKLANGRVIEKTLYNRRTRQDEPALFVALTFERREVLDSSNIKPMNLIGVDRGENIPAVIALTDPEGCPLSRFKDSLGNPTHILRIGESYKEKQRTIQAKKEVEQRRAGGYSRKYASKAKNLADDMVRNTARDLLYYAVTQDAMLIFENLSRGFGRQGKRTFMAERQYTRMEDWLTAKLAYEGLPSKTYLSKTLAQYTSKTCSNCGFTITSADYDRVLEKLKKTATGWMTTINGKELKVEGQITYYNRYKRQNVVKDLSVELDRLSEESVNNDISSWTKGRSGEALSLLKKRFSHRPVQEKFVCLNCGFETHADEQAALNIARSWLFLRSQEYKKYQTNKTTGNTDKRAFVETWQSFYRKKLKEVWKPAV

SEQ ID NO: 40531 - protein, 980 aa, synthetic construct
  REGION 1..980: note = engineered CasX variant
QEIKRINKIRRRLVKDSNTKKAGKTRGPMKTLLVRVMTPDLRERLENLRKKPENIPQPISNTSRANLNKLLTDYTEMKKAILHVYWEEFQKDPVGLMSRVAQPASKKIDQNKLKPEMDEKGNLTTAGFACSQCGQPLFVYKLEQVSEKGKAYTNYFGRCNVAEHEKLILLAQLKPEKDSDEAVTYSLGKFGQRALDFYSIHVTKESTHPVKPLAQIAGNRYASAPVGKALSDACMGTIASFLSKYQDIIIEHQKVVKGNQKRLESLRELAGKENLEYPSVTLPPQPHTKEGVDAYNEVIARVRMWVNLNLWQKLKLSRDDAKPLLRLKGFPSFPLVERQANEVDWWDMVCNVKKLINEKKEDGKVFWQNLAGYKRQEALRPYLSSEEDRKKGKKFARYQLGDLLLHLEKKHGEYDWGKVYDEAWERIDKKVEGLSKHIKLEEERRSEDAQSKAALTDWLRAKASFVIEGLKEADKDEFCRCELKLQKWYGDLRGKPFAIEAENSILDISGFSKQYNCAFIWQKDGVKKLNLYLIINYFKGGKLRFKKIKPEAFEANRFYTVINKKSGEIVPMEVNFNFDDPNLIILPLAFGKRQGREFIWNDLLSLETGSLKLANGRVIEKTLYNRRTRQDEPALFVALTFERREVLDSSNIKPMNLIGVDRGENIPAVIALTDPEGCPLSRFKDSLGNPTHILRIGESYKEKQRTIQAKKEVEQRRAGGYSRKYASKAKNLADDMVRNTARDLLYYAVTQDAMLIFENLSRGFGRQGKRTFMAERQYTRMEDWLTAKLAYEGLPSKTYLSKTLAQYTSKTCSNCGFTITSADYDRVLEKLKKTATGWMTTINGKELKVEGQITYYNRYKRQNVVKDLSVELDRLSEESVNNDISSWTKGRSGEALSLLKKRFSHRPVQEKFVCLNCGFETHADEQAALNIARSWLFLRSQEYKKYQTNKTTGNTDKRAFVETWQSFYRKKLKEVWKPAV

SEQ ID NO: 40532 - protein, 980 aa, synthetic construct
  REGION 1..980: note = engineered CasX variant
QEIKRINKIRRRLVKDSNTKKAGKTRGPMKTLLVRVMTPDLRERLENLRKKPENIPQPISNTSRANLNKLLTDYTEMKKAILHVYWEEFQKDPVGLMSRVAQPASKKIDQNKLKPEMDEKGNLTTAGFACSQCGQPLFVYKLEQVSEKGKAYTNYFGRCNVAEHEKLILLAQLKPEKDSDEAVTYSLGKFGQRALDFYSIHVTKESTHPVKPLAQIAGNRYASVPVGKALSDACMGTIASFLSKYQDIIIEHQKVVKGNQKRLESLRELAGKENLEYPSVTLPPQPHTKEGVDAYNEVIARVRMWVNLNLWQKLKLSRDDAKPLLRLKGFPSFPLVERQANEVDWWDMVCNVKKLINEKKEDGKVFWQNLAGYKRQEALRPYLSSEEDRKKGKKFARYQLGDLLLHLEKKHGEYDWGKVYDEAWERIDKKVEGLSKHIKLEEERRSEDAQSKAALTDWLRAKASFVIEGLKEADKDEFCRCELKLQKWYGDLRGKPFAIEAENSILDISGFSKQYNCAFIWQKDGVKKLNLYLIINYFKGGKLRFKKIKPEAFEANRFYTVINKKSGEIVPMEVNFNFDDPNLIILPLAFGKRQGREFIWNDLLSLETGSLKLANGRVIEKTLYNRRTRQDEPALFVALTFERREVLDSSNIKPMNLIGVDRGENIPAVIALTDPEGCPLSRFKDSLGNPTHILRIGESYKEKQRTIQAKKEVEQRRAGGYSRKYASKAKNLADDMVRNTARDLLYYAVTQDAMLIFENLSRGFGRQGKRTFMAERQYTRMEDWLTAKLAYEGLPSKTYLSKTLAQYTSKTCSNCGFTITSADYDRVLEKLKKTATGWMTTINGKELKVEGQITYYNRYKRQNVVKDLSVELDRLSEESVNNDISSWTKGRSGEALSLLKKRFSHRPVQEKFVCLNCGFETHADEQAALNIARSWLFLRSQEYKKYQTNKTTGNTDKRAFVETWQSFYRKKLKEVWKPAV

SEQ ID NO: 40533 - protein, 980 aa, synthetic construct
  REGION 1..980: note = engineered CasX variant
QEIKRINKIRRRLVKDSNTKKAGKTRGPMKTLLVRVMTPDLRERLENLRKKPENIPQPISNTSRANLNKLLTDYTEMKKAILHVYWEEFQKDPVGLMSRVAQPASKKIDQNKLKPEMDEKGNLTTAGFACSQCGQPLFVYKLEQVSEKGKAYTNYFGRCNVAEHEKLIKLAQLKPEKDSDEAVTYSLGKFGQRALDFYSIHVTKESTHPVKPLAQIAGNRYASGPVGKALSDACMGTIASFLSKYQDIIIEHQKVVKGNQKRLESLRELAGKENLEYPSVTLPPQPHTKEGVDAYNEVIARVRMWVNLNLWQKLKLSRDDAKPLLRLKGFPSFPLVERQANEVDWWDMVCNVKKLINEKKEDGKVFWQNLAGYKRQEALRPYLSSEEDRKKGKKFARYQLGDLLLHLEKKHGEYDWGKVYDEAWERIDKKVEGLSKHIKLEEERRSEDAQSKAALTDWLRAKASFVIEGLKEADKDEFCRCELKLQKWYGDLRGKPFAIEAENSILDISGFSKQYNCAFIWQKDGVKKLNLYLIINYFKGGKLRFKKIKPEAFEANRFYTVINKKSGEIVPMEVNFNFDDPNLIILPLAFGKRQGREFIWNDLLSLETGSLKLANGRVIEKTLYNRRTRQDEPALFVALTFERREVLDSSNIKPMNLIGVDRGENIPAVIALTDPEGCPLSRFKDSLGNPTHILRIGESYKEKQRTIQAKKEVEQRRAGGYSRKYASKAKNLADDMVRNTARDLLYYAVTQDAMLIFENLSRGFGRQGKRTFMAERQYTRMEDWLTAKLAYEGLPSKTYLSKTLAQYTSKTCSNCGFTITSADYDRVLEKLKKTATGWMTTINGKELKVEGQITYYNRYKRQNVVKDLSVELDRLSEESVNNDISSWTKGRSGEALSLLKKRFSHRPVQEKFVCLNCGFETHADEQAALNIARSWLFLRSQEYKKYQTNKTTGNTDKRAFVETWQSFYRKKLKEVWKPAV

SEQ ID NO: 40534 - protein, 979 aa, synthetic construct
  REGION 1..979: note = engineered CasX variant
QEIKRINKIRRRLVKDSNTKKAGKTRGPMKTLLVRVMTPDLRERLENLRKKPENIPQPISNTSRANLNKLLTDYTEMKKAILHVYWEEFQKDPVGLMSRVAQPASKKIDQNKLKPEMDEKGNLTTAGFACSQCGQPLFVYKLEQVSEKGKAYTNYFGRCNVAEHEKLILLAQLKPEKDSDEAVTYSLGKFGQRALDFYSIHVTKESTHPVKPLAQIAGNRYASPVGKALSDACMGTIASFLSKYQDIIIEHQKVVKGNQKRLESLRELAGKENLEYPSVTLPPQPHTKEGVDAYNEVIARVRMWVNLNLWQKLKLSRDDAKPLLRLKGFPSFPLVERQANEVDWWDMVCNVKKLINEKKEDGKVFWQNLAGYKRQEALRPYLSSEEDRKKGKKFARYQLGDLLLHLEKKHGEYDWGKVYDEAWERIDKKVEGLSKHIKLEEERRSEDAQSKAALTDWLRAKASFVIEGLKEADKDEFCRCELKLQKWYGDLRGKPFAIEAENSILDISGFSKQYNCAFIWQKDGVKKLNLYLIINYFKGGKLRFKKIKPEAFEANRFYTVINKKSGEIVPMEVNFNFDDPNLIILPLAFGKRQGREFIWNDLLSLETGSLKLANGRVIEKTLYNRRTRQDEPALFVALTFERREVLDSSNIKPMNLIGVDRGENIPAVIALTDPEGCPLSRFKDSLGNPTHILRIGESYKEKQRTIQAKKEVEQRRAGGYSRKYASKAKNLADDMVRNTARDLLYYAVTQDAMLIFENLSRGFGRQGKRTFMAERQYTRMEDWLTAKLAYEGLPSKTYLSKTLAQYTSKTCSNCGFTITSADYDRVLEKLKKTATGWMTTINGKELKVEGQITYYNRYKRQNVVKDLSVELDRLSEESVNNDISSWTKGRSGEALSLLKKRFSHRPVQEKFVCLNCGFETHADEQAALNIARSWLFLRSQEYKKYQTNKTTGNTDKRAFVETWQSFYRKKLKEVWKPAV

SEQ ID NO: 40535 - protein, 979 aa, synthetic construct
  REGION 1..979: note = engineered CasX variant
QEIKRINKIRRRLVKDSNTKKAGKTRGPMKTLLVRVMTPDLRERLENLRKKPENIPQPISNTSRANLNKLLTDYTEMKKAILHVYWEEFQKDPVGLMSRVAQPASKKIDQNKLKPEMDEKGNLTTAGFACSQCGQPLFVYKLEQVSEKGKAYTNYFGRCNVAEHEKLILLAQLKPEKDSDEAVTYSLGKFGQRALDFYSIHVTKESTHPVKPLAQIAGNRYASYPVGKALSDACMGTIASFLSKYQDIIIEHQKVVKGNQKRLESLRELAGKENLEYPSVTLPPQPHTKEGVDAYNEVIARVRMWVNLNLWQKLKLSRDDAKPLLRLKGFPSFPLVERQANEVDWWDMVCNVKKLINEKKEDGKVFWQNLAGYKRQEALRPYLSSEEDRKKGKKFARYQLGDLLLHLEKKHGEDWGDVYDEAWERIDKKVEGLSKHIKLEEERRSEDAQSKAALTDWLRAKASFVIEGLKEADKDEFCRCELKLQKWYGDLRGKPFAIEAENSILDISGFSKQYNCAFIWQKDGVKKLNLYLIINYFKGGKLRFKKIKPEAFEANRFYTVINKKSGEIVPMEVNFNFDDPNLIILPLAFGKRQGREFIWNDLLSLETGSLKLANGRVIEKTLYNRRTRQDEPALFVALTFERREVLDSSNIKPMNLIGVDRGENIPAVIALTDPEGCPLSRFKDSLGNPTHILRIGESYKEKQRTIQAKKEVEQRRAGGYSRKYASKAKNLADDMVRNTARDLLYYAVTQDAMLIFENLSRGFGRQGKRTFMAERQYTRMEDWLTAKLAYEGLPSKTYLSKTLAQYTSKTCSNCGFTITSADYDRVLEKLKKTATGWMTTINGKELKVEGQITYYNRYKRQNVVKDLSVELDRLSEESVNNDISSWTKGRSGEALSLLKKRFSHRPVQEKFVCLNCGFETHADEQAALNIARSWLFLRSQEYKKYQTNKTTGNTDKRAFVETWQSFYRKKLKEVWKPAV

SEQ ID NO: 40536 - protein, 979 aa, synthetic construct
  REGION 1..979: note = engineered CasX variant
QEIKRINKIRRRLVKDSNTKKAGKTRGPMKTLLVRVMTPDLRERLENLRKKPENIPQPISNTSRANLNKLLTDYTEMKKAILHVYWEEFQKDPVGLMSRVAQPASKKIDQNKLKPEMDEKGNLTTAGFACSQCGQPLFVYKLEQVSEKGKAYTNYFGRCNVAEHEKLILLAQLKPEKDSDEAVTYSLGKFGQRALDFYSIHVTKESTHPVKPLAQIAGNRYASHPVGKALSDACMGTIASFLSKYQDIIIEHQKVVKGNQKRLESLRELAGKENLEYPSVTLPPQPHTKEGVDAYNEVIARVRMWVNLNLWQKLKLSRDDAKPLLRLKGFPSFPLVERQANEVDWWDMVCNVKKLINEKKEDGKVFWQNLAGYKRQEALRPYLSSEEDRKKGKKFARYQLGDLLLHLEKKHGEDWGDVYDEAWERIDKKVEGLSKHIKLEEERRSEDAQSKAALTDWLRAKASFVIEGLKEADKDEFCRCELKLQKWYGDLRGKPFAIEAENSILDISGFSKQYNCAFIWQKDGVKKLNLYLIINYFKGGKLRFKKIKPEAFEANRFYTVINKKSGEIVPMEVNFNFDDPNLIILPLAFGKRQGREFIWNDLLSLETGSLKLANGRVIEKTLYNRRTRQDEPALFVALTFERREVLDSSNIKPMNLIGVDRGENIPAVIALTDPEGCPLSRFKDSLGNPTHILRIGESYKEKQRTIQAKKEVEQRRAGGYSRKYASKAKNLADDMVRNTARDLLYYAVTQDAMLIFENLSRGFGRQGKRTFMAERQYTRMEDWLTAKLAYEGLPSKTYLSKTLAQYTSKTCSNCGFTITSADYDRVLEKLKKTATGWMTTINGKELKVEGQITYYNRYKRQNVVKDLSVELDRLSEESVNNDISSWTKGRSGEALSLLKKRFSHRPVQEKFVCLNCGFETHADEQAALNIARSWLFLRSQEYKKYQTNKTTGNTDKRAFVETWQSFYRKKLKEVWKPAV

SEQ ID NO: 40537 - protein, 979 aa, synthetic construct
  REGION 1..979: note = engineered CasX variant
QEIKRINKIRRRLVKDSNTKKAGKTRGPMKTLLVRVMTPDLRERLENLRKKPENIPQPISNTSRANLNKLLTDYTEMKKAILHVYWEEFQKDPVGLMSRVAQPASKKIDQNKLKPEMDEKGNLTTAGFACSQCGQPLFVYKLEQVSEKGKAYTNYFGRCNVAEHEKLILLAQLKPEKDSDEAVTYSLGKFGQRALDFYSIHVTKESTHPVKPLAQIAGNRYASSPVGKALSDACMGTIASFLSKYQDIIIEHQKVVKGNQKRLESLRELAGKENLEYPSVTLPPQPHTKEGVDAYNEVIARVRMWVNLNLWQKLKLSRDDAKPLLRLKGFPSFPLVERQANEVDWWDMVCNVKKLINEKKEDGKVFWQNLAGYKRQEALRPYLSSEEDRKKGKKFARYQLGDLLLHLEKKHGEDWGDVYDEAWERIDKKVEGLSKHIKLEEERRSEDAQSKAALTDWLRAKASFVIEGLKEADKDEFCRCELKLQKWYGDLRGKPFAIEAENSILDISGFSKQYNCAFIWQKDGVKKLNLYLIINYFKGGKLRFKKIKPEAFEANRFYTVINKKSGEIVPMEVNFNFDDPNLIILPLAFGKRQGREFIWNDLLSLETGSLKLANGRVIEKTLYNRRTRQDEPALFVALTFERREVLDSSNIKPMNLIGVDRGENIPAVIALTDPEGCPLSRFKDSLGNPTHILRIGESYKEKQRTIQAKKEVEQRRAGGYSRKYASKAKNLADDMVRNTARDLLYYAVTQDAMLIFENLSRGFGRQGKRTFMAERQYTRMEDWLTAKLAYEGLPSKTYLSKTLAQYTSKTCSNCGFTITSADYDRVLEKLKKTATGWMTTINGKELKVEGQITYYNRYKRQNVVKDLSVELDRLSEESVNNDISSWTKGRSGEALSLLKKRFSHRPVQEKFVCLNCGFETHADEQAALNIARSWLFLRSQEYKKYQTNKTTGNTDKRAFVETWQSFYRKKLKEVWKPAV

SEQ ID NO: 40538 - protein, 979 aa, synthetic construct
  REGION 1..979: note = engineered CasX variant
QEIKRINKIRRRLVKDSNTKKAGKTRGPMKTLLVRVMTPDLRERLENLRKKPENIPQPISNTSRANLNKLLTDYTEMKKAILHVYWEEFQKDPVGLMSRVAQPASKKIDQNKLKPEMDEKGNLTTAGFACSQCGQPLFVYKLEQVSEKGKAYTNYFGRCNVAEHEKLILLAQLKPEKDSDEAVTYSLGKFGQRALDFYSIHVTKESTHPVKPLAQIAGNRYASTPVGKALSDACMGTIASFLSKYQDIIIEHQKVVKGNQKRLESLRELAGKENLEYPSVTLPPQPHTKEGVDAYNEVIARVRMWVNLNLWQKLKLSRDDAKPLLRLKGFPSFPLVERQANEVDWWDMVCNVKKLINEKKEDGKVFWQNLAGYKRQEALRPYLSSEEDRKKGKKFARYQLGDLLLHLEKKHGEDWGDVYDEAWERIDKKVEGLSKHIKLEEERRSEDAQSKAALTDWLRAKASFVIEGLKEADKDEFCRCELKLQKWYGDLRGKPFAIEAENSILDISGFSKQYNCAFIWQKDGVKKLNLYLIINYFKGGKLRFKKIKPEAFEANRFYTVINKKSGEIVPMEVNFNFDDPNLIILPLAFGKRQGREFIWNDLLSLETGSLKLANGRVIEKTLYNRRTRQDEPALFVALTFERREVLDSSNIKPMNLIGVDRGENIPAVIALTDPEGCPLSRFKDSLGNPTHILRIGESYKEKQRTIQAKKEVEQRRAGGYSRKYASKAKNLADDMVRNTARDLLYYAVTQDAMLIFENLSRGFGRQGKRTFMAERQYTRMEDWLTAKLAYEGLPSKTYLSKTLAQYTSKTCSNCGFTITSADYDRVLEKLKKTATGWMTTINGKELKVEGQITYYNRYKRQNVVKDLSVELDRLSEESVNNDISSWTKGRSGEALSLLKKRFSHRPVQEKFVCLNCGFETHADEQAALNIARSWLFLRSQEYKKYQTNKTTGNTDKRAFVETWQSFYRKKLKEVWKPAV

SEQ ID NO: 40539 - protein, 979 aa, synthetic construct
  REGION 1..979: note = engineered CasX variant
QEIKRINKIRRRLVKDSNTKKAGKTRGPMKTLLVRVMTPDLRERLENLRKKPENIPQPISNTSRANLNKLLTDYTEMKKAILHVYWEEFQKDPVGLMSRVAQPASKKIDQNKLKPEMDEKGNLTTAGFACSQCGQPLFVYKLEQVSEKGKAYTNYFGRCNVAEHEKLILLAQLKPEKDSDEAVTYSLGKFGQRALDFYSIHVTKESTHPVKPLAQIAGNRYASAPVGKALSDACMGTIASFLSKYQDIIIEHQKVVKGNQKRLESLRELAGKENLEYPSVTLPPQPHTKEGVDAYNEVIARVRMWVNLNLWQKLKLSRDDAKPLLRLKGFPSFPLVERQANEVDWWDMVCNVKKLINEKKEDGKVFWQNLAGYKRQEALRPYLSSEEDRKKGKKFARYQLGDLLLHLEKKHGEDWGDVYDEAWERIDKKVEGLSKHIKLEEERRSEDAQSKAALTDWLRAKASFVIEGLKEADKDEFCRCELKLQKWYGDLRGKPFAIEAENSILDISGFSKQYNCAFIWQKDGVKKLNLYLIINYFKGGKLRFKKIKPEAFEANRFYTVINKKSGEIVPMEVNFNFDDPNLIILPLAFGKRQGREFIWNDLLSLETGSLKLANGRVIEKTLYNRRTRQDEPALFVALTFERREVLDSSNIKPMNLIGVDRGENIPAVIALTDPEGCPLSRFKDSLGNPTHILRIGESYKEKQRTIQAKKEVEQRRAGGYSRKYASKAKNLADDMVRNTARDLLYYAVTQDAMLIFENLSRGFGRQGKRTFMAERQYTRMEDWLTAKLAYEGLPSKTYLSKTLAQYTSKTCSNCGFTITSADYDRVLEKLKKTATGWMTTINGKELKVEGQITYYNRYKRQNVVKDLSVELDRLSEESVNNDISSWTKGRSGEALSLLKKRFSHRPVQEKFVCLNCGFETHADEQAALNIARSWLFLRSQEYKKYQTNKTTGNTDKRAFVETWQSFYRKKLKEVWKPAV

SEQ ID NO: 40540 - protein, 979 aa, synthetic construct
  REGION 1..979: note = engineered CasX variant
QEIKRINKIRRRLVKDSNTKKAGKTRGPMKTLLVRVMTPDLRERLENLRKKPENIPQPISNTSRANLNKLLTDYTEMKKAILHVYWEEFQKDPVGLMSRVAQPASKKIDQNKLKPEMDEKGNLTTAGFACSQCGQPLFVYKLEQVSEKGKAYTNYFGRCNVAEHEKLILLAQLKPEKDSDEAVTYSLGKFGQRALDFYSIHVTKESTHPVKPLAQIAGNRYASVPVGKALSDACMGTIASFLSKYQDIIIEHQKVVKGNQKRLESLRELAGKENLEYPSVTLPPQPHTKEGVDAYNEVIARVRMWVNLNLWQKLKLSRDDAKPLLRLKGFPSFPLVERQANEVDWWDMVCNVKKLINEKKEDGKVFWQNLAGYKRQEALRPYLSSEEDRKKGKKFARYQLGDLLLHLEKKHGEDWGDVYDEAWERIDKKVEGLSKHIKLEEERRSEDAQSKAALTDWLRAKASFVIEGLKEADKDEFCRCELKLQKWYGDLRGKPFAIEAENSILDISGFSKQYNCAFIWQKDGVKKLNLYLIINYFKGGKLRFKKIKPEAFEANRFYTVINKKSGEIVPMEVNFNFDDPNLIILPLAFGKRQGREFIWNDLLSLETGSLKLANGRVIEKTLYNRRTRQDEPALFVALTFERREVLDSSNIKPMNLIGVDRGENIPAVIALTDPEGCPLSRFKDSLGNPTHILRIGESYKEKQRTIQAKKEVEQRRAGGYSRKYASKAKNLADDMVRNTARDLLYYAVTQDAMLIFENLSRGFGRQGKRTFMAERQYTRMEDWLTAKLAYEGLPSKTYLSKTLAQYTSKTCSNCGFTITSADYDRVLEKLKKTATGWMTTINGKELKVEGQITYYNRYKRQNVVKDLSVELDRLSEESVNNDISSWTKGRSGEALSLLKKRFSHRPVQEKFVCLNCGFETHADEQAALNIARSWLFLRSQEYKKYQTNKTTGNTDKRAFVETWQSFYRKKLKEVWKPAV

SEQ ID NO: 40541 - protein, 979 aa, synthetic construct
  REGION 1..979: note = engineered CasX variant
QEIKRINKIRRRLVKDSNTKKAGKTRGPMKTLLVRVMTPDLRERLENLRKKPENIPQPISNTSRANLNKLLTDYTEMKKAILHVYWEEFQKDPVGLMSRVAQPASKKIDQNKLKPEMDEKGNLTTAGFACSQCGQPLFVYKLEQVSEKGKAYTNYFGRCNVAEHEKLIKLAQLKPEKDSDEAVTYSLGKFGQRALDFYSIHVTKESTHPVKPLAQIAGNRYASGPVGKALSDACMGTIASFLSKYQDIIIEHQKVVKGNQKRLESLRELAGKENLEYPSVTLPPQPHTKEGVDAYNEVIARVRMWVNLNLWQKLKLSRDDAKPLLRLKGFPSFPLVERQANEVDWWDMVCNVKKLINEKKEDGKVFWQNLAGYKRQEALRPYLSSEEDRKKGKKFARYQLGDLLLHLEKKHGEDWGDVYDEAWERIDKKVEGLSKHIKLEEERRSEDAQSKAALTDWLRAKASFVIEGLKEADKDEFCRCELKLQKWYGDLRGKPFAIEAENSILDISGFSKQYNCAFIWQKDGVKKLNLYLIINYFKGGKLRFKKIKPEAFEANRFYTVINKKSGEIVPMEVNFNFDDPNLIILPLAFGKRQGREFIWNDLLSLETGSLKLANGRVIEKTLYNRRTRQDEPALFVALTFERREVLDSSNIKPMNLIGVDRGENIPAVIALTDPEGCPLSRFKDSLGNPTHILRIGESYKEKQRTIQAKKEVEQRRAGGYSRKYASKAKNLADDMVRNTARDLLYYAVTQDAMLIFENLSRGFGRQGKRTFMAERQYTRMEDWLTAKLAYEGLPSKTYLSKTLAQYTSKTCSNCGFTITSADYDRVLEKLKKTATGWMTTINGKELKVEGQITYYNRYKRQNVVKDLSVELDRLSEESVNNDISSWTKGRSGEALSLLKKRFSHRPVQEKFVCLNCGFETHADEQAALNIARSWLFLRSQEYKKYQTNKTTGNTDKRAFVETWQSFYRKKLKEVWKPAV

SEQ ID NO: 40542 - protein, 978 aa, synthetic construct
  REGION 1..978: note = engineered CasX variant
QEIKRINKIRRRLVKDSNTKKAGKTRGPMKTLLVRVMTPDLRERLENLRKKPENIPQPISNTSRANLNKLLTDYTEMKKAILHVYWEEFQKDPVGLMSRVAQPASKKIDQNKLKPEMDEKGNLTTAGFACSQCGQPLFVYKLEQVSEKGKAYTNYFGRCNVAEHEKLILLAQLKPEKDSDEAVTYSLGKFGQRALDFYSIHVTKESTHPVKPLAQIAGNRYASPVGKALSDACMGTIASFLSKYQDIIIEHQKVVKGNQKRLESLRELAGKENLEYPSVTLPPQPHTKEGVDAYNEVIARVRMWVNLNLWQKLKLSRDDAKPLLRLKGFPSFPLVERQANEVDWWDMVCNVKKLINEKKEDGKVFWQNLAGYKRQEALRPYLSSEEDRKKGKKFARYQLGDLLLHLEKKHGEDWGDVYDEAWERIDKKVEGLSKHIKLEEERRSEDAQSKAALTDWLRAKASFVIEGLKEADKDEFCRCELKLQKWYGDLRGKPFAIEAENSILDISGFSKQYNCAFIWQKDGVKKLNLYLIINYFKGGKLRFKKIKPEAFEANRFYTVINKKSGEIVPMEVNFNFDDPNLIILPLAFGKRQGREFIWNDLLSLETGSLKLANGRVIEKTLYNRRTRQDEPALFVALTFERREVLDSSNIKPMNLIGVDRGENIPAVIALTDPEGCPLSRFKDSLGNPTHILRIGESYKEKQRTIQAKKEVEQRRAGGYSRKYASKAKNLADDMVRNTARDLLYYAVTQDAMLIFENLSRGFGRQGKRTFMAERQYTRMEDWLTAKLAYEGLPSKTYLSKTLAQYTSKTCSNCGFTITSADYDRVLEKLKKTATGWMTTINGKELKVEGQITYYNRYKRQNVVKDLSVELDRLSEESVNNDISSWTKGRSGEALSLLKKRFSHRPVQEKFVCLNCGFETHADEQAALNIARSWLFLRSQEYKKYQTNKTTGNTDKRAFVETWQSFYRKKLKEVWKPAV

SEQ ID NO: 40543 - protein, 979 aa, synthetic construct
  REGION 1..979: note = engineered CasX variant
QEIKRINKIRRRLVKDSNTKKAGKTRGPMKTLLVRVMTPDLRERLENLRKKPENIPQPISNTSRANLNKLLTDYTEMKKAILHVYWEEFQKDPVGLMSRVAQPASKKIDQNKLKPEMDEKGNLTTAGFACSQCGQPLFVYKLEQVSEKGKAYTNYFGRCNVAEHEKLILLAQLKPEKDSDEAVTYSLGKFGQRALDFYSIHVTKESTHPVKPLAQIAGNRYASYPVGKALSDACMGTIASFLSKYQDIIIEHQKVVKGNQKRLESLRELAGKENLEYPSVTLPPQPHTKEGVDAYNEVIARVRMWVNLNLWQKLKLSRDDAKPLLRLKGFPSFPLVERQANEVDWWDMVCNVKKLINEKKEDGKVFWQNLAGYKRQEALRPYLSSEEDRKKGKKFARYQLGDLLLHLEKKHGEDWGKVYGEAWERIDKKVEGLSKHIKLEEERRSEDAQSKAALTDWLRAKASFVIEGLKEADKDEFCRCELKLQKWYGDLRGKPFAIEAENSILDISGFSKQYNCAFIWQKDGVKKLNLYLIINYFKGGKLRFKKIKPEAFEANRFYTVINKKSGEIVPMEVNFNFDDPNLIILPLAFGKRQGREFIWNDLLSLETGSLKLANGRVIEKTLYNRRTRQDEPALFVALTFERREVLDSSNIKPMNLIGVDRGENIPAVIALTDPEGCPLSRFKDSLGNPTHILRIGESYKEKQRTIQAKKEVEQRRAGGYSRKYASKAKNLADDMVRNTARDLLYYAVTQDAMLIFENLSRGFGRQGKRTFMAERQYTRMEDWLTAKLAYEGLPSKTYLSKTLAQYTSKTCSNCGFTITSADYDRVLEKLKKTATGWMTTINGKELKVEGQITYYNRYKRQNVVKDLSVELDRLSEESVNNDISSWTKGRSGEALSLLKKRFSHRPVQEKFVCLNCGFETHADEQAALNIARSWLFLRSQEYKKYQTNKTTGNTDKRAFVETWQSFYRKKLKEVWKPAV

SEQ ID NO: 40544 - protein, 979 aa, synthetic construct
  REGION 1..979: note = engineered CasX variant
QEIKRINKIRRRLVKDSNTKKAGKTRGPMKTLLVRVMTPDLRERLENLRKKPENIPQPISNTSRANLNKLLTDYTEMKKAILHVYWEEFQKDPVGLMSRVAQPASKKIDQNKLKPEMDEKGNLTTAGFACSQCGQPLFVYKLEQVSEKGKAYTNYFGRCNVAEHEKLILLAQLKPEKDSDEAVTYSLGKFGQRALDFYSIHVTKESTHPVKPLAQIAGNRYASHPVGKALSDACMGTIASFLSKYQDIIIEHQKVVKGNQKRLESLRELAGKENLEYPSVTLPPQPHTKEGVDAYNEVIARVRMWVNLNLWQKLKLSRDDAKPLLRLKGFPSFPLVERQANEVDWWDMVCNVKKLINEKKEDGKVFWQNLAGYKRQEALRPYLSSEEDRKKGKKFARYQLGDLLLHLEKKHGEDWGKVYGEAWERIDKKVEGLSKHIKLEEERRSEDAQSKAALTDWLRAKASFVIEGLKEADKDEFCRCELKLQKWYGDLRGKPFAIEAENSILDISGFSKQYNCAFIWQKDGVKKLNLYLIINYFKGGKLRFKKIKPEAFEANRFYTVINKKSGEIVPMEVNFNFDDPNLIILPLAFGKRQGREFIWNDLLSLETGSLKLANGRVIEKTLYNRRTRQDEPALFVALTFERREVLDSSNIKPMNLIGVDRGENIPAVIALTDPEGCPLSRFKDSLGNPTHILRIGESYKEKQRTIQAKKEVEQRRAGGYSRKYASKAKNLADDMVRNTARDLLYYAVTQDAMLIFENLSRGFGRQGKRTFMAERQYTRMEDWLTAKLAYEGLPSKTYLSKTLAQYTSKTCSNCGFTITSADYDRVLEKLKKTATGWMTTINGKELKVEGQITYYNRYKRQNVVKDLSVELDRLSEESVNNDISSWTKGRSGEALSLLKKRFSHRPVQEKFVCLNCGFETHADEQAALNIARSWLFLRSQEYKKYQTNKTTGNTDKRAFVETWQSFYRKKLKEVWKPAV

SEQ ID NO: 40545 - protein, 979 aa, synthetic construct
  REGION 1..979: note = engineered CasX variant
QEIKRINKIRRRLVKDSNTKKAGKTRGPMKTLLVRVMTPDLRERLENLRKKPENIPQPISNTSRANLNKLLTDYTEMKKAILHVYWEEFQKDPVGLMSRVAQPASKKIDQNKLKPEMDEKGNLTTAGFACSQCGQPLFVYKLEQVSEKGKAYTNYFGRCNVAEHEKLILLAQLKPEKDSDEAVTYSLGKFGQRALDFYSIHVTKESTHPVKPLAQIAGNRYASSPVGKALSDACMGTIASFLSKYQDIIIEHQKVVKGNQKRLESLRELAGKENLEYPSVTLPPQPHTKEGVDAYNEVIARVRMWVNLNLWQKLKLSRDDAKPLLRLKGFPSFPLVERQANEVDWWDMVCNVKKLINEKKEDGKVFWQNLAGYKRQEALRPYLSSEEDRKKGKKFARYQLGDLLLHLEKKHGEDWGKVYGEAWERIDKKVEGLSKHIKLEEERRSEDAQSKAALTDWLRAKASFVIEGLKEADKDEFCRCELKLQKWYGDLRGKPFAIEAENSILDISGFSKQYNCAFIWQKDGVKKLNLYLIINYFKGGKLRFKKIKPEAFEANRFYTVINKKSGEIVPMEVNFNFDDPNLIILPLAFGKRQGREFIWNDLLSLETGSLKLANGRVIEKTLYNRRTRQDEPALFVALTFERREVLDSSNIKPMNLIGVDRGENIPAVIALTDPEGCPLSRFKDSLGNPTHILRIGESYKEKQRTIQAKKEVEQRRAGGYSRKYASKAKNLADDMVRNTARDLLYYAVTQDAMLIFENLSRGFGRQGKRTFMAERQYTRMEDWLTAKLAYEGLPSKTYLSKTLAQYTSKTCSNCGFTITSADYDRVLEKLKKTATGWMTTINGKELKVEGQITYYNRYKRQNVVKDLSVELDRLSEESVNNDISSWTKGRSGEALSLLKKRFSHRPVQEKFVCLNCGFETHADEQAALNIARSWLFLRSQEYKKYQTNKTTGNTDKRAFVETWQSFYRKKLKEVWKPAV

SEQ ID NO: 40546 - protein, 979 aa, synthetic construct
  REGION 1..979: note = engineered CasX variant
QEIKRINKIRRRLVKDSNTKKAGKTRGPMKTLLVRVMTPDLRERLENLRKKPENIPQPISNTSRANLNKLLTDYTEMKKAILHVYWEEFQKDPVGLMSRVAQPASKKIDQNKLKPEMDEKGNLTTAGFACSQCGQPLFVYKLEQVSEKGKAYTNYFGRCNVAEHEKLILLAQLKPEKDSDEAVTYSLGKFGQRALDFYSIHVTKESTHPVKPLAQIAGNRYASTPVGKALSDACMGTIASFLSKYQDIIIEHQKVVKGNQKRLESLRELAGKENLEYPSVTLPPQPHTKEGVDAYNEVIARVRMWVNLNLWQKLKLSRDDAKPLLRLKGFPSFPLVERQANEVDWWDMVCNVKKLINEKKEDGKVFWQNLAGYKRQEALRPYLSSEEDRKKGKKFARYQLGDLLLHLEKKHGEDWGKVYGEAWERIDKKVEGLSKHIKLEEERRSEDAQSKAALTDWLRAKASFVIEGLKEADKDEFCRCELKLQKWYGDLRGKPFAIEAENSILDISGFSKQYNCAFIWQKDGVKKLNLYLIINYFKGGKLRFKKIKPEAFEANRFYTVINKKSGEIVPMEVNFNFDDPNLIILPLAFGKRQGREFIWNDLLSLETGSLKLANGRVIEKTLYNRRTRQDEPALFVALTFERREVLDSSNIKPMNLIGVDRGENIPAVIALTDPEGCPLSRFKDSLGNPTHILRIGESYKEKQRTIQAKKEVEQRRAGGYSRKYASKAKNLADDMVRNTARDLLYYAVTQDAMLIFENLSRGFGRQGKRTFMAERQYTRMEDWLTAKLAYEGLPSKTYLSKTLAQYTSKTCSNCGFTITSADYDRVLEKLKKTATGWMTTINGKELKVEGQITYYNRYKRQNVVKDLSVELDRLSEESVNNDISSWTKGRSGEALSLLKKRFSHRPVQEKFVCLNCGFETHADEQAALNIARSWLFLRSQEYKKYQTNKTTGNTDKRAFVETWQSFYRKKLKEVWKPAV

SEQ ID NO: 40547 - protein, 979 aa, synthetic construct
  REGION 1..979: note = engineered CasX variant
QEIKRINKIRRRLVKDSNTKKAGKTRGPMKTLLVRVMTPDLRERLENLRKKPENIPQPISNTSRANLNKLLTDYTEMKKAILHVYWEEFQKDPVGLMSRVAQPASKKIDQNKLKPEMDEKGNLTTAGFACSQCGQPLFVYKLEQVSEKGKAYTNYFGRCNVAEHEKLILLAQLKPEKDSDEAVTYSLGKFGQRALDFYSIHVTKESTHPVKPLAQIAGNRYASAPVGKALSDACMGTIASFLSKYQDIIIEHQKVVKGNQKRLESLRELAGKENLEYPSVTLPPQPHTKEGVDAYNEVIARVRMWVNLNLWQKLKLSRDDAKPLLRLKGFPSFPLVERQANEVDWWDMVCNVKKLINEKKEDGKVFWQNLAGYKRQEALRPYLSSEEDRKKGKKFARYQLGDLLLHLEKKHGEDWGKVYGEAWERIDKKVEGLSKHIKLEEERRSEDAQSKAALTDWLRAKASFVIEGLKEADKDEFCRCELKLQKWYGDLRGKPFAIEAENSILDISGFSKQYNCAFIWQKDGVKKLNLYLIINYFKGGKLRFKKIKPEAFEANRFYTVINKKSGEIVPMEVNFNFDDPNLIILPLAFGKRQGREFIWNDLLSLETGSLKLANGRVIEKTLYNRRTRQDEPALFVALTFERREVLDSSNIKPMNLIGVDRGENIPAVIALTDPEGCPLSRFKDSLGNPTHILRIGESYKEKQRTIQAKKEVEQRRAGGYSRKYASKAKNLADDMVRNTARDLLYYAVTQDAMLIFENLSRGFGRQGKRTFMAERQYTRMEDWLTAKLAYEGLPSKTYLSKTLAQYTSKTCSNCGFTITSADYDRVLEKLKKTATGWMTTINGKELKVEGQITYYNRYKRQNVVKDLSVELDRLSEESVNNDISSWTKGRSGEALSLLKKRFSHRPVQEKFVCLNCGFETHADEQAALNIARSWLFLRSQEYKKYQTNKTTGNTDKRAFVETWQSFYRKKLKEVWKPAV

SEQ ID NO: 40548 - protein, 979 aa, synthetic construct
  REGION 1..979: note = engineered CasX variant
QEIKRINKIRRRLVKDSNTKKAGKTRGPMKTLLVRVMTPDLRERLENLRKKPENIPQPISNTSRANLNKLLTDYTEMKKAILHVYWEEFQKDPVGLMSRVAQPASKKIDQNKLKPEMDEKGNLTTAGFACSQCGQPLFVYKLEQVSEKGKAYTNYFGRCNVAEHEKLILLAQLKPEKDSDEAVTYSLGKFGQRALDFYSIHVTKESTHPVKPLAQIAGNRYASVPVGKALSDACMGTIASFLSKYQDIIIEHQKVVKGNQKRLESLRELAGKENLEYPSVTLPPQPHTKEGVDAYNEVIARVRMWVNLNLWQKLKLSRDDAKPLLRLKGFPSFPLVERQANEVDWWDMVCNVKKLINEKKEDGKVFWQNLAGYKRQEALRPYLSSEEDRKKGKKFARYQLGDLLLHLEKKHGEDWGKVYGEAWERIDKKVEGLSKHIKLEEERRSEDAQSKAALTDWLRAKASFVIEGLKEADKDEFCRCELKLQKWYGDLRGKPFAIEAENSILDISGFSKQYNCAFIWQKDGVKKLNLYLIINYFKGGKLRFKKIKPEAFEANRFYTVINKKSGEIVPMEVNFNFDDPNLIILPLAFGKRQGREFIWNDLLSLETGSLKLANGRVIEKTLYNRRTRQDEPALFVALTFERREVLDSSNIKPMNLIGVDRGENIPAVIALTDPEGCPLSRFKDSLGNPTHILRIGESYKEKQRTIQAKKEVEQRRAGGYSRKYASKAKNLADDMVRNTARDLLYYAVTQDAMLIFENLSRGFGRQGKRTFMAERQYTRMEDWLTAKLAYEGLPSKTYLSKTLAQYTSKTCSNCGFTITSADYDRVLEKLKKTATGWMTTINGKELKVEGQITYYNRYKRQNVVKDLSVELDRLSEESVNNDISSWTKGRSGEALSLLKKRFSHRPVQEKFVCLNCGFETHADEQAALNIARSWLFLRSQEYKKYQTNKTTGNTDKRAFVETWQSFYRKKLKEVWKPAV

SEQ ID NO: 40549 - protein, 979 aa, synthetic construct
  REGION 1..979: note = engineered CasX variant
QEIKRINKIRRRLVKDSNTKKAGKTRGPMKTLLVRVMTPDLRERLENLRKKPENIPQPISNTSRANLNKLLTDYTEMKKAILHVYWEEFQKDPVGLMSRVAQPASKKIDQNKLKPEMDEKGNLTTAGFACSQCGQPLFVYKLEQVSEKGKAYTNYFGRCNVAEHEKLIKLAQLKPEKDSDEAVTYSLGKFGQRALDFYSIHVTKESTHPVKPLAQIAGNRYASGPVGKALSDACMGTIASFLSKYQDIIIEHQKVVKGNQKRLESLRELAGKENLEYPSVTLPPQPHTKEGVDAYNEVIARVRMWVNLNLWQKLKLSRDDAKPLLRLKGFPSFPLVERQANEVDWWDMVCNVKKLINEKKEDGKVFWQNLAGYKRQEALRPYLSSEEDRKKGKKFARYQLGDLLLHLEKKHGEDWGKVYGEAWERIDKKVEGLSKHIKLEEERRSEDAQSKAALTDWLRAKASFVIEGLKEADKDEFCRCELKLQKWYGDLRGKPFAIEAENSILDISGFSKQYNCAFIWQKDGVKKLNLYLIINYFKGGKLRFKKIKPEAFEANRFYTVINKKSGEIVPMEVNFNFDDPNLIILPLAFGKRQGREFIWNDLLSLETGSLKLANGRVIEKTLYNRRTRQDEPALFVALTFERREVLDSSNIKPMNLIGVDRGENIPAVIALTDPEGCPLSRFKDSLGNPTHILRIGESYKEKQRTIQAKKEVEQRRAGGYSRKYASKAKNLADDMVRNTARDLLYYAVTQDAMLIFENLSRGFGRQGKRTFMAERQYTRMEDWLTAKLAYEGLPSKTYLSKTLAQYTSKTCSNCGFTITSADYDRVLEKLKKTATGWMTTINGKELKVEGQITYYNRYKRQNVVKDLSVELDRLSEESVNNDISSWTKGRSGEALSLLKKRFSHRPVQEKFVCLNCGFETHADEQAALNIARSWLFLRSQEYKKYQTNKTTGNTDKRAFVETWQSFYRKKLKEVWKPAV

SEQ ID NO: 40550 - protein, 978 aa, synthetic construct
  REGION 1..978: note = engineered CasX variant
QEIKRINKIRRRLVKDSNTKKAGKTRGPMKTLLVRVMTPDLRERLENLRKKPENIPQPISNTSRANLNKLLTDYTEMKKAILHVYWEEFQKDPVGLMSRVAQPASKKIDQNKLKPEMDEKGNLTTAGFACSQCGQPLFVYKLEQVSEKGKAYTNYFGRCNVAEHEKLILLAQLKPEKDSDEAVTYSLGKFGQRALDFYSIHVTKESTHPVKPLAQIAGNRYASPVGKALSDACMGTIASFLSKYQDIIIEHQKVVKGNQKRLESLRELAGKENLEYPSVTLPPQPHTKEGVDAYNEVIARVRMWVNLNLWQKLKLSRDDAKPLLRLKGFPSFPLVERQANEVDWWDMVCNVKKLINEKKEDGKVFWQNLAGYKRQEALRPYLSSEEDRKKGKKFARYQLGDLLLHLEKKHGEDWGKVYGEAWERIDKKVEGLSKHIKLEEERRSEDAQSKAALTDWLRAKASFVIEGLKEADKDEFCRCELKLQKWYGDLRGKPFAIEAENSILDISGFSKQYNCAFIWQKDGVKKLNLYLIINYFKGGKLRFKKIKPEAFEANRFYTVINKKSGEIVPMEVNFNFDDPNLIILPLAFGKRQGREFIWNDLLSLETGSLKLANGRVIEKTLYNRRTRQDEPALFVALTFERREVLDSSNIKPMNLIGVDRGENIPAVIALTDPEGCPLSRFKDSLGNPTHILRIGESYKEKQRTIQAKKEVEQRRAGGYSRKYASKAKNLADDMVRNTARDLLYYAVTQDAMLIFENLSRGFGRQGKRTFMAERQYTRMEDWLTAKLAYEGLPSKTYLSKTLAQYTSKTCSNCGFTITSADYDRVLEKLKKTATGWMTTINGKELKVEGQITYYNRYKRQNVVKDLSVELDRLSEESVNNDISSWTKGRSGEALSLLKKRFSHRPVQEKFVCLNCGFETHADEQAALNIARSWLFLRSQEYKKYQTNKTTGNTDKRAFVETWQSFYRKKLKEVWKPAV

SEQ ID NO: 40551 - protein, 979 aa, synthetic construct
  REGION 1..979: note = engineered CasX variant
QEIKRINKIRRRLVKDSNTKKAGKTRGPMKTLLVRVMTPDLRERLENLRKKPENIPQPISNTSRANLNKLLTDYTEMKKAILHVYWEEFQKDPVGLMSRVAQPASKKIDQNKLKPEMDEKGNLTTAGFACSQCGQPLFVYKLEQVSEKGKAYTNYFGRCNVAEHEKLILLAQLKPEKDSDEAVTYSLGKFGQRALDFYSIHVTKESTHPVKPLAQIAGNRYASYPVGKALSDACMGTIASFLSKYQDIIIEHQKVVKGNQKRLESLRELAGKENLEYPSVTLPPQPHTKEGVDAYNEVIARVRMWVNLNLWQKLKLSRDDAKPLLRLKGFPSFPLVERQANEVDWWDMVCNVKKLINEKKEDGKVFWQNLAGYKRQEALRPYLSSEEDRKKGKKFARYQLGDLLLHLEKKHGEDWGKVYDEAWERIDKKVEGLSKHIKLEEERRSEDAQSKAALTDWLRAKASFVIEGKKEADKDEFCRCELKLQKWYGDLRGKPFAIEAENSILDISGFSKQYNCAFIWQKDGVKKLNLYLIINYFKGGKLRFKKIKPEAFEANRFYTVINKKSGEIVPMEVNFNFDDPNLIILPLAFGKRQGREFIWNDLLSLETGSLKLANGRVIEKTLYNRRTRQDEPALFVALTFERREVLDSSNIKPMNLIGVDRGENIPAVIALTDPEGCPLSRFKDSLGNPTHILRIGESYKEKQRTIQAKKEVEQRRAGGYSRKYASKAKNLADDMVRNTARDLLYYAVTQDAMLIFENLSRGFGRQGKRTFMAERQYTRMEDWLTAKLAYEGLPSKTYLSKTLAQYTSKTCSNCGFTITSADYDRVLEKLKKTATGWMTTINGKELKVEGQITYYNRYKRQNVVKDLSVELDRLSEESVNNDISSWTKGRSGEALSLLKKRFSHRPVQEKFVCLNCGFETHADEQAALNIARSWLFLRSQEYKKYQTNKTTGNTDKRAFVETWQSFYRKKLKEVWKPAV

SEQ ID NO: 40552 - protein, 979 aa, synthetic construct
  REGION 1..979: note = engineered CasX variant
QEIKRINKIRRRLVKDSNTKKAGKTRGPMKTLLVRVMTPDLRERLENLRKKPENIPQPISNTSRANLNKLLTDYTEMKKAILHVYWEEFQKDPVGLMSRVAQPASKKIDQNKLKPEMDEKGNLTTAGFACSQCGQPLFVYKLEQVSEKGKAYTNYFGRCNVAEHEKLILLAQLKPEKDSDEAVTYSLGKFGQRALDFYSIHVTKESTHPVKPLAQIAGNRYASHPVGKALSDACMGTIASFLSKYQDIIIEHQKVVKGNQKRLESLRELAGKENLEYPSVTLPPQPHTKEGVDAYNEVIARVRMWVNLNLWQKLKLSRDDAKPLLRLKGFPSFPLVERQANEVDWWDMVCNVKKLINEKKEDGKVFWQNLAGYKRQEALRPYLSSEEDRKKGKKFARYQLGDLLLHLEKKHGEDWGKVYDEAWERIDKKVEGLSKHIKLEEERRSEDAQSKAALTDWLRAKASFVIEGKKEADKDEFCRCELKLQKWYGDLRGKPFAIEAENSILDISGFSKQYNCAFIWQKDGVKKLNLYLIINYFKGGKLRFKKIKPEAFEANRFYTVINKKSGEIVPMEVNFNFDDPNLIILPLAFGKRQGREFIWNDLLSLETGSLKLANGRVIEKTLYNRRTRQDEPALFVALTFERREVLDSSNIKPMNLIGVDRGENIPAVIALTDPEGCPLSRFKDSLGNPTHILRIGESYKEKQRTIQAKKEVEQRRAGGYSRKYASKAKNLADDMVRNTARDLLYYAVTQDAMLIFENLSRGFGRQGKRTFMAERQYTRMEDWLTAKLAYEGLPSKTYLSKTLAQYTSKTCSNCGFTITSADYDRVLEKLKKTATGWMTTINGKELKVEGQITYYNRYKRQNVVKDLSVELDRLSEESVNNDISSWTKGRSGEALSLLKKRFSHRPVQEKFVCLNCGFETHADEQAALNIARSWLFLRSQEYKKYQTNKTTGNTDKRAFVETWQSFYRKKLKEVWKPAV

SEQ ID NO: 40553 - protein, 979 aa, synthetic construct
  REGION 1..979: note = engineered CasX variant
QEIKRINKIRRRLVKDSNTKKAGKTRGPMKTLLVRVMTPDLRERLENLRKKPENIPQPISNTSRANLNKLLTDYTEMKKAILHVYWEEFQKDPVGLMSRVAQPASKKIDQNKLKPEMDEKGNLTTAGFACSQCGQPLFVYKLEQVSEKGKAYTNYFGRCNVAEHEKLILLAQLKPEKDSDEAVTYSLGKFGQRALDFYSIHVTKESTHPVKPLAQIAGNRYASSPVGKALSDACMGTIASFLSKYQDIIIEHQKVVKGNQKRLESLRELAGKENLEYPSVTLPPQPHTKEGVDAYNEVIARVRMWVNLNLWQKLKLSRDDAKPLLRLKGFPSFPLVERQANEVDWWDMVCNVKKLINEKKEDGKVFWQNLAGYKRQEALRPYLSSEEDRKKGKKFARYQLGDLLLHLEKKHGEDWGKVYDEAWERIDKKVEGLSKHIKLEEERRSEDAQSKAALTDWLRAKASFVIEGKKEADKDEFCRCELKLQKWYGDLRGKPFAIEAENSILDISGFSKQYNCAFIWQKDGVKKLNLYLIINYFKGGKLRFKKIKPEAFEANRFYTVINKKSGEIVPMEVNFNFDDPNLIILPLAFGKRQGREFIWNDLLSLETGSLKLANGRVIEKTLYNRRTRQDEPALFVALTFERREVLDSSNIKPMNLIGVDRGENIPAVIALTDPEGCPLSRFKDSLGNPTHILRIGESYKEKQRTIQAKKEVEQRRAGGYSRKYASKAKNLADDMVRNTARDLLYYAVTQDAMLIFENLSRGFGRQGKRTFMAERQYTRMEDWLTAKLAYEGLPSKTYLSKTLAQYTSKTCSNCGFTITSADYDRVLEKLKKTATGWMTTINGKELKVEGQITYYNRYKRQNVVKDLSVELDRLSEESVNNDISSWTKGRSGEALSLLKKRFSHRPVQEKFVCLNCGFETHADEQAALNIARSWLFLRSQEYKKYQTNKTTGNTDKRAFVETWQSFYRKKLKEVWKPAV

SEQ ID NO: 40554 - protein, 979 aa, synthetic construct
  REGION 1..979: note = engineered CasX variant
QEIKRINKIRRRLVKDSNTKKAGKTRGPMKTLLVRVMTPDLRERLENLRKKPENIPQPISNTSRANLNKLLTDYTEMKKAILHVYWEEFQKDPVGLMSRVAQPASKKIDQNKLKPEMDEKGNLTTAGFACSQCGQPLFVYKLEQVSEKGKAYTNYFGRCNVAEHEKLILLAQLKPEKDSDEAVTYSLGKFGQRALDFYSIHVTKESTHPVKPLAQIAGNRYASTPVGKALSDACMGTIASFLSKYQDIIIEHQKVVKGNQKRLESLRELAGKENLEYPSVTLPPQPHTKEGVDAYNEVIARVRMWVNLNLWQKLKLSRDDAKPLLRLKGFPSFPLVERQANEVDWWDMVCNVKKLINEKKEDGKVFWQNLAGYKRQEALRPYLSSEEDRKKGKKFARYQLGDLLLHLEKKHGEDWGKVYDEAWERIDKKVEGLSKHIKLEEERRSEDAQSKAALTDWLRAKASFVIEGKKEADKDEFCRCELKLQKWYGDLRGKPFAIEAENSILDISGFSKQYNCAFIWQKDGVKKLNLYLIINYFKGGKLRFKKIKPEAFEANRFYTVINKKSGEIVPMEVNFNFDDPNLIILPLAFGKRQGREFIWNDLLSLETGSLKLANGRVIEKTLYNRRTRQDEPALFVALTFERREVLDSSNIKPMNLIGVDRGENIPAVIALTDPEGCPLSRFKDSLGNPTHILRIGESYKEKQRTIQAKKEVEQRRAGGYSRKYASKAKNLADDMVRNTARDLLYYAVTQDAMLIFENLSRGFGRQGKRTFMAERQYTRMEDWLTAKLAYEGLPSKTYLSKTLAQYTSKTCSNCGFTITSADYDRVLEKLKKTATGWMTTINGKELKVEGQITYYNRYKRQNVVKDLSVELDRLSEESVNNDISSWTKGRSGEALSLLKKRFSHRPVQEKFVCLNCGFETHADEQAALNIARSWLFLRSQEYKKYQTNKTTGNTDKRAFVETWQSFYRKKLKEVWKPAV

SEQ ID NO: 40555 - protein, 979 aa, synthetic construct
  REGION 1..979: note = engineered CasX variant
QEIKRINKIRRRLVKDSNTKKAGKTRGPMKTLLVRVMTPDLRERLENLRKKPENIPQPISNTSRANLNKLLTDYTEMKKAILHVYWEEFQKDPVGLMSRVAQPASKKIDQNKLKPEMDEKGNLTTAGFACSQCGQPLFVYKLEQVSEKGKAYTNYFGRCNVAEHEKLILLAQLKPEKDSDEAVTYSLGKFGQRALDFYSIHVTKESTHPVKPLAQIAGNRYASAPVGKALSDACMGTIASFLSKYQDIIIEHQKVVKGNQKRLESLRELAGKENLEYPSVTLPPQPHTKEGVDAYNEVIARVRMWVNLNLWQKLKLSRDDAKPLLRLKGFPSFPLVERQANEVDWWDMVCNVKKLINEKKEDGKVFWQNLAGYKRQEALRPYLSSEEDRKKGKKFARYQLGDLLLHLEKKHGEDWGKVYDEAWERIDKKVEGLSKHIKLEEERRSEDAQSKAALTDWLRAKASFVIEGKKEADKDEFCRCELKLQKWYGDLRGKPFAIEAENSILDISGFSKQYNCAFIWQKDGVKKLNLYLIINYFKGGKLRFKKIKPEAFEANRFYTVINKKSGEIVPMEVNFNFDDPNLIILPLAFGKRQGREFIWNDLLSLETGSLKLANGRVIEKTLYNRRTRQDEPALFVALTFERREVLDSSNIKPMNLIGVDRGENIPAVIALTDPEGCPLSRFKDSLGNPTHILRIGESYKEKQRTIQAKKEVEQRRAGGYSRKYASKAKNLADDMVRNTARDLLYYAVTQDAMLIFENLSRGFGRQGKRTFMAERQYTRMEDWLTAKLAYEGLPSKTYLSKTLAQYTSKTCSNCGFTITSADYDRVLEKLKKTATGWMTTINGKELKVEGQITYYNRYKRQNVVKDLSVELDRLSEESVNNDISSWTKGRSGEALSLLKKRFSHRPVQEKFVCLNCGFETHADEQAALNIARSWLFLRSQEYKKYQTNKTTGNTDKRAFVETWQSFYRKKLKEVWKPAV

SEQ ID NO: 40556 - protein, 979 aa, synthetic construct
  REGION 1..979: note = engineered CasX variant
QEIKRINKIRRRLVKDSNTKKAGKTRGPMKTLLVRVMTPDLRERLENLRKKPENIPQPISNTSRANLNKLLTDYTEMKKAILHVYWEEFQKDPVGLMSRVAQPASKKIDQNKLKPEMDEKGNLTTAGFACSQCGQPLFVYKLEQVSEKGKAYTNYFGRCNVAEHEKLILLAQLKPEKDSDEAVTYSLGKFGQRALDFYSIHVTKESTHPVKPLAQIAGNRYASVPVGKALSDACMGTIASFLSKYQDIIIEHQKVVKGNQKRLESLRELAGKENLEYPSVTLPPQPHTKEGVDAYNEVIARVRMWVNLNLWQKLKLSRDDAKPLLRLKGFPSFPLVERQANEVDWWDMVCNVKKLINEKKEDGKVFWQNLAGYKRQEALRPYLSSEEDRKKGKKFARYQLGDLLLHLEKKHGEDWGKVYDEAWERIDKKVEGLSKHIKLEEERRSEDAQSKAALTDWLRAKASFVIEGKKEADKDEFCRCELKLQKWYGDLRGKPFAIEAENSILDISGFSKQYNCAFIWQKDGVKKLNLYLIINYFKGGKLRFKKIKPEAFEANRFYTVINKKSGEIVPMEVNFNFDDPNLIILPLAFGKRQGREFIWNDLLSLETGSLKLANGRVIEKTLYNRRTRQDEPALFVALTFERREVLDSSNIKPMNLIGVDRGENIPAVIALTDPEGCPLSRFKDSLGNPTHILRIGESYKEKQRTIQAKKEVEQRRAGGYSRKYASKAKNLADDMVRNTARDLLYYAVTQDAMLIFENLSRGFGRQGKRTFMAERQYTRMEDWLTAKLAYEGLPSKTYLSKTLAQYTSKTCSNCGFTITSADYDRVLEKLKKTATGWMTTINGKELKVEGQITYYNRYKRQNVVKDLSVELDRLSEESVNNDISSWTKGRSGEALSLLKKRFSHRPVQEKFVCLNCGFETHADEQAALNIARSWLFLRSQEYKKYQTNKTTGNTDKRAFVETWQSFYRKKLKEVWKPAV

SEQ ID NO: 40557 - protein, 979 aa, synthetic construct
  REGION 1..979: note = engineered CasX variant
QEIKRINKIRRRLVKDSNTKKAGKTRGPMKTLLVRVMTPDLRERLENLRKKPENIPQPISNTSRANLNKLLTDYTEMKKAILHVYWEEFQKDPVGLMSRVAQPASKKIDQNKLKPEMDEKGNLTTAGFACSQCGQPLFVYKLEQVSEKGKAYTNYFGRCNVAEHEKLIKLAQLKPEKDSDEAVTYSLGKFGQRALDFYSIHVTKESTHPVKPLAQIAGNRYASGPVGKALSDACMGTIASFLSKYQDIIIEHQKVVKGNQKRLESLRELAGKENLEYPSVTLPPQPHTKEGVDAYNEVIARVRMWVNLNLWQKLKLSRDDAKPLLRLKGFPSFPLVERQANEVDWWDMVCNVKKLINEKKEDGKVFWQNLAGYKRQEALRPYLSSEEDRKKGKKFARYQLGDLLLHLEKKHGEDWGKVYDEAWERIDKKVEGLSKHIKLEEERRSEDAQSKAALTDWLRAKASFVIEGKKEADKDEFCRCELKLQKWYGDLRGKPFAIEAENSILDISGFSKQYNCAFIWQKDGVKKLNLYLIINYFKGGKLRFKKIKPEAFEANRFYTVINKKSGEIVPMEVNFNFDDPNLIILPLAFGKRQGREFIWNDLLSLETGSLKLANGRVIEKTLYNRRTRQDEPALFVALTFERREVLDSSNIKPMNLIGVDRGENIPAVIALTDPEGCPLSRFKDSLGNPTHILRIGESYKEKQRTIQAKKEVEQRRAGGYSRKYASKAKNLADDMVRNTARDLLYYAVTQDAMLIFENLSRGFGRQGKRTFMAERQYTRMEDWLTAKLAYEGLPSKTYLSKTLAQYTSKTCSNCGFTITSADYDRVLEKLKKTATGWMTTINGKELKVEGQITYYNRYKRQNVVKDLSVELDRLSEESVNNDISSWTKGRSGEALSLLKKRFSHRPVQEKFVCLNCGFETHADEQAALNIARSWLFLRSQEYKKYQTNKTTGNTDKRAFVETWQSFYRKKLKEVWKPAV

SEQ ID NO: 40558 - protein, 978 aa, synthetic construct
  REGION 1..978: note = engineered CasX variant
QEIKRINKIRRRLVKDSNTKKAGKTRGPMKTLLVRVMTPDLRERLENLRKKPENIPQPISNTSRANLNKLLTDYTEMKKAILHVYWEEFQKDPVGLMSRVAQPASKKIDQNKLKPEMDEKGNLTTAGFACSQCGQPLFVYKLEQVSEKGKAYTNYFGRCNVAEHEKLILLAQLKPEKDSDEAVTYSLGKFGQRALDFYSIHVTKESTHPVKPLAQIAGNRYASPVGKALSDACMGTIASFLSKYQDIIIEHQKVVKGNQKRLESLRELAGKENLEYPSVTLPPQPHTKEGVDAYNEVIARVRMWVNLNLWQKLKLSRDDAKPLLRLKGFPSFPLVERQANEVDWWDMVCNVKKLINEKKEDGKVFWQNLAGYKRQEALRPYLSSEEDRKKGKKFARYQLGDLLLHLEKKHGEDWGKVYDEAWERIDKKVEGLSKHIKLEEERRSEDAQSKAALTDWLRAKASFVIEGKKEADKDEFCRCELKLQKWYGDLRGKPFAIEAENSILDISGFSKQYNCAFIWQKDGVKKLNLYLIINYFKGGKLRFKKIKPEAFEANRFYTVINKKSGEIVPMEVNFNFDDPNLIILPLAFGKRQGREFIWNDLLSLETGSLKLANGRVIEKTLYNRRTRQDEPALFVALTFERREVLDSSNIKPMNLIGVDRGENIPAVIALTDPEGCPLSRFKDSLGNPTHILRIGESYKEKQRTIQAKKEVEQRRAGGYSRKYASKAKNLADDMVRNTARDLLYYAVTQDAMLIFENLSRGFGRQGKRTFMAERQYTRMEDWLTAKLAYEGLPSKTYLSKTLAQYTSKTCSNCGFTITSADYDRVLEKLKKTATGWMTTINGKELKVEGQITYYNRYKRQNVVKDLSVELDRLSEESVNNDISSWTKGRSGEALSLLKKRFSHRPVQEKFVCLNCGFETHADEQAALNIARSWLFLRSQEYKKYQTNKTTGNTDKRAFVETWQSFYRKKLKEVWKPAV

SEQ ID NO: 40559 - protein, 979 aa, synthetic construct
  REGION 1..979: note = engineered CasX variant
QEIKRINKIRRRLVKDSNTKKAGKTRGPMKTLLVRVMTPDLRERLENLRKKPENIPQPISNTSRANLNKLLTDYTEMKKAILHVYWEEFQKDPVGLMSRVAQPASKKIDQNKLKPEMDEKGNLTTAGFACSQCGQPLFVYKLEQVSEKGKAYTNYFGRCNVAEHEKLILLAQLKPEKDSDEAVTYSLGKFGQRALDFYSIHVTKESTHPVKPLAQIAGNRYASYPVGKALSDACMGTIASFLSKYQDIIIEHQKVVKGNQKRLESLRELAGKENLEYPSVTLPPQPHTKEGVDAYNEVIARVRMWVNLNLWQKLKLSRDDAKPLLRLKGFPSFPLVERQANEVDWWDMVCNVKKLINEKKEDGKVFWQNLAGYKRQEALRPYLSSEEDRKKGKKFARYQLGDLLLHLEKKHGEDWGKVYDEAWERIDKKVEGLSKHIKLEEERRSEDAQSKAALTDWLRAKASFVIEGSKEADKDEFCRCELKLQKWYGDLRGKPFAIEAENSILDISGFSKQYNCAFIWQKDGVKKLNLYLIINYFKGGKLRFKKIKPEAFEANRFYTVINKKSGEIVPMEVNFNFDDPNLIILPLAFGKRQGREFIWNDLLSLETGSLKLANGRVIEKTLYNRRTRQDEPALFVALTFERREVLDSSNIKPMNLIGVDRGENIPAVIALTDPEGCPLSRFKDSLGNPTHILRIGESYKEKQRTIQAKKEVEQRRAGGYSRKYASKAKNLADDMVRNTARDLLYYAVTQDAMLIFENLSRGFGRQGKRTFMAERQYTRMEDWLTAKLAYEGLPSKTYLSKTLAQYTSKTCSNCGFTITSADYDRVLEKLKKTATGWMTTINGKELKVEGQITYYNRYKRQNVVKDLSVELDRLSEESVNNDISSWTKGRSGEALSLLKKRFSHRPVQEKFVCLNCGFETHADEQAALNIARSWLFLRSQEYKKYQTNKTTGNTDKRAFVETWQSFYRKKLKEVWKPAV

SEQ ID NO: 40560 - protein, 979 aa, synthetic construct
  REGION 1..979: note = engineered CasX variant
QEIKRINKIRRRLVKDSNTKKAGKTRGPMKTLLVRVMTPDLRERLENLRKKPENIPQPISNTSRANLNKLLTDYTEMKKAILHVYWEEFQKDPVGLMSRVAQPASKKIDQNKLKPEMDEKGNLTTAGFACSQCGQPLFVYKLEQVSEKGKAYTNYFGRCNVAEHEKLILLAQLKPEKDSDEAVTYSLGKFGQRALDFYSIHVTKESTHPVKPLAQIAGNRYASHPVGKALSDACMGTIASFLSKYQDIIIEHQKVVKGNQKRLESLRELAGKENLEYPSVTLPPQPHTKEGVDAYNEVIARVRMWVNLNLWQKLKLSRDDAKPLLRLKGFPSFPLVERQANEVDWWDMVCNVKKLINEKKEDGKVFWQNLAGYKRQEALRPYLSSEEDRKKGKKFARYQLGDLLLHLEKKHGEDWGKVYDEAWERIDKKVEGLSKHIKLEEERRSEDAQSKAALTDWLRAKASFVIEGSKEADKDEFCRCELKLQKWYGDLRGKPFAIEAENSILDISGFSKQYNCAFIWQKDGVKKLNLYLIINYFKGGKLRFKKIKPEAFEANRFYTVINKKSGEIVPMEVNFNFDDPNLIILPLAFGKRQGREFIWNDLLSLETGSLKLANGRVIEKTLYNRRTRQDEPALFVALTFERREVLDSSNIKPMNLIGVDRGENIPAVIALTDPEGCPLSRFKDSLGNPTHILRIGESYKEKQRTIQAKKEVEQRRAGGYSRKYASKAKNLADDMVRNTARDLLYYAVTQDAMLIFENLSRGFGRQGKRTFMAERQYTRMEDWLTAKLAYEGLPSKTYLSKTLAQYTSKTCSNCGFTITSADYDRVLEKLKKTATGWMTTINGKELKVEGQITYYNRYKRQNVVKDLSVELDRLSEESVNNDISSWTKGRSGEALSLLKKRFSHRPVQEKFVCLNCGFETHADEQAALNIARSWLFLRSQEYKKYQTNKTTGNTDKRAFVETWQSFYRKKLKEVWKPAV

SEQ ID NO: 40561 - protein, 979 aa, synthetic construct
  REGION 1..979: note = engineered CasX variant
QEIKRINKIRRRLVKDSNTKKAGKTRGPMKTLLVRVMTPDLRERLENLRKKPENIPQPISNTSRANLNKLLTDYTEMKKAILHVYWEEFQKDPVGLMSRVAQPASKKIDQNKLKPEMDEKGNLTTAGFACSQCGQPLFVYKLEQVSEKGKAYTNYFGRCNVAEHEKLILLAQLKPEKDSDEAVTYSLGKFGQRALDFYSIHVTKESTHPVKPLAQIAGNRYASSPVGKALSDACMGTIASFLSKYQDIIIEHQKVVKGNQKRLESLRELAGKENLEYPSVTLPPQPHTKEGVDAYNEVIARVRMWVNLNLWQKLKLSRDDAKPLLRLKGFPSFPLVERQANEVDWWDMVCNVKKLINEKKEDGKVFWQNLAGYKRQEALRPYLSSEEDRKKGKKFARYQLGDLLLHLEKKHGEDWGKVYDEAWERIDKKVEGLSKHIKLEEERRSEDAQSKAALTDWLRAKASFVIEGSKEADKDEFCRCELKLQKWYGDLRGKPFAIEAENSILDISGFSKQYNCAFIWQKDGVKKLNLYLIINYFKGGKLRFKKIKPEAFEANRFYTVINKKSGEIVPMEVNFNFDDPNLIILPLAFGKRQGREFIWNDLLSLETGSLKLANGRVIEKTLYNRRTRQDEPALFVALTFERREVLDSSNIKPMNLIGVDRGENIPAVIALTDPEGCPLSRFKDSLGNPTHILRIGESYKEKQRTIQAKKEVEQRRAGGYSRKYASKAKNLADDMVRNTARDLLYYAVTQDAMLIFENLSRGFGRQGKRTFMAERQYTRMEDWLTAKLAYEGLPSKTYLSKTLAQYTSKTCSNCGFTITSADYDRVLEKLKKTATGWMTTINGKELKVEGQITYYNRYKRQNVVKDLSVELDRLSEESVNNDISSWTKGRSGEALSLLKKRFSHRPVQEKFVCLNCGFETHADEQAALNIARSWLFLRSQEYKKYQTNKTTGNTDKRAFVETWQSFYRKKLKEVWKPAV

SEQ ID NO: 40562 - protein, 979 aa, synthetic construct
  REGION 1..979: note = engineered CasX variant
QEIKRINKIRRRLVKDSNTKKAGKTRGPMKTLLVRVMTPDLRERLENLRKKPENIPQPISNTSRANLNKLLTDYTEMKKAILHVYWEEFQKDPVGLMSRVAQPASKKIDQNKLKPEMDEKGNLTTAGFACSQCGQPLFVYKLEQVSEKGKAYTNYFGRCNVAEHEKLILLAQLKPEKDSDEAVTYSLGKFGQRALDFYSIHVTKESTHPVKPLAQIAGNRYASTPVGKALSDACMGTIASFLSKYQDIIIEHQKVVKGNQKRLESLRELAGKENLEYPSVTLPPQPHTKEGVDAYNEVIARVRMWVNLNLWQKLKLSRDDAKPLLRLKGFPSFPLVERQANEVDWWDMVCNVKKLINEKKEDGKVFWQNLAGYKRQEALRPYLSSEEDRKKGKKFARYQLGDLLLHLEKKHGEDWGKVYDEAWERIDKKVEGLSKHIKLEEERRSEDAQSKAALTDWLRAKASFVIEGSKEADKDEFCRCELKLQKWYGDLRGKPFAIEAENSILDISGFSKQYNCAFIWQKDGVKKLNLYLIINYFKGGKLRFKKIKPEAFEANRFYTVINKKSGEIVPMEVNFNFDDPNLIILPLAFGKRQGREFIWNDLLSLETGSLKLANGRVIEKTLYNRRTRQDEPALFVALTFERREVLDSSNIKPMNLIGVDRGENIPAVIALTDPEGCPLSRFKDSLGNPTHILRIGESYKEKQRTIQAKKEVEQRRAGGYSRKYASKAKNLADDMVRNTARDLLYYAVTQDAMLIFENLSRGFGRQGKRTFMAERQYTRMEDWLTAKLAYEGLPSKTYLSKTLAQYTSKTCSNCGFTITSADYDRVLEKLKKTATGWMTTINGKELKVEGQITYYNRYKRQNVVKDLSVELDRLSEESVNNDISSWTKGRSGEALSLLKKRFSHRPVQEKFVCLNCGFETHADEQAALNIARSWLFLRSQEYKKYQTNKTTGNTDKRAFVETWQSFYRKKLKEVWKPAV

SEQ ID NO: 40563 - protein, 979 aa, synthetic construct
  REGION 1..979: note = engineered CasX variant
QEIKRINKIRRRLVKDSNTKKAGKTRGPMKTLLVRVMTPDLRERLENLRKKPENIPQPISNTSRANLNKLLTDYTEMKKAILHVYWEEFQKDPVGLMSRVAQPASKKIDQNKLKPEMDEKGNLTTAGFACSQCGQPLFVYKLEQVSEKGKAYTNYFGRCNVAEHEKLILLAQLKPEKDSDEAVTYSLGKFGQRALDFYSIHVTKESTHPVKPLAQIAGNRYASAPVGKALSDACMGTIASFLSKYQDIIIEHQKVVKGNQKRLESLRELAGKENLEYPSVTLPPQPHTKEGVDAYNEVIARVRMWVNLNLWQKLKLSRDDAKPLLRLKGFPSFPLVERQANEVDWWDMVCNVKKLINEKKEDGKVFWQNLAGYKRQEALRPYLSSEEDRKKGKKFARYQLGDLLLHLEKKHGEDWGKVYDEAWERIDKKVEGLSKHIKLEEERRSEDAQSKAALTDWLRAKASFVIEGSKEADKDEFCRCELKLQKWYGDLRGKPFAIEAENSILDISGFSKQYNCAFIWQKDGVKKLNLYLIINYFKGGKLRFKKIKPEAFEANRFYTVINKKSGEIVPMEVNFNFDDPNLIILPLAFGKRQGREFIWNDLLSLETGSLKLANGRVIEKTLYNRRTRQDEPALFVALTFERREVLDSSNIKPMNLIGVDRGENIPAVIALTDPEGCPLSRFKDSLGNPTHILRIGESYKEKQRTIQAKKEVEQRRAGGYSRKYASKAKNLADDMVRNTARDLLYYAVTQDAMLIFENLSRGFGRQGKRTFMAERQYTRMEDWLTAKLAYEGLPSKTYLSKTLAQYTSKTCSNCGFTITSADYDRVLEKLKKTATGWMTTINGKELKVEGQITYYNRYKRQNVVKDLSVELDRLSEESVNNDISSWTKGRSGEALSLLKKRFSHRPVQEKFVCLNCGFETHADEQAALNIARSWLFLRSQEYKKYQTNKTTGNTDKRAFVETWQSFYRKKLKEVWKPAV

SEQ ID NO: 40564 - protein, 979 aa, synthetic construct
  REGION 1..979: note = engineered CasX variant
QEIKRINKIRRRLVKDSNTKKAGKTRGPMKTLLVRVMTPDLRERLENLRKKPENIPQPISNTSRANLNKLLTDYTEMKKAILHVYWEEFQKDPVGLMSRVAQPASKKIDQNKLKPEMDEKGNLTTAGFACSQCGQPLFVYKLEQVSEKGKAYTNYFGRCNVAEHEKLILLAQLKPEKDSDEAVTYSLGKFGQRALDFYSIHVTKESTHPVKPLAQIAGNRYASVPVGKALSDACMGTIASFLSKYQDIIIEHQKVVKGNQKRLESLRELAGKENLEYPSVTLPPQPHTKEGVDAYNEVIARVRMWVNLNLWQKLKLSRDDAKPLLRLKGFPSFPLVERQANEVDWWDMVCNVKKLINEKKEDGKVFWQNLAGYKRQEALRPYLSSEEDRKKGKKFARYQLGDLLLHLEKKHGEDWGKVYDEAWERIDKKVEGLSKHIKLEEERRSEDAQSKAALTDWLRAKASFVIEGSKEADKDEFCRCELKLQKWYGDLRGKPFAIEAENSILDISGFSKQYNCAFIWQKDGVKKLNLYLIINYFKGGKLRFKKIKPEAFEANRFYTVINKKSGEIVPMEVNFNFDDPNLIILPLAFGKRQGREFIWNDLLSLETGSLKLANGRVIEKTLYNRRTRQDEPALFVALTFERREVLDSSNIKPMNLIGVDRGENIPAVIALTDPEGCPLSRFKDSLGNPTHILRIGESYKEKQRTIQAKKEVEQRRAGGYSRKYASKAKNLADDMVRNTARDLLYYAVTQDAMLIFENLSRGFGRQGKRTFMAERQYTRMEDWLTAKLAYEGLPSKTYLSKTLAQYTSKTCSNCGFTITSADYDRVLEKLKKTATGWMTTINGKELKVEGQITYYNRYKRQNVVKDLSVELDRLSEESVNNDISSWTKGRSGEALSLLKKRFSHRPVQEKFVCLNCGFETHADEQAALNIARSWLFLRSQEYKKYQTNKTTGNTDKRAFVETWQSFYRKKLKEVWKPAV

SEQ ID NO: 40565 - protein, 979 aa, synthetic construct
  REGION 1..979: note = engineered CasX variant
QEIKRINKIRRRLVKDSNTKKAGKTRGPMKTLLVRVMTPDLRERLENLRKKPENIPQPISNTSRANLNKLLTDYTEMKKAILHVYWEEFQKDPVGLMSRVAQPASKKIDQNKLKPEMDEKGNLTTAGFACSQCGQPLFVYKLEQVSEKGKAYTNYFGRCNVAEHEKLIKLAQLKPEKDSDEAVTYSLGKFGQRALDFYSIHVTKESTHPVKPLAQIAGNRYASGPVGKALSDACMGTIASFLSKYQDIIIEHQKVVKGNQKRLESLRELAGKENLEYPSVTLPPQPHTKEGVDAYNEVIARVRMWVNLNLWQKLKLSRDDAKPLLRLKGFPSFPLVERQANEVDWWDMVCNVKKLINEKKEDGKVFWQNLAGYKRQEALRPYLSSEEDRKKGKKFARYQLGDLLLHLEKKHGEDWGKVYDEAWERIDKKVEGLSKHIKLEEERRSEDAQSKAALTDWLRAKASFVIEGSKEADKDEFCRCELKLQKWYGDLRGKPFAIEAENSILDISGFSKQYNCAFIWQKDGVKKLNLYLIINYFKGGKLRFKKIKPEAFEANRFYTVINKKSGEIVPMEVNFNFDDPNLIILPLAFGKRQGREFIWNDLLSLETGSLKLANGRVIEKTLYNRRTRQDEPALFVALTFERREVLDSSNIKPMNLIGVDRGENIPAVIALTDPEGCPLSRFKDSLGNPTHILRIGESYKEKQRTIQAKKEVEQRRAGGYSRKYASKAKNLADDMVRNTARDLLYYAVTQDAMLIFENLSRGFGRQGKRTFMAERQYTRMEDWLTAKLAYEGLPSKTYLSKTLAQYTSKTCSNCGFTITSADYDRVLEKLKKTATGWMTTINGKELKVEGQITYYNRYKRQNVVKDLSVELDRLSEESVNNDISSWTKGRSGEALSLLKKRFSHRPVQEKFVCLNCGFETHADEQAALNIARSWLFLRSQEYKKYQTNKTTGNTDKRAFVETWQSFYRKKLKEVWKPAV

SEQ ID NO: 40566 - protein, 978 aa, synthetic construct
  REGION 1..978: note = engineered CasX variant
QEIKRINKIRRRLVKDSNTKKAGKTRGPMKTLLVRVMTPDLRERLENLRKKPENIPQPISNTSRANLNKLLTDYTEMKKAILHVYWEEFQKDPVGLMSRVAQPASKKIDQNKLKPEMDEKGNLTTAGFACSQCGQPLFVYKLEQVSEKGKAYTNYFGRCNVAEHEKLILLAQLKPEKDSDEAVTYSLGKFGQRALDFYSIHVTKESTHPVKPLAQIAGNRYASPVGKALSDACMGTIASFLSKYQDIIIEHQKVVKGNQKRLESLRELAGKENLEYPSVTLPPQPHTKEGVDAYNEVIARVRMWVNLNLWQKLKLSRDDAKPLLRLKGFPSFPLVERQANEVDWWDMVCNVKKLINEKKEDGKVFWQNLAGYKRQEALRPYLSSEEDRKKGKKFARYQLGDLLLHLEKKHGEDWGKVYDEAWERIDKKVEGLSKHIKLEEERRSEDAQSKAALTDWLRAKASFVIEGSKEADKDEFCRCELKLQKWYGDLRGKPFAIEAENSILDISGFSKQYNCAFIWQKDGVKKLNLYLIINYFKGGKLRFKKIKPEAFEANRFYTVINKKSGEIVPMEVNFNFDDPNLIILPLAFGKRQGREFIWNDLLSLETGSLKLANGRVIEKTLYNRRTRQDEPALFVALTFERREVLDSSNIKPMNLIGVDRGENIPAVIALTDPEGCPLSRFKDSLGNPTHILRIGESYKEKQRTIQAKKEVEQRRAGGYSRKYASKAKNLADDMVRNTARDLLYYAVTQDAMLIFENLSRGFGRQGKRTFMAERQYTRMEDWLTAKLAYEGLPSKTYLSKTLAQYTSKTCSNCGFTITSADYDRVLEKLKKTATGWMTTINGKELKVEGQITYYNRYKRQNVVKDLSVELDRLSEESVNNDISSWTKGRSGEALSLLKKRFSHRPVQEKFVCLNCGFETHADEQAALNIARSWLFLRSQEYKKYQTNKTTGNTDKRAFVETWQSFYRKKLKEVWKPAV

SEQ ID NO: 40567 - protein, 980 aa, synthetic construct
  REGION 1..980: note = engineered CasX variant
QEIKRINKIRRRLVKDSNTKKAGKTRGPMKTLLVRVMTPDLRERLENLRKKPENIPQPISNTSRANLNKLLTDYTEMKKAILHVYWEEFQKDPVGLMSRVAQPASKKIDQNKLKPEMDEKGNLTTAGFACSQCGQPLFVYKLEQVSEKGKAYTNYFGRCNVAEHEKLILLAQLKPEKDSDEAVTYSLGKFGQRALDFYSIHVTKESTHPVKPLAQIAGNRYASYPVGKALSDACMGTIASFLSKYQDIIIEHQKVVKGNQKRLESLRELAGKENLEYPSVTLPPQPHTKEGVDAYNEVIARVRMWVNLNLWQKLKLSRDDAKPLLRLKGFPSFPLVERQANEVDWWDMVCNVKKLINEKKEDGKVFWQNLAGYKRQEALRPYLSSEEDRKKGKKFARYQLGDLLLHLEKKHGEDWGKVYDEAWERIDKKVEGLSKHIKLEEERRSEDAQSKAALTDWLRAKASFVIEGLKEADDKDEFCRCELKLQKWYGDLRGKPFAIEAENSILDISGFSKQYNCAFIWQKDGVKKLNLYLIINYFKGGKLRFKKIKPEAFEANRFYTVINKKSGEIVPMEVNFNFDDPNLIILPLAFGKRQGREFIWNDLLSLETGSLKLANGRVIEKTLYNRRTRQDEPALFVALTFERREVLDSSNIKPMNLIGVDRGENIPAVIALTDPEGCPLSRFKDSLGNPTHILRIGESYKEKQRTIQAKKEVEQRRAGGYSRKYASKAKNLADDMVRNTARDLLYYAVTQDAMLIFENLSRGFGRQGKRTFMAERQYTRMEDWLTAKLAYEGLPSKTYLSKTLAQYTSKTCSNCGFTITSADYDRVLEKLKKTATGWMTTINGKELKVEGQITYYNRYKRQNVVKDLSVELDRLSEESVNNDISSWTKGRSGEALSLLKKRFSHRPVQEKFVCLNCGFETHADEQAALNIARSWLFLRSQEYKKYQTNKTTGNTDKRAFVETWQSFYRKKLKEVWKPAV

SEQ ID NO: 40568 - protein, 980 aa, synthetic construct
  REGION 1..980: note = engineered CasX variant
QEIKRINKIRRRLVKDSNTKKAGKTRGPMKTLLVRVMTPDLRERLENLRKKPENIPQPISNTSRANLNKLLTDYTEMKKAILHVYWEEFQKDPVGLMSRVAQPASKKIDQNKLKPEMDEKGNLTTAGFACSQCGQPLFVYKLEQVSEKGKAYTNYFGRCNVAEHEKLILLAQLKPEKDSDEAVTYSLGKFGQRALDFYSIHVTKESTHPVKPLAQIAGNRYASHPVGKALSDACMGTIASFLSKYQDIIIEHQKVVKGNQKRLESLRELAGKENLEYPSVTLPPQPHTKEGVDAYNEVIARVRMWVNLNLWQKLKLSRDDAKPLLRLKGFPSFPLVERQANEVDWWDMVCNVKKLINEKKEDGKVFWQNLAGYKRQEALRPYLSSEEDRKKGKKFARYQLGDLLLHLEKKHGEDWGKVYDEAWERIDKKVEGLSKHIKLEEERRSEDAQSKAALTDWLRAKASFVIEGLKEADDKDEFCRCELKLQKWYGDLRGKPFAIEAENSILDISGFSKQYNCAFIWQKDGVKKLNLYLIINYFKGGKLRFKKIKPEAFEANRFYTVINKKSGEIVPMEVNFNFDDPNLIILPLAFGKRQGREFIWNDLLSLETGSLKLANGRVIEKTLYNRRTRQDEPALFVALTFERREVLDSSNIKPMNLIGVDRGENIPAVIALTDPEGCPLSRFKDSLGNPTHILRIGESYKEKQRTIQAKKEVEQRRAGGYSRKYASKAKNLADDMVRNTARDLLYYAVTQDAMLIFENLSRGFGRQGKRTFMAERQYTRMEDWLTAKLAYEGLPSKTYLSKTLAQYTSKTCSNCGFTITSADYDRVLEKLKKTATGWMTTINGKELKVEGQITYYNRYKRQNVVKDLSVELDRLSEESVNNDISSWTKGRSGEALSLLKKRFSHRPVQEKFVCLNCGFETHADEQAALNIARSWLFLRSQEYKKYQTNKTTGNTDKRAFVETWQSFYRKKLKEVWKPAV

SEQ ID NO: 40569 - protein, 980 aa, synthetic construct
  REGION 1..980: note = engineered CasX variant
QEIKRINKIRRRLVKDSNTKKAGKTRGPMKTLLVRVMTPDLRERLENLRKKPENIPQPISNTSRANLNKLLTDYTEMKKAILHVYWEEFQKDPVGLMSRVAQPASKKIDQNKLKPEMDEKGNLTTAGFACSQCGQPLFVYKLEQVSEKGKAYTNYFGRCNVAEHEKLILLAQLKPEKDSDEAVTYSLGKFGQRALDFYSIHVTKESTHPVKPLAQIAGNRYASSPVGKALSDACMGTIASFLSKYQDIIIEHQKVVKGNQKRLESLRELAGKENLEYPSVTLPPQPHTKEGVDAYNEVIARVRMWVNLNLWQKLKLSRDDAKPLLRLKGFPSFPLVERQANEVDWWDMVCNVKKLINEKKEDGKVFWQNLAGYKRQEALRPYLSSEEDRKKGKKFARYQLGDLLLHLEKKHGEDWGKVYDEAWERIDKKVEGLSKHIKLEEERRSEDAQSKAALTDWLRAKASFVIEGLKEADDKDEFCRCELKLQKWYGDLRGKPFAIEAENSILDISGFSKQYNCAFIWQKDGVKKLNLYLIINYFKGGKLRFKKIKPEAFEANRFYTVINKKSGEIVPMEVNFNFDDPNLIILPLAFGKRQGREFIWNDLLSLETGSLKLANGRVIEKTLYNRRTRQDEPALFVALTFERREVLDSSNIKPMNLIGVDRGENIPAVIALTDPEGCPLSRFKDSLGNPTHILRIGESYKEKQRTIQAKKEVEQRRAGGYSRKYASKAKNLADDMVRNTARDLLYYAVTQDAMLIFENLSRGFGRQGKRTFMAERQYTRMEDWLTAKLAYEGLPSKTYLSKTLAQYTSKTCSNCGFTITSADYDRVLEKLKKTATGWMTTINGKELKVEGQITYYNRYKRQNVVKDLSVELDRLSEESVNNDISSWTKGRSGEALSLLKKRFSHRPVQEKFVCLNCGFETHADEQAALNIARSWLFLRSQEYKKYQTNKTTGNTDKRAFVETWQSFYRKKLKEVWKPAV

SEQ ID NO: 40570 - protein, 980 aa, synthetic construct
  REGION 1..980: note = engineered CasX variant
QEIKRINKIRRRLVKDSNTKKAGKTRGPMKTLLVRVMTPDLRERLENLRKKPENIPQPISNTSRANLNKLLTDYTEMKKAILHVYWEEFQKDPVGLMSRVAQPASKKIDQNKLKPEMDEKGNLTTAGFACSQCGQPLFVYKLEQVSEKGKAYTNYFGRCNVAEHEKLILLAQLKPEKDSDEAVTYSLGKFGQRALDFYSIHVTKESTHPVKPLAQIAGNRYASTPVGKALSDACMGTIASFLSKYQDIIIEHQKVVKGNQKRLESLRELAGKENLEYPSVTLPPQPHTKEGVDAYNEVIARVRMWVNLNLWQKLKLSRDDAKPLLRLKGFPSFPLVERQANEVDWWDMVCNVKKLINEKKEDGKVFWQNLAGYKRQEALRPYLSSEEDRKKGKKFARYQLGDLLLHLEKKHGEDWGKVYDEAWERIDKKVEGLSKHIKLEEERRSEDAQSKAALTDWLRAKASFVIEGLKEADDKDEFCRCELKLQKWYGDLRGKPFAIEAENSILDISGFSKQYNCAFIWQKDGVKKLNLYLIINYFKGGKLRFKKIKPEAFEANRFYTVINKKSGEIVPMEVNFNFDDPNLIILPLAFGKRQGREFIWNDLLSLETGSLKLANGRVIEKTLYNRRTRQDEPALFVALTFERREVLDSSNIKPMNLIGVDRGENIPAVIALTDPEGCPLSRFKDSLGNPTHILRIGESYKEKQRTIQAKKEVEQRRAGGYSRKYASKAKNLADDMVRNTARDLLYYAVTQDAMLIFENLSRGFGRQGKRTFMAERQYTRMEDWLTAKLAYEGLPSKTYLSKTLAQYTSKTCSNCGFTITSADYDRVLEKLKKTATGWMTTINGKELKVEGQITYYNRYKRQNVVKDLSVELDRLSEESVNNDISSWTKGRSGEALSLLKKRFSHRPVQEKFVCLNCGFETHADEQAALNIARSWLFLRSQEYKKYQTNKTTGNTDKRAFVETWQSFYRKKLKEVWKPAV

SEQ ID NO: 40571 - protein, 980 aa, synthetic construct
  REGION 1..980: note = engineered CasX variant
QEIKRINKIRRRLVKDSNTKKAGKTRGPMKTLLVRVMTPDLRERLENLRKKPENIPQPISNTSRANLNKLLTDYTEMKKAILHVYWEEFQKDPVGLMSRVAQPASKKIDQNKLKPEMDEKGNLTTAGFACSQCGQPLFVYKLEQVSEKGKAYTNYFGRCNVAEHEKLILLAQLKPEKDSDEAVTYSLGKFGQRALDFYSIHVTKESTHPVKPLAQIAGNRYASAPVGKALSDACMGTIASFLSKYQDIIIEHQKVVKGNQKRLESLRELAGKENLEYPSVTLPPQPHTKEGVDAYNEVIARVRMWVNLNLWQKLKLSRDDAKPLLRLKGFPSFPLVERQANEVDWWDMVCNVKKLINEKKEDGKVFWQNLAGYKRQEALRPYLSSEEDRKKGKKFARYQLGDLLLHLEKKHGEDWGKVYDEAWERIDKKVEGLSKHIKLEEERRSEDAQSKAALTDWLRAKASFVIEGLKEADDKDEFCRCELKLQKWYGDLRGKPFAIEAENSILDISGFSKQYNCAFIWQKDGVKKLNLYLIINYFKGGKLRFKKIKPEAFEANRFYTVINKKSGEIVPMEVNFNFDDPNLIILPLAFGKRQGREFIWNDLLSLETGSLKLANGRVIEKTLYNRRTRQDEPALFVALTFERREVLDSSNIKPMNLIGVDRGENIPAVIALTDPEGCPLSRFKDSLGNPTHILRIGESYKEKQRTIQAKKEVEQRRAGGYSRKYASKAKNLADDMVRNTARDLLYYAVTQDAMLIFENLSRGFGRQGKRTFMAERQYTRMEDWLTAKLAYEGLPSKTYLSKTLAQYTSKTCSNCGFTITSADYDRVLEKLKKTATGWMTTINGKELKVEGQITYYNRYKRQNVVKDLSVELDRLSEESVNNDISSWTKGRSGEALSLLKKRFSHRPVQEKFVCLNCGFETHADEQAALNIARSWLFLRSQEYKKYQTNKTTGNTDKRAFVETWQSFYRKKLKEVWKPAV

SEQ ID NO: 40572 - protein, 980 aa, synthetic construct
  REGION 1..980: note = engineered CasX variant
QEIKRINKIRRRLVKDSNTKKAGKTRGPMKTLLVRVMTPDLRERLENLRKKPENIPQPISNTSRANLNKLLTDYTEMKKAILHVYWEEFQKDPVGLMSRVAQPASKKIDQNKLKPEMDEKGNLTTAGFACSQCGQPLFVYKLEQVSEKGKAYTNYFGRCNVAEHEKLILLAQLKPEKDSDEAVTYSLGKFGQRALDFYSIHVTKESTHPVKPLAQIAGNRYASVPVGKALSDACMGTIASFLSKYQDIIIEHQKVVKGNQKRLESLRELAGKENLEYPSVTLPPQPHTKEGVDAYNEVIARVRMWVNLNLWQKLKLSRDDAKPLLRLKGFPSFPLVERQANEVDWWDMVCNVKKLINEKKEDGKVFWQNLAGYKRQEALRPYLSSEEDRKKGKKFARYQLGDLLLHLEKKHGEDWGKVYDEAWERIDKKVEGLSKHIKLEEERRSEDAQSKAALTDWLRAKASFVIEGLKEADDKDEFCRCELKLQKWYGDLRGKPFAIEAENSILDISGFSKQYNCAFIWQKDGVKKLNLYLIINYFKGGKLRFKKIKPEAFEANRFYTVINKKSGEIVPMEVNFNFDDPNLIILPLAFGKRQGREFIWNDLLSLETGSLKLANGRVIEKTLYNRRTRQDEPALFVALTFERREVLDSSNIKPMNLIGVDRGENIPAVIALTDPEGCPLSRFKDSLGNPTHILRIGESYKEKQRTIQAKKEVEQRRAGGYSRKYASKAKNLADDMVRNTARDLLYYAVTQDAMLIFENLSRGFGRQGKRTFMAERQYTRMEDWLTAKLAYEGLPSKTYLSKTLAQYTSKTCSNCGFTITSADYDRVLEKLKKTATGWMTTINGKELKVEGQITYYNRYKRQNVVKDLSVELDRLSEESVNNDISSWTKGRSGEALSLLKKRFSHRPVQEKFVCLNCGFETHADEQAALNIARSWLFLRSQEYKKYQTNKTTGNTDKRAFVETWQSFYRKKLKEVWKPAV

SEQ ID NO: 40573 - protein, 980 aa, synthetic construct
  REGION 1..980: note = engineered CasX variant
QEIKRINKIRRRLVKDSNTKKAGKTRGPMKTLLVRVMTPDLRERLENLRKKPENIPQPISNTSRANLNKLLTDYTEMKKAILHVYWEEFQKDPVGLMSRVAQPASKKIDQNKLKPEMDEKGNLTTAGFACSQCGQPLFVYKLEQVSEKGKAYTNYFGRCNVAEHEKLIKLAQLKPEKDSDEAVTYSLGKFGQRALDFYSIHVTKESTHPVKPLAQIAGNRYASGPVGKALSDACMGTIASFLSKYQDIIIEHQKVVKGNQKRLESLRELAGKENLEYPSVTLPPQPHTKEGVDAYNEVIARVRMWVNLNLWQKLKLSRDDAKPLLRLKGFPSFPLVERQANEVDWWDMVCNVKKLINEKKEDGKVFWQNLAGYKRQEALRPYLSSEEDRKKGKKFARYQLGDLLLHLEKKHGEDWGKVYDEAWERIDKKVEGLSKHIKLEEERRSEDAQSKAALTDWLRAKASFVIEGLKEADDKDEFCRCELKLQKWYGDLRGKPFAIEAENSILDISGFSKQYNCAFIWQKDGVKKLNLYLIINYFKGGKLRFKKIKPEAFEANRFYTVINKKSGEIVPMEVNFNFDDPNLIILPLAFGKRQGREFIWNDLLSLETGSLKLANGRVIEKTLYNRRTRQDEPALFVALTFERREVLDSSNIKPMNLIGVDRGENIPAVIALTDPEGCPLSRFKDSLGNPTHILRIGESYKEKQRTIQAKKEVEQRRAGGYSRKYASKAKNLADDMVRNTARDLLYYAVTQDAMLIFENLSRGFGRQGKRTFMAERQYTRMEDWLTAKLAYEGLPSKTYLSKTLAQYTSKTCSNCGFTITSADYDRVLEKLKKTATGWMTTINGKELKVEGQITYYNRYKRQNVVKDLSVELDRLSEESVNNDISSWTKGRSGEALSLLKKRFSHRPVQEKFVCLNCGFETHADEQAALNIARSWLFLRSQEYKKYQTNKTTGNTDKRAFVETWQSFYRKKLKEVWKPAV

SEQ ID NO: 40574 - protein, 979 aa, synthetic construct
  REGION 1..979: note = engineered CasX variant
QEIKRINKIRRRLVKDSNTKKAGKTRGPMKTLLVRVMTPDLRERLENLRKKPENIPQPISNTSRANLNKLLTDYTEMKKAILHVYWEEFQKDPVGLMSRVAQPASKKIDQNKLKPEMDEKGNLTTAGFACSQCGQPLFVYKLEQVSEKGKAYTNYFGRCNVAEHEKLILLAQLKPEKDSDEAVTYSLGKFGQRALDFYSIHVTKESTHPVKPLAQIAGNRYASPVGKALSDACMGTIASFLSKYQDIIIEHQKVVKGNQKRLESLRELAGKENLEYPSVTLPPQPHTKEGVDAYNEVIARVRMWVNLNLWQKLKLSRDDAKPLLRLKGFPSFPLVERQANEVDWWDMVCNVKKLINEKKEDGKVFWQNLAGYKRQEALRPYLSSEEDRKKGKKFARYQLGDLLLHLEKKHGEDWGKVYDEAWERIDKKVEGLSKHIKLEEERRSEDAQSKAALTDWLRAKASFVIEGLKEADDKDEFCRCELKLQKWYGDLRGKPFAIEAENSILDISGFSKQYNCAFIWQKDGVKKLNLYLIINYFKGGKLRFKKIKPEAFEANRFYTVINKKSGEIVPMEVNFNFDDPNLIILPLAFGKRQGREFIWNDLLSLETGSLKLANGRVIEKTLYNRRTRQDEPALFVALTFERREVLDSSNIKPMNLIGVDRGENIPAVIALTDPEGCPLSRFKDSLGNPTHILRIGESYKEKQRTIQAKKEVEQRRAGGYSRKYASKAKNLADDMVRNTARDLLYYAVTQDAMLIFENLSRGFGRQGKRTFMAERQYTRMEDWLTAKLAYEGLPSKTYLSKTLAQYTSKTCSNCGFTITSADYDRVLEKLKKTATGWMTTINGKELKVEGQITYYNRYKRQNVVKDLSVELDRLSEESVNNDISSWTKGRSGEALSLLKKRFSHRPVQEKFVCLNCGFETHADEQAALNIARSWLFLRSQEYKKYQTNKTTGNTDKRAFVETWQSFYRKKLKEVWKPAV

SEQ ID NO: 40575 - protein, 980 aa, synthetic construct
  REGION 1..980: note = engineered CasX variant
QEIKRINKIRRRLVKDSNTKKAGKTRGPMKTLLVRVMTPDLRERLENLRKKPENIPQPISNTSRANLNKLLTDYTEMKKAILHVYWEEFQKDPVGLMSRVAQPASKKIDQNKLKPEMDEKGNLTTAGFACSQCGQPLFVYKLEQVSEKGKAYTNYFGRCNVAEHEKLILLAQLKPEKDSDEAVTYSLGKFGQRALDFYSIHVTKESTHPVKPLAQIAGNRYASYPVGKALSDACMGTIASFLSKYQDIIIEHQKVVKGNQKRLESLRELAGKENLEYPSVTLPPQPHTKEGVDAYNEVIARVRMWVNLNLWQKLKLSRDDAKPLLRLKGFPSFPLVERQANEVDWWDMVCNVKKLINEKKEDGKVFWQNLAGYKRQEALRPYLSSEEDRKKGKKFARYQLGDLLLHLEKKHGEDWGKVYDEAWERIDKKVEGLSKHIKLEEERRSEDAQSKAALTDWLRAKASFVIEGLKEADKDEFCRCELKLQKWYGDLRGKPFAIEAENSILDISGFSKQYNCAFIWQKDGVKKLNLYLIINYFKGGKLRFKKIKPEAFEANRFYTVINKKSGEIVPMEVNFNFDDPNLIILPLAFGKRQGREFIWNDLLSLETGSLKLANGRVIEKTLYNRRTRQDEPALFVALTFERREVLDSSNIKPMNLIGVDRGENIPAVIALTDPEGCPLSRFKDSLGNPTHILRIGESYKEKQRTIQAKKEVEQRRAGGYSRKYASKAKNLADDMVRNTARDLLYYAVTQDAMLIFENLSRGFGRQGKRTFMAERQYTRMEDWLTAKLAYEGLPSKTYLSKTLAQYTSKTCSNCGFTITSADYDRVLEKLKKTATGWMTTINGKELKVEGQITYYNRYKRQNVVKDLSVELDRLSEESVNNDISSWTKGRSGNEALSLLKKRFSHRPVQEKFVCLNCGFETHADEQAALNIARSWLFLRSQEYKKYQTNKTTGNTDKRAFVETWQSFYRKKLKEVWKPAV

SEQ ID NO: 40576 - protein, 980 aa, synthetic construct
  REGION 1..980: note = engineered CasX variant
QEIKRINKIRRRLVKDSNTKKAGKTRGPMKTLLVRVMTPDLRERLENLRKKPENIPQPISNTSRANLNKLLTDYTEMKKAILHVYWEEFQKDPVGLMSRVAQPASKKIDQNKLKPEMDEKGNLTTAGFACSQCGQPLFVYKLEQVSEKGKAYTNYFGRCNVAEHEKLILLAQLKPEKDSDEAVTYSLGKFGQRALDFYSIHVTKESTHPVKPLAQIAGNRYASHPVGKALSDACMGTIASFLSKYQDIIIEHQKVVKGNQKRLESLRELAGKENLEYPSVTLPPQPHTKEGVDAYNEVIARVRMWVNLNLWQKLKLSRDDAKPLLRLKGFPSFPLVERQANEVDWWDMVCNVKKLINEKKEDGKVFWQNLAGYKRQEALRPYLSSEEDRKKGKKFARYQLGDLLLHLEKKHGEDWGKVYDEAWERIDKKVEGLSKHIKLEEERRSEDAQSKAALTDWLRAKASFVIEGLKEADKDEFCRCELKLQKWYGDLRGKPFAIEAENSILDISGFSKQYNCAFIWQKDGVKKLNLYLIINYFKGGKLRFKKIKPEAFEANRFYTVINKKSGEIVPMEVNFNFDDPNLIILPLAFGKRQGREFIWNDLLSLETGSLKLANGRVIEKTLYNRRTRQDEPALFVALTFERREVLDSSNIKPMNLIGVDRGENIPAVIALTDPEGCPLSRFKDSLGNPTHILRIGESYKEKQRTIQAKKEVEQRRAGGYSRKYASKAKNLADDMVRNTARDLLYYAVTQDAMLIFENLSRGFGRQGKRTFMAERQYTRMEDWLTAKLAYEGLPSKTYLSKTLAQYTSKTCSNCGFTITSADYDRVLEKLKKTATGWMTTINGKELKVEGQITYYNRYKRQNVVKDLSVELDRLSEESVNNDISSWTKGRSGNEALSLLKKRFSHRPVQEKFVCLNCGFETHADEQAALNIARSWLFLRSQEYKKYQTNKTTGNTDKRAFVETWQSFYRKKLKEVWKPAV

SEQ ID NO: 40577 - protein, 980 aa, synthetic construct
  REGION 1..980: note = engineered CasX variant
QEIKRINKIRRRLVKDSNTKKAGKTRGPMKTLLVRVMTPDLRERLENLRKKPENIPQPISNTSRANLNKLLTDYTEMKKAILHVYWEEFQKDPVGLMSRVAQPASKKIDQNKLKPEMDEKGNLTTAGFACSQCGQPLFVYKLEQVSEKGKAYTNYFGRCNVAEHEKLILLAQLKPEKDSDEAVTYSLGKFGQRALDFYSIHVTKESTHPVKPLAQIAGNRYASSPVGKALSDACMGTIASFLSKYQDIIIEHQKVVKGNQKRLESLRELAGKENLEYPSVTLPPQPHTKEGVDAYNEVIARVRMWVNLNLWQKLKLSRDDAKPLLRLKGFPSFPLVERQANEVDWWDMVCNVKKLINEKKEDGKVFWQNLAGYKRQEALRPYLSSEEDRKKGKKFARYQLGDLLLHLEKKHGEDWGKVYDEAWERIDKKVEGLSKHIKLEEERRSEDAQSKAALTDWLRAKASFVIEGLKEADKDEFCRCELKLQKWYGDLRGKPFAIEAENSILDISGFSKQYNCAFIWQKDGVKKLNLYLIINYFKGGKLRFKKIKPEAFEANRFYTVINKKSGEIVPMEVNFNFDDPNLIILPLAFGKRQGREFIWNDLLSLETGSLKLANGRVIEKTLYNRRTRQDEPALFVALTFERREVLDSSNIKPMNLIGVDRGENIPAVIALTDPEGCPLSRFKDSLGNPTHILRIGESYKEKQRTIQAKKEVEQRRAGGYSRKYASKAKNLADDMVRNTARDLLYYAVTQDAMLIFENLSRGFGRQGKRTFMAERQYTRMEDWLTAKLAYEGLPSKTYLSKTLAQYTSKTCSNCGFTITSADYDRVLEKLKKTATGWMTTINGKELKVEGQITYYNRYKRQNVVKDLSVELDRLSEESVNNDISSWTKGRSGNEALSLLKKRFSHRPVQEKFVCLNCGFETHADEQAALNIARSWLFLRSQEYKKYQTNKTTGNTDKRAFVETWQSFYRKKLKEVWKPAV

SEQ ID NO: 40578 - protein, 980 aa, synthetic construct
  REGION 1..980: note = engineered CasX variant
QEIKRINKIRRRLVKDSNTKKAGKTRGPMKTLLVRVMTPDLRERLENLRKKPENIPQPISNTSRANLNKLLTDYTEMKKAILHVYWEEFQKDPVGLMSRVAQPASKKIDQNKLKPEMDEKGNLTTAGFACSQCGQPLFVYKLEQVSEKGKAYTNYFGRCNVAEHEKLILLAQLKPEKDSDEAVTYSLGKFGQRALDFYSIHVTKESTHPVKPLAQIAGNRYASTPVGKALSDACMGTIASFLSKYQDIIIEHQKVVKGNQKRLESLRELAGKENLEYPSVTLPPQPHTKEGVDAYNEVIARVRMWVNLNLWQKLKLSRDDAKPLLRLKGFPSFPLVERQANEVDWWDMVCNVKKLINEKKEDGKVFWQNLAGYKRQEALRPYLSSEEDRKKGKKFARYQLGDLLLHLEKKHGEDWGKVYDEAWERIDKKVEGLSKHIKLEEERRSEDAQSKAALTDWLRAKASFVIEGLKEADKDEFCRCELKLQKWYGDLRGKPFAIEAENSILDISGFSKQYNCAFIWQKDGVKKLNLYLIINYFKGGKLRFKKIKPEAFEANRFYTVINKKSGEIVPMEVNFNFDDPNLIILPLAFGKRQGREFIWNDLLSLETGSLKLANGRVIEKTLYNRRTRQDEPALFVALTFERREVLDSSNIKPMNLIGVDRGENIPAVIALTDPEGCPLSRFKDSLGNPTHILRIGESYKEKQRTIQAKKEVEQRRAGGYSRKYASKAKNLADDMVRNTARDLLYYAVTQDAMLIFENLSRGFGRQGKRTFMAERQYTRMEDWLTAKLAYEGLPSKTYLSKTLAQYTSKTCSNCGFTITSADYDRVLEKLKKTATGWMTTINGKELKVEGQITYYNRYKRQNVVKDLSVELDRLSEESVNNDISSWTKGRSGNEALSLLKKRFSHRPVQEKFVCLNCGFETHADEQAALNIARSWLFLRSQEYKKYQTNKTTGNTDKRAFVETWQSFYRKKLKEVWKPAV

SEQ ID NO: 40579 - protein, 980 aa, synthetic construct
  REGION 1..980: note = engineered CasX variant
QEIKRINKIRRRLVKDSNTKKAGKTRGPMKTLLVRVMTPDLRERLENLRKKPENIPQPISNTSRANLNKLLTDYTEMKKAILHVYWEEFQKDPVGLMSRVAQPASKKIDQNKLKPEMDEKGNLTTAGFACSQCGQPLFVYKLEQVSEKGKAYTNYFGRCNVAEHEKLILLAQLKPEKDSDEAVTYSLGKFGQRALDFYSIHVTKESTHPVKPLAQIAGNRYASAPVGKALSDACMGTIASFLSKYQDIIIEHQKVVKGNQKRLESLRELAGKENLEYPSVTLPPQPHTKEGVDAYNEVIARVRMWVNLNLWQKLKLSRDDAKPLLRLKGFPSFPLVERQANEVDWWDMVCNVKKLINEKKEDGKVFWQNLAGYKRQEALRPYLSSEEDRKKGKKFARYQLGDLLLHLEKKHGEDWGKVYDEAWERIDKKVEGLSKHIKLEEERRSEDAQSKAALTDWLRAKASFVIEGLKEADKDEFCRCELKLQKWYGDLRGKPFAIEAENSILDISGFSKQYNCAFIWQKDGVKKLNLYLIINYFKGGKLRFKKIKPEAFEANRFYTVINKKSGEIVPMEVNFNFDDPNLIILPLAFGKRQGREFIWNDLLSLETGSLKLANGRVIEKTLYNRRTRQDEPALFVALTFERREVLDSSNIKPMNLIGVDRGENIPAVIALTDPEGCPLSRFKDSLGNPTHILRIGESYKEKQRTIQAKKEVEQRRAGGYSRKYASKAKNLADDMVRNTARDLLYYAVTQDAMLIFENLSRGFGRQGKRTFMAERQYTRMEDWLTAKLAYEGLPSKTYLSKTLAQYTSKTCSNCGFTITSADYDRVLEKLKKTATGWMTTINGKELKVEGQITYYNRYKRQNVVKDLSVELDRLSEESVNNDISSWTKGRSGNEALSLLKKRFSHRPVQEKFVCLNCGFETHADEQAALNIARSWLFLRSQEYKKYQTNKTTGNTDKRAFVETWQSFYRKKLKEVWKPAV

SEQ ID NO: 40580 - protein, 980 aa, synthetic construct
  REGION 1..980: note = engineered CasX variant
QEIKRINKIRRRLVKDSNTKKAGKTRGPMKTLLVRVMTPDLRERLENLRKKPENIPQPISNTSRANLNKLLTDYTEMKKAILHVYWEEFQKDPVGLMSRVAQPASKKIDQNKLKPEMDEKGNLTTAGFACSQCGQPLFVYKLEQVSEKGKAYTNYFGRCNVAEHEKLILLAQLKPEKDSDEAVTYSLGKFGQRALDFYSIHVTKESTHPVKPLAQIAGNRYASVPVGKALSDACMGTIASFLSKYQDIIIEHQKVVKGNQKRLESLRELAGKENLEYPSVTLPPQPHTKEGVDAYNEVIARVRMWVNLNLWQKLKLSRDDAKPLLRLKGFPSFPLVERQANEVDWWDMVCNVKKLINEKKEDGKVFWQNLAGYKRQEALRPYLSSEEDRKKGKKFARYQLGDLLLHLEKKHGEDWGKVYDEAWERIDKKVEGLSKHIKLEEERRSEDAQSKAALTDWLRAKASFVIEGLKEADKDEFCRCELKLQKWYGDLRGKPFAIEAENSILDISGFSKQYNCAFIWQKDGVKKLNLYLIINYFKGGKLRFKKIKPEAFEANRFYTVINKKSGEIVPMEVNFNFDDPNLIILPLAFGKRQGREFIWNDLLSLETGSLKLANGRVIEKTLYNRRTRQDEPALFVALTFERREVLDSSNIKPMNLIGVDRGENIPAVIALTDPEGCPLSRFKDSLGNPTHILRIGESYKEKQRTIQAKKEVEQRRAGGYSRKYASKAKNLADDMVRNTARDLLYYAVTQDAMLIFENLSRGFGRQGKRTFMAERQYTRMEDWLTAKLAYEGLPSKTYLSKTLAQYTSKTCSNCGFTITSADYDRVLEKLKKTATGWMTTINGKELKVEGQITYYNRYKRQNVVKDLSVELDRLSEESVNNDISSWTKGRSGNEALSLLKKRFSHRPVQEKFVCLNCGFETHADEQAALNIARSWLFLRSQEYKKYQTNKTTGNTDKRAFVETWQSFYRKKLKEVWKPAV

SEQ ID NO: 40581 - protein, 980 aa, synthetic construct
  REGION 1..980: note = engineered CasX variant
QEIKRINKIRRRLVKDSNTKKAGKTRGPMKTLLVRVMTPDLRERLENLRKKPENIPQPISNTSRANLNKLLTDYTEMKKAILHVYWEEFQKDPVGLMSRVAQPASKKIDQNKLKPEMDEKGNLTTAGFACSQCGQPLFVYKLEQVSEKGKAYTNYFGRCNVAEHEKLIKLAQLKPEKDSDEAVTYSLGKFGQRALDFYSIHVTKESTHPVKPLAQIAGNRYASGPVGKALSDACMGTIASFLSKYQDIIIEHQKVVKGNQKRLESLRELAGKENLEYPSVTLPPQPHTKEGVDAYNEVIARVRMWVNLNLWQKLKLSRDDAKPLLRLKGFPSFPLVERQANEVDWWDMVCNVKKLINEKKEDGKVFWQNLAGYKRQEALRPYLSSEEDRKKGKKFARYQLGDLLLHLEKKHGEDWGKVYDEAWERIDKKVEGLSKHIKLEEERRSEDAQSKAALTDWLRAKASFVIEGLKEADKDEFCRCELKLQKWYGDLRGKPFAIEAENSILDISGFSKQYNCAFIWQKDGVKKLNLYLIINYFKGGKLRFKKIKPEAFEANRFYTVINKKSGEIVPMEVNFNFDDPNLIILPLAFGKRQGREFIWNDLLSLETGSLKLANGRVIEKTLYNRRTRQDEPALFVALTFERREVLDSSNIKPMNLIGVDRGENIPAVIALTDPEGCPLSRFKDSLGNPTHILRIGESYKEKQRTIQAKKEVEQRRAGGYSRKYASKAKNLADDMVRNTARDLLYYAVTQDAMLIFENLSRGFGRQGKRTFMAERQYTRMEDWLTAKLAYEGLPSKTYLSKTLAQYTSKTCSNCGFTITSADYDRVLEKLKKTATGWMTTINGKELKVEGQITYYNRYKRQNVVKDLSVELDRLSEESVNNDISSWTKGRSGNEALSLLKKRFSHRPVQEKFVCLNCGFETHADEQAALNIARSWLFLRSQEYKKYQTNKTTGNTDKRAFVETWQSFYRKKLKEVWKPAV

SEQ ID NO: 40582 - protein, 979 aa, synthetic construct
  REGION 1..979: note = engineered CasX variant
QEIKRINKIRRRLVKDSNTKKAGKTRGPMKTLLVRVMTPDLRERLENLRKKPENIPQPISNTSRANLNKLLTDYTEMKKAILHVYWEEFQKDPVGLMSRVAQPASKKIDQNKLKPEMDEKGNLTTAGFACSQCGQPLFVYKLEQVSEKGKAYTNYFGRCNVAEHEKLILLAQLKPEKDSDEAVTYSLGKFGQRALDFYSIHVTKESTHPVKPLAQIAGNRYASPVGKALSDACMGTIASFLSKYQDIIIEHQKVVKGNQKRLESLRELAGKENLEYPSVTLPPQPHTKEGVDAYNEVIARVRMWVNLNLWQKLKLSRDDAKPLLRLKGFPSFPLVERQANEVDWWDMVCNVKKLINEKKEDGKVFWQNLAGYKRQEALRPYLSSEEDRKKGKKFARYQLGDLLLHLEKKHGEDWGKVYDEAWERIDKKVEGLSKHIKLEEERRSEDAQSKAALTDWLRAKASFVIEGLKEADKDEFCRCELKLQKWYGDLRGKPFAIEAENSILDISGFSKQYNCAFIWQKDGVKKLNLYLIINYFKGGKLRFKKIKPEAFEANRFYTVINKKSGEIVPMEVNFNFDDPNLIILPLAFGKRQGREFIWNDLLSLETGSLKLANGRVIEKTLYNRRTRQDEPALFVALTFERREVLDSSNIKPMNLIGVDRGENIPAVIALTDPEGCPLSRFKDSLGNPTHILRIGESYKEKQRTIQAKKEVEQRRAGGYSRKYASKAKNLADDMVRNTARDLLYYAVTQDAMLIFENLSRGFGRQGKRTFMAERQYTRMEDWLTAKLAYEGLPSKTYLSKTLAQYTSKTCSNCGFTITSADYDRVLEKLKKTATGWMTTINGKELKVEGQITYYNRYKRQNVVKDLSVELDRLSEESVNNDISSWTKGRSGNEALSLLKKRFSHRPVQEKFVCLNCGFETHADEQAALNIARSWLFLRSQEYKKYQTNKTTGNTDKRAFVETWQSFYRKKLKEVWKPAV

SEQ ID NO: 40583 - protein, 979 aa, synthetic construct
  REGION 1..979: note = engineered CasX variant
QEIKRINKIRRRLVKDSNTKKAGKTRGPMKTLLVRVMTPDLRERLENLRKKPENIPQPISNTSRANLNKLLTDYTEMKKAILHVYWEEFQKDPVGLMSRVAQPASKKIDQNKLKPEMDEKGNLTTAGFACSQCGQPLFVYKLEQVSEKGKAYTNYFGRCNVAEHEKLILLAQLKPEKDSDEAVTYSLGKFGQRALDFYSIHVTKESTHPVKPLAQIAGNRYASYPVGKALSDACMGTIASFLSKYQDIIIEHQKVVKGNQKRLESLRELAGKENLEYPSVTLPPQPHTKEGVDAYNEVIARVRMWVNLNLWQKLKLSRDDAKPLLRLKGFPSFPLVERQANEVDWWDMVCNVKKLINEKKEDGKVFWQNLAGYKRQEALRPYLSSEEDRQKGKKFARYQLGDLLLHLEKKHGEDWGKVYDEAWERIDKKVEGLSKHIKLEEERRSEDAQSKAALTDWLRAKASFVIEGLKEADKDEFCRCELKLQKWYGDLRGKPFAIEAENSILDISGFSKQYNCAFIWQKDGVKKLNLYLIINYFKGGKLRFKKIKPEAFEANRFYTVINKKSGEIVPMEVNFNFDDPNLIILPLAFGKRQGREFIWNDLLSLETGSLKLANGRVIEKTLYNRRTRQDEPALFVALTFERREVLDSSNIKPMNLIGVDRGENIPAVIALTDPEGCPLSRFKDSLGNPTHILRIGESYKEKQRTIQAKKEVEQRRAGGYSRKYASKAKNLADDMVRNTARDLLYYAVTQDAMLIFENLSRGFGRQGKRTFMAERQYTRMEDWLTAKLAYEGLPSKTYLSKTLAQYTSKTCSNCGFTITSADYDRVLEKLKKTATGWMTTINGKELKVEGQITYYNRYKRQNVVKDLSVELDRLSEESVNNDISSWTKGRSGEALSLLKKRFSHRPVQEKFVCLNCGFETHADEQAALNIARSWLFLRSQEYKKYQTNKTTGNTDKRAFVETWQSFYRKKLKEVWKPAV

SEQ ID NO: 40584 - protein, 979 aa, synthetic construct
  REGION 1..979: note = engineered CasX variant
QEIKRINKIRRRLVKDSNTKKAGKTRGPMKTLLVRVMTPDLRERLENLRKKPENIPQPISNTSRANLNKLLTDYTEMKKAILHVYWEEFQKDPVGLMSRVAQPASKKIDQNKLKPEMDEKGNLTTAGFACSQCGQPLFVYKLEQVSEKGKAYTNYFGRCNVAEHEKLILLAQLKPEKDSDEAVTYSLGKFGQRALDFYSIHVTKESTHPVKPLAQIAGNRYASHPVGKALSDACMGTIASFLSKYQDIIIEHQKVVKGNQKRLESLRELAGKENLEYPSVTLPPQPHTKEGVDAYNEVIARVRMWVNLNLWQKLKLSRDDAKPLLRLKGFPSFPLVERQANEVDWWDMVCNVKKLINEKKEDGKVFWQNLAGYKRQEALRPYLSSEEDRQKGKKFARYQLGDLLLHLEKKHGEDWGKVYDEAWERIDKKVEGLSKHIKLEEERRSEDAQSKAALTDWLRAKASFVIEGLKEADKDEFCRCELKLQKWYGDLRGKPFAIEAENSILDISGFSKQYNCAFIWQKDGVKKLNLYLIINYFKGGKLRFKKIKPEAFEANRFYTVINKKSGEIVPMEVNFNFDDPNLIILPLAFGKRQGREFIWNDLLSLETGSLKLANGRVIEKTLYNRRTRQDEPALFVALTFERREVLDSSNIKPMNLIGVDRGENIPAVIALTDPEGCPLSRFKDSLGNPTHILRIGESYKEKQRTIQAKKEVEQRRAGGYSRKYASKAKNLADDMVRNTARDLLYYAVTQDAMLIFENLSRGFGRQGKRTFMAERQYTRMEDWLTAKLAYEGLPSKTYLSKTLAQYTSKTCSNCGFTITSADYDRVLEKLKKTATGWMTTINGKELKVEGQITYYNRYKRQNVVKDLSVELDRLSEESVNNDISSWTKGRSGEALSLLKKRFSHRPVQEKFVCLNCGFETHADEQAALNIARSWLFLRSQEYKKYQTNKTTGNTDKRAFVETWQSFYRKKLKEVWKPAV

SEQ ID NO: 40585 - protein, 979 aa, synthetic construct
  REGION 1..979: note = engineered CasX variant
QEIKRINKIRRRLVKDSNTKKAGKTRGPMKTLLVRVMTPDLRERLENLRKKPENIPQPISNTSRANLNKLLTDYTEMKKAILHVYWEEFQKDPVGLMSRVAQPASKKIDQNKLKPEMDEKGNLTTAGFACSQCGQPLFVYKLEQVSEKGKAYTNYFGRCNVAEHEKLILLAQLKPEKDSDEAVTYSLGKFGQRALDFYSIHVTKESTHPVKPLAQIAGNRYASSPVGKALSDACMGTIASFLSKYQDIIIEHQKVVKGNQKRLESLRELAGKENLEYPSVTLPPQPHTKEGVDAYNEVIARVRMWVNLNLWQKLKLSRDDAKPLLRLKGFPSFPLVERQANEVDWWDMVCNVKKLINEKKEDGKVFWQNLAGYKRQEALRPYLSSEEDRQKGKKFARYQLGDLLLHLEKKHGEDWGKVYDEAWERIDKKVEGLSKHIKLEEERRSEDAQSKAALTDWLRAKASFVIEGLKEADKDEFCRCELKLQKWYGDLRGKPFAIEAENSILDISGFSKQYNCAFIWQKDGVKKLNLYLIINYFKGGKLRFKKIKPEAFEANRFYTVINKKSGEIVPMEVNFNFDDPNLIILPLAFGKRQGREFIWNDLLSLETGSLKLANGRVIEKTLYNRRTRQDEPALFVALTFERREVLDSSNIKPMNLIGVDRGENIPAVIALTDPEGCPLSRFKDSLGNPTHILRIGESYKEKQRTIQAKKEVEQRRAGGYSRKYASKAKNLADDMVRNTARDLLYYAVTQDAMLIFENLSRGFGRQGKRTFMAERQYTRMEDWLTAKLAYEGLPSKTYLSKTLAQYTSKTCSNCGFTITSADYDRVLEKLKKTATGWMTTINGKELKVEGQITYYNRYKRQNVVKDLSVELDRLSEESVNNDISSWTKGRSGEALSLLKKRFSHRPVQEKFVCLNCGFETHADEQAALNIARSWLFLRSQEYKKYQTNKTTGNTDKRAFVETWQSFYRKKLKEVWKPAV

SEQ ID NO: 40586 - protein, 979 aa, synthetic construct
  REGION 1..979: note = engineered CasX variant
QEIKRINKIRRRLVKDSNTKKAGKTRGPMKTLLVRVMTPDLRERLENLRKKPENIPQPISNTSRANLNKLLTDYTEMKKAILHVYWEEFQKDPVGLMSRVAQPASKKIDQNKLKPEMDEKGNLTTAGFACSQCGQPLFVYKLEQVSEKGKAYTNYFGRCNVAEHEKLILLAQLKPEKDSDEAVTYSLGKFGQRALDFYSIHVTKESTHPVKPLAQIAGNRYASTPVGKALSDACMGTIASFLSKYQDIIIEHQKVVKGNQKRLESLRELAGKENLEYPSVTLPPQPHTKEGVDAYNEVIARVRMWVNLNLWQKLKLSRDDAKPLLRLKGFPSFPLVERQANEVDWWDMVCNVKKLINEKKEDGKVFWQNLAGYKRQEALRPYLSSEEDRQKGKKFARYQLGDLLLHLEKKHGEDWGKVYDEAWERIDKKVEGLSKHIKLEEERRSEDAQSKAALTDWLRAKASFVIEGLKEADKDEFCRCELKLQKWYGDLRGKPFAIEAENSILDISGFSKQYNCAFIWQKDGVKKLNLYLIINYFKGGKLRFKKIKPEAFEANRFYTVINKKSGEIVPMEVNFNFDDPNLIILPLAFGKRQGREFIWNDLLSLETGSLKLANGRVIEKTLYNRRTRQDEPALFVALTFERREVLDSSNIKPMNLIGVDRGENIPAVIALTDPEGCPLSRFKDSLGNPTHILRIGESYKEKQRTIQAKKEVEQRRAGGYSRKYASKAKNLADDMVRNTARDLLYYAVTQDAMLIFENLSRGFGRQGKRTFMAERQYTRMEDWLTAKLAYEGLPSKTYLSKTLAQYTSKTCSNCGFTITSADYDRVLEKLKKTATGWMTTINGKELKVEGQITYYNRYKRQNVVKDLSVELDRLSEESVNNDISSWTKGRSGEALSLLKKRFSHRPVQEKFVCLNCGFETHADEQAALNIARSWLFLRSQEYKKYQTNKTTGNTDKRAFVETWQSFYRKKLKEVWKPAV

SEQ ID NO: 40587 - protein, 979 aa, synthetic construct
  REGION 1..979: note = engineered CasX variant
QEIKRINKIRRRLVKDSNTKKAGKTRGPMKTLLVRVMTPDLRERLENLRKKPENIPQPISNTSRANLNKLLTDYTEMKKAILHVYWEEFQKDPVGLMSRVAQPASKKIDQNKLKPEMDEKGNLTTAGFACSQCGQPLFVYKLEQVSEKGKAYTNYFGRCNVAEHEKLILLAQLKPEKDSDEAVTYSLGKFGQRALDFYSIHVTKESTHPVKPLAQIAGNRYASAPVGKALSDACMGTIASFLSKYQDIIIEHQKVVKGNQKRLESLRELAGKENLEYPSVTLPPQPHTKEGVDAYNEVIARVRMWVNLNLWQKLKLSRDDAKPLLRLKGFPSFPLVERQANEVDWWDMVCNVKKLINEKKEDGKVFWQNLAGYKRQEALRPYLSSEEDRQKGKKFARYQLGDLLLHLEKKHGEDWGKVYDEAWERIDKKVEGLSKHIKLEEERRSEDAQSKAALTDWLRAKASFVIEGLKEADKDEFCRCELKLQKWYGDLRGKPFAIEAENSILDISGFSKQYNCAFIWQKDGVKKLNLYLIINYFKGGKLRFKKIKPEAFEANRFYTVINKKSGEIVPMEVNFNFDDPNLIILPLAFGKRQGREFIWNDLLSLETGSLKLANGRVIEKTLYNRRTRQDEPALFVALTFERREVLDSSNIKPMNLIGVDRGENIPAVIALTDPEGCPLSRFKDSLGNPTHILRIGESYKEKQRTIQAKKEVEQRRAGGYSRKYASKAKNLADDMVRNTARDLLYYAVTQDAMLIFENLSRGFGRQGKRTFMAERQYTRMEDWLTAKLAYEGLPSKTYLSKTLAQYTSKTCSNCGFTITSADYDRVLEKLKKTATGWMTTINGKELKVEGQITYYNRYKRQNVVKDLSVELDRLSEESVNNDISSWTKGRSGEALSLLKKRFSHRPVQEKFVCLNCGFETHADEQAALNIARSWLFLRSQEYKKYQTNKTTGNTDKRAFVETWQSFYRKKLKEVWKPAV

SEQ ID NO: 40588 - protein, 979 aa, synthetic construct
  REGION 1..979: note = engineered CasX variant
QEIKRINKIRRRLVKDSNTKKAGKTRGPMKTLLVRVMTPDLRERLENLRKKPENIPQPISNTSRANLNKLLTDYTEMKKAILHVYWEEFQKDPVGLMSRVAQPASKKIDQNKLKPEMDEKGNLTTAGFACSQCGQPLFVYKLEQVSEKGKAYTNYFGRCNVAEHEKLILLAQLKPEKDSDEAVTYSLGKFGQRALDFYSIHVTKESTHPVKPLAQIAGNRYASVPVGKALSDACMGTIASFLSKYQDIIIEHQKVVKGNQKRLESLRELAGKENLEYPSVTLPPQPHTKEGVDAYNEVIARVRMWVNLNLWQKLKLSRDDAKPLLRLKGFPSFPLVERQANEVDWWDMVCNVKKLINEKKEDGKVFWQNLAGYKRQEALRPYLSSEEDRQKGKKFARYQLGDLLLHLEKKHGEDWGKVYDEAWERIDKKVEGLSKHIKLEEERRSEDAQSKAALTDWLRAKASFVIEGLKEADKDEFCRCELKLQKWYGDLRGKPFAIEAENSILDISGFSKQYNCAFIWQKDGVKKLNLYLIINYFKGGKLRFKKIKPEAFEANRFYTVINKKSGEIVPMEVNFNFDDPNLIILPLAFGKRQGREFIWNDLLSLETGSLKLANGRVIEKTLYNRRTRQDEPALFVALTFERREVLDSSNIKPMNLIGVDRGENIPAVIALTDPEGCPLSRFKDSLGNPTHILRIGESYKEKQRTIQAKKEVEQRRAGGYSRKYASKAKNLADDMVRNTARDLLYYAVTQDAMLIFENLSRGFGRQGKRTFMAERQYTRMEDWLTAKLAYEGLPSKTYLSKTLAQYTSKTCSNCGFTITSADYDRVLEKLKKTATGWMTTINGKELKVEGQITYYNRYKRQNVVKDLSVELDRLSEESVNNDISSWTKGRSGEALSLLKKRFSHRPVQEKFVCLNCGFETHADEQAALNIARSWLFLRSQEYKKYQTNKTTGNTDKRAFVETWQSFYRKKLKEVWKPAV

SEQ ID NO: 40589 - protein, 979 aa, synthetic construct
  REGION 1..979: note = engineered CasX variant
QEIKRINKIRRRLVKDSNTKKAGKTRGPMKTLLVRVMTPDLRERLENLRKKPENIPQPISNTSRANLNKLLTDYTEMKKAILHVYWEEFQKDPVGLMSRVAQPASKKIDQNKLKPEMDEKGNLTTAGFACSQCGQPLFVYKLEQVSEKGKAYTNYFGRCNVAEHEKLIKLAQLKPEKDSDEAVTYSLGKFGQRALDFYSIHVTKESTHPVKPLAQIAGNRYASGPVGKALSDACMGTIASFLSKYQDIIIEHQKVVKGNQKRLESLRELAGKENLEYPSVTLPPQPHTKEGVDAYNEVIARVRMWVNLNLWQKLKLSRDDAKPLLRLKGFPSFPLVERQANEVDWWDMVCNVKKLINEKKEDGKVFWQNLAGYKRQEALRPYLSSEEDRQKGKKFARYQLGDLLLHLEKKHGEDWGKVYDEAWERIDKKVEGLSKHIKLEEERRSEDAQSKAALTDWLRAKASFVIEGLKEADKDEFCRCELKLQKWYGDLRGKPFAIEAENSILDISGFSKQYNCAFIWQKDGVKKLNLYLIINYFKGGKLRFKKIKPEAFEANRFYTVINKKSGEIVPMEVNFNFDDPNLIILPLAFGKRQGREFIWNDLLSLETGSLKLANGRVIEKTLYNRRTRQDEPALFVALTFERREVLDSSNIKPMNLIGVDRGENIPAVIALTDPEGCPLSRFKDSLGNPTHILRIGESYKEKQRTIQAKKEVEQRRAGGYSRKYASKAKNLADDMVRNTARDLLYYAVTQDAMLIFENLSRGFGRQGKRTFMAERQYTRMEDWLTAKLAYEGLPSKTYLSKTLAQYTSKTCSNCGFTITSADYDRVLEKLKKTATGWMTTINGKELKVEGQITYYNRYKRQNVVKDLSVELDRLSEESVNNDISSWTKGRSGEALSLLKKRFSHRPVQEKFVCLNCGFETHADEQAALNIARSWLFLRSQEYKKYQTNKTTGNTDKRAFVETWQSFYRKKLKEVWKPAV

SEQ ID NO: 40590 - protein, 978 aa, synthetic construct
  REGION 1..978: note = engineered CasX variant
QEIKRINKIRRRLVKDSNTKKAGKTRGPMKTLLVRVMTPDLRERLENLRKKPENIPQPISNTSRANLNKLLTDYTEMKKAILHVYWEEFQKDPVGLMSRVAQPASKKIDQNKLKPEMDEKGNLTTAGFACSQCGQPLFVYKLEQVSEKGKAYTNYFGRCNVAEHEKLILLAQLKPEKDSDEAVTYSLGKFGQRALDFYSIHVTKESTHPVKPLAQIAGNRYASPVGKALSDACMGTIASFLSKYQDIIIEHQKVVKGNQKRLESLRELAGKENLEYPSVTLPPQPHTKEGVDAYNEVIARVRMWVNLNLWQKLKLSRDDAKPLLRLKGFPSFPLVERQANEVDWWDMVCNVKKLINEKKEDGKVFWQNLAGYKRQEALRPYLSSEEDRQKGKKFARYQLGDLLLHLEKKHGEDWGKVYDEAWERIDKKVEGLSKHIKLEEERRSEDAQSKAALTDWLRAKASFVIEGLKEADKDEFCRCELKLQKWYGDLRGKPFAIEAENSILDISGFSKQYNCAFIWQKDGVKKLNLYLIINYFKGGKLRFKKIKPEAFEANRFYTVINKKSGEIVPMEVNFNFDDPNLIILPLAFGKRQGREFIWNDLLSLETGSLKLANGRVIEKTLYNRRTRQDEPALFVALTFERREVLDSSNIKPMNLIGVDRGENIPAVIALTDPEGCPLSRFKDSLGNPTHILRIGESYKEKQRTIQAKKEVEQRRAGGYSRKYASKAKNLADDMVRNTARDLLYYAVTQDAMLIFENLSRGFGRQGKRTFMAERQYTRMEDWLTAKLAYEGLPSKTYLSKTLAQYTSKTCSNCGFTITSADYDRVLEKLKKTATGWMTTINGKELKVEGQITYYNRYKRQNVVKDLSVELDRLSEESVNNDISSWTKGRSGEALSLLKKRFSHRPVQEKFVCLNCGFETHADEQAALNIARSWLFLRSQEYKKYQTNKTTGNTDKRAFVETWQSFYRKKLKEVWKPAV

SEQ ID NO: 40591 - protein, 979 aa, synthetic construct
  REGION 1..979: note = engineered CasX variant
QEIKRINKIRRRLVKDSNTKKAGKTRGPMKTLLVRVMTPDLRERLENLRKKPENIPQPISNTSRANLNKLLTDYTEMKKAILHVYWEEFQKDPVGLMSRVAQPASKKIDQNKLKPEMDEKGNLTTAGFACSQCGQPLFVYKLEQVSEKGKAYTNYFGRCNVAEHEKLILLAQLKPEKDSDEAVTYSLGKFGQRALDFYSIHVTKESTHPVKPLAQIAGNRYASYPVGKALSDACMGTIASFLSKYQDIIIEHQKVVKGNQKRLESLRELAGKENLEYPSVTLPPQPHTKEGVDAYNEVIARVRMWVNLNLWQKLKLSRDDAKPLLRLKGFPSFPLVERQANEVDWWDMVCNVKKLINEKKEDGKVFWQNLAGYKRQEALRPYLSSEEDRKKGKKFARYQLGDLLLHLEKKHGEDWGKVYDEAWERIDKKVEGLSKHIKLEEERRSEDAQSKAALTDWLRAKASFVIEGLKEADKDEFCRCELKLQKWYGDLRGKPFAIEAENSILDISGFSKQYNCAFIWQKDGVKKLNLYLIINYFKGGKLRFKKIKPEAFEANRFYTVINKKSGEIVPMEVNFNFDDPNLIILPLAFGKRQGREFIWNDLLSLETGSLKLANGRVIEKTLYNRRTRQDEPALFVALTFERREVLDSSNIKPMNLIGVDRGENIPAVIALTDPEGCPLSRFKDSLGNPTHILRIGESYKEKQRTIQAKKEVEQRRAGGYSRKYASKAKNLADDMVRNTARDLLYYAVTQDAMLIFENLSRGFGRQGKRTFMAERQYTRMEDWLTAKLAYEGLPSQTYLSKTLAQYTSKTCSNCGFTITSADYDRVLEKLKKTATGWMTTINGKELKVEGQITYYNRYKRQNVVKDLSVELDRLSEESVNNDISSWTKGRSGEALSLLKKRFSHRPVQEKFVCLNCGFETHADEQAALNIARSWLFLRSQEYKKYQTNKTTGNTDKRAFVETWQSFYRKKLKEVWKPAV

SEQ ID NO: 40592 - protein, 979 aa, synthetic construct
  REGION 1..979: note = engineered CasX variant
QEIKRINKIRRRLVKDSNTKKAGKTRGPMKTLLVRVMTPDLRERLENLRKKPENIPQPISNTSRANLNKLLTDYTEMKKAILHVYWEEFQKDPVGLMSRVAQPASKKIDQNKLKPEMDEKGNLTTAGFACSQCGQPLFVYKLEQVSEKGKAYTNYFGRCNVAEHEKLILLAQLKPEKDSDEAVTYSLGKFGQRALDFYSIHVTKESTHPVKPLAQIAGNRYASHPVGKALSDACMGTIASFLSKYQDIIIEHQKVVKGNQKRLESLRELAGKENLEYPSVTLPPQPHTKEGVDAYNEVIARVRMWVNLNLWQKLKLSRDDAKPLLRLKGFPSFPLVERQANEVDWWDMVCNVKKLINEKKEDGKVFWQNLAGYKRQEALRPYLSSEEDRKKGKKFARYQLGDLLLHLEKKHGEDWGKVYDEAWERIDKKVEGLSKHIKLEEERRSEDAQSKAALTDWLRAKASFVIEGLKEADKDEFCRCELKLQKWYGDLRGKPFAIEAENSILDISGFSKQYNCAFIWQKDGVKKLNLYLIINYFKGGKLRFKKIKPEAFEANRFYTVINKKSGEIVPMEVNFNFDDPNLIILPLAFGKRQGREFIWNDLLSLETGSLKLANGRVIEKTLYNRRTRQDEPALFVALTFERREVLDSSNIKPMNLIGVDRGENIPAVIALTDPEGCPLSRFKDSLGNPTHILRIGESYKEKQRTIQAKKEVEQRRAGGYSRKYASKAKNLADDMVRNTARDLLYYAVTQDAMLIFENLSRGFGRQGKRTFMAERQYTRMEDWLTAKLAYEGLPSQTYLSKTLAQYTSKTCSNCGFTITSADYDRVLEKLKKTATGWMTTINGKELKVEGQITYYNRYKRQNVVKDLSVELDRLSEESVNNDISSWTKGRSGEALSLLKKRFSHRPVQEKFVCLNCGFETHADEQAALNIARSWLFLRSQEYKKYQTNKTTGNTDKRAFVETWQSFYRKKLKEVWKPAV

SEQ ID NO: 40593 - protein, 979 aa, synthetic construct
  REGION 1..979: note = engineered CasX variant
QEIKRINKIRRRLVKDSNTKKAGKTRGPMKTLLVRVMTPDLRERLENLRKKPENIPQPISNTSRANLNKLLTDYTEMKKAILHVYWEEFQKDPVGLMSRVAQPASKKIDQNKLKPEMDEKGNLTTAGFACSQCGQPLFVYKLEQVSEKGKAYTNYFGRCNVAEHEKLILLAQLKPEKDSDEAVTYSLGKFGQRALDFYSIHVTKESTHPVKPLAQIAGNRYASSPVGKALSDACMGTIASFLSKYQDIIIEHQKVVKGNQKRLESLRELAGKENLEYPSVTLPPQPHTKEGVDAYNEVIARVRMWVNLNLWQKLKLSRDDAKPLLRLKGFPSFPLVERQANEVDWWDMVCNVKKLINEKKEDGKVFWQNLAGYKRQEALRPYLSSEEDRKKGKKFARYQLGDLLLHLEKKHGEDWGKVYDEAWERIDKKVEGLSKHIKLEEERRSEDAQSKAALTDWLRAKASFVIEGLKEADKDEFCRCELKLQKWYGDLRGKPFAIEAENSILDISGFSKQYNCAFIWQKDGVKKLNLYLIINYFKGGKLRFKKIKPEAFEANRFYTVINKKSGEIVPMEVNFNFDDPNLIILPLAFGKRQGREFIWNDLLSLETGSLKLANGRVIEKTLYNRRTRQDEPALFVALTFERREVLDSSNIKPMNLIGVDRGENIPAVIALTDPEGCPLSRFKDSLGNPTHILRIGESYKEKQRTIQAKKEVEQRRAGGYSRKYASKAKNLADDMVRNTARDLLYYAVTQDAMLIFENLSRGFGRQGKRTFMAERQYTRMEDWLTAKLAYEGLPSQTYLSKTLAQYTSKTCSNCGFTITSADYDRVLEKLKKTATGWMTTINGKELKVEGQITYYNRYKRQNVVKDLSVELDRLSEESVNNDISSWTKGRSGEALSLLKKRFSHRPVQEKFVCLNCGFETHADEQAALNIARSWLFLRSQEYKKYQTNKTTGNTDKRAFVETWQSFYRKKLKEVWKPAV

SEQ ID NO: 40594 - protein, 979 aa, synthetic construct
  REGION 1..979: note = engineered CasX variant
QEIKRINKIRRRLVKDSNTKKAGKTRGPMKTLLVRVMTPDLRERLENLRKKPENIPQPISNTSRANLNKLLTDYTEMKKAILHVYWEEFQKDPVGLMSRVAQPASKKIDQNKLKPEMDEKGNLTTAGFACSQCGQPLFVYKLEQVSEKGKAYTNYFGRCNVAEHEKLILLAQLKPEKDSDEAVTYSLGKFGQRALDFYSIHVTKESTHPVKPLAQIAGNRYASTPVGKALSDACMGTIASFLSKYQDIIIEHQKVVKGNQKRLESLRELAGKENLEYPSVTLPPQPHTKEGVDAYNEVIARVRMWVNLNLWQKLKLSRDDAKPLLRLKGFPSFPLVERQANEVDWWDMVCNVKKLINEKKEDGKVFWQNLAGYKRQEALRPYLSSEEDRKKGKKFARYQLGDLLLHLEKKHGEDWGKVYDEAWERIDKKVEGLSKHIKLEEERRSEDAQSKAALTDWLRAKASFVIEGLKEADKDEFCRCELKLQKWYGDLRGKPFAIEAENSILDISGFSKQYNCAFIWQKDGVKKLNLYLIINYFKGGKLRFKKIKPEAFEANRFYTVINKKSGEIVPMEVNFNFDDPNLIILPLAFGKRQGREFIWNDLLSLETGSLKLANGRVIEKTLYNRRTRQDEPALFVALTFERREVLDSSNIKPMNLIGVDRGENIPAVIALTDPEGCPLSRFKDSLGNPTHILRIGESYKEKQRTIQAKKEVEQRRAGGYSRKYASKAKNLADDMVRNTARDLLYYAVTQDAMLIFENLSRGFGRQGKRTFMAERQYTRMEDWLTAKLAYEGLPSQTYLSKTLAQYTSKTCSNCGFTITSADYDRVLEKLKKTATGWMTTINGKELKVEGQITYYNRYKRQNVVKDLSVELDRLSEESVNNDISSWTKGRSGEALSLLKKRFSHRPVQEKFVCLNCGFETHADEQAALNIARSWLFLRSQEYKKYQTNKTTGNTDKRAFVETWQSFYRKKLKEVWKPAV

SEQ ID NO: 40595 - protein, 979 aa, synthetic construct
  REGION 1..979: note = engineered CasX variant
QEIKRINKIRRRLVKDSNTKKAGKTRGPMKTLLVRVMTPDLRERLENLRKKPENIPQPISNTSRANLNKLLTDYTEMKKAILHVYWEEFQKDPVGLMSRVAQPASKKIDQNKLKPEMDEKGNLTTAGFACSQCGQPLFVYKLEQVSEKGKAYTNYFGRCNVAEHEKLILLAQLKPEKDSDEAVTYSLGKFGQRALDFYSIHVTKESTHPVKPLAQIAGNRYASAPVGKALSDACMGTIASFLSKYQDIIIEHQKVVKGNQKRLESLRELAGKENLEYPSVTLPPQPHTKEGVDAYNEVIARVRMWVNLNLWQKLKLSRDDAKPLLRLKGFPSFPLVERQANEVDWWDMVCNVKKLINEKKEDGKVFWQNLAGYKRQEALRPYLSSEEDRKKGKKFARYQLGDLLLHLEKKHGEDWGKVYDEAWERIDKKVEGLSKHIKLEEERRSEDAQSKAALTDWLRAKASFVIEGLKEADKDEFCRCELKLQKWYGDLRGKPFAIEAENSILDISGFSKQYNCAFIWQKDGVKKLNLYLIINYFKGGKLRFKKIKPEAFEANRFYTVINKKSGEIVPMEVNFNFDDPNLIILPLAFGKRQGREFIWNDLLSLETGSLKLANGRVIEKTLYNRRTRQDEPALFVALTFERREVLDSSNIKPMNLIGVDRGENIPAVIALTDPEGCPLSRFKDSLGNPTHILRIGESYKEKQRTIQAKKEVEQRRAGGYSRKYASKAKNLADDMVRNTARDLLYYAVTQDAMLIFENLSRGFGRQGKRTFMAERQYTRMEDWLTAKLAYEGLPSQTYLSKTLAQYTSKTCSNCGFTITSADYDRVLEKLKKTATGWMTTINGKELKVEGQITYYNRYKRQNVVKDLSVELDRLSEESVNNDISSWTKGRSGEALSLLKKRFSHRPVQEKFVCLNCGFETHADEQAALNIARSWLFLRSQEYKKYQTNKTTGNTDKRAFVETWQSFYRKKLKEVWKPAV

SEQ ID NO: 40596 - protein, 979 aa, synthetic construct
  REGION 1..979: note = engineered CasX variant
QEIKRINKIRRRLVKDSNTKKAGKTRGPMKTLLVRVMTPDLRERLENLRKKPENIPQPISNTSRANLNKLLTDYTEMKKAILHVYWEEFQKDPVGLMSRVAQPASKKIDQNKLKPEMDEKGNLTTAGFACSQCGQPLFVYKLEQVSEKGKAYTNYFGRCNVAEHEKLILLAQLKPEKDSDEAVTYSLGKFGQRALDFYSIHVTKESTHPVKPLAQIAGNRYASVPVGKALSDACMGTIASFLSKYQDIIIEHQKVVKGNQKRLESLRELAGKENLEYPSVTLPPQPHTKEGVDAYNEVIARVRMWVNLNLWQKLKLSRDDAKPLLRLKGFPSFPLVERQANEVDWWDMVCNVKKLINEKKEDGKVFWQNLAGYKRQEALRPYLSSEEDRKKGKKFARYQLGDLLLHLEKKHGEDWGKVYDEAWERIDKKVEGLSKHIKLEEERRSEDAQSKAALTDWLRAKASFVIEGLKEADKDEFCRCELKLQKWYGDLRGKPFAIEAENSILDISGFSKQYNCAFIWQKDGVKKLNLYLIINYFKGGKLRFKKIKPEAFEANRFYTVINKKSGEIVPMEVNFNFDDPNLIILPLAFGKRQGREFIWNDLLSLETGSLKLANGRVIEKTLYNRRTRQDEPALFVALTFERREVLDSSNIKPMNLIGVDRGENIPAVIALTDPEGCPLSRFKDSLGNPTHILRIGESYKEKQRTIQAKKEVEQRRAGGYSRKYASKAKNLADDMVRNTARDLLYYAVTQDAMLIFENLSRGFGRQGKRTFMAERQYTRMEDWLTAKLAYEGLPSQTYLSKTLAQYTSKTCSNCGFTITSADYDRVLEKLKKTATGWMTTINGKELKVEGQITYYNRYKRQNVVKDLSVELDRLSEESVNNDISSWTKGRSGEALSLLKKRFSHRPVQEKFVCLNCGFETHADEQAALNIARSWLFLRSQEYKKYQTNKTTGNTDKRAFVETWQSFYRKKLKEVWKPAV

SEQ ID NO: 40597 - protein, 979 aa, synthetic construct
  REGION 1..979: note = engineered CasX variant
QEIKRINKIRRRLVKDSNTKKAGKTRGPMKTLLVRVMTPDLRERLENLRKKPENIPQPISNTSRANLNKLLTDYTEMKKAILHVYWEEFQKDPVGLMSRVAQPASKKIDQNKLKPEMDEKGNLTTAGFACSQCGQPLFVYKLEQVSEKGKAYTNYFGRCNVAEHEKLIKLAQLKPEKDSDEAVTYSLGKFGQRALDFYSIHVTKESTHPVKPLAQIAGNRYASGPVGKALSDACMGTIASFLSKYQDIIIEHQKVVKGNQKRLESLRELAGKENLEYPSVTLPPQPHTKEGVDAYNEVIARVRMWVNLNLWQKLKLSRDDAKPLLRLKGFPSFPLVERQANEVDWWDMVCNVKKLINEKKEDGKVFWQNLAGYKRQEALRPYLSSEEDRKKGKKFARYQLGDLLLHLEKKHGEDWGKVYDEAWERIDKKVEGLSKHIKLEEERRSEDAQSKAALTDWLRAKASFVIEGLKEADKDEFCRCELKLQKWYGDLRGKPFAIEAENSILDISGFSKQYNCAFIWQKDGVKKLNLYLIINYFKGGKLRFKKIKPEAFEANRFYTVINKKSGEIVPMEVNFNFDDPNLIILPLAFGKRQGREFIWNDLLSLETGSLKLANGRVIEKTLYNRRTRQDEPALFVALTFERREVLDSSNIKPMNLIGVDRGENIPAVIALTDPEGCPLSRFKDSLGNPTHILRIGESYKEKQRTIQAKKEVEQRRAGGYSRKYASKAKNLADDMVRNTARDLLYYAVTQDAMLIFENLSRGFGRQGKRTFMAERQYTRMEDWLTAKLAYEGLPSQTYLSKTLAQYTSKTCSNCGFTITSADYDRVLEKLKKTATGWMTTINGKELKVEGQITYYNRYKRQNVVKDLSVELDRLSEESVNNDISSWTKGRSGEALSLLKKRFSHRPVQEKFVCLNCGFETHADEQAALNIARSWLFLRSQEYKKYQTNKTTGNTDKRAFVETWQSFYRKKLKEVWKPAV

SEQ ID NO: 40598 - protein, 978 aa, synthetic construct
  REGION 1..978: note = engineered CasX variant
QEIKRINKIRRRLVKDSNTKKAGKTRGPMKTLLVRVMTPDLRERLENLRKKPENIPQPISNTSRANLNKLLTDYTEMKKAILHVYWEEFQKDPVGLMSRVAQPASKKIDQNKLKPEMDEKGNLTTAGFACSQCGQPLFVYKLEQVSEKGKAYTNYFGRCNVAEHEKLILLAQLKPEKDSDEAVTYSLGKFGQRALDFYSIHVTKESTHPVKPLAQIAGNRYASPVGKALSDACMGTIASFLSKYQDIIIEHQKVVKGNQKRLESLRELAGKENLEYPSVTLPPQPHTKEGVDAYNEVIARVRMWVNLNLWQKLKLSRDDAKPLLRLKGFPSFPLVERQANEVDWWDMVCNVKKLINEKKEDGKVFWQNLAGYKRQEALRPYLSSEEDRKKGKKFARYQLGDLLLHLEKKHGEDWGKVYDEAWERIDKKVEGLSKHIKLEEERRSEDAQSKAALTDWLRAKASFVIEGLKEADKDEFCRCELKLQKWYGDLRGKPFAIEAENSILDISGFSKQYNCAFIWQKDGVKKLNLYLIINYFKGGKLRFKKIKPEAFEANRFYTVINKKSGEIVPMEVNFNFDDPNLIILPLAFGKRQGREFIWNDLLSLETGSLKLANGRVIEKTLYNRRTRQDEPALFVALTFERREVLDSSNIKPMNLIGVDRGENIPAVIALTDPEGCPLSRFKDSLGNPTHILRIGESYKEKQRTIQAKKEVEQRRAGGYSRKYASKAKNLADDMVRNTARDLLYYAVTQDAMLIFENLSRGFGRQGKRTFMAERQYTRMEDWLTAKLAYEGLPSQTYLSKTLAQYTSKTCSNCGFTITSADYDRVLEKLKKTATGWMTTINGKELKVEGQITYYNRYKRQNVVKDLSVELDRLSEESVNNDISSWTKGRSGEALSLLKKRFSHRPVQEKFVCLNCGFETHADEQAALNIARSWLFLRSQEYKKYQTNKTTGNTDKRAFVETWQSFYRKKLKEVWKPAV

SEQ ID NO: 40599 - protein, 979 aa, synthetic construct
  REGION 1..979: note = engineered CasX variant
QEIKRINKIRRRLVKDSNTKKAGKTRGPMKTLLVRVMTPDLRERLENLRKKPENIPQPISNTSRANLNKLLTDYTEMKKAILHVYWEEFQKDPVGLMSRVAQPASKKIDQNKLKPEMDEKGNLTTAGFACSQCGQPLFVYKLEQVSEKGKAYTNYFGRCNVAEHEKLILLAQLKPEKDSDEAVTYSLGKFGQRALDFYSIHVTKESTHPVKPLAQIAGNRYASYPVGKALSDACMGTIASFLSKYQDIIIEHQKVVKGNQKRLESLRELAGKENLEYPSVTLPPQPHTKEGVDAYNEVIARVRMWVNLNLWQKLKLSRDDAKPLLRLKGFPSFPLVERQANEVDWWDMVCNVKKLINEKKEDGKVFWQNLAGYKRQEALRPYLSSEEDRKKGKKFARYQLGDLLLHLEKKHGEDWGKVYDEAWERIDKKVEGLSKHIKLEEERRSEDAQSKAALTDWLRAKASFVIEGLKEADKDEFCRCELKLQKWYGDLRGKPFAIEAENSILDISGFSKQYNCAFIWQKDGVKKLNLYLIINYFKGGKLRFKKIKPEAFEANRFYTVINKKSGEIVPMEVNFNFDDPNLIILPLAFGKRQGREFIWNDLLSLETGSLKLANGRVIEKTLYNRRTRQDEPALFVALTFERREVLDSSNIKPMNLIGVDRGENIPAVIALTDPEGCPLSRFKDSLGNPTHILRIGESYKEKQRTIQAKKEVEQRRAGGYSRKYASKAKNLADDMVRNTARDLLYYAVTQDAMLIFENLSRGFGRQGKRTFMAERQYTRMEDWLTAKLAYNGLPSKTYLSKTLAQYTSKTCSNCGFTITSADYDRVLEKLKKTATGWMTTINGKELKVEGQITYYNRYKRQNVVKDLSVELDRLSEESVNNDISSWTKGRSGEALSLLKKRFSHRPVQEKFVCLNCGFETHADEQAALNIARSWLFLRSQEYKKYQTNKTTGNTDKRAFVETWQSFYRKKLKEVWKPAV

SEQ ID NO: 40600 - protein, 979 aa, synthetic construct
  REGION 1..979: note = engineered CasX variant
QEIKRINKIRRRLVKDSNTKKAGKTRGPMKTLLVRVMTPDLRERLENLRKKPENIPQPISNTSRANLNKLLTDYTEMKKAILHVYWEEFQKDPVGLMSRVAQPASKKIDQNKLKPEMDEKGNLTTAGFACSQCGQPLFVYKLEQVSEKGKAYTNYFGRCNVAEHEKLILLAQLKPEKDSDEAVTYSLGKFGQRALDFYSIHVTKESTHPVKPLAQIAGNRYASHPVGKALSDACMGTIASFLSKYQDIIIEHQKVVKGNQKRLESLRELAGKENLEYPSVTLPPQPHTKEGVDAYNEVIARVRMWVNLNLWQKLKLSRDDAKPLLRLKGFPSFPLVERQANEVDWWDMVCNVKKLINEKKEDGKVFWQNLAGYKRQEALRPYLSSEEDRKKGKKFARYQLGDLLLHLEKKHGEDWGKVYDEAWERIDKKVEGLSKHIKLEEERRSEDAQSKAALTDWLRAKASFVIEGLKEADKDEFCRCELKLQKWYGDLRGKPFAIEAENSILDISGFSKQYNCAFIWQKDGVKKLNLYLIINYFKGGKLRFKKIKPEAFEANRFYTVINKKSGEIVPMEVNFNFDDPNLIILPLAFGKRQGREFIWNDLLSLETGSLKLANGRVIEKTLYNRRTRQDEPALFVALTFERREVLDSSNIKPMNLIGVDRGENIPAVIALTDPEGCPLSRFKDSLGNPTHILRIGESYKEKQRTIQAKKEVEQRRAGGYSRKYASKAKNLADDMVRNTARDLLYYAVTQDAMLIFENLSRGFGRQGKRTFMAERQYTRMEDWLTAKLAYNGLPSKTYLSKTLAQYTSKTCSNCGFTITSADYDRVLEKLKKTATGWMTTINGKELKVEGQITYYNRYKRQNVVKDLSVELDRLSEESVNNDISSWTKGRSGEALSLLKKRFSHRPVQEKFVCLNCGFETHADEQAALNIARSWLFLRSQEYKKYQTNKTTGNTDKRAFVETWQSFYRKKLKEVWKPAV

SEQ ID NO: 40601 - protein, 979 aa, synthetic construct
  REGION 1..979: note = engineered CasX variant
QEIKRINKIRRRLVKDSNTKKAGKTRGPMKTLLVRVMTPDLRERLENLRKKPENIPQPISNTSRANLNKLLTDYTEMKKAILHVYWEEFQKDPVGLMSRVAQPASKKIDQNKLKPEMDEKGNLTTAGFACSQCGQPLFVYKLEQVSEKGKAYTNYFGRCNVAEHEKLILLAQLKPEKDSDEAVTYSLGKFGQRALDFYSIHVTKESTHPVKPLAQIAGNRYASSPVGKALSDACMGTIASFLSKYQDIIIEHQKVVKGNQKRLESLRELAGKENLEYPSVTLPPQPHTKEGVDAYNEVIARVRMWVNLNLWQKLKLSRDDAKPLLRLKGFPSFPLVERQANEVDWWDMVCNVKKLINEKKEDGKVFWQNLAGYKRQEALRPYLSSEEDRKKGKKFARYQLGDLLLHLEKKHGEDWGKVYDEAWERIDKKVEGLSKHIKLEEERRSEDAQSKAALTDWLRAKASFVIEGLKEADKDEFCRCELKLQKWYGDLRGKPFAIEAENSILDISGFSKQYNCAFIWQKDGVKKLNLYLIINYFKGGKLRFKKIKPEAFEANRFYTVINKKSGEIVPMEVNFNFDDPNLIILPLAFGKRQGREFIWNDLLSLETGSLKLANGRVIEKTLYNRRTRQDEPALFVALTFERREVLDSSNIKPMNLIGVDRGENIPAVIALTDPEGCPLSRFKDSLGNPTHILRIGESYKEKQRTIQAKKEVEQRRAGGYSRKYASKAKNLADDMVRNTARDLLYYAVTQDAMLIFENLSRGFGRQGKRTFMAERQYTRMEDWLTAKLAYNGLPSKTYLSKTLAQYTSKTCSNCGFTITSADYDRVLEKLKKTATGWMTTINGKELKVEGQITYYNRYKRQNVVKDLSVELDRLSEESVNNDISSWTKGRSGEALSLLKKRFSHRPVQEKFVCLNCGFETHADEQAALNIARSWLFLRSQEYKKYQTNKTTGNTDKRAFVETWQSFYRKKLKEVWKPAV

SEQ ID NO: 40602 - protein, 979 aa, synthetic construct
  REGION 1..979: note = engineered CasX variant
QEIKRINKIRRRLVKDSNTKKAGKTRGPMKTLLVRVMTPDLRERLENLRKKPENIPQPISNTSRANLNKLLTDYTEMKKAILHVYWEEFQKDPVGLMSRVAQPASKKIDQNKLKPEMDEKGNLTTAGFACSQCGQPLFVYKLEQVSEKGKAYTNYFGRCNVAEHEKLILLAQLKPEKDSDEAVTYSLGKFGQRALDFYSIHVTKESTHPVKPLAQIAGNRYASTPVGKALSDACMGTIASFLSKYQDIIIEHQKVVKGNQKRLESLRELAGKENLEYPSVTLPPQPHTKEGVDAYNEVIARVRMWVNLNLWQKLKLSRDDAKPLLRLKGFPSFPLVERQANEVDWWDMVCNVKKLINEKKEDGKVFWQNLAGYKRQEALRPYLSSEEDRKKGKKFARYQLGDLLLHLEKKHGEDWGKVYDEAWERIDKKVEGLSKHIKLEEERRSEDAQSKAALTDWLRAKASFVIEGLKEADKDEFCRCELKLQKWYGDLRGKPFAIEAENSILDISGFSKQYNCAFIWQKDGVKKLNLYLIINYFKGGKLRFKKIKPEAFEANRFYTVINKKSGEIVPMEVNFNFDDPNLIILPLAFGKRQGREFIWNDLLSLETGSLKLANGRVIEKTLYNRRTRQDEPALFVALTFERREVLDSSNIKPMNLIGVDRGENIPAVIALTDPEGCPLSRFKDSLGNPTHILRIGESYKEKQRTIQAKKEVEQRRAGGYSRKYASKAKNLADDMVRNTARDLLYYAVTQDAMLIFENLSRGFGRQGKRTFMAERQYTRMEDWLTAKLAYNGLPSKTYLSKTLAQYTSKTCSNCGFTITSADYDRVLEKLKKTATGWMTTINGKELKVEGQITYYNRYKRQNVVKDLSVELDRLSEESVNNDISSWTKGRSGEALSLLKKRFSHRPVQEKFVCLNCGFETHADEQAALNIARSWLFLRSQEYKKYQTNKTTGNTDKRAFVETWQSFYRKKLKEVWKPAV

SEQ ID NO: 40603 - protein, 979 aa, synthetic construct
  REGION 1..979: note = engineered CasX variant
QEIKRINKIRRRLVKDSNTKKAGKTRGPMKTLLVRVMTPDLRERLENLRKKPENIPQPISNTSRANLNKLLTDYTEMKKAILHVYWEEFQKDPVGLMSRVAQPASKKIDQNKLKPEMDEKGNLTTAGFACSQCGQPLFVYKLEQVSEKGKAYTNYFGRCNVAEHEKLILLAQLKPEKDSDEAVTYSLGKFGQRALDFYSIHVTKESTHPVKPLAQIAGNRYASAPVGKALSDACMGTIASFLSKYQDIIIEHQKVVKGNQKRLESLRELAGKENLEYPSVTLPPQPHTKEGVDAYNEVIARVRMWVNLNLWQKLKLSRDDAKPLLRLKGFPSFPLVERQANEVDWWDMVCNVKKLINEKKEDGKVFWQNLAGYKRQEALRPYLSSEEDRKKGKKFARYQLGDLLLHLEKKHGEDWGKVYDEAWERIDKKVEGLSKHIKLEEERRSEDAQSKAALTDWLRAKASFVIEGLKEADKDEFCRCELKLQKWYGDLRGKPFAIEAENSILDISGFSKQYNCAFIWQKDGVKKLNLYLIINYFKGGKLRFKKIKPEAFEANRFYTVINKKSGEIVPMEVNFNFDDPNLIILPLAFGKRQGREFIWNDLLSLETGSLKLANGRVIEKTLYNRRTRQDEPALFVALTFERREVLDSSNIKPMNLIGVDRGENIPAVIALTDPEGCPLSRFKDSLGNPTHILRIGESYKEKQRTIQAKKEVEQRRAGGYSRKYASKAKNLADDMVRNTARDLLYYAVTQDAMLIFENLSRGFGRQGKRTFMAERQYTRMEDWLTAKLAYNGLPSKTYLSKTLAQYTSKTCSNCGFTITSADYDRVLEKLKKTATGWMTTINGKELKVEGQITYYNRYKRQNVVKDLSVELDRLSEESVNNDISSWTKGRSGEALSLLKKRFSHRPVQEKFVCLNCGFETHADEQAALNIARSWLFLRSQEYKKYQTNKTTGNTDKRAFVETWQSFYRKKLKEVWKPAV

SEQ ID NO: 40604 - protein, 979 aa, synthetic construct
  REGION 1..979: note = engineered CasX variant
QEIKRINKIRRRLVKDSNTKKAGKTRGPMKTLLVRVMTPDLRERLENLRKKPENIPQPISNTSRANLNKLLTDYTEMKKAILHVYWEEFQKDPVGLMSRVAQPASKKIDQNKLKPEMDEKGNLTTAGFACSQCGQPLFVYKLEQVSEKGKAYTNYFGRCNVAEHEKLILLAQLKPEKDSDEAVTYSLGKFGQRALDFYSIHVTKESTHPVKPLAQIAGNRYASVPVGKALSDACMGTIASFLSKYQDIIIEHQKVVKGNQKRLESLRELAGKENLEYPSVTLPPQPHTKEGVDAYNEVIARVRMWVNLNLWQKLKLSRDDAKPLLRLKGFPSFPLVERQANEVDWWDMVCNVKKLINEKKEDGKVFWQNLAGYKRQEALRPYLSSEEDRKKGKKFARYQLGDLLLHLEKKHGEDWGKVYDEAWERIDKKVEGLSKHIKLEEERRSEDAQSKAALTDWLRAKASFVIEGLKEADKDEFCRCELKLQKWYGDLRGKPFAIEAENSILDISGFSKQYNCAFIWQKDGVKKLNLYLIINYFKGGKLRFKKIKPEAFEANRFYTVINKKSGEIVPMEVNFNFDDPNLIILPLAFGKRQGREFIWNDLLSLETGSLKLANGRVIEKTLYNRRTRQDEPALFVALTFERREVLDSSNIKPMNLIGVDRGENIPAVIALTDPEGCPLSRFKDSLGNPTHILRIGESYKEKQRTIQAKKEVEQRRAGGYSRKYASKAKNLADDMVRNTARDLLYYAVTQDAMLIFENLSRGFGRQGKRTFMAERQYTRMEDWLTAKLAYNGLPSKTYLSKTLAQYTSKTCSNCGFTITSADYDRVLEKLKKTATGWMTTINGKELKVEGQITYYNRYKRQNVVKDLSVELDRLSEESVNNDISSWTKGRSGEALSLLKKRFSHRPVQEKFVCLNCGFETHADEQAALNIARSWLFLRSQEYKKYQTNKTTGNTDKRAFVETWQSFYRKKLKEVWKPAV

SEQ ID NO: 40605 - protein, 979 aa, synthetic construct
  REGION 1..979: note = engineered CasX variant
QEIKRINKIRRRLVKDSNTKKAGKTRGPMKTLLVRVMTPDLRERLENLRKKPENIPQPISNTSRANLNKLLTDYTEMKKAILHVYWEEFQKDPVGLMSRVAQPASKKIDQNKLKPEMDEKGNLTTAGFACSQCGQPLFVYKLEQVSEKGKAYTNYFGRCNVAEHEKLIKLAQLKPEKDSDEAVTYSLGKFGQRALDFYSIHVTKESTHPVKPLAQIAGNRYASGPVGKALSDACMGTIASFLSKYQDIIIEHQKVVKGNQKRLESLRELAGKENLEYPSVTLPPQPHTKEGVDAYNEVIARVRMWVNLNLWQKLKLSRDDAKPLLRLKGFPSFPLVERQANEVDWWDMVCNVKKLINEKKEDGKVFWQNLAGYKRQEALRPYLSSEEDRKKGKKFARYQLGDLLLHLEKKHGEDWGKVYDEAWERIDKKVEGLSKHIKLEEERRSEDAQSKAALTDWLRAKASFVIEGLKEADKDEFCRCELKLQKWYGDLRGKPFAIEAENSILDISGFSKQYNCAFIWQKDGVKKLNLYLIINYFKGGKLRFKKIKPEAFEANRFYTVINKKSGEIVPMEVNFNFDDPNLIILPLAFGKRQGREFIWNDLLSLETGSLKLANGRVIEKTLYNRRTRQDEPALFVALTFERREVLDSSNIKPMNLIGVDRGENIPAVIALTDPEGCPLSRFKDSLGNPTHILRIGESYKEKQRTIQAKKEVEQRRAGGYSRKYASKAKNLADDMVRNTARDLLYYAVTQDAMLIFENLSRGFGRQGKRTFMAERQYTRMEDWLTAKLAYNGLPSKTYLSKTLAQYTSKTCSNCGFTITSADYDRVLEKLKKTATGWMTTINGKELKVEGQITYYNRYKRQNVVKDLSVELDRLSEESVNNDISSWTKGRSGEALSLLKKRFSHRPVQEKFVCLNCGFETHADEQAALNIARSWLFLRSQEYKKYQTNKTTGNTDKRAFVETWQSFYRKKLKEVWKPAV

SEQ ID NO: 40606 - protein, 978 aa, synthetic construct
  REGION 1..978: note = engineered CasX variant
QEIKRINKIRRRLVKDSNTKKAGKTRGPMKTLLVRVMTPDLRERLENLRKKPENIPQPISNTSRANLNKLLTDYTEMKKAILHVYWEEFQKDPVGLMSRVAQPASKKIDQNKLKPEMDEKGNLTTAGFACSQCGQPLFVYKLEQVSEKGKAYTNYFGRCNVAEHEKLILLAQLKPEKDSDEAVTYSLGKFGQRALDFYSIHVTKESTHPVKPLAQIAGNRYASPVGKALSDACMGTIASFLSKYQDIIIEHQKVVKGNQKRLESLRELAGKENLEYPSVTLPPQPHTKEGVDAYNEVIARVRMWVNLNLWQKLKLSRDDAKPLLRLKGFPSFPLVERQANEVDWWDMVCNVKKLINEKKEDGKVFWQNLAGYKRQEALRPYLSSEEDRKKGKKFARYQLGDLLLHLEKKHGEDWGKVYDEAWERIDKKVEGLSKHIKLEEERRSEDAQSKAALTDWLRAKASFVIEGLKEADKDEFCRCELKLQKWYGDLRGKPFAIEAENSILDISGFSKQYNCAFIWQKDGVKKLNLYLIINYFKGGKLRFKKIKPEAFEANRFYTVINKKSGEIVPMEVNFNFDDPNLIILPLAFGKRQGREFIWNDLLSLETGSLKLANGRVIEKTLYNRRTRQDEPALFVALTFERREVLDSSNIKPMNLIGVDRGENIPAVIALTDPEGCPLSRFKDSLGNPTHILRIGESYKEKQRTIQAKKEVEQRRAGGYSRKYASKAKNLADDMVRNTARDLLYYAVTQDAMLIFENLSRGFGRQGKRTFMAERQYTRMEDWLTAKLAYNGLPSKTYLSKTLAQYTSKTCSNCGFTITSADYDRVLEKLKKTATGWMTTINGKELKVEGQITYYNRYKRQNVVKDLSVELDRLSEESVNNDISSWTKGRSGEALSLLKKRFSHRPVQEKFVCLNCGFETHADEQAALNIARSWLFLRSQEYKKYQTNKTTGNTDKRAFVETWQSFYRKKLKEVWKPAV

SEQ ID NO: 40607 - protein, 979 aa, synthetic construct
  REGION 1..979: note = engineered CasX variant
QEIKRINKIRRRLVKDSNTKKAGKTRGPMKTLLVRVMTPDLRERLENLRKKPENIPQPISNTSRANLNKLLTDYTEMKKAILHVYWEEFQKDPVGLMSRVAQPASKKIDQNKLKPEMDEKGNLTTAGFACSQCGQPLFVYKLEQVSEKGKAYTNYFGRCNVAEHEKLIQLAQLKPEKDSDEAVTYSLGKFGQRALDFYSIHVTKESTHPVKPLAQIAGNRYASYPVGKALSDACMGTIASFLSKYQDIIIEHQKVVKGNQKRLESLRELAGKENLEYPSVTLPPQPHTKEGVDAYNEVIARVRMWVNLNLWQKLKLSRDDAKPLLRLKGFPSFPLVERQANEVDWWDMVCNVKKLINEKKEDGKVFWQNLAGYKRQEALRPYLSSEEDRKKGKKFARYQLGDLLLHLEKKHGEDWGKVYDEAWERIDKKVEGLSKHIKLEEERRSEDAQSKAALTDWLRAKASFVIEGLKEADKDEFCRCELKLQKWYGDLRGKPFAIEAENSILDISGFSKQYNCAFIWQKDGVKKLNLYLIINYFKGGKLRFKKIKPEAFEANRFYTVINKKSGEIVPMEVNFNFDDPNLIILPLAFGKRQGREFIWNDLLSLETGSLKLANGRVIEKTLYNRRTRQDEPALFVALTFERREVLDSSNIKPMNLIGVDRGENIPAVIALTDPEGCPLSRFKDSLGNPTHILRIGESYKEKQRTIQAKKEVEQRRAGGYSRKYASKAKNLADDMVRNTARDLLYYAVTQDAMLIFENLSRGFGRQGKRTFMAERQYTRMEDWLTAKLAYEGLPSKTYLSKTLAQYTSKTCSNCGFTITSADYDRVLEKLKKTATGWMTTINGKELKVEGQITYYNRYKRQNVVKDLSVELDRLSEESVNNDISSWTKGRSGEALSLLKKRFSHRPVQEKFVCLNCGFETHADEQAALNIARSWLFLRSQEYKKYQTNKTTGNTDKRAFVETWQSFYRKKLKEVWKPAV

SEQ ID NO: 40608 - protein, 979 aa, synthetic construct
  REGION 1..979: note = engineered CasX variant
QEIKRINKIRRRLVKDSNTKKAGKTRGPMKTLLVRVMTPDLRERLENLRKKPENIPQPISNTSRANLNKLLTDYTEMKKAILHVYWEEFQKDPVGLMSRVAQPASKKIDQNKLKPEMDEKGNLTTAGFACSQCGQPLFVYKLEQVSEKGKAYTNYFGRCNVAEHEKLIQLAQLKPEKDSDEAVTYSLGKFGQRALDFYSIHVTKESTHPVKPLAQIAGNRYASHPVGKALSDACMGTIASFLSKYQDIIIEHQKVVKGNQKRLESLRELAGKENLEYPSVTLPPQPHTKEGVDAYNEVIARVRMWVNLNLWQKLKLSRDDAKPLLRLKGFPSFPLVERQANEVDWWDMVCNVKKLINEKKEDGKVFWQNLAGYKRQEALRPYLSSEEDRKKGKKFARYQLGDLLLHLEKKHGEDWGKVYDEAWERIDKKVEGLSKHIKLEEERRSEDAQSKAALTDWLRAKASFVIEGLKEADKDEFCRCELKLQKWYGDLRGKPFAIEAENSILDISGFSKQYNCAFIWQKDGVKKLNLYLIINYFKGGKLRFKKIKPEAFEANRFYTVINKKSGEIVPMEVNFNFDDPNLIILPLAFGKRQGREFIWNDLLSLETGSLKLANGRVIEKTLYNRRTRQDEPALFVALTFERREVLDSSNIKPMNLIGVDRGENIPAVIALTDPEGCPLSRFKDSLGNPTHILRIGESYKEKQRTIQAKKEVEQRRAGGYSRKYASKAKNLADDMVRNTARDLLYYAVTQDAMLIFENLSRGFGRQGKRTFMAERQYTRMEDWLTAKLAYEGLPSKTYLSKTLAQYTSKTCSNCGFTITSADYDRVLEKLKKTATGWMTTINGKELKVEGQITYYNRYKRQNVVKDLSVELDRLSEESVNNDISSWTKGRSGEALSLLKKRFSHRPVQEKFVCLNCGFETHADEQAALNIARSWLFLRSQEYKKYQTNKTTGNTDKRAFVETWQSFYRKKLKEVWKPAV

SEQ ID NO: 40609 - protein, 979 aa, synthetic construct
  REGION 1..979: note = engineered CasX variant
QEIKRINKIRRRLVKDSNTKKAGKTRGPMKTLLVRVMTPDLRERLENLRKKPENIPQPISNTSRANLNKLLTDYTEMKKAILHVYWEEFQKDPVGLMSRVAQPASKKIDQNKLKPEMDEKGNLTTAGFACSQCGQPLFVYKLEQVSEKGKAYTNYFGRCNVAEHEKLIQLAQLKPEKDSDEAVTYSLGKFGQRALDFYSIHVTKESTHPVKPLAQIAGNRYASSPVGKALSDACMGTIASFLSKYQDIIIEHQKVVKGNQKRLESLRELAGKENLEYPSVTLPPQPHTKEGVDAYNEVIARVRMWVNLNLWQKLKLSRDDAKPLLRLKGFPSFPLVERQANEVDWWDMVCNVKKLINEKKEDGKVFWQNLAGYKRQEALRPYLSSEEDRKKGKKFARYQLGDLLLHLEKKHGEDWGKVYDEAWERIDKKVEGLSKHIKLEEERRSEDAQSKAALTDWLRAKASFVIEGLKEADKDEFCRCELKLQKWYGDLRGKPFAIEAENSILDISGFSKQYNCAFIWQKDGVKKLNLYLIINYFKGGKLRFKKIKPEAFEANRFYTVINKKSGEIVPMEVNFNFDDPNLIILPLAFGKRQGREFIWNDLLSLETGSLKLANGRVIEKTLYNRRTRQDEPALFVALTFERREVLDSSNIKPMNLIGVDRGENIPAVIALTDPEGCPLSRFKDSLGNPTHILRIGESYKEKQRTIQAKKEVEQRRAGGYSRKYASKAKNLADDMVRNTARDLLYYAVTQDAMLIFENLSRGFGRQGKRTFMAERQYTRMEDWLTAKLAYEGLPSKTYLSKTLAQYTSKTCSNCGFTITSADYDRVLEKLKKTATGWMTTINGKELKVEGQITYYNRYKRQNVVKDLSVELDRLSEESVNNDISSWTKGRSGEALSLLKKRFSHRPVQEKFVCLNCGFETHADEQAALNIARSWLFLRSQEYKKYQTNKTTGNTDKRAFVETWQSFYRKKLKEVWKPAV

SEQ ID NO: 40610 - protein, 979 aa, synthetic construct
  REGION 1..979: note = engineered CasX variant
QEIKRINKIRRRLVKDSNTKKAGKTRGPMKTLLVRVMTPDLRERLENLRKKPENIPQPISNTSRANLNKLLTDYTEMKKAILHVYWEEFQKDPVGLMSRVAQPASKKIDQNKLKPEMDEKGNLTTAGFACSQCGQPLFVYKLEQVSEKGKAYTNYFGRCNVAEHEKLIQLAQLKPEKDSDEAVTYSLGKFGQRALDFYSIHVTKESTHPVKPLAQIAGNRYASTPVGKALSDACMGTIASFLSKYQDIIIEHQKVVKGNQKRLESLRELAGKENLEYPSVTLPPQPHTKEGVDAYNEVIARVRMWVNLNLWQKLKLSRDDAKPLLRLKGFPSFPLVERQANEVDWWDMVCNVKKLINEKKEDGKVFWQNLAGYKRQEALRPYLSSEEDRKKGKKFARYQLGDLLLHLEKKHGEDWGKVYDEAWERIDKKVEGLSKHIKLEEERRSEDAQSKAALTDWLRAKASFVIEGLKEADKDEFCRCELKLQKWYGDLRGKPFAIEAENSILDISGFSKQYNCAFIWQKDGVKKLNLYLIINYFKGGKLRFKKIKPEAFEANRFYTVINKKSGEIVPMEVNFNFDDPNLIILPLAFGKRQGREFIWNDLLSLETGSLKLANGRVIEKTLYNRRTRQDEPALFVALTFERREVLDSSNIKPMNLIGVDRGENIPAVIALTDPEGCPLSRFKDSLGNPTHILRIGESYKEKQRTIQAKKEVEQRRAGGYSRKYASKAKNLADDMVRNTARDLLYYAVTQDAMLIFENLSRGFGRQGKRTFMAERQYTRMEDWLTAKLAYEGLPSKTYLSKTLAQYTSKTCSNCGFTITSADYDRVLEKLKKTATGWMTTINGKELKVEGQITYYNRYKRQNVVKDLSVELDRLSEESVNNDISSWTKGRSGEALSLLKKRFSHRPVQEKFVCLNCGFETHADEQAALNIARSWLFLRSQEYKKYQTNKTTGNTDKRAFVETWQSFYRKKLKEVWKPAV

SEQ ID NO: 40611 - protein, 979 aa, synthetic construct
  REGION 1..979: note = engineered CasX variant
QEIKRINKIRRRLVKDSNTKKAGKTRGPMKTLLVRVMTPDLRERLENLRKKPENIPQPISNTSRANLNKLLTDYTEMKKAILHVYWEEFQKDPVGLMSRVAQPASKKIDQNKLKPEMDEKGNLTTAGFACSQCGQPLFVYKLEQVSEKGKAYTNYFGRCNVAEHEKLIQLAQLKPEKDSDEAVTYSLGKFGQRALDFYSIHVTKESTHPVKPLAQIAGNRYASAPVGKALSDACMGTIASFLSKYQDIIIEHQKVVKGNQKRLESLRELAGKENLEYPSVTLPPQPHTKEGVDAYNEVIARVRMWVNLNLWQKLKLSRDDAKPLLRLKGFPSFPLVERQANEVDWWDMVCNVKKLINEKKEDGKVFWQNLAGYKRQEALRPYLSSEEDRKKGKKFARYQLGDLLLHLEKKHGEDWGKVYDEAWERIDKKVEGLSKHIKLEEERRSEDAQSKAALTDWLRAKASFVIEGLKEADKDEFCRCELKLQKWYGDLRGKPFAIEAENSILDISGFSKQYNCAFIWQKDGVKKLNLYLIINYFKGGKLRFKKIKPEAFEANRFYTVINKKSGEIVPMEVNFNFDDPNLIILPLAFGKRQGREFIWNDLLSLETGSLKLANGRVIEKTLYNRRTRQDEPALFVALTFERREVLDSSNIKPMNLIGVDRGENIPAVIALTDPEGCPLSRFKDSLGNPTHILRIGESYKEKQRTIQAKKEVEQRRAGGYSRKYASKAKNLADDMVRNTARDLLYYAVTQDAMLIFENLSRGFGRQGKRTFMAERQYTRMEDWLTAKLAYEGLPSKTYLSKTLAQYTSKTCSNCGFTITSADYDRVLEKLKKTATGWMTTINGKELKVEGQITYYNRYKRQNVVKDLSVELDRLSEESVNNDISSWTKGRSGEALSLLKKRFSHRPVQEKFVCLNCGFETHADEQAALNIARSWLFLRSQEYKKYQTNKTTGNTDKRAFVETWQSFYRKKLKEVWKPAV

SEQ ID NO: 40612 - protein, 979 aa, synthetic construct
  REGION 1..979: note = engineered CasX variant
QEIKRINKIRRRLVKDSNTKKAGKTRGPMKTLLVRVMTPDLRERLENLRKKPENIPQPISNTSRANLNKLLTDYTEMKKAILHVYWEEFQKDPVGLMSRVAQPASKKIDQNKLKPEMDEKGNLTTAGFACSQCGQPLFVYKLEQVSEKGKAYTNYFGRCNVAEHEKLIQLAQLKPEKDSDEAVTYSLGKFGQRALDFYSIHVTKESTHPVKPLAQIAGNRYASVPVGKALSDACMGTIASFLSKYQDIIIEHQKVVKGNQKRLESLRELAGKENLEYPSVTLPPQPHTKEGVDAYNEVIARVRMWVNLNLWQKLKLSRDDAKPLLRLKGFPSFPLVERQANEVDWWDMVCNVKKLINEKKEDGKVFWQNLAGYKRQEALRPYLSSEEDRKKGKKFARYQLGDLLLHLEKKHGEDWGKVYDEAWERIDKKVEGLSKHIKLEEERRSEDAQSKAALTDWLRAKASFVIEGLKEADKDEFCRCELKLQKWYGDLRGKPFAIEAENSILDISGFSKQYNCAFIWQKDGVKKLNLYLIINYFKGGKLRFKKIKPEAFEANRFYTVINKKSGEIVPMEVNFNFDDPNLIILPLAFGKRQGREFIWNDLLSLETGSLKLANGRVIEKTLYNRRTRQDEPALFVALTFERREVLDSSNIKPMNLIGVDRGENIPAVIALTDPEGCPLSRFKDSLGNPTHILRIGESYKEKQRTIQAKKEVEQRRAGGYSRKYASKAKNLADDMVRNTARDLLYYAVTQDAMLIFENLSRGFGRQGKRTFMAERQYTRMEDWLTAKLAYEGLPSKTYLSKTLAQYTSKTCSNCGFTITSADYDRVLEKLKKTATGWMTTINGKELKVEGQITYYNRYKRQNVVKDLSVELDRLSEESVNNDISSWTKGRSGEALSLLKKRFSHRPVQEKFVCLNCGFETHADEQAALNIARSWLFLRSQEYKKYQTNKTTGNTDKRAFVETWQSFYRKKLKEVWKPAV

SEQ ID NO: 40613 - protein, 980 aa, synthetic construct
  REGION 1..980: note = engineered CasX variant
QEIKRINKIRRRLVKDSNTKKAGKTRGPMKTLLVRVMTPDLRERLENLRKKPENIPQPISNTSRANLNKLLTDYTEMKKAILHVYWEEFQKDPVGLMSRVAQPASKKIDQNKLKPEMDEKGNLTTAGFACSQCGQPLFVYKLEQVSEKGKAYTNYFGRCNVAEHEKLIQKLAQLKPEKDSDEAVTYSLGKFGQRALDFYSIHVTKESTHPVKPLAQIAGNRYASGPVGKALSDACMGTIASFLSKYQDIIIEHQKVVKGNQKRLESLRELAGKENLEYPSVTLPPQPHTKEGVDAYNEVIARVRMWVNLNLWQKLKLSRDDAKPLLRLKGFPSFPLVERQANEVDWWDMVCNVKKLINEKKEDGKVFWQNLAGYKRQEALRPYLSSEEDRKKGKKFARYQLGDLLLHLEKKHGEDWGKVYDEAWERIDKKVEGLSKHIKLEEERRSEDAQSKAALTDWLRAKASFVIEGLKEADKDEFCRCELKLQKWYGDLRGKPFAIEAENSILDISGFSKQYNCAFIWQKDGVKKLNLYLIINYFKGGKLRFKKIKPEAFEANRFYTVINKKSGEIVPMEVNFNFDDPNLIILPLAFGKRQGREFIWNDLLSLETGSLKLANGRVIEKTLYNRRTRQDEPALFVALTFERREVLDSSNIKPMNLIGVDRGENIPAVIALTDPEGCPLSRFKDSLGNPTHILRIGESYKEKQRTIQAKKEVEQRRAGGYSRKYASKAKNLADDMVRNTARDLLYYAVTQDAMLIFENLSRGFGRQGKRTFMAERQYTRMEDWLTAKLAYEGLPSKTYLSKTLAQYTSKTCSNCGFTITSADYDRVLEKLKKTATGWMTTINGKELKVEGQITYYNRYKRQNVVKDLSVELDRLSEESVNNDISSWTKGRSGEALSLLKKRFSHRPVQEKFVCLNCGFETHADEQAALNIARSWLFLRSQEYKKYQTNKTTGNTDKRAFVETWQSFYRKKLKEVWKPAV

SEQ ID NO: 40614 - protein, 978 aa, synthetic construct
  REGION 1..978: note = engineered CasX variant
QEIKRINKIRRRLVKDSNTKKAGKTRGPMKTLLVRVMTPDLRERLENLRKKPENIPQPISNTSRANLNKLLTDYTEMKKAILHVYWEEFQKDPVGLMSRVAQPASKKIDQNKLKPEMDEKGNLTTAGFACSQCGQPLFVYKLEQVSEKGKAYTNYFGRCNVAEHEKLIQLAQLKPEKDSDEAVTYSLGKFGQRALDFYSIHVTKESTHPVKPLAQIAGNRYASPVGKALSDACMGTIASFLSKYQDIIIEHQKVVKGNQKRLESLRELAGKENLEYPSVTLPPQPHTKEGVDAYNEVIARVRMWVNLNLWQKLKLSRDDAKPLLRLKGFPSFPLVERQANEVDWWDMVCNVKKLINEKKEDGKVFWQNLAGYKRQEALRPYLSSEEDRKKGKKFARYQLGDLLLHLEKKHGEDWGKVYDEAWERIDKKVEGLSKHIKLEEERRSEDAQSKAALTDWLRAKASFVIEGLKEADKDEFCRCELKLQKWYGDLRGKPFAIEAENSILDISGFSKQYNCAFIWQKDGVKKLNLYLIINYFKGGKLRFKKIKPEAFEANRFYTVINKKSGEIVPMEVNFNFDDPNLIILPLAFGKRQGREFIWNDLLSLETGSLKLANGRVIEKTLYNRRTRQDEPALFVALTFERREVLDSSNIKPMNLIGVDRGENIPAVIALTDPEGCPLSRFKDSLGNPTHILRIGESYKEKQRTIQAKKEVEQRRAGGYSRKYASKAKNLADDMVRNTARDLLYYAVTQDAMLIFENLSRGFGRQGKRTFMAERQYTRMEDWLTAKLAYEGLPSKTYLSKTLAQYTSKTCSNCGFTITSADYDRVLEKLKKTATGWMTTINGKELKVEGQITYYNRYKRQNVVKDLSVELDRLSEESVNNDISSWTKGRSGEALSLLKKRFSHRPVQEKFVCLNCGFETHADEQAALNIARSWLFLRSQEYKKYQTNKTTGNTDKRAFVETWQSFYRKKLKEVWKPAV

SEQ ID NO: 40615 - protein, 979 aa, synthetic construct
  REGION 1..979: note = engineered CasX variant
QEIKRINKIRRRLVKDSNTKKAGKTRGPMKTLLVRVMTPDLRERLENLRKKPENIPQPISNTSRANLNKLLTDYTEMKKAILHVYWEEFQKDPVGLMSRVAQPASKKIDQNKLKPEMDEKGNLTTAGFACSQCGQPLFVYKLEQVSEKGKAYTNYFGRCNVAEHEKLILLAQLKPEKDSDEAVTYSLGKFGQRALDFYSIHVTKESTHPVKPLAQIAGNRYASYPVGKALSDACMGTIASFLSKYQDIIIEHQKVVKGNQKRLESLRELAGKENLEYPSVTLPPQPHTKEGVDAYNEVIARVRMWVNLNLWQKLKLSRDDAKPLLRLKGFPSFPLVERQANEVDWWDMVCNVKKLINEKKEDGKVFWQNLAIYKRQEALRPYLSSEEDRKKGKKFARYQLGDLLLHLEKKHGEDWGKVYDEAWERIDKKVEGLSKHIKLEEERRSEDAQSKAALTDWLRAKASFVIEGLKEADKDEFCRCELKLQKWYGDLRGKPFAIEAENSILDISGFSKQYNCAFIWQKDGVKKLNLYLIINYFKGGKLRFKKIKPEAFEANRFYTVINKKSGEIVPMEVNFNFDDPNLIILPLAFGKRQGREFIWNDLLSLETGSLKLANGRVIEKTLYNRRTRQDEPALFVALTFERREVLDSSNIKPMNLIGVDRGENIPAVIALTDPEGCPLSRFKDSLGNPTHILRIGESYKEKQRTIQAKKEVEQRRAGGYSRKYASKAKNLADDMVRNTARDLLYYAVTQDAMLIFENLSRGFGRQGKRTFMAERQYTRMEDWLTAKLAYEGLPSKTYLSKTLAQYTSKTCSNCGFTITSADYDRVLEKLKKTATGWMTTINGKELKVEGQITYYNRYKRQNVVKDLSVELDRLSEESVNNDISSWTKGRSGEALSLLKKRFSHRPVQEKFVCLNCGFETHADEQAALNIARSWLFLRSQEYKKYQTNKTTGNTDKRAFVETWQSFYRKKLKEVWKPAV

SEQ ID NO: 40616 - protein, 979 aa, synthetic construct
  REGION 1..979: note = engineered CasX variant
QEIKRINKIRRRLVKDSNTKKAGKTRGPMKTLLVRVMTPDLRERLENLRKKPENIPQPISNTSRANLNKLLTDYTEMKKAILHVYWEEFQKDPVGLMSRVAQPASKKIDQNKLKPEMDEKGNLTTAGFACSQCGQPLFVYKLEQVSEKGKAYTNYFGRCNVAEHEKLILLAQLKPEKDSDEAVTYSLGKFGQRALDFYSIHVTKESTHPVKPLAQIAGNRYASHPVGKALSDACMGTIASFLSKYQDIIIEHQKVVKGNQKRLESLRELAGKENLEYPSVTLPPQPHTKEGVDAYNEVIARVRMWVNLNLWQKLKLSRDDAKPLLRLKGFPSFPLVERQANEVDWWDMVCNVKKLINEKKEDGKVFWQNLAIYKRQEALRPYLSSEEDRKKGKKFARYQLGDLLLHLEKKHGEDWGKVYDEAWERIDKKVEGLSKHIKLEEERRSEDAQSKAALTDWLRAKASFVIEGLKEADKDEFCRCELKLQKWYGDLRGKPFAIEAENSILDISGFSKQYNCAFIWQKDGVKKLNLYLIINYFKGGKLRFKKIKPEAFEANRFYTVINKKSGEIVPMEVNFNFDDPNLIILPLAFGKRQGREFIWNDLLSLETGSLKLANGRVIEKTLYNRRTRQDEPALFVALTFERREVLDSSNIKPMNLIGVDRGENIPAVIALTDPEGCPLSRFKDSLGNPTHILRIGESYKEKQRTIQAKKEVEQRRAGGYSRKYASKAKNLADDMVRNTARDLLYYAVTQDAMLIFENLSRGFGRQGKRTFMAERQYTRMEDWLTAKLAYEGLPSKTYLSKTLAQYTSKTCSNCGFTITSADYDRVLEKLKKTATGWMTTINGKELKVEGQITYYNRYKRQNVVKDLSVELDRLSEESVNNDISSWTKGRSGEALSLLKKRFSHRPVQEKFVCLNCGFETHADEQAALNIARSWLFLRSQEYKKYQTNKTTGNTDKRAFVETWQSFYRKKLKEVWKPAV

SEQ ID NO: 40617 - protein, 979 aa, synthetic construct
  REGION 1..979: note = engineered CasX variant
QEIKRINKIRRRLVKDSNTKKAGKTRGPMKTLLVRVMTPDLRERLENLRKKPENIPQPISNTSRANLNKLLTDYTEMKKAILHVYWEEFQKDPVGLMSRVAQPASKKIDQNKLKPEMDEKGNLTTAGFACSQCGQPLFVYKLEQVSEKGKAYTNYFGRCNVAEHEKLILLAQLKPEKDSDEAVTYSLGKFGQRALDFYSIHVTKESTHPVKPLAQIAGNRYASSPVGKALSDACMGTIASFLSKYQDIIIEHQKVVKGNQKRLESLRELAGKENLEYPSVTLPPQPHTKEGVDAYNEVIARVRMWVNLNLWQKLKLSRDDAKPLLRLKGFPSFPLVERQANEVDWWDMVCNVKKLINEKKEDGKVFWQNLAIYKRQEALRPYLSSEEDRKKGKKFARYQLGDLLLHLEKKHGEDWGKVYDEAWERIDKKVEGLSKHIKLEEERRSEDAQSKAALTDWLRAKASFVIEGLKEADKDEFCRCELKLQKWYGDLRGKPFAIEAENSILDISGFSKQYNCAFIWQKDGVKKLNLYLIINYFKGGKLRFKKIKPEAFEANRFYTVINKKSGEIVPMEVNFNFDDPNLIILPLAFGKRQGREFIWNDLLSLETGSLKLANGRVIEKTLYNRRTRQDEPALFVALTFERREVLDSSNIKPMNLIGVDRGENIPAVIALTDPEGCPLSRFKDSLGNPTHILRIGESYKEKQRTIQAKKEVEQRRAGGYSRKYASKAKNLADDMVRNTARDLLYYAVTQDAMLIFENLSRGFGRQGKRTFMAERQYTRMEDWLTAKLAYEGLPSKTYLSKTLAQYTSKTCSNCGFTITSADYDRVLEKLKKTATGWMTTINGKELKVEGQITYYNRYKRQNVVKDLSVELDRLSEESVNNDISSWTKGRSGEALSLLKKRFSHRPVQEKFVCLNCGFETHADEQAALNIARSWLFLRSQEYKKYQTNKTTGNTDKRAFVETWQSFYRKKLKEVWKPAV

SEQ ID NO: 40618 - protein, 979 aa, synthetic construct
  REGION 1..979: note = engineered CasX variant
QEIKRINKIRRRLVKDSNTKKAGKTRGPMKTLLVRVMTPDLRERLENLRKKPENIPQPISNTSRANLNKLLTDYTEMKKAILHVYWEEFQKDPVGLMSRVAQPASKKIDQNKLKPEMDEKGNLTTAGFACSQCGQPLFVYKLEQVSEKGKAYTNYFGRCNVAEHEKLILLAQLKPEKDSDEAVTYSLGKFGQRALDFYSIHVTKESTHPVKPLAQIAGNRYASTPVGKALSDACMGTIASFLSKYQDIIIEHQKVVKGNQKRLESLRELAGKENLEYPSVTLPPQPHTKEGVDAYNEVIARVRMWVNLNLWQKLKLSRDDAKPLLRLKGFPSFPLVERQANEVDWWDMVCNVKKLINEKKEDGKVFWQNLAIYKRQEALRPYLSSEEDRKKGKKFARYQLGDLLLHLEKKHGEDWGKVYDEAWERIDKKVEGLSKHIKLEEERRSEDAQSKAALTDWLRAKASFVIEGLKEADKDEFCRCELKLQKWYGDLRGKPFAIEAENSILDISGFSKQYNCAFIWQKDGVKKLNLYLIINYFKGGKLRFKKIKPEAFEANRFYTVINKKSGEIVPMEVNFNFDDPNLIILPLAFGKRQGREFIWNDLLSLETGSLKLANGRVIEKTLYNRRTRQDEPALFVALTFERREVLDSSNIKPMNLIGVDRGENIPAVIALTDPEGCPLSRFKDSLGNPTHILRIGESYKEKQRTIQAKKEVEQRRAGGYSRKYASKAKNLADDMVRNTARDLLYYAVTQDAMLIFENLSRGFGRQGKRTFMAERQYTRMEDWLTAKLAYEGLPSKTYLSKTLAQYTSKTCSNCGFTITSADYDRVLEKLKKTATGWMTTINGKELKVEGQITYYNRYKRQNVVKDLSVELDRLSEESVNNDISSWTKGRSGEALSLLKKRFSHRPVQEKFVCLNCGFETHADEQAALNIARSWLFLRSQEYKKYQTNKTTGNTDKRAFVETWQSFYRKKLKEVWKPAV

SEQ ID NO: 40619 - protein, 979 aa, synthetic construct
  REGION 1..979: note = engineered CasX variant
QEIKRINKIRRRLVKDSNTKKAGKTRGPMKTLLVRVMTPDLRERLENLRKKPENIPQPISNTSRANLNKLLTDYTEMKKAILHVYWEEFQKDPVGLMSRVAQPASKKIDQNKLKPEMDEKGNLTTAGFACSQCGQPLFVYKLEQVSEKGKAYTNYFGRCNVAEHEKLILLAQLKPEKDSDEAVTYSLGKFGQRALDFYSIHVTKESTHPVKPLAQIAGNRYASAPVGKALSDACMGTIASFLSKYQDIIIEHQKVVKGNQKRLESLRELAGKENLEYPSVTLPPQPHTKEGVDAYNEVIARVRMWVNLNLWQKLKLSRDDAKPLLRLKGFPSFPLVERQANEVDWWDMVCNVKKLINEKKEDGKVFWQNLAIYKRQEALRPYLSSEEDRKKGKKFARYQLGDLLLHLEKKHGEDWGKVYDEAWERIDKKVEGLSKHIKLEEERRSEDAQSKAALTDWLRAKASFVIEGLKEADKDEFCRCELKLQKWYGDLRGKPFAIEAENSILDISGFSKQYNCAFIWQKDGVKKLNLYLIINYFKGGKLRFKKIKPEAFEANRFYTVINKKSGEIVPMEVNFNFDDPNLIILPLAFGKRQGREFIWNDLLSLETGSLKLANGRVIEKTLYNRRTRQDEPALFVALTFERREVLDSSNIKPMNLIGVDRGENIPAVIALTDPEGCPLSRFKDSLGNPTHILRIGESYKEKQRTIQAKKEVEQRRAGGYSRKYASKAKNLADDMVRNTARDLLYYAVTQDAMLIFENLSRGFGRQGKRTFMAERQYTRMEDWLTAKLAYEGLPSKTYLSKTLAQYTSKTCSNCGFTITSADYDRVLEKLKKTATGWMTTINGKELKVEGQITYYNRYKRQNVVKDLSVELDRLSEESVNNDISSWTKGRSGEALSLLKKRFSHRPVQEKFVCLNCGFETHADEQAALNIARSWLFLRSQEYKKYQTNKTTGNTDKRAFVETWQSFYRKKLKEVWKPAV

SEQ ID NO: 40620 - protein, 979 aa, synthetic construct
  REGION 1..979: note = engineered CasX variant
QEIKRINKIRRRLVKDSNTKKAGKTRGPMKTLLVRVMTPDLRERLENLRKKPENIPQPISNTSRANLNKLLTDYTEMKKAILHVYWEEFQKDPVGLMSRVAQPASKKIDQNKLKPEMDEKGNLTTAGFACSQCGQPLFVYKLEQVSEKGKAYTNYFGRCNVAEHEKLILLAQLKPEKDSDEAVTYSLGKFGQRALDFYSIHVTKESTHPVKPLAQIAGNRYASVPVGKALSDACMGTIASFLSKYQDIIIEHQKVVKGNQKRLESLRELAGKENLEYPSVTLPPQPHTKEGVDAYNEVIARVRMWVNLNLWQKLKLSRDDAKPLLRLKGFPSFPLVERQANEVDWWDMVCNVKKLINEKKEDGKVFWQNLAIYKRQEALRPYLSSEEDRKKGKKFARYQLGDLLLHLEKKHGEDWGKVYDEAWERIDKKVEGLSKHIKLEEERRSEDAQSKAALTDWLRAKASFVIEGLKEADKDEFCRCELKLQKWYGDLRGKPFAIEAENSILDISGFSKQYNCAFIWQKDGVKKLNLYLIINYFKGGKLRFKKIKPEAFEANRFYTVINKKSGEIVPMEVNFNFDDPNLIILPLAFGKRQGREFIWNDLLSLETGSLKLANGRVIEKTLYNRRTRQDEPALFVALTFERREVLDSSNIKPMNLIGVDRGENIPAVIALTDPEGCPLSRFKDSLGNPTHILRIGESYKEKQRTIQAKKEVEQRRAGGYSRKYASKAKNLADDMVRNTARDLLYYAVTQDAMLIFENLSRGFGRQGKRTFMAERQYTRMEDWLTAKLAYEGLPSKTYLSKTLAQYTSKTCSNCGFTITSADYDRVLEKLKKTATGWMTTINGKELKVEGQITYYNRYKRQNVVKDLSVELDRLSEESVNNDISSWTKGRSGEALSLLKKRFSHRPVQEKFVCLNCGFETHADEQAALNIARSWLFLRSQEYKKYQTNKTTGNTDKRAFVETWQSFYRKKLKEVWKPAV

SEQ ID NO: 40621 - protein, 979 aa, synthetic construct
  REGION 1..979: note = engineered CasX variant
QEIKRINKIRRRLVKDSNTKKAGKTRGPMKTLLVRVMTPDLRERLENLRKKPENIPQPISNTSRANLNKLLTDYTEMKKAILHVYWEEFQKDPVGLMSRVAQPASKKIDQNKLKPEMDEKGNLTTAGFACSQCGQPLFVYKLEQVSEKGKAYTNYFGRCNVAEHEKLIKLAQLKPEKDSDEAVTYSLGKFGQRALDFYSIHVTKESTHPVKPLAQIAGNRYASGPVGKALSDACMGTIASFLSKYQDIIIEHQKVVKGNQKRLESLRELAGKENLEYPSVTLPPQPHTKEGVDAYNEVIARVRMWVNLNLWQKLKLSRDDAKPLLRLKGFPSFPLVERQANEVDWWDMVCNVKKLINEKKEDGKVFWQNLAIYKRQEALRPYLSSEEDRKKGKKFARYQLGDLLLHLEKKHGEDWGKVYDEAWERIDKKVEGLSKHIKLEEERRSEDAQSKAALTDWLRAKASFVIEGLKEADKDEFCRCELKLQKWYGDLRGKPFAIEAENSILDISGFSKQYNCAFIWQKDGVKKLNLYLIINYFKGGKLRFKKIKPEAFEANRFYTVINKKSGEIVPMEVNFNFDDPNLIILPLAFGKRQGREFIWNDLLSLETGSLKLANGRVIEKTLYNRRTRQDEPALFVALTFERREVLDSSNIKPMNLIGVDRGENIPAVIALTDPEGCPLSRFKDSLGNPTHILRIGESYKEKQRTIQAKKEVEQRRAGGYSRKYASKAKNLADDMVRNTARDLLYYAVTQDAMLIFENLSRGFGRQGKRTFMAERQYTRMEDWLTAKLAYEGLPSKTYLSKTLAQYTSKTCSNCGFTITSADYDRVLEKLKKTATGWMTTINGKELKVEGQITYYNRYKRQNVVKDLSVELDRLSEESVNNDISSWTKGRSGEALSLLKKRFSHRPVQEKFVCLNCGFETHADEQAALNIARSWLFLRSQEYKKYQTNKTTGNTDKRAFVETWQSFYRKKLKEVWKPAV

SEQ ID NO: 40622 - protein, 978 aa, synthetic construct
  REGION 1..978: note = engineered CasX variant
QEIKRINKIRRRLVKDSNTKKAGKTRGPMKTLLVRVMTPDLRERLENLRKKPENIPQPISNTSRANLNKLLTDYTEMKKAILHVYWEEFQKDPVGLMSRVAQPASKKIDQNKLKPEMDEKGNLTTAGFACSQCGQPLFVYKLEQVSEKGKAYTNYFGRCNVAEHEKLILLAQLKPEKDSDEAVTYSLGKFGQRALDFYSIHVTKESTHPVKPLAQIAGNRYASPVGKALSDACMGTIASFLSKYQDIIIEHQKVVKGNQKRLESLRELAGKENLEYPSVTLPPQPHTKEGVDAYNEVIARVRMWVNLNLWQKLKLSRDDAKPLLRLKGFPSFPLVERQANEVDWWDMVCNVKKLINEKKEDGKVFWQNLAIYKRQEALRPYLSSEEDRKKGKKFARYQLGDLLLHLEKKHGEDWGKVYDEAWERIDKKVEGLSKHIKLEEERRSEDAQSKAALTDWLRAKASFVIEGLKEADKDEFCRCELKLQKWYGDLRGKPFAIEAENSILDISGFSKQYNCAFIWQKDGVKKLNLYLIINYFKGGKLRFKKIKPEAFEANRFYTVINKKSGEIVPMEVNFNFDDPNLIILPLAFGKRQGREFIWNDLLSLETGSLKLANGRVIEKTLYNRRTRQDEPALFVALTFERREVLDSSNIKPMNLIGVDRGENIPAVIALTDPEGCPLSRFKDSLGNPTHILRIGESYKEKQRTIQAKKEVEQRRAGGYSRKYASKAKNLADDMVRNTARDLLYYAVTQDAMLIFENLSRGFGRQGKRTFMAERQYTRMEDWLTAKLAYEGLPSKTYLSKTLAQYTSKTCSNCGFTITSADYDRVLEKLKKTATGWMTTINGKELKVEGQITYYNRYKRQNVVKDLSVELDRLSEESVNNDISSWTKGRSGEALSLLKKRFSHRPVQEKFVCLNCGFETHADEQAALNIARSWLFLRSQEYKKYQTNKTTGNTDKRAFVETWQSFYRKKLKEVWKPAV

SEQ ID NO: 40623 - protein, 979 aa, synthetic construct
  REGION 1..979: note = engineered CasX variant
QEIKRINKIRRRLVKDSNTKKAGKTRGPMKTLLVRVMTPDLRERLENLRKKPENIPQPISNTSRANLNKLLTDYTEMKKAILHVYWEEFQKDPVGLMSRVAQPASKKIDQNKLKPEMDEKGNLTTAGFACSQCGQPLFVYKLEQVSEKGKAYTNYFGRCNVAEHEKLILLAQLKPEKDSDEAVTYSLGKFGQRALDFYSIHVTKESTHPVKPLAQIAGNRYASYPVGKALSDACMGTIASFLSKYQDIIIEHQKVVKGNQKRLESLRELAGKENLEYPSVTLPPQPHTKEGVDAYNEVIARVRMWVNLNLWQKLKLSRDDAKPLLRLKGFPSFPLVERQANEVDWWDMVCNVKKLINEKKEDGKVFWQNLAGYKRQEALRPYLSSEEDREKGKKFARYQLGDLLLHLEKKHGEDWGKVYDEAWERIDKKVEGLSKHIKLEEERRSEDAQSKAALTDWLRAKASFVIEGLKEADKDEFCRCELKLQKWYGDLRGKPFAIEAENSILDISGFSKQYNCAFIWQKDGVKKLNLYLIINYFKGGKLRFKKIKPEAFEANRFYTVINKKSGEIVPMEVNFNFDDPNLIILPLAFGKRQGREFIWNDLLSLETGSLKLANGRVIEKTLYNRRTRQDEPALFVALTFERREVLDSSNIKPMNLIGVDRGENIPAVIALTDPEGCPLSRFKDSLGNPTHILRIGESYKEKQRTIQAKKEVEQRRAGGYSRKYASKAKNLADDMVRNTARDLLYYAVTQDAMLIFENLSRGFGRQGKRTFMAERQYTRMEDWLTAKLAYEGLPSKTYLSKTLAQYTSKTCSNCGFTITSADYDRVLEKLKKTATGWMTTINGKELKVEGQITYYNRYKRQNVVKDLSVELDRLSEESVNNDISSWTKGRSGEALSLLKKRFSHRPVQEKFVCLNCGFETHADEQAALNIARSWLFLRSQEYKKYQTNKTTGNTDKRAFVETWQSFYRKKLKEVWKPAV

SEQ ID NO: 40624 - protein, 979 aa, synthetic construct
  REGION 1..979: note = engineered CasX variant
QEIKRINKIRRRLVKDSNTKKAGKTRGPMKTLLVRVMTPDLRERLENLRKKPENIPQPISNTSRANLNKLLTDYTEMKKAILHVYWEEFQKDPVGLMSRVAQPASKKIDQNKLKPEMDEKGNLTTAGFACSQCGQPLFVYKLEQVSEKGKAYTNYFGRCNVAEHEKLILLAQLKPEKDSDEAVTYSLGKFGQRALDFYSIHVTKESTHPVKPLAQIAGNRYASHPVGKALSDACMGTIASFLSKYQDIIIEHQKVVKGNQKRLESLRELAGKENLEYPSVTLPPQPHTKEGVDAYNEVIARVRMWVNLNLWQKLKLSRDDAKPLLRLKGFPSFPLVERQANEVDWWDMVCNVKKLINEKKEDGKVFWQNLAGYKRQEALRPYLSSEEDREKGKKFARYQLGDLLLHLEKKHGEDWGKVYDEAWERIDKKVEGLSKHIKLEEERRSEDAQSKAALTDWLRAKASFVIEGLKEADKDEFCRCELKLQKWYGDLRGKPFAIEAENSILDISGFSKQYNCAFIWQKDGVKKLNLYLIINYFKGGKLRFKKIKPEAFEANRFYTVINKKSGEIVPMEVNFNFDDPNLIILPLAFGKRQGREFIWNDLLSLETGSLKLANGRVIEKTLYNRRTRQDEPALFVALTFERREVLDSSNIKPMNLIGVDRGENIPAVIALTDPEGCPLSRFKDSLGNPTHILRIGESYKEKQRTIQAKKEVEQRRAGGYSRKYASKAKNLADDMVRNTARDLLYYAVTQDAMLIFENLSRGFGRQGKRTFMAERQYTRMEDWLTAKLAYEGLPSKTYLSKTLAQYTSKTCSNCGFTITSADYDRVLEKLKKTATGWMTTINGKELKVEGQITYYNRYKRQNVVKDLSVELDRLSEESVNNDISSWTKGRSGEALSLLKKRFSHRPVQEKFVCLNCGFETHADEQAALNIARSWLFLRSQEYKKYQTNKTTGNTDKRAFVETWQSFYRKKLKEVWKPAV

SEQ ID NO: 40625 - protein, 979 aa, synthetic construct
  REGION 1..979: note = engineered CasX variant
QEIKRINKIRRRLVKDSNTKKAGKTRGPMKTLLVRVMTPDLRERLENLRKKPENIPQPISNTSRANLNKLLTDYTEMKKAILHVYWEEFQKDPVGLMSRVAQPASKKIDQNKLKPEMDEKGNLTTAGFACSQCGQPLFVYKLEQVSEKGKAYTNYFGRCNVAEHEKLILLAQLKPEKDSDEAVTYSLGKFGQRALDFYSIHVTKESTHPVKPLAQIAGNRYASSPVGKALSDACMGTIASFLSKYQDIIIEHQKVVKGNQKRLESLRELAGKENLEYPSVTLPPQPHTKEGVDAYNEVIARVRMWVNLNLWQKLKLSRDDAKPLLRLKGFPSFPLVERQANEVDWWDMVCNVKKLINEKKEDGKVFWQNLAGYKRQEALRPYLSSEEDREKGKKFARYQLGDLLLHLEKKHGEDWGKVYDEAWERIDKKVEGLSKHIKLEEERRSEDAQSKAALTDWLRAKASFVIEGLKEADKDEFCRCELKLQKWYGDLRGKPFAIEAENSILDISGFSKQYNCAFIWQKDGVKKLNLYLIINYFKGGKLRFKKIKPEAFEANRFYTVINKKSGEIVPMEVNFNFDDPNLIILPLAFGKRQGREFIWNDLLSLETGSLKLANGRVIEKTLYNRRTRQDEPALFVALTFERREVLDSSNIKPMNLIGVDRGENIPAVIALTDPEGCPLSRFKDSLGNPTHILRIGESYKEKQRTIQAKKEVEQRRAGGYSRKYASKAKNLADDMVRNTARDLLYYAVTQDAMLIFENLSRGFGRQGKRTFMAERQYTRMEDWLTAKLAYEGLPSKTYLSKTLAQYTSKTCSNCGFTITSADYDRVLEKLKKTATGWMTTINGKELKVEGQITYYNRYKRQNVVKDLSVELDRLSEESVNNDISSWTKGRSGEALSLLKKRFSHRPVQEKFVCLNCGFETHADEQAALNIARSWLFLRSQEYKKYQTNKTTGNTDKRAFVETWQSFYRKKLKEVWKPAV

SEQ ID NO: 40626 - protein, 979 aa, synthetic construct
  REGION 1..979: note = engineered CasX variant
QEIKRINKIRRRLVKDSNTKKAGKTRGPMKTLLVRVMTPDLRERLENLRKKPENIPQPISNTSRANLNKLLTDYTEMKKAILHVYWEEFQKDPVGLMSRVAQPASKKIDQNKLKPEMDEKGNLTTAGFACSQCGQPLFVYKLEQVSEKGKAYTNYFGRCNVAEHEKLILLAQLKPEKDSDEAVTYSLGKFGQRALDFYSIHVTKESTHPVKPLAQIAGNRYASTPVGKALSDACMGTIASFLSKYQDIIIEHQKVVKGNQKRLESLRELAGKENLEYPSVTLPPQPHTKEGVDAYNEVIARVRMWVNLNLWQKLKLSRDDAKPLLRLKGFPSFPLVERQANEVDWWDMVCNVKKLINEKKEDGKVFWQNLAGYKRQEALRPYLSSEEDREKGKKFARYQLGDLLLHLEKKHGEDWGKVYDEAWERIDKKVEGLSKHIKLEEERRSEDAQSKAALTDWLRAKASFVIEGLKEADKDEFCRCELKLQKWYGDLRGKPFAIEAENSILDISGFSKQYNCAFIWQKDGVKKLNLYLIINYFKGGKLRFKKIKPEAFEANRFYTVINKKSGEIVPMEVNFNFDDPNLIILPLAFGKRQGREFIWNDLLSLETGSLKLANGRVIEKTLYNRRTRQDEPALFVALTFERREVLDSSNIKPMNLIGVDRGENIPAVIALTDPEGCPLSRFKDSLGNPTHILRIGESYKEKQRTIQAKKEVEQRRAGGYSRKYASKAKNLADDMVRNTARDLLYYAVTQDAMLIFENLSRGFGRQGKRTFMAERQYTRMEDWLTAKLAYEGLPSKTYLSKTLAQYTSKTCSNCGFTITSADYDRVLEKLKKTATGWMTTINGKELKVEGQITYYNRYKRQNVVKDLSVELDRLSEESVNNDISSWTKGRSGEALSLLKKRFSHRPVQEKFVCLNCGFETHADEQAALNIARSWLFLRSQEYKKYQTNKTTGNTDKRAFVETWQSFYRKKLKEVWKPAV

SEQ ID NO: 40627 - protein, 979 aa, synthetic construct
  REGION 1..979: note = engineered CasX variant
QEIKRINKIRRRLVKDSNTKKAGKTRGPMKTLLVRVMTPDLRERLENLRKKPENIPQPISNTSRANLNKLLTDYTEMKKAILHVYWEEFQKDPVGLMSRVAQPASKKIDQNKLKPEMDEKGNLTTAGFACSQCGQPLFVYKLEQVSEKGKAYTNYFGRCNVAEHEKLILLAQLKPEKDSDEAVTYSLGKFGQRALDFYSIHVTKESTHPVKPLAQIAGNRYASAPVGKALSDACMGTIASFLSKYQDIIIEHQKVVKGNQKRLESLRELAGKENLEYPSVTLPPQPHTKEGVDAYNEVIARVRMWVNLNLWQKLKLSRDDAKPLLRLKGFPSFPLVERQANEVDWWDMVCNVKKLINEKKEDGKVFWQNLAGYKRQEALRPYLSSEEDREKGKKFARYQLGDLLLHLEKKHGEDWGKVYDEAWERIDKKVEGLSKHIKLEEERRSEDAQSKAALTDWLRAKASFVIEGLKEADKDEFCRCELKLQKWYGDLRGKPFAIEAENSILDISGFSKQYNCAFIWQKDGVKKLNLYLIINYFKGGKLRFKKIKPEAFEANRFYTVINKKSGEIVPMEVNFNFDDPNLIILPLAFGKRQGREFIWNDLLSLETGSLKLANGRVIEKTLYNRRTRQDEPALFVALTFERREVLDSSNIKPMNLIGVDRGENIPAVIALTDPEGCPLSRFKDSLGNPTHILRIGESYKEKQRTIQAKKEVEQRRAGGYSRKYASKAKNLADDMVRNTARDLLYYAVTQDAMLIFENLSRGFGRQGKRTFMAERQYTRMEDWLTAKLAYEGLPSKTYLSKTLAQYTSKTCSNCGFTITSADYDRVLEKLKKTATGWMTTINGKELKVEGQITYYNRYKRQNVVKDLSVELDRLSEESVNNDISSWTKGRSGEALSLLKKRFSHRPVQEKFVCLNCGFETHADEQAALNIARSWLFLRSQEYKKYQTNKTTGNTDKRAFVETWQSFYRKKLKEVWKPAV

SEQ ID NO: 40628 - protein, 979 aa, synthetic construct
  REGION 1..979: note = engineered CasX variant
QEIKRINKIRRRLVKDSNTKKAGKTRGPMKTLLVRVMTPDLRERLENLRKKPENIPQPISNTSRANLNKLLTDYTEMKKAILHVYWEEFQKDPVGLMSRVAQPASKKIDQNKLKPEMDEKGNLTTAGFACSQCGQPLFVYKLEQVSEKGKAYTNYFGRCNVAEHEKLILLAQLKPEKDSDEAVTYSLGKFGQRALDFYSIHVTKESTHPVKPLAQIAGNRYASVPVGKALSDACMGTIASFLSKYQDIIIEHQKVVKGNQKRLESLRELAGKENLEYPSVTLPPQPHTKEGVDAYNEVIARVRMWVNLNLWQKLKLSRDDAKPLLRLKGFPSFPLVERQANEVDWWDMVCNVKKLINEKKEDGKVFWQNLAGYKRQEALRPYLSSEEDREKGKKFARYQLGDLLLHLEKKHGEDWGKVYDEAWERIDKKVEGLSKHIKLEEERRSEDAQSKAALTDWLRAKASFVIEGLKEADKDEFCRCELKLQKWYGDLRGKPFAIEAENSILDISGFSKQYNCAFIWQKDGVKKLNLYLIINYFKGGKLRFKKIKPEAFEANRFYTVINKKSGEIVPMEVNFNFDDPNLIILPLAFGKRQGREFIWNDLLSLETGSLKLANGRVIEKTLYNRRTRQDEPALFVALTFERREVLDSSNIKPMNLIGVDRGENIPAVIALTDPEGCPLSRFKDSLGNPTHILRIGESYKEKQRTIQAKKEVEQRRAGGYSRKYASKAKNLADDMVRNTARDLLYYAVTQDAMLIFENLSRGFGRQGKRTFMAERQYTRMEDWLTAKLAYEGLPSKTYLSKTLAQYTSKTCSNCGFTITSADYDRVLEKLKKTATGWMTTINGKELKVEGQITYYNRYKRQNVVKDLSVELDRLSEESVNNDISSWTKGRSGEALSLLKKRFSHRPVQEKFVCLNCGFETHADEQAALNIARSWLFLRSQEYKKYQTNKTTGNTDKRAFVETWQSFYRKKLKEVWKPAV

SEQ ID NO: 40629 - protein, 979 aa, synthetic construct
  REGION 1..979: note = engineered CasX variant
QEIKRINKIRRRLVKDSNTKKAGKTRGPMKTLLVRVMTPDLRERLENLRKKPENIPQPISNTSRANLNKLLTDYTEMKKAILHVYWEEFQKDPVGLMSRVAQPASKKIDQNKLKPEMDEKGNLTTAGFACSQCGQPLFVYKLEQVSEKGKAYTNYFGRCNVAEHEKLIKLAQLKPEKDSDEAVTYSLGKFGQRALDFYSIHVTKESTHPVKPLAQIAGNRYASGPVGKALSDACMGTIASFLSKYQDIIIEHQKVVKGNQKRLESLRELAGKENLEYPSVTLPPQPHTKEGVDAYNEVIARVRMWVNLNLWQKLKLSRDDAKPLLRLKGFPSFPLVERQANEVDWWDMVCNVKKLINEKKEDGKVFWQNLAGYKRQEALRPYLSSEEDREKGKKFARYQLGDLLLHLEKKHGEDWGKVYDEAWERIDKKVEGLSKHIKLEEERRSEDAQSKAALTDWLRAKASFVIEGLKEADKDEFCRCELKLQKWYGDLRGKPFAIEAENSILDISGFSKQYNCAFIWQKDGVKKLNLYLIINYFKGGKLRFKKIKPEAFEANRFYTVINKKSGEIVPMEVNFNFDDPNLIILPLAFGKRQGREFIWNDLLSLETGSLKLANGRVIEKTLYNRRTRQDEPALFVALTFERREVLDSSNIKPMNLIGVDRGENIPAVIALTDPEGCPLSRFKDSLGNPTHILRIGESYKEKQRTIQAKKEVEQRRAGGYSRKYASKAKNLADDMVRNTARDLLYYAVTQDAMLIFENLSRGFGRQGKRTFMAERQYTRMEDWLTAKLAYEGLPSKTYLSKTLAQYTSKTCSNCGFTITSADYDRVLEKLKKTATGWMTTINGKELKVEGQITYYNRYKRQNVVKDLSVELDRLSEESVNNDISSWTKGRSGEALSLLKKRFSHRPVQEKFVCLNCGFETHADEQAALNIARSWLFLRSQEYKKYQTNKTTGNTDKRAFVETWQSFYRKKLKEVWKPAV

SEQ ID NO: 40630 - protein, 978 aa, synthetic construct
  REGION 1..978: note = engineered CasX variant
QEIKRINKIRRRLVKDSNTKKAGKTRGPMKTLLVRVMTPDLRERLENLRKKPENIPQPISNTSRANLNKLLTDYTEMKKAILHVYWEEFQKDPVGLMSRVAQPASKKIDQNKLKPEMDEKGNLTTAGFACSQCGQPLFVYKLEQVSEKGKAYTNYFGRCNVAEHEKLILLAQLKPEKDSDEAVTYSLGKFGQRALDFYSIHVTKESTHPVKPLAQIAGNRYASPVGKALSDACMGTIASFLSKYQDIIIEHQKVVKGNQKRLESLRELAGKENLEYPSVTLPPQPHTKEGVDAYNEVIARVRMWVNLNLWQKLKLSRDDAKPLLRLKGFPSFPLVERQANEVDWWDMVCNVKKLINEKKEDGKVFWQNLAGYKRQEALRPYLSSEEDREKGKKFARYQLGDLLLHLEKKHGEDWGKVYDEAWERIDKKVEGLSKHIKLEEERRSEDAQSKAALTDWLRAKASFVIEGLKEADKDEFCRCELKLQKWYGDLRGKPFAIEAENSILDISGFSKQYNCAFIWQKDGVKKLNLYLIINYFKGGKLRFKKIKPEAFEANRFYTVINKKSGEIVPMEVNFNFDDPNLIILPLAFGKRQGREFIWNDLLSLETGSLKLANGRVIEKTLYNRRTRQDEPALFVALTFERREVLDSSNIKPMNLIGVDRGENIPAVIALTDPEGCPLSRFKDSLGNPTHILRIGESYKEKQRTIQAKKEVEQRRAGGYSRKYASKAKNLADDMVRNTARDLLYYAVTQDAMLIFENLSRGFGRQGKRTFMAERQYTRMEDWLTAKLAYEGLPSKTYLSKTLAQYTSKTCSNCGFTITSADYDRVLEKLKKTATGWMTTINGKELKVEGQITYYNRYKRQNVVKDLSVELDRLSEESVNNDISSWTKGRSGEALSLLKKRFSHRPVQEKFVCLNCGFETHADEQAALNIARSWLFLRSQEYKKYQTNKTTGNTDKRAFVETWQSFYRKKLKEVWKPAV

SEQ ID NO: 40631 - protein, 979 aa, synthetic construct
  REGION 1..979: note = engineered CasX variant
QEIKRINKIRRRLVKDSNTKKAGKTRGPMKTLLVRVMTPDLRERLENLRKKPENIPQPISNTSRANLNKLLTDYTEMKKAILHVYWEEFQKDPVGLMSRVAQPASKKIDQNKLKPEMDEKGNLTTAGFACSQCGQPLFVYKLEQVSEKGKAYTNYFGRCNVAEHEKLILLAQLKPEKDSDEAVTYSLGKFGQRALDFYSIHVTKESTHPVKPLAQIAGNRYASYPVGKALSDACMGTIASFLSKYQDIIIEHQKVVKGNQKRLESLRELAGKENLEYPSVTLPPQPHTKEGVDAYNEVIARVRMWVNLNLWQKLKLSRDDAKPLLRLKGFPSFPLVERQANEVDWWDMVCNVKKLINEKKEDGKVFWQNLAGYKRQEALRPYLSSEEDRKKGKKFARYQLGDLLLHLEKKHGEDWGKVYDEAWERIDKKVEGLSKHIKLEEERRSEDAQSKAALTDWLRAKASFVIEGLKEADKDEFCRCELKLQKWYGDLRGKPFAIEAENSILDISGFSKQYNCAFIWQKDGVKKLNLYLIINYFKGGKLRFKKIKPEAFEANRFYTVINKKSGEIVIMEVNFNFDDPNLIILPLAFGKRQGREFIWNDLLSLETGSLKLANGRVIEKTLYNRRTRQDEPALFVALTFERREVLDSSNIKPMNLIGVDRGENIPAVIALTDPEGCPLSRFKDSLGNPTHILRIGESYKEKQRTIQAKKEVEQRRAGGYSRKYASKAKNLADDMVRNTARDLLYYAVTQDAMLIFENLSRGFGRQGKRTFMAERQYTRMEDWLTAKLAYEGLPSKTYLSKTLAQYTSKTCSNCGFTITSADYDRVLEKLKKTATGWMTTINGKELKVEGQITYYNRYKRQNVVKDLSVELDRLSEESVNNDISSWTKGRSGEALSLLKKRFSHRPVQEKFVCLNCGFETHADEQAALNIARSWLFLRSQEYKKYQTNKTTGNTDKRAFVETWQSFYRKKLKEVWKPAV

SEQ ID NO: 40632 - protein, 979 aa, synthetic construct
  REGION 1..979: note = engineered CasX variant
QEIKRINKIRRRLVKDSNTKKAGKTRGPMKTLLVRVMTPDLRERLENLRKKPENIPQPISNTSRANLNKLLTDYTEMKKAILHVYWEEFQKDPVGLMSRVAQPASKKIDQNKLKPEMDEKGNLTTAGFACSQCGQPLFVYKLEQVSEKGKAYTNYFGRCNVAEHEKLILLAQLKPEKDSDEAVTYSLGKFGQRALDFYSIHVTKESTHPVKPLAQIAGNRYASHPVGKALSDACMGTIASFLSKYQDIIIEHQKVVKGNQKRLESLRELAGKENLEYPSVTLPPQPHTKEGVDAYNEVIARVRMWVNLNLWQKLKLSRDDAKPLLRLKGFPSFPLVERQANEVDWWDMVCNVKKLINEKKEDGKVFWQNLAGYKRQEALRPYLSSEEDRKKGKKFARYQLGDLLLHLEKKHGEDWGKVYDEAWERIDKKVEGLSKHIKLEEERRSEDAQSKAALTDWLRAKASFVIEGLKEADKDEFCRCELKLQKWYGDLRGKPFAIEAENSILDISGFSKQYNCAFIWQKDGVKKLNLYLIINYFKGGKLRFKKIKPEAFEANRFYTVINKKSGEIVIMEVNFNFDDPNLIILPLAFGKRQGREFIWNDLLSLETGSLKLANGRVIEKTLYNRRTRQDEPALFVALTFERREVLDSSNIKPMNLIGVDRGENIPAVIALTDPEGCPLSRFKDSLGNPTHILRIGESYKEKQRTIQAKKEVEQRRAGGYSRKYASKAKNLADDMVRNTARDLLYYAVTQDAMLIFENLSRGFGRQGKRTFMAERQYTRMEDWLTAKLAYEGLPSKTYLSKTLAQYTSKTCSNCGFTITSADYDRVLEKLKKTATGWMTTINGKELKVEGQITYYNRYKRQNVVKDLSVELDRLSEESVNNDISSWTKGRSGEALSLLKKRFSHRPVQEKFVCLNCGFETHADEQAALNIARSWLFLRSQEYKKYQTNKTTGNTDKRAFVETWQSFYRKKLKEVWKPAV

SEQ ID NO: 40633 - protein, 979 aa, synthetic construct
  REGION 1..979: note = engineered CasX variant
QEIKRINKIRRRLVKDSNTKKAGKTRGPMKTLLVRVMTPDLRERLENLRKKPENIPQPISNTSRANLNKLLTDYTEMKKAILHVYWEEFQKDPVGLMSRVAQPASKKIDQNKLKPEMDEKGNLTTAGFACSQCGQPLFVYKLEQVSEKGKAYTNYFGRCNVAEHEKLILLAQLKPEKDSDEAVTYSLGKFGQRALDFYSIHVTKESTHPVKPLAQIAGNRYASSPVGKALSDACMGTIASFLSKYQDIIIEHQKVVKGNQKRLESLRELAGKENLEYPSVTLPPQPHTKEGVDAYNEVIARVRMWVNLNLWQKLKLSRDDAKPLLRLKGFPSFPLVERQANEVDWWDMVCNVKKLINEKKEDGKVFWQNLAGYKRQEALRPYLSSEEDRKKGKKFARYQLGDLLLHLEKKHGEDWGKVYDEAWERIDKKVEGLSKHIKLEEERRSEDAQSKAALTDWLRAKASFVIEGLKEADKDEFCRCELKLQKWYGDLRGKPFAIEAENSILDISGFSKQYNCAFIWQKDGVKKLNLYLIINYFKGGKLRFKKIKPEAFEANRFYTVINKKSGEIVIMEVNFNFDDPNLIILPLAFGKRQGREFIWNDLLSLETGSLKLANGRVIEKTLYNRRTRQDEPALFVALTFERREVLDSSNIKPMNLIGVDRGENIPAVIALTDPEGCPLSRFKDSLGNPTHILRIGESYKEKQRTIQAKKEVEQRRAGGYSRKYASKAKNLADDMVRNTARDLLYYAVTQDAMLIFENLSRGFGRQGKRTFMAERQYTRMEDWLTAKLAYEGLPSKTYLSKTLAQYTSKTCSNCGFTITSADYDRVLEKLKKTATGWMTTINGKELKVEGQITYYNRYKRQNVVKDLSVELDRLSEESVNNDISSWTKGRSGEALSLLKKRFSHRPVQEKFVCLNCGFETHADEQAALNIARSWLFLRSQEYKKYQTNKTTGNTDKRAFVETWQSFYRKKLKEVWKPAV

SEQ ID NO: 40634 - protein, 979 aa, synthetic construct
  REGION 1..979: note = engineered CasX variant
QEIKRINKIRRRLVKDSNTKKAGKTRGPMKTLLVRVMTPDLRERLENLRKKPENIPQPISNTSRANLNKLLTDYTEMKKAILHVYWEEFQKDPVGLMSRVAQPASKKIDQNKLKPEMDEKGNLTTAGFACSQCGQPLFVYKLEQVSEKGKAYTNYFGRCNVAEHEKLILLAQLKPEKDSDEAVTYSLGKFGQRALDFYSIHVTKESTHPVKPLAQIAGNRYASTPVGKALSDACMGTIASFLSKYQDIIIEHQKVVKGNQKRLESLRELAGKENLEYPSVTLPPQPHTKEGVDAYNEVIARVRMWVNLNLWQKLKLSRDDAKPLLRLKGFPSFPLVERQANEVDWWDMVCNVKKLINEKKEDGKVFWQNLAGYKRQEALRPYLSSEEDRKKGKKFARYQLGDLLLHLEKKHGEDWGKVYDEAWERIDKKVEGLSKHIKLEEERRSEDAQSKAALTDWLRAKASFVIEGLKEADKDEFCRCELKLQKWYGDLRGKPFAIEAENSILDISGFSKQYNCAFIWQKDGVKKLNLYLIINYFKGGKLRFKKIKPEAFEANRFYTVINKKSGEIVIMEVNFNFDDPNLIILPLAFGKRQGREFIWNDLLSLETGSLKLANGRVIEKTLYNRRTRQDEPALFVALTFERREVLDSSNIKPMNLIGVDRGENIPAVIALTDPEGCPLSRFKDSLGNPTHILRIGESYKEKQRTIQAKKEVEQRRAGGYSRKYASKAKNLADDMVRNTARDLLYYAVTQDAMLIFENLSRGFGRQGKRTFMAERQYTRMEDWLTAKLAYEGLPSKTYLSKTLAQYTSKTCSNCGFTITSADYDRVLEKLKKTATGWMTTINGKELKVEGQITYYNRYKRQNVVKDLSVELDRLSEESVNNDISSWTKGRSGEALSLLKKRFSHRPVQEKFVCLNCGFETHADEQAALNIARSWLFLRSQEYKKYQTNKTTGNTDKRAFVETWQSFYRKKLKEVWKPAV

SEQ ID NO: 40635 - protein, 979 aa, synthetic construct
  REGION 1..979: note = engineered CasX variant
QEIKRINKIRRRLVKDSNTKKAGKTRGPMKTLLVRVMTPDLRERLENLRKKPENIPQPISNTSRANLNKLLTDYTEMKKAILHVYWEEFQKDPVGLMSRVAQPASKKIDQNKLKPEMDEKGNLTTAGFACSQCGQPLFVYKLEQVSEKGKAYTNYFGRCNVAEHEKLILLAQLKPEKDSDEAVTYSLGKFGQRALDFYSIHVTKESTHPVKPLAQIAGNRYASAPVGKALSDACMGTIASFLSKYQDIIIEHQKVVKGNQKRLESLRELAGKENLEYPSVTLPPQPHTKEGVDAYNEVIARVRMWVNLNLWQKLKLSRDDAKPLLRLKGFPSFPLVERQANEVDWWDMVCNVKKLINEKKEDGKVFWQNLAGYKRQEALRPYLSSEEDRKKGKKFARYQLGDLLLHLEKKHGEDWGKVYDEAWERIDKKVEGLSKHIKLEEERRSEDAQSKAALTDWLRAKASFVIEGLKEADKDEFCRCELKLQKWYGDLRGKPFAIEAENSILDISGFSKQYNCAFIWQKDGVKKLNLYLIINYFKGGKLRFKKIKPEAFEANRFYTVINKKSGEIVIMEVNFNFDDPNLIILPLAFGKRQGREFIWNDLLSLETGSLKLANGRVIEKTLYNRRTRQDEPALFVALTFERREVLDSSNIKPMNLIGVDRGENIPAVIALTDPEGCPLSRFKDSLGNPTHILRIGESYKEKQRTIQAKKEVEQRRAGGYSRKYASKAKNLADDMVRNTARDLLYYAVTQDAMLIFENLSRGFGRQGKRTFMAERQYTRMEDWLTAKLAYEGLPSKTYLSKTLAQYTSKTCSNCGFTITSADYDRVLEKLKKTATGWMTTINGKELKVEGQITYYNRYKRQNVVKDLSVELDRLSEESVNNDISSWTKGRSGEALSLLKKRFSHRPVQEKFVCLNCGFETHADEQAALNIARSWLFLRSQEYKKYQTNKTTGNTDKRAFVETWQSFYRKKLKEVWKPAV

SEQ ID NO: 40636 - protein, 979 aa, synthetic construct
  REGION 1..979: note = engineered CasX variant
QEIKRINKIRRRLVKDSNTKKAGKTRGPMKTLLVRVMTPDLRERLENLRKKPENIPQPISNTSRANLNKLLTDYTEMKKAILHVYWEEFQKDPVGLMSRVAQPASKKIDQNKLKPEMDEKGNLTTAGFACSQCGQPLFVYKLEQVSEKGKAYTNYFGRCNVAEHEKLILLAQLKPEKDSDEAVTYSLGKFGQRALDFYSIHVTKESTHPVKPLAQIAGNRYASVPVGKALSDACMGTIASFLSKYQDIIIEHQKVVKGNQKRLESLRELAGKENLEYPSVTLPPQPHTKEGVDAYNEVIARVRMWVNLNLWQKLKLSRDDAKPLLRLKGFPSFPLVERQANEVDWWDMVCNVKKLINEKKEDGKVFWQNLAGYKRQEALRPYLSSEEDRKKGKKFARYQLGDLLLHLEKKHGEDWGKVYDEAWERIDKKVEGLSKHIKLEEERRSEDAQSKAALTDWLRAKASFVIEGLKEADKDEFCRCELKLQKWYGDLRGKPFAIEAENSILDISGFSKQYNCAFIWQKDGVKKLNLYLIINYFKGGKLRFKKIKPEAFEANRFYTVINKKSGEIVIMEVNFNFDDPNLIILPLAFGKRQGREFIWNDLLSLETGSLKLANGRVIEKTLYNRRTRQDEPALFVALTFERREVLDSSNIKPMNLIGVDRGENIPAVIALTDPEGCPLSRFKDSLGNPTHILRIGESYKEKQRTIQAKKEVEQRRAGGYSRKYASKAKNLADDMVRNTARDLLYYAVTQDAMLIFENLSRGFGRQGKRTFMAERQYTRMEDWLTAKLAYEGLPSKTYLSKTLAQYTSKTCSNCGFTITSADYDRVLEKLKKTATGWMTTINGKELKVEGQITYYNRYKRQNVVKDLSVELDRLSEESVNNDISSWTKGRSGEALSLLKKRFSHRPVQEKFVCLNCGFETHADEQAALNIARSWLFLRSQEYKKYQTNKTTGNTDKRAFVETWQSFYRKKLKEVWKPAV

SEQ ID NO: 40637 - protein, 979 aa, synthetic construct
  REGION 1..979: note = engineered CasX variant
QEIKRINKIRRRLVKDSNTKKAGKTRGPMKTLLVRVMTPDLRERLENLRKKPENIPQPISNTSRANLNKLLTDYTEMKKAILHVYWEEFQKDPVGLMSRVAQPASKKIDQNKLKPEMDEKGNLTTAGFACSQCGQPLFVYKLEQVSEKGKAYTNYFGRCNVAEHEKLIKLAQLKPEKDSDEAVTYSLGKFGQRALDFYSIHVTKESTHPVKPLAQIAGNRYASGPVGKALSDACMGTIASFLSKYQDIIIEHQKVVKGNQKRLESLRELAGKENLEYPSVTLPPQPHTKEGVDAYNEVIARVRMWVNLNLWQKLKLSRDDAKPLLRLKGFPSFPLVERQANEVDWWDMVCNVKKLINEKKEDGKVFWQNLAGYKRQEALRPYLSSEEDRKKGKKFARYQLGDLLLHLEKKHGEDWGKVYDEAWERIDKKVEGLSKHIKLEEERRSEDAQSKAALTDWLRAKASFVIEGLKEADKDEFCRCELKLQKWYGDLRGKPFAIEAENSILDISGFSKQYNCAFIWQKDGVKKLNLYLIINYFKGGKLRFKKIKPEAFEANRFYTVINKKSGEIVIMEVNFNFDDPNLIILPLAFGKRQGREFIWNDLLSLETGSLKLANGRVIEKTLYNRRTRQDEPALFVALTFERREVLDSSNIKPMNLIGVDRGENIPAVIALTDPEGCPLSRFKDSLGNPTHILRIGESYKEKQRTIQAKKEVEQRRAGGYSRKYASKAKNLADDMVRNTARDLLYYAVTQDAMLIFENLSRGFGRQGKRTFMAERQYTRMEDWLTAKLAYEGLPSKTYLSKTLAQYTSKTCSNCGFTITSADYDRVLEKLKKTATGWMTTINGKELKVEGQITYYNRYKRQNVVKDLSVELDRLSEESVNNDISSWTKGRSGEALSLLKKRFSHRPVQEKFVCLNCGFETHADEQAALNIARSWLFLRSQEYKKYQTNKTTGNTDKRAFVETWQSFYRKKLKEVWKPAV

SEQ ID NO: 40638 - protein, 978 aa, synthetic construct
  REGION 1..978: note = engineered CasX variant
QEIKRINKIRRRLVKDSNTKKAGKTRGPMKTLLVRVMTPDLRERLENLRKKPENIPQPISNTSRANLNKLLTDYTEMKKAILHVYWEEFQKDPVGLMSRVAQPASKKIDQNKLKPEMDEKGNLTTAGFACSQCGQPLFVYKLEQVSEKGKAYTNYFGRCNVAEHEKLILLAQLKPEKDSDEAVTYSLGKFGQRALDFYSIHVTKESTHPVKPLAQIAGNRYASPVGKALSDACMGTIASFLSKYQDIIIEHQKVVKGNQKRLESLRELAGKENLEYPSVTLPPQPHTKEGVDAYNEVIARVRMWVNLNLWQKLKLSRDDAKPLLRLKGFPSFPLVERQANEVDWWDMVCNVKKLINEKKEDGKVFWQNLAGYKRQEALRPYLSSEEDRKKGKKFARYQLGDLLLHLEKKHGEDWGKVYDEAWERIDKKVEGLSKHIKLEEERRSEDAQSKAALTDWLRAKASFVIEGLKEADKDEFCRCELKLQKWYGDLRGKPFAIEAENSILDISGFSKQYNCAFIWQKDGVKKLNLYLIINYFKGGKLRFKKIKPEAFEANRFYTVINKKSGEIVIMEVNFNFDDPNLIILPLAFGKRQGREFIWNDLLSLETGSLKLANGRVIEKTLYNRRTRQDEPALFVALTFERREVLDSSNIKPMNLIGVDRGENIPAVIALTDPEGCPLSRFKDSLGNPTHILRIGESYKEKQRTIQAKKEVEQRRAGGYSRKYASKAKNLADDMVRNTARDLLYYAVTQDAMLIFENLSRGFGRQGKRTFMAERQYTRMEDWLTAKLAYEGLPSKTYLSKTLAQYTSKTCSNCGFTITSADYDRVLEKLKKTATGWMTTINGKELKVEGQITYYNRYKRQNVVKDLSVELDRLSEESVNNDISSWTKGRSGEALSLLKKRFSHRPVQEKFVCLNCGFETHADEQAALNIARSWLFLRSQEYKKYQTNKTTGNTDKRAFVETWQSFYRKKLKEVWKPAV

SEQ ID NO: 40639 - protein, 979 aa, synthetic construct
  REGION 1..979: note = engineered CasX variant
QEIKRINKIRRRLVKDSNTKKAGKTGPMKTLLVRVMTPDLRERLENLRKKPENIPQPISNTSRANLNKLLTDYTEMKKAILHVYWEEFQKDPVGLMSRVAQPASKKIDQNKLKPEMDEKGNLTTAGFACSQCGQPLFVYKLEQVSEKGKAYTNYFGRCNVAEHEKLILLAQLKPEKDSDEAVTYSLGKFGQRALDFYSIHVTKESTHPVKPLAQIAGNRYASSYPVGKALSGACMGTIASFLSKYQDIIIEHQKVVKGNQKRLESLRELAGKENLEYPSVTLPPQPHTKEGVDAYNEVIARVRMWVNLNLWQKLKLSRDDAKPLLRLKGFPSFPLVERQANEVDWWDMVCNVKKLINEKKEDGKVFWQNLAGYKRQEALRPYLSSEEDRKKGKKFARYQLGDLLLHLEKKHGEDWGKVYDEAWERIDKKVEGLSKHIKLEEERRSEDAQSKAALTDWLRAKASFVIEGLKEADKDEFCRCELKLQKWYGDLRGKPFAIEAENSILDISGFSKQYNCAFIWQKDGVKKLNLYLIINYFKGGKLRFKKIKPEAFEANRFYTVINKKSGEIVPMEVNFNFDDPNLIILPLAFGKRQGREFIWNDLLSLETGSLKLANGRVIEKTLYNRRTRQDEPALFVALTFERREVLDSSNIKPMNLIGVDRGENIPAVIALTDPEGCPLSRFKDSLGNPTHILRIGESYKEKQRTIQAKKEVEQRRAGGYSRKYASKAKNLADDMVRNTARDLLYYAVTQDAMLIFENLSRGFGRQGKRTFMAERQYTRMEDWLTAKLAYEGLPSKTYLSKTLAQYTSKTCSNCGFTITSADYDRVLEKLKKTATGWMTTINGKELKVEGQITYYNRYKRQNVVKDLSVELDRLSEESVNNDISSWTKGRSGEALSLLKKRFSHRPVQEKFVCLNCGFETHADEQAALNIARSWLFLRSQEYKKYQTNKTTGNTDKRAFVETWQSFYRKKLKEVWKPAV

SEQ ID NO: 40640 - protein, 979 aa, synthetic construct
  REGION 1..979: note = engineered CasX variant
QEIKRINKIRRRLVKDSNTKKAGKTGPMKTLLVRVMTPDLRERLENLRKKPENIPQPISNTSRANLNKLLTDYTEMKKAILHVYWEEFQKDPVGLMSRVAQPASKKIDQNKLKPEMDEKGNLTTAGFACSQCGQPLFVYKLEQVSEKGKAYTNYFGRCNVAEHEKLILLAQLKPEKDSDEAVTYSLGKFGQRALDFYSIHVTKESTHPVKPLAQIAGNRYASSHPVGKALSGACMGTIASFLSKYQDIIIEHQKVVKGNQKRLESLRELAGKENLEYPSVTLPPQPHTKEGVDAYNEVIARVRMWVNLNLWQKLKLSRDDAKPLLRLKGFPSFPLVERQANEVDWWDMVCNVKKLINEKKEDGKVFWQNLAGYKRQEALRPYLSSEEDRKKGKKFARYQLGDLLLHLEKKHGEDWGKVYDEAWERIDKKVEGLSKHIKLEEERRSEDAQSKAALTDWLRAKASFVIEGLKEADKDEFCRCELKLQKWYGDLRGKPFAIEAENSILDISGFSKQYNCAFIWQKDGVKKLNLYLIINYFKGGKLRFKKIKPEAFEANRFYTVINKKSGEIVPMEVNFNFDDPNLIILPLAFGKRQGREFIWNDLLSLETGSLKLANGRVIEKTLYNRRTRQDEPALFVALTFERREVLDSSNIKPMNLIGVDRGENIPAVIALTDPEGCPLSRFKDSLGNPTHILRIGESYKEKQRTIQAKKEVEQRRAGGYSRKYASKAKNLADDMVRNTARDLLYYAVTQDAMLIFENLSRGFGRQGKRTFMAERQYTRMEDWLTAKLAYEGLPSKTYLSKTLAQYTSKTCSNCGFTITSADYDRVLEKLKKTATGWMTTINGKELKVEGQITYYNRYKRQNVVKDLSVELDRLSEESVNNDISSWTKGRSGEALSLLKKRFSHRPVQEKFVCLNCGFETHADEQAALNIARSWLFLRSQEYKKYQTNKTTGNTDKRAFVETWQSFYRKKLKEVWKPAV

SEQ ID NO: 40641 - protein, 979 aa, synthetic construct
  REGION 1..979: note = engineered CasX variant
QEIKRINKIRRRLVKDSNTKKAGKTGPMKTLLVRVMTPDLRERLENLRKKPENIPQPISNTSRANLNKLLTDYTEMKKAILHVYWEEFQKDPVGLMSRVAQPASKKIDQNKLKPEMDEKGNLTTAGFACSQCGQPLFVYKLEQVSEKGKAYTNYFGRCNVAEHEKLILLAQLKPEKDSDEAVTYSLGKFGQRALDFYSIHVTKESTHPVKPLAQIAGNRYASSSPVGKALSGACMGTIASFLSKYQDIIIEHQKVVKGNQKRLESLRELAGKENLEYPSVTLPPQPHTKEGVDAYNEVIARVRMWVNLNLWQKLKLSRDDAKPLLRLKGFPSFPLVERQANEVDWWDMVCNVKKLINEKKEDGKVFWQNLAGYKRQEALRPYLSSEEDRKKGKKFARYQLGDLLLHLEKKHGEDWGKVYDEAWERIDKKVEGLSKHIKLEEERRSEDAQSKAALTDWLRAKASFVIEGLKEADKDEFCRCELKLQKWYGDLRGKPFAIEAENSILDISGFSKQYNCAFIWQKDGVKKLNLYLIINYFKGGKLRFKKIKPEAFEANRFYTVINKKSGEIVPMEVNFNFDDPNLIILPLAFGKRQGREFIWNDLLSLETGSLKLANGRVIEKTLYNRRTRQDEPALFVALTFERREVLDSSNIKPMNLIGVDRGENIPAVIALTDPEGCPLSRFKDSLGNPTHILRIGESYKEKQRTIQAKKEVEQRRAGGYSRKYASKAKNLADDMVRNTARDLLYYAVTQDAMLIFENLSRGFGRQGKRTFMAERQYTRMEDWLTAKLAYEGLPSKTYLSKTLAQYTSKTCSNCGFTITSADYDRVLEKLKKTATGWMTTINGKELKVEGQITYYNRYKRQNVVKDLSVELDRLSEESVNNDISSWTKGRSGEALSLLKKRFSHRPVQEKFVCLNCGFETHADEQAALNIARSWLFLRSQEYKKYQTNKTTGNTDKRAFVETWQSFYRKKLKEVWKPAV

SEQ ID NO: 40642 - protein, 979 aa, synthetic construct
  REGION 1..979: note = engineered CasX variant
QEIKRINKIRRRLVKDSNTKKAGKTGPMKTLLVRVMTPDLRERLENLRKKPENIPQPISNTSRANLNKLLTDYTEMKKAILHVYWEEFQKDPVGLMSRVAQPASKKIDQNKLKPEMDEKGNLTTAGFACSQCGQPLFVYKLEQVSEKGKAYTNYFGRCNVAEHEKLILLAQLKPEKDSDEAVTYSLGKFGQRALDFYSIHVTKESTHPVKPLAQIAGNRYASSTPVGKALSGACMGTIASFLSKYQDIIIEHQKVVKGNQKRLESLRELAGKENLEYPSVTLPPQPHTKEGVDAYNEVIARVRMWVNLNLWQKLKLSRDDAKPLLRLKGFPSFPLVERQANEVDWWDMVCNVKKLINEKKEDGKVFWQNLAGYKRQEALRPYLSSEEDRKKGKKFARYQLGDLLLHLEKKHGEDWGKVYDEAWERIDKKVEGLSKHIKLEEERRSEDAQSKAALTDWLRAKASFVIEGLKEADKDEFCRCELKLQKWYGDLRGKPFAIEAENSILDISGFSKQYNCAFIWQKDGVKKLNLYLIINYFKGGKLRFKKIKPEAFEANRFYTVINKKSGEIVPMEVNFNFDDPNLIILPLAFGKRQGREFIWNDLLSLETGSLKLANGRVIEKTLYNRRTRQDEPALFVALTFERREVLDSSNIKPMNLIGVDRGENIPAVIALTDPEGCPLSRFKDSLGNPTHILRIGESYKEKQRTIQAKKEVEQRRAGGYSRKYASKAKNLADDMVRNTARDLLYYAVTQDAMLIFENLSRGFGRQGKRTFMAERQYTRMEDWLTAKLAYEGLPSKTYLSKTLAQYTSKTCSNCGFTITSADYDRVLEKLKKTATGWMTTINGKELKVEGQITYYNRYKRQNVVKDLSVELDRLSEESVNNDISSWTKGRSGEALSLLKKRFSHRPVQEKFVCLNCGFETHADEQAALNIARSWLFLRSQEYKKYQTNKTTGNTDKRAFVETWQSFYRKKLKEVWKPAV

SEQ ID NO: 40643 - protein, 979 aa, synthetic construct
  REGION 1..979: note = engineered CasX variant
QEIKRINKIRRRLVKDSNTKKAGKTGPMKTLLVRVMTPDLRERLENLRKKPENIPQPISNTSRANLNKLLTDYTEMKKAILHVYWEEFQKDPVGLMSRVAQPASKKIDQNKLKPEMDEKGNLTTAGFACSQCGQPLFVYKLEQVSEKGKAYTNYFGRCNVAEHEKLILLAQLKPEKDSDEAVTYSLGKFGQRALDFYSIHVTKESTHPVKPLAQIAGNRYASSAPVGKALSGACMGTIASFLSKYQDIIIEHQKVVKGNQKRLESLRELAGKENLEYPSVTLPPQPHTKEGVDAYNEVIARVRMWVNLNLWQKLKLSRDDAKPLLRLKGFPSFPLVERQANEVDWWDMVCNVKKLINEKKEDGKVFWQNLAGYKRQEALRPYLSSEEDRKKGKKFARYQLGDLLLHLEKKHGEDWGKVYDEAWERIDKKVEGLSKHIKLEEERRSEDAQSKAALTDWLRAKASFVIEGLKEADKDEFCRCELKLQKWYGDLRGKPFAIEAENSILDISGFSKQYNCAFIWQKDGVKKLNLYLIINYFKGGKLRFKKIKPEAFEANRFYTVINKKSGEIVPMEVNFNFDDPNLIILPLAFGKRQGREFIWNDLLSLETGSLKLANGRVIEKTLYNRRTRQDEPALFVALTFERREVLDSSNIKPMNLIGVDRGENIPAVIALTDPEGCPLSRFKDSLGNPTHILRIGESYKEKQRTIQAKKEVEQRRAGGYSRKYASKAKNLADDMVRNTARDLLYYAVTQDAMLIFENLSRGFGRQGKRTFMAERQYTRMEDWLTAKLAYEGLPSKTYLSKTLAQYTSKTCSNCGFTITSADYDRVLEKLKKTATGWMTTINGKELKVEGQITYYNRYKRQNVVKDLSVELDRLSEESVNNDISSWTKGRSGEALSLLKKRFSHRPVQEKFVCLNCGFETHADEQAALNIARSWLFLRSQEYKKYQTNKTTGNTDKRAFVETWQSFYRKKLKEVWKPAV

SEQ ID NO: 40644 - protein, 979 aa, synthetic construct
  REGION 1..979: note = engineered CasX variant
QEIKRINKIRRRLVKDSNTKKAGKTGPMKTLLVRVMTPDLRERLENLRKKPENIPQPISNTSRANLNKLLTDYTEMKKAILHVYWEEFQKDPVGLMSRVAQPASKKIDQNKLKPEMDEKGNLTTAGFACSQCGQPLFVYKLEQVSEKGKAYTNYFGRCNVAEHEKLILLAQLKPEKDSDEAVTYSLGKFGQRALDFYSIHVTKESTHPVKPLAQIAGNRYASSVPVGKALSGACMGTIASFLSKYQDIIIEHQKVVKGNQKRLESLRELAGKENLEYPSVTLPPQPHTKEGVDAYNEVIARVRMWVNLNLWQKLKLSRDDAKPLLRLKGFPSFPLVERQANEVDWWDMVCNVKKLINEKKEDGKVFWQNLAGYKRQEALRPYLSSEEDRKKGKKFARYQLGDLLLHLEKKHGEDWGKVYDEAWERIDKKVEGLSKHIKLEEERRSEDAQSKAALTDWLRAKASFVIEGLKEADKDEFCRCELKLQKWYGDLRGKPFAIEAENSILDISGFSKQYNCAFIWQKDGVKKLNLYLIINYFKGGKLRFKKIKPEAFEANRFYTVINKKSGEIVPMEVNFNFDDPNLIILPLAFGKRQGREFIWNDLLSLETGSLKLANGRVIEKTLYNRRTRQDEPALFVALTFERREVLDSSNIKPMNLIGVDRGENIPAVIALTDPEGCPLSRFKDSLGNPTHILRIGESYKEKQRTIQAKKEVEQRRAGGYSRKYASKAKNLADDMVRNTARDLLYYAVTQDAMLIFENLSRGFGRQGKRTFMAERQYTRMEDWLTAKLAYEGLPSKTYLSKTLAQYTSKTCSNCGFTITSADYDRVLEKLKKTATGWMTTINGKELKVEGQITYYNRYKRQNVVKDLSVELDRLSEESVNNDISSWTKGRSGEALSLLKKRFSHRPVQEKFVCLNCGFETHADEQAALNIARSWLFLRSQEYKKYQTNKTTGNTDKRAFVETWQSFYRKKLKEVWKPAV

SEQ ID NO: 40645 - protein, 978 aa, synthetic construct
  REGION 1..978: note = engineered CasX variant
QEIKRINKIRRRLVKDSNTKKAGKTGPMKTLLVRVMTPDLRERLENLRKKPENIPQPISNTSRANLNKLLTDYTEMKKAILHVYWEEFQKDPVGLMSRVAQPASKKIDQNKLKPEMDEKGNLTTAGFACSQCGQPLFVYKLEQVSEKGKAYTNYFGRCNVAEHEKLIKLAQLKPEKDSDEAVTYSLGKFGQRALDFYSIHVTKESTHPVKPLAQIAGNRYASSPVGKALSGACMGTIASFLSKYQDIIIEHQKVVKGNQKRLESLRELAGKENLEYPSVTLPPQPHTKEGVDAYNEVIARVRMWVNLNLWQKLKLSRDDAKPLLRLKGFPSFPLVERQANEVDWWDMVCNVKKLINEKKEDGKVFWQNLAGYKRQEALRPYLSSEEDRKKGKKFARYQLGDLLLHLEKKHGEDWGKVYDEAWERIDKKVEGLSKHIKLEEERRSEDAQSKAALTDWLRAKASFVIEGLKEADKDEFCRCELKLQKWYGDLRGKPFAIEAENSILDISGFSKQYNCAFIWQKDGVKKLNLYLIINYFKGGKLRFKKIKPEAFEANRFYTVINKKSGEIVPMEVNFNFDDPNLIILPLAFGKRQGREFIWNDLLSLETGSLKLANGRVIEKTLYNRRTRQDEPALFVALTFERREVLDSSNIKPMNLIGVDRGENIPAVIALTDPEGCPLSRFKDSLGNPTHILRIGESYKEKQRTIQAKKEVEQRRAGGYSRKYASKAKNLADDMVRNTARDLLYYAVTQDAMLIFENLSRGFGRQGKRTFMAERQYTRMEDWLTAKLAYEGLPSKTYLSKTLAQYTSKTCSNCGFTITSADYDRVLEKLKKTATGWMTTINGKELKVEGQITYYNRYKRQNVVKDLSVELDRLSEESVNNDISSWTKGRSGEALSLLKKRFSHRPVQEKFVCLNCGFETHADEQAALNIARSWLFLRSQEYKKYQTNKTTGNTDKRAFVETWQSFYRKKLKEVWKPAV

SEQ ID NO: 40646 - protein, 979 aa, synthetic construct
  REGION 1..979: note = engineered CasX variant
QEIKRINKIRRRLVKDSNTKKAGKTGPMKTLLVRVMTPDLRERLENLRKKPENIPQPISNTSRANLNKLLTDYTEMKKAILHVYWEEFQKDPVGLMSRVAQPASKKIDQNKLKPEMDEKGNLTTAGFACSQCGQPLFVYKLEQVSEKGKAYTNYFGRCNVAEHEKLILLAQLKPEKDSDEAVTYSLGKFGQRALDFYSIHVTKESTHPVKPLAQIAGNRYASSYPVGKALSDACMGTIASFLSKYQDIIIEHQKVVKGNQKRLESLRELAGKENLEYPSVTLPPQPHTKEGVDAYNEVIARVRMWVNLNLWQKLKLSRDDAKPLLRLKNFPSFPLVERQANEVDWWDMVCNVKKLINEKKEDGKVFWQNLAGYKRQEALRPYLSSEEDRKKGKKFARYQLGDLLLHLEKKHGEDWGKVYDEAWERIDKKVEGLSKHIKLEEERRSEDAQSKAALTDWLRAKASFVIEGLKEADKDEFCRCELKLQKWYGDLRGKPFAIEAENSILDISGFSKQYNCAFIWQKDGVKKLNLYLIINYFKGGKLRFKKIKPEAFEANRFYTVINKKSGEIVPMEVNFNFDDPNLIILPLAFGKRQGREFIWNDLLSLETGSLKLANGRVIEKTLYNRRTRQDEPALFVALTFERREVLDSSNIKPMNLIGVDRGENIPAVIALTDPEGCPLSRFKDSLGNPTHILRIGESYKEKQRTIQAKKEVEQRRAGGYSRKYASKAKNLADDMVRNTARDLLYYAVTQDAMLIFENLSRGFGRQGKRTFMAERQYTRMEDWLTAKLAYEGLPSKTYLSKTLAQYTSKTCSNCGFTITSADYDRVLEKLKKTATGWMTTINGKELKVEGQITYYNRYKRQNVVKDLSVELDRLSEESVNNDISSWTKGRSGEALSLLKKRFSHRPVQEKFVCLNCGFETHADEQAALNIARSWLFLRSQEYKKYQTNKTTGNTDKRAFVETWQSFYRKKLKEVWKPAV

SEQ ID NO: 40647 - protein, 979 aa, synthetic construct
  REGION 1..979: note = engineered CasX variant
QEIKRINKIRRRLVKDSNTKKAGKTGPMKTLLVRVMTPDLRERLENLRKKPENIPQPISNTSRANLNKLLTDYTEMKKAILHVYWEEFQKDPVGLMSRVAQPASKKIDQNKLKPEMDEKGNLTTAGFACSQCGQPLFVYKLEQVSEKGKAYTNYFGRCNVAEHEKLILLAQLKPEKDSDEAVTYSLGKFGQRALDFYSIHVTKESTHPVKPLAQIAGNRYASSHPVGKALSDACMGTIASFLSKYQDIIIEHQKVVKGNQKRLESLRELAGKENLEYPSVTLPPQPHTKEGVDAYNEVIARVRMWVNLNLWQKLKLSRDDAKPLLRLKNFPSFPLVERQANEVDWWDMVCNVKKLINEKKEDGKVFWQNLAGYKRQEALRPYLSSEEDRKKGKKFARYQLGDLLLHLEKKHGEDWGKVYDEAWERIDKKVEGLSKHIKLEEERRSEDAQSKAALTDWLRAKASFVIEGLKEADKDEFCRCELKLQKWYGDLRGKPFAIEAENSILDISGFSKQYNCAFIWQKDGVKKLNLYLIINYFKGGKLRFKKIKPEAFEANRFYTVINKKSGEIVPMEVNFNFDDPNLIILPLAFGKRQGREFIWNDLLSLETGSLKLANGRVIEKTLYNRRTRQDEPALFVALTFERREVLDSSNIKPMNLIGVDRGENIPAVIALTDPEGCPLSRFKDSLGNPTHILRIGESYKEKQRTIQAKKEVEQRRAGGYSRKYASKAKNLADDMVRNTARDLLYYAVTQDAMLIFENLSRGFGRQGKRTFMAERQYTRMEDWLTAKLAYEGLPSKTYLSKTLAQYTSKTCSNCGFTITSADYDRVLEKLKKTATGWMTTINGKELKVEGQITYYNRYKRQNVVKDLSVELDRLSEESVNNDISSWTKGRSGEALSLLKKRFSHRPVQEKFVCLNCGFETHADEQAALNIARSWLFLRSQEYKKYQTNKTTGNTDKRAFVETWQSFYRKKLKEVWKPAV

SEQ ID NO: 40648 - protein, 979 aa, synthetic construct
  REGION 1..979: note = engineered CasX variant
QEIKRINKIRRRLVKDSNTKKAGKTGPMKTLLVRVMTPDLRERLENLRKKPENIPQPISNTSRANLNKLLTDYTEMKKAILHVYWEEFQKDPVGLMSRVAQPASKKIDQNKLKPEMDEKGNLTTAGFACSQCGQPLFVYKLEQVSEKGKAYTNYFGRCNVAEHEKLILLAQLKPEKDSDEAVTYSLGKFGQRALDFYSIHVTKESTHPVKPLAQIAGNRYASSSPVGKALSDACMGTIASFLSKYQDIIIEHQKVVKGNQKRLESLRELAGKENLEYPSVTLPPQPHTKEGVDAYNEVIARVRMWVNLNLWQKLKLSRDDAKPLLRLKNFPSFPLVERQANEVDWWDMVCNVKKLINEKKEDGKVFWQNLAGYKRQEALRPYLSSEEDRKKGKKFARYQLGDLLLHLEKKHGEDWGKVYDEAWERIDKKVEGLSKHIKLEEERRSEDAQSKAALTDWLRAKASFVIEGLKEADKDEFCRCELKLQKWYGDLRGKPFAIEAENSILDISGFSKQYNCAFIWQKDGVKKLNLYLIINYFKGGKLRFKKIKPEAFEANRFYTVINKKSGEIVPMEVNFNFDDPNLIILPLAFGKRQGREFIWNDLLSLETGSLKLANGRVIEKTLYNRRTRQDEPALFVALTFERREVLDSSNIKPMNLIGVDRGENIPAVIALTDPEGCPLSRFKDSLGNPTHILRIGESYKEKQRTIQAKKEVEQRRAGGYSRKYASKAKNLADDMVRNTARDLLYYAVTQDAMLIFENLSRGFGRQGKRTFMAERQYTRMEDWLTAKLAYEGLPSKTYLSKTLAQYTSKTCSNCGFTITSADYDRVLEKLKKTATGWMTTINGKELKVEGQITYYNRYKRQNVVKDLSVELDRLSEESVNNDISSWTKGRSGEALSLLKKRFSHRPVQEKFVCLNCGFETHADEQAALNIARSWLFLRSQEYKKYQTNKTTGNTDKRAFVETWQSFYRKKLKEVWKPAV

SEQ ID NO: 40649 - protein, 979 aa, synthetic construct
  REGION 1..979: note = engineered CasX variant
QEIKRINKIRRRLVKDSNTKKAGKTGPMKTLLVRVMTPDLRERLENLRKKPENIPQPISNTSRANLNKLLTDYTEMKKAILHVYWEEFQKDPVGLMSRVAQPASKKIDQNKLKPEMDEKGNLTTAGFACSQCGQPLFVYKLEQVSEKGKAYTNYFGRCNVAEHEKLILLAQLKPEKDSDEAVTYSLGKFGQRALDFYSIHVTKESTHPVKPLAQIAGNRYASSTPVGKALSDACMGTIASFLSKYQDIIIEHQKVVKGNQKRLESLRELAGKENLEYPSVTLPPQPHTKEGVDAYNEVIARVRMWVNLNLWQKLKLSRDDAKPLLRLKNFPSFPLVERQANEVDWWDMVCNVKKLINEKKEDGKVFWQNLAGYKRQEALRPYLSSEEDRKKGKKFARYQLGDLLLHLEKKHGEDWGKVYDEAWERIDKKVEGLSKHIKLEEERRSEDAQSKAALTDWLRAKASFVIEGLKEADKDEFCRCELKLQKWYGDLRGKPFAIEAENSILDISGFSKQYNCAFIWQKDGVKKLNLYLIINYFKGGKLRFKKIKPEAFEANRFYTVINKKSGEIVPMEVNFNFDDPNLIILPLAFGKRQGREFIWNDLLSLETGSLKLANGRVIEKTLYNRRTRQDEPALFVALTFERREVLDSSNIKPMNLIGVDRGENIPAVIALTDPEGCPLSRFKDSLGNPTHILRIGESYKEKQRTIQAKKEVEQRRAGGYSRKYASKAKNLADDMVRNTARDLLYYAVTQDAMLIFENLSRGFGRQGKRTFMAERQYTRMEDWLTAKLAYEGLPSKTYLSKTLAQYTSKTCSNCGFTITSADYDRVLEKLKKTATGWMTTINGKELKVEGQITYYNRYKRQNVVKDLSVELDRLSEESVNNDISSWTKGRSGEALSLLKKRFSHRPVQEKFVCLNCGFETHADEQAALNIARSWLFLRSQEYKKYQTNKTTGNTDKRAFVETWQSFYRKKLKEVWKPAV

SEQ ID NO: 40650 - protein, 979 aa, synthetic construct
  REGION 1..979: note = engineered CasX variant
QEIKRINKIRRRLVKDSNTKKAGKTGPMKTLLVRVMTPDLRERLENLRKKPENIPQPISNTSRANLNKLLTDYTEMKKAILHVYWEEFQKDPVGLMSRVAQPASKKIDQNKLKPEMDEKGNLTTAGFACSQCGQPLFVYKLEQVSEKGKAYTNYFGRCNVAEHEKLILLAQLKPEKDSDEAVTYSLGKFGQRALDFYSIHVTKESTHPVKPLAQIAGNRYASSAPVGKALSDACMGTIASFLSKYQDIIIEHQKVVKGNQKRLESLRELAGKENLEYPSVTLPPQPHTKEGVDAYNEVIARVRMWVNLNLWQKLKLSRDDAKPLLRLKNFPSFPLVERQANEVDWWDMVCNVKKLINEKKEDGKVFWQNLAGYKRQEALRPYLSSEEDRKKGKKFARYQLGDLLLHLEKKHGEDWGKVYDEAWERIDKKVEGLSKHIKLEEERRSEDAQSKAALTDWLRAKASFVIEGLKEADKDEFCRCELKLQKWYGDLRGKPFAIEAENSILDISGFSKQYNCAFIWQKDGVKKLNLYLIINYFKGGKLRFKKIKPEAFEANRFYTVINKKSGEIVPMEVNFNFDDPNLIILPLAFGKRQGREFIWNDLLSLETGSLKLANGRVIEKTLYNRRTRQDEPALFVALTFERREVLDSSNIKPMNLIGVDRGENIPAVIALTDPEGCPLSRFKDSLGNPTHILRIGESYKEKQRTIQAKKEVEQRRAGGYSRKYASKAKNLADDMVRNTARDLLYYAVTQDAMLIFENLSRGFGRQGKRTFMAERQYTRMEDWLTAKLAYEGLPSKTYLSKTLAQYTSKTCSNCGFTITSADYDRVLEKLKKTATGWMTTINGKELKVEGQITYYNRYKRQNVVKDLSVELDRLSEESVNNDISSWTKGRSGEALSLLKKRFSHRPVQEKFVCLNCGFETHADEQAALNIARSWLFLRSQEYKKYQTNKTTGNTDKRAFVETWQSFYRKKLKEVWKPAV

SEQ ID NO: 40651 - protein, 979 aa, synthetic construct
  REGION 1..979: note = engineered CasX variant
QEIKRINKIRRRLVKDSNTKKAGKTGPMKTLLVRVMTPDLRERLENLRKKPENIPQPISNTSRANLNKLLTDYTEMKKAILHVYWEEFQKDPVGLMSRVAQPASKKIDQNKLKPEMDEKGNLTTAGFACSQCGQPLFVYKLEQVSEKGKAYTNYFGRCNVAEHEKLILLAQLKPEKDSDEAVTYSLGKFGQRALDFYSIHVTKESTHPVKPLAQIAGNRYASSVPVGKALSDACMGTIASFLSKYQDIIIEHQKVVKGNQKRLESLRELAGKENLEYPSVTLPPQPHTKEGVDAYNEVIARVRMWVNLNLWQKLKLSRDDAKPLLRLKNFPSFPLVERQANEVDWWDMVCNVKKLINEKKEDGKVFWQNLAGYKRQEALRPYLSSEEDRKKGKKFARYQLGDLLLHLEKKHGEDWGKVYDEAWERIDKKVEGLSKHIKLEEERRSEDAQSKAALTDWLRAKASFVIEGLKEADKDEFCRCELKLQKWYGDLRGKPFAIEAENSILDISGFSKQYNCAFIWQKDGVKKLNLYLIINYFKGGKLRFKKIKPEAFEANRFYTVINKKSGEIVPMEVNFNFDDPNLIILPLAFGKRQGREFIWNDLLSLETGSLKLANGRVIEKTLYNRRTRQDEPALFVALTFERREVLDSSNIKPMNLIGVDRGENIPAVIALTDPEGCPLSRFKDSLGNPTHILRIGESYKEKQRTIQAKKEVEQRRAGGYSRKYASKAKNLADDMVRNTARDLLYYAVTQDAMLIFENLSRGFGRQGKRTFMAERQYTRMEDWLTAKLAYEGLPSKTYLSKTLAQYTSKTCSNCGFTITSADYDRVLEKLKKTATGWMTTINGKELKVEGQITYYNRYKRQNVVKDLSVELDRLSEESVNNDISSWTKGRSGEALSLLKKRFSHRPVQEKFVCLNCGFETHADEQAALNIARSWLFLRSQEYKKYQTNKTTGNTDKRAFVETWQSFYRKKLKEVWKPAV

SEQ ID NO: 40652 - protein, 978 aa, synthetic construct
  REGION 1..978: note = engineered CasX variant
QEIKRINKIRRRLVKDSNTKKAGKTGPMKTLLVRVMTPDLRERLENLRKKPENIPQPISNTSRANLNKLLTDYTEMKKAILHVYWEEFQKDPVGLMSRVAQPASKKIDQNKLKPEMDEKGNLTTAGFACSQCGQPLFVYKLEQVSEKGKAYTNYFGRCNVAEHEKLIKLAQLKPEKDSDEAVTYSLGKFGQRALDFYSIHVTKESTHPVKPLAQIAGNRYASSPVGKALSDACMGTIASFLSKYQDIIIEHQKVVKGNQKRLESLRELAGKENLEYPSVTLPPQPHTKEGVDAYNEVIARVRMWVNLNLWQKLKLSRDDAKPLLRLKNFPSFPLVERQANEVDWWDMVCNVKKLINEKKEDGKVFWQNLAGYKRQEALRPYLSSEEDRKKGKKFARYQLGDLLLHLEKKHGEDWGKVYDEAWERIDKKVEGLSKHIKLEEERRSEDAQSKAALTDWLRAKASFVIEGLKEADKDEFCRCELKLQKWYGDLRGKPFAIEAENSILDISGFSKQYNCAFIWQKDGVKKLNLYLIINYFKGGKLRFKKIKPEAFEANRFYTVINKKSGEIVPMEVNFNFDDPNLIILPLAFGKRQGREFIWNDLLSLETGSLKLANGRVIEKTLYNRRTRQDEPALFVALTFERREVLDSSNIKPMNLIGVDRGENIPAVIALTDPEGCPLSRFKDSLGNPTHILRIGESYKEKQRTIQAKKEVEQRRAGGYSRKYASKAKNLADDMVRNTARDLLYYAVTQDAMLIFENLSRGFGRQGKRTFMAERQYTRMEDWLTAKLAYEGLPSKTYLSKTLAQYTSKTCSNCGFTITSADYDRVLEKLKKTATGWMTTINGKELKVEGQITYYNRYKRQNVVKDLSVELDRLSEESVNNDISSWTKGRSGEALSLLKKRFSHRPVQEKFVCLNCGFETHADEQAALNIARSWLFLRSQEYKKYQTNKTTGNTDKRAFVETWQSFYRKKLKEVWKPAV

SEQ ID NO: 40653 - protein, 979 aa, synthetic construct
  REGION 1..979: note = engineered CasX variant
QEIKRINKIRRRLVKDSNTKKAGKTGPMKTLLVRVMTPDLRERLENLRKKPENIPQPISNTSRANLNKLLTDYTEMKKAILHVYWEEFQKDPVGLMSRVAQPASKKIDQNKLKPEMDEKGNLTTAGFACSQCGQPLFVYKLEQVSEKGKAYTNYFGRCNVAEHEKLILLAQLKPEKDSDEAVTYSLGKFGQRALDFYSIHVTKESTHPVKPLAQIAGNRYASSYPVGKALSDACMGTIASFLSKYQDIIIEHQKVVKGNQKRLESLRELAGKENLEYPSVTLPPQPHTKEGVDAYNEVIARVRMWVNLNLWQKLKLSRDDAKPLLRLKGFPSFPLVERQANEVDWWDMVCNVKKLINEKKEDGKVFWQNLAGYKRQEALRPYLSSEEDRKKGKKFARYQLGDLLNHLEKKHGEDWGKVYDEAWERIDKKVEGLSKHIKLEEERRSEDAQSKAALTDWLRAKASFVIEGLKEADKDEFCRCELKLQKWYGDLRGKPFAIEAENSILDISGFSKQYNCAFIWQKDGVKKLNLYLIINYFKGGKLRFKKIKPEAFEANRFYTVINKKSGEIVPMEVNFNFDDPNLIILPLAFGKRQGREFIWNDLLSLETGSLKLANGRVIEKTLYNRRTRQDEPALFVALTFERREVLDSSNIKPMNLIGVDRGENIPAVIALTDPEGCPLSRFKDSLGNPTHILRIGESYKEKQRTIQAKKEVEQRRAGGYSRKYASKAKNLADDMVRNTARDLLYYAVTQDAMLIFENLSRGFGRQGKRTFMAERQYTRMEDWLTAKLAYEGLPSKTYLSKTLAQYTSKTCSNCGFTITSADYDRVLEKLKKTATGWMTTINGKELKVEGQITYYNRYKRQNVVKDLSVELDRLSEESVNNDISSWTKGRSGEALSLLKKRFSHRPVQEKFVCLNCGFETHADEQAALNIARSWLFLRSQEYKKYQTNKTTGNTDKRAFVETWQSFYRKKLKEVWKPAV

SEQ ID NO: 40654 - protein, 979 aa, synthetic construct
  REGION 1..979: note = engineered CasX variant
QEIKRINKIRRRLVKDSNTKKAGKTGPMKTLLVRVMTPDLRERLENLRKKPENIPQPISNTSRANLNKLLTDYTEMKKAILHVYWEEFQKDPVGLMSRVAQPASKKIDQNKLKPEMDEKGNLTTAGFACSQCGQPLFVYKLEQVSEKGKAYTNYFGRCNVAEHEKLILLAQLKPEKDSDEAVTYSLGKFGQRALDFYSIHVTKESTHPVKPLAQIAGNRYASSHPVGKALSDACMGTIASFLSKYQDIIIEHQKVVKGNQKRLESLRELAGKENLEYPSVTLPPQPHTKEGVDAYNEVIARVRMWVNLNLWQKLKLSRDDAKPLLRLKGFPSFPLVERQANEVDWWDMVCNVKKLINEKKEDGKVFWQNLAGYKRQEALRPYLSSEEDRKKGKKFARYQLGDLLNHLEKKHGEDWGKVYDEAWERIDKKVEGLSKHIKLEEERRSEDAQSKAALTDWLRAKASFVIEGLKEADKDEFCRCELKLQKWYGDLRGKPFAIEAENSILDISGFSKQYNCAFIWQKDGVKKLNLYLIINYFKGGKLRFKKIKPEAFEANRFYTVINKKSGEIVPMEVNFNFDDPNLIILPLAFGKRQGREFIWNDLLSLETGSLKLANGRVIEKTLYNRRTRQDEPALFVALTFERREVLDSSNIKPMNLIGVDRGENIPAVIALTDPEGCPLSRFKDSLGNPTHILRIGESYKEKQRTIQAKKEVEQRRAGGYSRKYASKAKNLADDMVRNTARDLLYYAVTQDAMLIFENLSRGFGRQGKRTFMAERQYTRMEDWLTAKLAYEGLPSKTYLSKTLAQYTSKTCSNCGFTITSADYDRVLEKLKKTATGWMTTINGKELKVEGQITYYNRYKRQNVVKDLSVELDRLSEESVNNDISSWTKGRSGEALSLLKKRFSHRPVQEKFVCLNCGFETHADEQAALNIARSWLFLRSQEYKKYQTNKTTGNTDKRAFVETWQSFYRKKLKEVWKPAV

SEQ ID NO: 40655 - protein, 979 aa, synthetic construct
  REGION 1..979: note = engineered CasX variant
QEIKRINKIRRRLVKDSNTKKAGKTGPMKTLLVRVMTPDLRERLENLRKKPENIPQPISNTSRANLNKLLTDYTEMKKAILHVYWEEFQKDPVGLMSRVAQPASKKIDQNKLKPEMDEKGNLTTAGFACSQCGQPLFVYKLEQVSEKGKAYTNYFGRCNVAEHEKLILLAQLKPEKDSDEAVTYSLGKFGQRALDFYSIHVTKESTHPVKPLAQIAGNRYASSSPVGKALSDACMGTIASFLSKYQDIIIEHQKVVKGNQKRLESLRELAGKENLEYPSVTLPPQPHTKEGVDAYNEVIARVRMWVNLNLWQKLKLSRDDAKPLLRLKGFPSFPLVERQANEVDWWDMVCNVKKLINEKKEDGKVFWQNLAGYKRQEALRPYLSSEEDRKKGKKFARYQLGDLLNHLEKKHGEDWGKVYDEAWERIDKKVEGLSKHIKLEEERRSEDAQSKAALTDWLRAKASFVIEGLKEADKDEFCRCELKLQKWYGDLRGKPFAIEAENSILDISGFSKQYNCAFIWQKDGVKKLNLYLIINYFKGGKLRFKKIKPEAFEANRFYTVINKKSGEIVPMEVNFNFDDPNLIILPLAFGKRQGREFIWNDLLSLETGSLKLANGRVIEKTLYNRRTRQDEPALFVALTFERREVLDSSNIKPMNLIGVDRGENIPAVIALTDPEGCPLSRFKDSLGNPTHILRIGESYKEKQRTIQAKKEVEQRRAGGYSRKYASKAKNLADDMVRNTARDLLYYAVTQDAMLIFENLSRGFGRQGKRTFMAERQYTRMEDWLTAKLAYEGLPSKTYLSKTLAQYTSKTCSNCGFTITSADYDRVLEKLKKTATGWMTTINGKELKVEGQITYYNRYKRQNVVKDLSVELDRLSEESVNNDISSWTKGRSGEALSLLKKRFSHRPVQEKFVCLNCGFETHADEQAALNIARSWLFLRSQEYKKYQTNKTTGNTDKRAFVETWQSFYRKKLKEVWKPAV

SEQ ID NO: 40656 - protein, 979 aa, synthetic construct
  REGION 1..979: note = engineered CasX variant
QEIKRINKIRRRLVKDSNTKKAGKTGPMKTLLVRVMTPDLRERLENLRKKPENIPQPISNTSRANLNKLLTDYTEMKKAILHVYWEEFQKDPVGLMSRVAQPASKKIDQNKLKPEMDEKGNLTTAGFACSQCGQPLFVYKLEQVSEKGKAYTNYFGRCNVAEHEKLILLAQLKPEKDSDEAVTYSLGKFGQRALDFYSIHVTKESTHPVKPLAQIAGNRYASSTPVGKALSDACMGTIASFLSKYQDIIIEHQKVVKGNQKRLESLRELAGKENLEYPSVTLPPQPHTKEGVDAYNEVIARVRMWVNLNLWQKLKLSRDDAKPLLRLKGFPSFPLVERQANEVDWWDMVCNVKKLINEKKEDGKVFWQNLAGYKRQEALRPYLSSEEDRKKGKKFARYQLGDLLNHLEKKHGEDWGKVYDEAWERIDKKVEGLSKHIKLEEERRSEDAQSKAALTDWLRAKASFVIEGLKEADKDEFCRCELKLQKWYGDLRGKPFAIEAENSILDISGFSKQYNCAFIWQKDGVKKLNLYLIINYFKGGKLRFKKIKPEAFEANRFYTVINKKSGEIVPMEVNFNFDDPNLIILPLAFGKRQGREFIWNDLLSLETGSLKLANGRVIEKTLYNRRTRQDEPALFVALTFERREVLDSSNIKPMNLIGVDRGENIPAVIALTDPEGCPLSRFKDSLGNPTHILRIGESYKEKQRTIQAKKEVEQRRAGGYSRKYASKAKNLADDMVRNTARDLLYYAVTQDAMLIFENLSRGFGRQGKRTFMAERQYTRMEDWLTAKLAYEGLPSKTYLSKTLAQYTSKTCSNCGFTITSADYDRVLEKLKKTATGWMTTINGKELKVEGQITYYNRYKRQNVVKDLSVELDRLSEESVNNDISSWTKGRSGEALSLLKKRFSHRPVQEKFVCLNCGFETHADEQAALNIARSWLFLRSQEYKKYQTNKTTGNTDKRAFVETWQSFYRKKLKEVWKPAV

SEQ ID NO: 40657 - protein, 979 aa, synthetic construct
  REGION 1..979: note = engineered CasX variant
QEIKRINKIRRRLVKDSNTKKAGKTGPMKTLLVRVMTPDLRERLENLRKKPENIPQPISNTSRANLNKLLTDYTEMKKAILHVYWEEFQKDPVGLMSRVAQPASKKIDQNKLKPEMDEKGNLTTAGFACSQCGQPLFVYKLEQVSEKGKAYTNYFGRCNVAEHEKLILLAQLKPEKDSDEAVTYSLGKFGQRALDFYSIHVTKESTHPVKPLAQIAGNRYASSAPVGKALSDACMGTIASFLSKYQDIIIEHQKVVKGNQKRLESLRELAGKENLEYPSVTLPPQPHTKEGVDAYNEVIARVRMWVNLNLWQKLKLSRDDAKPLLRLKGFPSFPLVERQANEVDWWDMVCNVKKLINEKKEDGKVFWQNLAGYKRQEALRPYLSSEEDRKKGKKFARYQLGDLLNHLEKKHGEDWGKVYDEAWERIDKKVEGLSKHIKLEEERRSEDAQSKAALTDWLRAKASFVIEGLKEADKDEFCRCELKLQKWYGDLRGKPFAIEAENSILDISGFSKQYNCAFIWQKDGVKKLNLYLIINYFKGGKLRFKKIKPEAFEANRFYTVINKKSGEIVPMEVNFNFDDPNLIILPLAFGKRQGREFIWNDLLSLETGSLKLANGRVIEKTLYNRRTRQDEPALFVALTFERREVLDSSNIKPMNLIGVDRGENIPAVIALTDPEGCPLSRFKDSLGNPTHILRIGESYKEKQRTIQAKKEVEQRRAGGYSRKYASKAKNLADDMVRNTARDLLYYAVTQDAMLIFENLSRGFGRQGKRTFMAERQYTRMEDWLTAKLAYEGLPSKTYLSKTLAQYTSKTCSNCGFTITSADYDRVLEKLKKTATGWMTTINGKELKVEGQITYYNRYKRQNVVKDLSVELDRLSEESVNNDISSWTKGRSGEALSLLKKRFSHRPVQEKFVCLNCGFETHADEQAALNIARSWLFLRSQEYKKYQTNKTTGNTDKRAFVETWQSFYRKKLKEVWKPAV

SEQ ID NO: 40658 - protein, 979 aa, synthetic construct
  REGION 1..979: note = engineered CasX variant
QEIKRINKIRRRLVKDSNTKKAGKTGPMKTLLVRVMTPDLRERLENLRKKPENIPQPISNTSRANLNKLLTDYTEMKKAILHVYWEEFQKDPVGLMSRVAQPASKKIDQNKLKPEMDEKGNLTTAGFACSQCGQPLFVYKLEQVSEKGKAYTNYFGRCNVAEHEKLILLAQLKPEKDSDEAVTYSLGKFGQRALDFYSIHVTKESTHPVKPLAQIAGNRYASSVPVGKALSDACMGTIASFLSKYQDIIIEHQKVVKGNQKRLESLRELAGKENLEYPSVTLPPQPHTKEGVDAYNEVIARVRMWVNLNLWQKLKLSRDDAKPLLRLKGFPSFPLVERQANEVDWWDMVCNVKKLINEKKEDGKVFWQNLAGYKRQEALRPYLSSEEDRKKGKKFARYQLGDLLNHLEKKHGEDWGKVYDEAWERIDKKVEGLSKHIKLEEERRSEDAQSKAALTDWLRAKASFVIEGLKEADKDEFCRCELKLQKWYGDLRGKPFAIEAENSILDISGFSKQYNCAFIWQKDGVKKLNLYLIINYFKGGKLRFKKIKPEAFEANRFYTVINKKSGEIVPMEVNFNFDDPNLIILPLAFGKRQGREFIWNDLLSLETGSLKLANGRVIEKTLYNRRTRQDEPALFVALTFERREVLDSSNIKPMNLIGVDRGENIPAVIALTDPEGCPLSRFKDSLGNPTHILRIGESYKEKQRTIQAKKEVEQRRAGGYSRKYASKAKNLADDMVRNTARDLLYYAVTQDAMLIFENLSRGFGRQGKRTFMAERQYTRMEDWLTAKLAYEGLPSKTYLSKTLAQYTSKTCSNCGFTITSADYDRVLEKLKKTATGWMTTINGKELKVEGQITYYNRYKRQNVVKDLSVELDRLSEESVNNDISSWTKGRSGEALSLLKKRFSHRPVQEKFVCLNCGFETHADEQAALNIARSWLFLRSQEYKKYQTNKTTGNTDKRAFVETWQSFYRKKLKEVWKPAV

SEQ ID NO: 40659 - protein, 978 aa, synthetic construct
  REGION 1..978: note = engineered CasX variant
QEIKRINKIRRRLVKDSNTKKAGKTGPMKTLLVRVMTPDLRERLENLRKKPENIPQPISNTSRANLNKLLTDYTEMKKAILHVYWEEFQKDPVGLMSRVAQPASKKIDQNKLKPEMDEKGNLTTAGFACSQCGQPLFVYKLEQVSEKGKAYTNYFGRCNVAEHEKLIKLAQLKPEKDSDEAVTYSLGKFGQRALDFYSIHVTKESTHPVKPLAQIAGNRYASSPVGKALSDACMGTIASFLSKYQDIIIEHQKVVKGNQKRLESLRELAGKENLEYPSVTLPPQPHTKEGVDAYNEVIARVRMWVNLNLWQKLKLSRDDAKPLLRLKGFPSFPLVERQANEVDWWDMVCNVKKLINEKKEDGKVFWQNLAGYKRQEALRPYLSSEEDRKKGKKFARYQLGDLLNHLEKKHGEDWGKVYDEAWERIDKKVEGLSKHIKLEEERRSEDAQSKAALTDWLRAKASFVIEGLKEADKDEFCRCELKLQKWYGDLRGKPFAIEAENSILDISGFSKQYNCAFIWQKDGVKKLNLYLIINYFKGGKLRFKKIKPEAFEANRFYTVINKKSGEIVPMEVNFNFDDPNLIILPLAFGKRQGREFIWNDLLSLETGSLKLANGRVIEKTLYNRRTRQDEPALFVALTFERREVLDSSNIKPMNLIGVDRGENIPAVIALTDPEGCPLSRFKDSLGNPTHILRIGESYKEKQRTIQAKKEVEQRRAGGYSRKYASKAKNLADDMVRNTARDLLYYAVTQDAMLIFENLSRGFGRQGKRTFMAERQYTRMEDWLTAKLAYEGLPSKTYLSKTLAQYTSKTCSNCGFTITSADYDRVLEKLKKTATGWMTTINGKELKVEGQITYYNRYKRQNVVKDLSVELDRLSEESVNNDISSWTKGRSGEALSLLKKRFSHRPVQEKFVCLNCGFETHADEQAALNIARSWLFLRSQEYKKYQTNKTTGNTDKRAFVETWQSFYRKKLKEVWKPAV

SEQ ID NO: 40660 - protein, 979 aa, synthetic construct
  REGION 1..979: note = engineered CasX variant
QEIKRINKIRRRLVKDSNTKKAGKTGPMKTLLVRVMTPDLRERLENLRKKPENIPQPISNTSRANLNKLLTDYTEMKKAILHVYWEEFQKDPVGLMSRVAQPASKKIDQNKLKPEMDEKGNLTTAGFACSQCGQPLFVYKLEQVSEKGKAYTNYFGRCNVAEHEKLILLAQLKPEKDSDEAVTYSLGKFGQRALDFYSIHVTKESTHPVKPLAQIAGNRYASSYPVGKALSDACMGTIASFLSKYQDIIIEHQKVVKGNQKRLESLRELAGKENLEYPSVTLPPQPHTKEGVDAYNEVIARVRMWVNLNLWQKLKLSRDDAKPLLRLKGFPSFPLVERQANEVDWWDMVCNVKKLINEKKEDGKVFWQNLAGYKRQEALRPYLSSEEDRKKGKKFARYQLGDLLWHLEKKHGEDWGKVYDEAWERIDKKVEGLSKHIKLEEERRSEDAQSKAALTDWLRAKASFVIEGLKEADKDEFCRCELKLQKWYGDLRGKPFAIEAENSILDISGFSKQYNCAFIWQKDGVKKLNLYLIINYFKGGKLRFKKIKPEAFEANRFYTVINKKSGEIVPMEVNFNFDDPNLIILPLAFGKRQGREFIWNDLLSLETGSLKLANGRVIEKTLYNRRTRQDEPALFVALTFERREVLDSSNIKPMNLIGVDRGENIPAVIALTDPEGCPLSRFKDSLGNPTHILRIGESYKEKQRTIQAKKEVEQRRAGGYSRKYASKAKNLADDMVRNTARDLLYYAVTQDAMLIFENLSRGFGRQGKRTFMAERQYTRMEDWLTAKLAYEGLPSKTYLSKTLAQYTSKTCSNCGFTITSADYDRVLEKLKKTATGWMTTINGKELKVEGQITYYNRYKRQNVVKDLSVELDRLSEESVNNDISSWTKGRSGEALSLLKKRFSHRPVQEKFVCLNCGFETHADEQAALNIARSWLFLRSQEYKKYQTNKTTGNTDKRAFVETWQSFYRKKLKEVWKPAV

SEQ ID NO: 40661 - protein, 979 aa, synthetic construct
  REGION 1..979: note = engineered CasX variant
QEIKRINKIRRRLVKDSNTKKAGKTGPMKTLLVRVMTPDLRERLENLRKKPENIPQPISNTSRANLNKLLTDYTEMKKAILHVYWEEFQKDPVGLMSRVAQPASKKIDQNKLKPEMDEKGNLTTAGFACSQCGQPLFVYKLEQVSEKGKAYTNYFGRCNVAEHEKLILLAQLKPEKDSDEAVTYSLGKFGQRALDFYSIHVTKESTHPVKPLAQIAGNRYASSHPVGKALSDACMGTIASFLSKYQDIIIEHQKVVKGNQKRLESLRELAGKENLEYPSVTLPPQPHTKEGVDAYNEVIARVRMWVNLNLWQKLKLSRDDAKPLLRLKGFPSFPLVERQANEVDWWDMVCNVKKLINEKKEDGKVFWQNLAGYKRQEALRPYLSSEEDRKKGKKFARYQLGDLLWHLEKKHGEDWGKVYDEAWERIDKKVEGLSKHIKLEEERRSEDAQSKAALTDWLRAKASFVIEGLKEADKDEFCRCELKLQKWYGDLRGKPFAIEAENSILDISGFSKQYNCAFIWQKDGVKKLNLYLIINYFKGGKLRFKKIKPEAFEANRFYTVINKKSGEIVPMEVNFNFDDPNLIILPLAFGKRQGREFIWNDLLSLETGSLKLANGRVIEKTLYNRRTRQDEPALFVALTFERREVLDSSNIKPMNLIGVDRGENIPAVIALTDPEGCPLSRFKDSLGNPTHILRIGESYKEKQRTIQAKKEVEQRRAGGYSRKYASKAKNLADDMVRNTARDLLYYAVTQDAMLIFENLSRGFGRQGKRTFMAERQYTRMEDWLTAKLAYEGLPSKTYLSKTLAQYTSKTCSNCGFTITSADYDRVLEKLKKTATGWMTTINGKELKVEGQITYYNRYKRQNVVKDLSVELDRLSEESVNNDISSWTKGRSGEALSLLKKRFSHRPVQEKFVCLNCGFETHADEQAALNIARSWLFLRSQEYKKYQTNKTTGNTDKRAFVETWQSFYRKKLKEVWKPAV

SEQ ID NO: 40662 - protein, 979 aa, synthetic construct
  REGION 1..979: note = engineered CasX variant
QEIKRINKIRRRLVKDSNTKKAGKTGPMKTLLVRVMTPDLRERLENLRKKPENIPQPISNTSRANLNKLLTDYTEMKKAILHVYWEEFQKDPVGLMSRVAQPASKKIDQNKLKPEMDEKGNLTTAGFACSQCGQPLFVYKLEQVSEKGKAYTNYFGRCNVAEHEKLILLAQLKPEKDSDEAVTYSLGKFGQRALDFYSIHVTKESTHPVKPLAQIAGNRYASSSPVGKALSDACMGTIASFLSKYQDIIIEHQKVVKGNQKRLESLRELAGKENLEYPSVTLPPQPHTKEGVDAYNEVIARVRMWVNLNLWQKLKLSRDDAKPLLRLKGFPSFPLVERQANEVDWWDMVCNVKKLINEKKEDGKVFWQNLAGYKRQEALRPYLSSEEDRKKGKKFARYQLGDLLWHLEKKHGEDWGKVYDEAWERIDKKVEGLSKHIKLEEERRSEDAQSKAALTDWLRAKASFVIEGLKEADKDEFCRCELKLQKWYGDLRGKPFAIEAENSILDISGFSKQYNCAFIWQKDGVKKLNLYLIINYFKGGKLRFKKIKPEAFEANRFYTVINKKSGEIVPMEVNFNFDDPNLIILPLAFGKRQGREFIWNDLLSLETGSLKLANGRVIEKTLYNRRTRQDEPALFVALTFERREVLDSSNIKPMNLIGVDRGENIPAVIALTDPEGCPLSRFKDSLGNPTHILRIGESYKEKQRTIQAKKEVEQRRAGGYSRKYASKAKNLADDMVRNTARDLLYYAVTQDAMLIFENLSRGFGRQGKRTFMAERQYTRMEDWLTAKLAYEGLPSKTYLSKTLAQYTSKTCSNCGFTITSADYDRVLEKLKKTATGWMTTINGKELKVEGQITYYNRYKRQNVVKDLSVELDRLSEESVNNDISSWTKGRSGEALSLLKKRFSHRPVQEKFVCLNCGFETHADEQAALNIARSWLFLRSQEYKKYQTNKTTGNTDKRAFVETWQSFYRKKLKEVWKPAV

SEQ ID NO: 40663 - protein, 979 aa, synthetic construct
  REGION 1..979: note = engineered CasX variant
QEIKRINKIRRRLVKDSNTKKAGKTGPMKTLLVRVMTPDLRERLENLRKKPENIPQPISNTSRANLNKLLTDYTEMKKAILHVYWEEFQKDPVGLMSRVAQPASKKIDQNKLKPEMDEKGNLTTAGFACSQCGQPLFVYKLEQVSEKGKAYTNYFGRCNVAEHEKLILLAQLKPEKDSDEAVTYSLGKFGQRALDFYSIHVTKESTHPVKPLAQIAGNRYASSTPVGKALSDACMGTIASFLSKYQDIIIEHQKVVKGNQKRLESLRELAGKENLEYPSVTLPPQPHTKEGVDAYNEVIARVRMWVNLNLWQKLKLSRDDAKPLLRLKGFPSFPLVERQANEVDWWDMVCNVKKLINEKKEDGKVFWQNLAGYKRQEALRPYLSSEEDRKKGKKFARYQLGDLLWHLEKKHGEDWGKVYDEAWERIDKKVEGLSKHIKLEEERRSEDAQSKAALTDWLRAKASFVIEGLKEADKDEFCRCELKLQKWYGDLRGKPFAIEAENSILDISGFSKQYNCAFIWQKDGVKKLNLYLIINYFKGGKLRFKKIKPEAFEANRFYTVINKKSGEIVPMEVNFNFDDPNLIILPLAFGKRQGREFIWNDLLSLETGSLKLANGRVIEKTLYNRRTRQDEPALFVALTFERREVLDSSNIKPMNLIGVDRGENIPAVIALTDPEGCPLSRFKDSLGNPTHILRIGESYKEKQRTIQAKKEVEQRRAGGYSRKYASKAKNLADDMVRNTARDLLYYAVTQDAMLIFENLSRGFGRQGKRTFMAERQYTRMEDWLTAKLAYEGLPSKTYLSKTLAQYTSKTCSNCGFTITSADYDRVLEKLKKTATGWMTTINGKELKVEGQITYYNRYKRQNVVKDLSVELDRLSEESVNNDISSWTKGRSGEALSLLKKRFSHRPVQEKFVCLNCGFETHADEQAALNIARSWLFLRSQEYKKYQTNKTTGNTDKRAFVETWQSFYRKKLKEVWKPAV

SEQ ID NO: 40664 - protein, 979 aa, synthetic construct
  REGION 1..979: note = engineered CasX variant
QEIKRINKIRRRLVKDSNTKKAGKTGPMKTLLVRVMTPDLRERLENLRKKPENIPQPISNTSRANLNKLLTDYTEMKKAILHVYWEEFQKDPVGLMSRVAQPASKKIDQNKLKPEMDEKGNLTTAGFACSQCGQPLFVYKLEQVSEKGKAYTNYFGRCNVAEHEKLILLAQLKPEKDSDEAVTYSLGKFGQRALDFYSIHVTKESTHPVKPLAQIAGNRYASSAPVGKALSDACMGTIASFLSKYQDIIIEHQKVVKGNQKRLESLRELAGKENLEYPSVTLPPQPHTKEGVDAYNEVIARVRMWVNLNLWQKLKLSRDDAKPLLRLKGFPSFPLVERQANEVDWWDMVCNVKKLINEKKEDGKVFWQNLAGYKRQEALRPYLSSEEDRKKGKKFARYQLGDLLWHLEKKHGEDWGKVYDEAWERIDKKVEGLSKHIKLEEERRSEDAQSKAALTDWLRAKASFVIEGLKEADKDEFCRCELKLQKWYGDLRGKPFAIEAENSILDISGFSKQYNCAFIWQKDGVKKLNLYLIINYFKGGKLRFKKIKPEAFEANRFYTVINKKSGEIVPMEVNFNFDDPNLIILPLAFGKRQGREFIWNDLLSLETGSLKLANGRVIEKTLYNRRTRQDEPALFVALTFERREVLDSSNIKPMNLIGVDRGENIPAVIALTDPEGCPLSRFKDSLGNPTHILRIGESYKEKQRTIQAKKEVEQRRAGGYSRKYASKAKNLADDMVRNTARDLLYYAVTQDAMLIFENLSRGFGRQGKRTFMAERQYTRMEDWLTAKLAYEGLPSKTYLSKTLAQYTSKTCSNCGFTITSADYDRVLEKLKKTATGWMTTINGKELKVEGQITYYNRYKRQNVVKDLSVELDRLSEESVNNDISSWTKGRSGEALSLLKKRFSHRPVQEKFVCLNCGFETHADEQAALNIARSWLFLRSQEYKKYQTNKTTGNTDKRAFVETWQSFYRKKLKEVWKPAV

SEQ ID NO: 40665 - protein, 979 aa, synthetic construct
  REGION 1..979: note = engineered CasX variant
QEIKRINKIRRRLVKDSNTKKAGKTGPMKTLLVRVMTPDLRERLENLRKKPENIPQPISNTSRANLNKLLTDYTEMKKAILHVYWEEFQKDPVGLMSRVAQPASKKIDQNKLKPEMDEKGNLTTAGFACSQCGQPLFVYKLEQVSEKGKAYTNYFGRCNVAEHEKLILLAQLKPEKDSDEAVTYSLGKFGQRALDFYSIHVTKESTHPVKPLAQIAGNRYASSVPVGKALSDACMGTIASFLSKYQDIIIEHQKVVKGNQKRLESLRELAGKENLEYPSVTLPPQPHTKEGVDAYNEVIARVRMWVNLNLWQKLKLSRDDAKPLLRLKGFPSFPLVERQANEVDWWDMVCNVKKLINEKKEDGKVFWQNLAGYKRQEALRPYLSSEEDRKKGKKFARYQLGDLLWHLEKKHGEDWGKVYDEAWERIDKKVEGLSKHIKLEEERRSEDAQSKAALTDWLRAKASFVIEGLKEADKDEFCRCELKLQKWYGDLRGKPFAIEAENSILDISGFSKQYNCAFIWQKDGVKKLNLYLIINYFKGGKLRFKKIKPEAFEANRFYTVINKKSGEIVPMEVNFNFDDPNLIILPLAFGKRQGREFIWNDLLSLETGSLKLANGRVIEKTLYNRRTRQDEPALFVALTFERREVLDSSNIKPMNLIGVDRGENIPAVIALTDPEGCPLSRFKDSLGNPTHILRIGESYKEKQRTIQAKKEVEQRRAGGYSRKYASKAKNLADDMVRNTARDLLYYAVTQDAMLIFENLSRGFGRQGKRTFMAERQYTRMEDWLTAKLAYEGLPSKTYLSKTLAQYTSKTCSNCGFTITSADYDRVLEKLKKTATGWMTTINGKELKVEGQITYYNRYKRQNVVKDLSVELDRLSEESVNNDISSWTKGRSGEALSLLKKRFSHRPVQEKFVCLNCGFETHADEQAALNIARSWLFLRSQEYKKYQTNKTTGNTDKRAFVETWQSFYRKKLKEVWKPAV

SEQ ID NO: 40666 - protein, 978 aa, synthetic construct
  REGION 1..978: note = engineered CasX variant
QEIKRINKIRRRLVKDSNTKKAGKTGPMKTLLVRVMTPDLRERLENLRKKPENIPQPISNTSRANLNKLLTDYTEMKKAILHVYWEEFQKDPVGLMSRVAQPASKKIDQNKLKPEMDEKGNLTTAGFACSQCGQPLFVYKLEQVSEKGKAYTNYFGRCNVAEHEKLIKLAQLKPEKDSDEAVTYSLGKFGQRALDFYSIHVTKESTHPVKPLAQIAGNRYASSPVGKALSDACMGTIASFLSKYQDIIIEHQKVVKGNQKRLESLRELAGKENLEYPSVTLPPQPHTKEGVDAYNEVIARVRMWVNLNLWQKLKLSRDDAKPLLRLKGFPSFPLVERQANEVDWWDMVCNVKKLINEKKEDGKVFWQNLAGYKRQEALRPYLSSEEDRKKGKKFARYQLGDLLWHLEKKHGEDWGKVYDEAWERIDKKVEGLSKHIKLEEERRSEDAQSKAALTDWLRAKASFVIEGLKEADKDEFCRCELKLQKWYGDLRGKPFAIEAENSILDISGFSKQYNCAFIWQKDGVKKLNLYLIINYFKGGKLRFKKIKPEAFEANRFYTVINKKSGEIVPMEVNFNFDDPNLIILPLAFGKRQGREFIWNDLLSLETGSLKLANGRVIEKTLYNRRTRQDEPALFVALTFERREVLDSSNIKPMNLIGVDRGENIPAVIALTDPEGCPLSRFKDSLGNPTHILRIGESYKEKQRTIQAKKEVEQRRAGGYSRKYASKAKNLADDMVRNTARDLLYYAVTQDAMLIFENLSRGFGRQGKRTFMAERQYTRMEDWLTAKLAYEGLPSKTYLSKTLAQYTSKTCSNCGFTITSADYDRVLEKLKKTATGWMTTINGKELKVEGQITYYNRYKRQNVVKDLSVELDRLSEESVNNDISSWTKGRSGEALSLLKKRFSHRPVQEKFVCLNCGFETHADEQAALNIARSWLFLRSQEYKKYQTNKTTGNTDKRAFVETWQSFYRKKLKEVWKPAV

SEQ ID NO: 40667 - protein, 979 aa, synthetic construct
  REGION 1..979: note = engineered CasX variant
QEIKRINKIRRRLVKDSNTKKAGKTGPMKTLLVRVMTPDLRERLENLRKKPENIPQPISNTSRANLNKLLTDYTEMKKAILHVYWEEFQKDPVGLMSRVAQPASKKIDQNKLKPEMDEKGNLTTAGFACSQCGQPLFVYKLEQVSEKGKAYTNYFGRCNVAEHEKLILLAQLKPEKDSDEAVTYSLGKFGQRALDFYSIHVTKESTHPVKPLAQIAGNRYASSYPVGKALSDACMGTIASFLSKYQDIIIEHQKVVKGNQKRLESLRELAGKENLEYPSVTLPPQPHTKEGVDAYNEVIARVRMWVNLNLWQKLKLSRDDAKPLLRLKGFPSFPLVERQANEVDWWDMVCNVKKLINEKKEDGKVFWQNLAGYKRQEALRPYLSSEEDRKKGKKFARYQLGDLLLHLYKKHGEDWGKVYDEAWERIDKKVEGLSKHIKLEEERRSEDAQSKAALTDWLRAKASFVIEGLKEADKDEFCRCELKLQKWYGDLRGKPFAIEAENSILDISGFSKQYNCAFIWQKDGVKKLNLYLIINYFKGGKLRFKKIKPEAFEANRFYTVINKKSGEIVPMEVNFNFDDPNLIILPLAFGKRQGREFIWNDLLSLETGSLKLANGRVIEKTLYNRRTRQDEPALFVALTFERREVLDSSNIKPMNLIGVDRGENIPAVIALTDPEGCPLSRFKDSLGNPTHILRIGESYKEKQRTIQAKKEVEQRRAGGYSRKYASKAKNLADDMVRNTARDLLYYAVTQDAMLIFENLSRGFGRQGKRTFMAERQYTRMEDWLTAKLAYEGLPSKTYLSKTLAQYTSKTCSNCGFTITSADYDRVLEKLKKTATGWMTTINGKELKVEGQITYYNRYKRQNVVKDLSVELDRLSEESVNNDISSWTKGRSGEALSLLKKRFSHRPVQEKFVCLNCGFETHADEQAALNIARSWLFLRSQEYKKYQTNKTTGNTDKRAFVETWQSFYRKKLKEVWKPAV

SEQ ID NO: 40668 - protein, 979 aa, synthetic construct
  REGION 1..979: note = engineered CasX variant
QEIKRINKIRRRLVKDSNTKKAGKTGPMKTLLVRVMTPDLRERLENLRKKPENIPQPISNTSRANLNKLLTDYTEMKKAILHVYWEEFQKDPVGLMSRVAQPASKKIDQNKLKPEMDEKGNLTTAGFACSQCGQPLFVYKLEQVSEKGKAYTNYFGRCNVAEHEKLILLAQLKPEKDSDEAVTYSLGKFGQRALDFYSIHVTKESTHPVKPLAQIAGNRYASSHPVGKALSDACMGTIASFLSKYQDIIIEHQKVVKGNQKRLESLRELAGKENLEYPSVTLPPQPHTKEGVDAYNEVIARVRMWVNLNLWQKLKLSRDDAKPLLRLKGFPSFPLVERQANEVDWWDMVCNVKKLINEKKEDGKVFWQNLAGYKRQEALRPYLSSEEDRKKGKKFARYQLGDLLLHLYKKHGEDWGKVYDEAWERIDKKVEGLSKHIKLEEERRSEDAQSKAALTDWLRAKASFVIEGLKEADKDEFCRCELKLQKWYGDLRGKPFAIEAENSILDISGFSKQYNCAFIWQKDGVKKLNLYLIINYFKGGKLRFKKIKPEAFEANRFYTVINKKSGEIVPMEVNFNFDDPNLIILPLAFGKRQGREFIWNDLLSLETGSLKLANGRVIEKTLYNRRTRQDEPALFVALTFERREVLDSSNIKPMNLIGVDRGENIPAVIALTDPEGCPLSRFKDSLGNPTHILRIGESYKEKQRTIQAKKEVEQRRAGGYSRKYASKAKNLADDMVRNTARDLLYYAVTQDAMLIFENLSRGFGRQGKRTFMAERQYTRMEDWLTAKLAYEGLPSKTYLSKTLAQYTSKTCSNCGFTITSADYDRVLEKLKKTATGWMTTINGKELKVEGQITYYNRYKRQNVVKDLSVELDRLSEESVNNDISSWTKGRSGEALSLLKKRFSHRPVQEKFVCLNCGFETHADEQAALNIARSWLFLRSQEYKKYQTNKTTGNTDKRAFVETWQSFYRKKLKEVWKPAV

SEQ ID NO: 40669 - protein, 979 aa, synthetic construct
  REGION 1..979: note = engineered CasX variant
QEIKRINKIRRRLVKDSNTKKAGKTGPMKTLLVRVMTPDLRERLENLRKKPENIPQPISNTSRANLNKLLTDYTEMKKAILHVYWEEFQKDPVGLMSRVAQPASKKIDQNKLKPEMDEKGNLTTAGFACSQCGQPLFVYKLEQVSEKGKAYTNYFGRCNVAEHEKLILLAQLKPEKDSDEAVTYSLGKFGQRALDFYSIHVTKESTHPVKPLAQIAGNRYASSSPVGKALSDACMGTIASFLSKYQDIIIEHQKVVKGNQKRLESLRELAGKENLEYPSVTLPPQPHTKEGVDAYNEVIARVRMWVNLNLWQKLKLSRDDAKPLLRLKGFPSFPLVERQANEVDWWDMVCNVKKLINEKKEDGKVFWQNLAGYKRQEALRPYLSSEEDRKKGKKFARYQLGDLLLHLYKKHGEDWGKVYDEAWERIDKKVEGLSKHIKLEEERRSEDAQSKAALTDWLRAKASFVIEGLKEADKDEFCRCELKLQKWYGDLRGKPFAIEAENSILDISGFSKQYNCAFIWQKDGVKKLNLYLIINYFKGGKLRFKKIKPEAFEANRFYTVINKKSGEIVPMEVNFNFDDPNLIILPLAFGKRQGREFIWNDLLSLETGSLKLANGRVIEKTLYNRRTRQDEPALFVALTFERREVLDSSNIKPMNLIGVDRGENIPAVIALTDPEGCPLSRFKDSLGNPTHILRIGESYKEKQRTIQAKKEVEQRRAGGYSRKYASKAKNLADDMVRNTARDLLYYAVTQDAMLIFENLSRGFGRQGKRTFMAERQYTRMEDWLTAKLAYEGLPSKTYLSKTLAQYTSKTCSNCGFTITSADYDRVLEKLKKTATGWMTTINGKELKVEGQITYYNRYKRQNVVKDLSVELDRLSEESVNNDISSWTKGRSGEALSLLKKRFSHRPVQEKFVCLNCGFETHADEQAALNIARSWLFLRSQEYKKYQTNKTTGNTDKRAFVETWQSFYRKKLKEVWKPAV

SEQ ID NO: 40670 - protein, 979 aa, synthetic construct
  REGION 1..979: note = engineered CasX variant
QEIKRINKIRRRLVKDSNTKKAGKTGPMKTLLVRVMTPDLRERLENLRKKPENIPQPISNTSRANLNKLLTDYTEMKKAILHVYWEEFQKDPVGLMSRVAQPASKKIDQNKLKPEMDEKGNLTTAGFACSQCGQPLFVYKLEQVSEKGKAYTNYFGRCNVAEHEKLILLAQLKPEKDSDEAVTYSLGKFGQRALDFYSIHVTKESTHPVKPLAQIAGNRYASSTPVGKALSDACMGTIASFLSKYQDIIIEHQKVVKGNQKRLESLRELAGKENLEYPSVTLPPQPHTKEGVDAYNEVIARVRMWVNLNLWQKLKLSRDDAKPLLRLKGFPSFPLVERQANEVDWWDMVCNVKKLINEKKEDGKVFWQNLAGYKRQEALRPYLSSEEDRKKGKKFARYQLGDLLLHLYKKHGEDWGKVYDEAWERIDKKVEGLSKHIKLEEERRSEDAQSKAALTDWLRAKASFVIEGLKEADKDEFCRCELKLQKWYGDLRGKPFAIEAENSILDISGFSKQYNCAFIWQKDGVKKLNLYLIINYFKGGKLRFKKIKPEAFEANRFYTVINKKSGEIVPMEVNFNFDDPNLIILPLAFGKRQGREFIWNDLLSLETGSLKLANGRVIEKTLYNRRTRQDEPALFVALTFERREVLDSSNIKPMNLIGVDRGENIPAVIALTDPEGCPLSRFKDSLGNPTHILRIGESYKEKQRTIQAKKEVEQRRAGGYSRKYASKAKNLADDMVRNTARDLLYYAVTQDAMLIFENLSRGFGRQGKRTFMAERQYTRMEDWLTAKLAYEGLPSKTYLSKTLAQYTSKTCSNCGFTITSADYDRVLEKLKKTATGWMTTINGKELKVEGQITYYNRYKRQNVVKDLSVELDRLSEESVNNDISSWTKGRSGEALSLLKKRFSHRPVQEKFVCLNCGFETHADEQAALNIARSWLFLRSQEYKKYQTNKTTGNTDKRAFVETWQSFYRKKLKEVWKPAV

SEQ ID NO: 40671 - protein, 979 aa, synthetic construct
  REGION 1..979: note = engineered CasX variant
QEIKRINKIRRRLVKDSNTKKAGKTGPMKTLLVRVMTPDLRERLENLRKKPENIPQPISNTSRANLNKLLTDYTEMKKAILHVYWEEFQKDPVGLMSRVAQPASKKIDQNKLKPEMDEKGNLTTAGFACSQCGQPLFVYKLEQVSEKGKAYTNYFGRCNVAEHEKLILLAQLKPEKDSDEAVTYSLGKFGQRALDFYSIHVTKESTHPVKPLAQIAGNRYASSAPVGKALSDACMGTIASFLSKYQDIIIEHQKVVKGNQKRLESLRELAGKENLEYPSVTLPPQPHTKEGVDAYNEVIARVRMWVNLNLWQKLKLSRDDAKPLLRLKGFPSFPLVERQANEVDWWDMVCNVKKLINEKKEDGKVFWQNLAGYKRQEALRPYLSSEEDRKKGKKFARYQLGDLLLHLYKKHGEDWGKVYDEAWERIDKKVEGLSKHIKLEEERRSEDAQSKAALTDWLRAKASFVIEGLKEADKDEFCRCELKLQKWYGDLRGKPFAIEAENSILDISGFSKQYNCAFIWQKDGVKKLNLYLIINYFKGGKLRFKKIKPEAFEANRFYTVINKKSGEIVPMEVNFNFDDPNLIILPLAFGKRQGREFIWNDLLSLETGSLKLANGRVIEKTLYNRRTRQDEPALFVALTFERREVLDSSNIKPMNLIGVDRGENIPAVIALTDPEGCPLSRFKDSLGNPTHILRIGESYKEKQRTIQAKKEVEQRRAGGYSRKYASKAKNLADDMVRNTARDLLYYAVTQDAMLIFENLSRGFGRQGKRTFMAERQYTRMEDWLTAKLAYEGLPSKTYLSKTLAQYTSKTCSNCGFTITSADYDRVLEKLKKTATGWMTTINGKELKVEGQITYYNRYKRQNVVKDLSVELDRLSEESVNNDISSWTKGRSGEALSLLKKRFSHRPVQEKFVCLNCGFETHADEQAALNIARSWLFLRSQEYKKYQTNKTTGNTDKRAFVETWQSFYRKKLKEVWKPAV

SEQ ID NO: 40672 - protein, 979 aa, synthetic construct
  REGION 1..979: note = engineered CasX variant
QEIKRINKIRRRLVKDSNTKKAGKTGPMKTLLVRVMTPDLRERLENLRKKPENIPQPISNTSRANLNKLLTDYTEMKKAILHVYWEEFQKDPVGLMSRVAQPASKKIDQNKLKPEMDEKGNLTTAGFACSQCGQPLFVYKLEQVSEKGKAYTNYFGRCNVAEHEKLILLAQLKPEKDSDEAVTYSLGKFGQRALDFYSIHVTKESTHPVKPLAQIAGNRYASSVPVGKALSDACMGTIASFLSKYQDIIIEHQKVVKGNQKRLESLRELAGKENLEYPSVTLPPQPHTKEGVDAYNEVIARVRMWVNLNLWQKLKLSRDDAKPLLRLKGFPSFPLVERQANEVDWWDMVCNVKKLINEKKEDGKVFWQNLAGYKRQEALRPYLSSEEDRKKGKKFARYQLGDLLLHLYKKHGEDWGKVYDEAWERIDKKVEGLSKHIKLEEERRSEDAQSKAALTDWLRAKASFVIEGLKEADKDEFCRCELKLQKWYGDLRGKPFAIEAENSILDISGFSKQYNCAFIWQKDGVKKLNLYLIINYFKGGKLRFKKIKPEAFEANRFYTVINKKSGEIVPMEVNFNFDDPNLIILPLAFGKRQGREFIWNDLLSLETGSLKLANGRVIEKTLYNRRTRQDEPALFVALTFERREVLDSSNIKPMNLIGVDRGENIPAVIALTDPEGCPLSRFKDSLGNPTHILRIGESYKEKQRTIQAKKEVEQRRAGGYSRKYASKAKNLADDMVRNTARDLLYYAVTQDAMLIFENLSRGFGRQGKRTFMAERQYTRMEDWLTAKLAYEGLPSKTYLSKTLAQYTSKTCSNCGFTITSADYDRVLEKLKKTATGWMTTINGKELKVEGQITYYNRYKRQNVVKDLSVELDRLSEESVNNDISSWTKGRSGEALSLLKKRFSHRPVQEKFVCLNCGFETHADEQAALNIARSWLFLRSQEYKKYQTNKTTGNTDKRAFVETWQSFYRKKLKEVWKPAV

SEQ ID NO: 40673 - protein, 978 aa, synthetic construct
  REGION 1..978: note = engineered CasX variant
QEIKRINKIRRRLVKDSNTKKAGKTGPMKTLLVRVMTPDLRERLENLRKKPENIPQPISNTSRANLNKLLTDYTEMKKAILHVYWEEFQKDPVGLMSRVAQPASKKIDQNKLKPEMDEKGNLTTAGFACSQCGQPLFVYKLEQVSEKGKAYTNYFGRCNVAEHEKLIKLAQLKPEKDSDEAVTYSLGKFGQRALDFYSIHVTKESTHPVKPLAQIAGNRYASSPVGKALSDACMGTIASFLSKYQDIIIEHQKVVKGNQKRLESLRELAGKENLEYPSVTLPPQPHTKEGVDAYNEVIARVRMWVNLNLWQKLKLSRDDAKPLLRLKGFPSFPLVERQANEVDWWDMVCNVKKLINEKKEDGKVFWQNLAGYKRQEALRPYLSSEEDRKKGKKFARYQLGDLLLHLYKKHGEDWGKVYDEAWERIDKKVEGLSKHIKLEEERRSEDAQSKAALTDWLRAKASFVIEGLKEADKDEFCRCELKLQKWYGDLRGKPFAIEAENSILDISGFSKQYNCAFIWQKDGVKKLNLYLIINYFKGGKLRFKKIKPEAFEANRFYTVINKKSGEIVPMEVNFNFDDPNLIILPLAFGKRQGREFIWNDLLSLETGSLKLANGRVIEKTLYNRRTRQDEPALFVALTFERREVLDSSNIKPMNLIGVDRGENIPAVIALTDPEGCPLSRFKDSLGNPTHILRIGESYKEKQRTIQAKKEVEQRRAGGYSRKYASKAKNLADDMVRNTARDLLYYAVTQDAMLIFENLSRGFGRQGKRTFMAERQYTRMEDWLTAKLAYEGLPSKTYLSKTLAQYTSKTCSNCGFTITSADYDRVLEKLKKTATGWMTTINGKELKVEGQITYYNRYKRQNVVKDLSVELDRLSEESVNNDISSWTKGRSGEALSLLKKRFSHRPVQEKFVCLNCGFETHADEQAALNIARSWLFLRSQEYKKYQTNKTTGNTDKRAFVETWQSFYRKKLKEVWKPAV

SEQ ID NO: 40674 - protein, 979 aa, synthetic construct
  REGION 1..979: note = engineered CasX variant
QEIKRINKIRRRLVKDSNTKKAGKTGPMKTLLVRVMTPDLRERLENLRKKPENIPQPISNTSRANLNKLLTDYTEMKKAILHVYWEEFQKDPVGLMSRVAQPASKKIDQNKLKPEMDEKGNLTTAGFACSQCGQPLFVYKLEQVSEKGKAYTNYFGRCNVAEHEKLILLAQLKPEKDSDEAVTYSLGKFGQRALDFYSIHVTKESTHPVKPLAQIAGNRYASSYPVGKALSDACMGTIASFLSKYQDIIIEHQKVVKGNQKRLESLRELAGKENLEYPSVTLPPQPHTKEGVDAYNEVIARVRMWVNLNLWQKLKLSRDDAKPLLRLKGFPSFPLVERQANEVDWWDMVCNVKKLINEKKEDGKVFWQNLAGYKRQEALRPYLSSEEDRKKGKKFARYQLGDLLLHLEKKHPEDWGKVYDEAWERIDKKVEGLSKHIKLEEERRSEDAQSKAALTDWLRAKASFVIEGLKEADKDEFCRCELKLQKWYGDLRGKPFAIEAENSILDISGFSKQYNCAFIWQKDGVKKLNLYLIINYFKGGKLRFKKIKPEAFEANRFYTVINKKSGEIVPMEVNFNFDDPNLIILPLAFGKRQGREFIWNDLLSLETGSLKLANGRVIEKTLYNRRTRQDEPALFVALTFERREVLDSSNIKPMNLIGVDRGENIPAVIALTDPEGCPLSRFKDSLGNPTHILRIGESYKEKQRTIQAKKEVEQRRAGGYSRKYASKAKNLADDMVRNTARDLLYYAVTQDAMLIFENLSRGFGRQGKRTFMAERQYTRMEDWLTAKLAYEGLPSKTYLSKTLAQYTSKTCSNCGFTITSADYDRVLEKLKKTATGWMTTINGKELKVEGQITYYNRYKRQNVVKDLSVELDRLSEESVNNDISSWTKGRSGEALSLLKKRFSHRPVQEKFVCLNCGFETHADEQAALNIARSWLFLRSQEYKKYQTNKTTGNTDKRAFVETWQSFYRKKLKEVWKPAV

SEQ ID NO: 40675 - protein, 979 aa, synthetic construct
  REGION 1..979: note = engineered CasX variant
QEIKRINKIRRRLVKDSNTKKAGKTGPMKTLLVRVMTPDLRERLENLRKKPENIPQPISNTSRANLNKLLTDYTEMKKAILHVYWEEFQKDPVGLMSRVAQPASKKIDQNKLKPEMDEKGNLTTAGFACSQCGQPLFVYKLEQVSEKGKAYTNYFGRCNVAEHEKLILLAQLKPEKDSDEAVTYSLGKFGQRALDFYSIHVTKESTHPVKPLAQIAGNRYASSHPVGKALSDACMGTIASFLSKYQDIIIEHQKVVKGNQKRLESLRELAGKENLEYPSVTLPPQPHTKEGVDAYNEVIARVRMWVNLNLWQKLKLSRDDAKPLLRLKGFPSFPLVERQANEVDWWDMVCNVKKLINEKKEDGKVFWQNLAGYKRQEALRPYLSSEEDRKKGKKFARYQLGDLLLHLEKKHPEDWGKVYDEAWERIDKKVEGLSKHIKLEEERRSEDAQSKAALTDWLRAKASFVIEGLKEADKDEFCRCELKLQKWYGDLRGKPFAIEAENSILDISGFSKQYNCAFIWQKDGVKKLNLYLIINYFKGGKLRFKKIKPEAFEANRFYTVINKKSGEIVPMEVNFNFDDPNLIILPLAFGKRQGREFIWNDLLSLETGSLKLANGRVIEKTLYNRRTRQDEPALFVALTFERREVLDSSNIKPMNLIGVDRGENIPAVIALTDPEGCPLSRFKDSLGNPTHILRIGESYKEKQRTIQAKKEVEQRRAGGYSRKYASKAKNLADDMVRNTARDLLYYAVTQDAMLIFENLSRGFGRQGKRTFMAERQYTRMEDWLTAKLAYEGLPSKTYLSKTLAQYTSKTCSNCGFTITSADYDRVLEKLKKTATGWMTTINGKELKVEGQITYYNRYKRQNVVKDLSVELDRLSEESVNNDISSWTKGRSGEALSLLKKRFSHRPVQEKFVCLNCGFETHADEQAALNIARSWLFLRSQEYKKYQTNKTTGNTDKRAFVETWQSFYRKKLKEVWKPAV

SEQ ID NO: 40676 - protein, 979 aa, synthetic construct
  REGION 1..979: note = engineered CasX variant
QEIKRINKIRRRLVKDSNTKKAGKTGPMKTLLVRVMTPDLRERLENLRKKPENIPQPISNTSRANLNKLLTDYTEMKKAILHVYWEEFQKDPVGLMSRVAQPASKKIDQNKLKPEMDEKGNLTTAGFACSQCGQPLFVYKLEQVSEKGKAYTNYFGRCNVAEHEKLILLAQLKPEKDSDEAVTYSLGKFGQRALDFYSIHVTKESTHPVKPLAQIAGNRYASSSPVGKALSDACMGTIASFLSKYQDIIIEHQKVVKGNQKRLESLRELAGKENLEYPSVTLPPQPHTKEGVDAYNEVIARVRMWVNLNLWQKLKLSRDDAKPLLRLKGFPSFPLVERQANEVDWWDMVCNVKKLINEKKEDGKVFWQNLAGYKRQEALRPYLSSEEDRKKGKKFARYQLGDLLLHLEKKHPEDWGKVYDEAWERIDKKVEGLSKHIKLEEERRSEDAQSKAALTDWLRAKASFVIEGLKEADKDEFCRCELKLQKWYGDLRGKPFAIEAENSILDISGFSKQYNCAFIWQKDGVKKLNLYLIINYFKGGKLRFKKIKPEAFEANRFYTVINKKSGEIVPMEVNFNFDDPNLIILPLAFGKRQGREFIWNDLLSLETGSLKLANGRVIEKTLYNRRTRQDEPALFVALTFERREVLDSSNIKPMNLIGVDRGENIPAVIALTDPEGCPLSRFKDSLGNPTHILRIGESYKEKQRTIQAKKEVEQRRAGGYSRKYASKAKNLADDMVRNTARDLLYYAVTQDAMLIFENLSRGFGRQGKRTFMAERQYTRMEDWLTAKLAYEGLPSKTYLSKTLAQYTSKTCSNCGFTITSADYDRVLEKLKKTATGWMTTINGKELKVEGQITYYNRYKRQNVVKDLSVELDRLSEESVNNDISSWTKGRSGEALSLLKKRFSHRPVQEKFVCLNCGFETHADEQAALNIARSWLFLRSQEYKKYQTNKTTGNTDKRAFVETWQSFYRKKLKEVWKPAV

SEQ ID NO: 40677 - protein, 979 aa, synthetic construct
  REGION 1..979: note = engineered CasX variant
QEIKRINKIRRRLVKDSNTKKAGKTGPMKTLLVRVMTPDLRERLENLRKKPENIPQPISNTSRANLNKLLTDYTEMKKAILHVYWEEFQKDPVGLMSRVAQPASKKIDQNKLKPEMDEKGNLTTAGFACSQCGQPLFVYKLEQVSEKGKAYTNYFGRCNVAEHEKLILLAQLKPEKDSDEAVTYSLGKFGQRALDFYSIHVTKESTHPVKPLAQIAGNRYASSTPVGKALSDACMGTIASFLSKYQDIIIEHQKVVKGNQKRLESLRELAGKENLEYPSVTLPPQPHTKEGVDAYNEVIARVRMWVNLNLWQKLKLSRDDAKPLLRLKGFPSFPLVERQANEVDWWDMVCNVKKLINEKKEDGKVFWQNLAGYKRQEALRPYLSSEEDRKKGKKFARYQLGDLLLHLEKKHPEDWGKVYDEAWERIDKKVEGLSKHIKLEEERRSEDAQSKAALTDWLRAKASFVIEGLKEADKDEFCRCELKLQKWYGDLRGKPFAIEAENSILDISGFSKQYNCAFIWQKDGVKKLNLYLIINYFKGGKLRFKKIKPEAFEANRFYTVINKKSGEIVPMEVNFNFDDPNLIILPLAFGKRQGREFIWNDLLSLETGSLKLANGRVIEKTLYNRRTRQDEPALFVALTFERREVLDSSNIKPMNLIGVDRGENIPAVIALTDPEGCPLSRFKDSLGNPTHILRIGESYKEKQRTIQAKKEVEQRRAGGYSRKYASKAKNLADDMVRNTARDLLYYAVTQDAMLIFENLSRGFGRQGKRTFMAERQYTRMEDWLTAKLAYEGLPSKTYLSKTLAQYTSKTCSNCGFTITSADYDRVLEKLKKTATGWMTTINGKELKVEGQITYYNRYKRQNVVKDLSVELDRLSEESVNNDISSWTKGRSGEALSLLKKRFSHRPVQEKFVCLNCGFETHADEQAALNIARSWLFLRSQEYKKYQTNKTTGNTDKRAFVETWQSFYRKKLKEVWKPAV

SEQ ID NO: 40678 - protein, 979 aa, synthetic construct
  REGION 1..979: note = engineered CasX variant
QEIKRINKIRRRLVKDSNTKKAGKTGPMKTLLVRVMTPDLRERLENLRKKPENIPQPISNTSRANLNKLLTDYTEMKKAILHVYWEEFQKDPVGLMSRVAQPASKKIDQNKLKPEMDEKGNLTTAGFACSQCGQPLFVYKLEQVSEKGKAYTNYFGRCNVAEHEKLILLAQLKPEKDSDEAVTYSLGKFGQRALDFYSIHVTKESTHPVKPLAQIAGNRYASSAPVGKALSDACMGTIASFLSKYQDIIIEHQKVVKGNQKRLESLRELAGKENLEYPSVTLPPQPHTKEGVDAYNEVIARVRMWVNLNLWQKLKLSRDDAKPLLRLKGFPSFPLVERQANEVDWWDMVCNVKKLINEKKEDGKVFWQNLAGYKRQEALRPYLSSEEDRKKGKKFARYQLGDLLLHLEKKHPEDWGKVYDEAWERIDKKVEGLSKHIKLEEERRSEDAQSKAALTDWLRAKASFVIEGLKEADKDEFCRCELKLQKWYGDLRGKPFAIEAENSILDISGFSKQYNCAFIWQKDGVKKLNLYLIINYFKGGKLRFKKIKPEAFEANRFYTVINKKSGEIVPMEVNFNFDDPNLIILPLAFGKRQGREFIWNDLLSLETGSLKLANGRVIEKTLYNRRTRQDEPALFVALTFERREVLDSSNIKPMNLIGVDRGENIPAVIALTDPEGCPLSRFKDSLGNPTHILRIGESYKEKQRTIQAKKEVEQRRAGGYSRKYASKAKNLADDMVRNTARDLLYYAVTQDAMLIFENLSRGFGRQGKRTFMAERQYTRMEDWLTAKLAYEGLPSKTYLSKTLAQYTSKTCSNCGFTITSADYDRVLEKLKKTATGWMTTINGKELKVEGQITYYNRYKRQNVVKDLSVELDRLSEESVNNDISSWTKGRSGEALSLLKKRFSHRPVQEKFVCLNCGFETHADEQAALNIARSWLFLRSQEYKKYQTNKTTGNTDKRAFVETWQSFYRKKLKEVWKPAV

SEQ ID NO: 40679 - protein, 979 aa, synthetic construct
  REGION 1..979: note = engineered CasX variant
QEIKRINKIRRRLVKDSNTKKAGKTGPMKTLLVRVMTPDLRERLENLRKKPENIPQPISNTSRANLNKLLTDYTEMKKAILHVYWEEFQKDPVGLMSRVAQPASKKIDQNKLKPEMDEKGNLTTAGFACSQCGQPLFVYKLEQVSEKGKAYTNYFGRCNVAEHEKLILLAQLKPEKDSDEAVTYSLGKFGQRALDFYSIHVTKESTHPVKPLAQIAGNRYASSVPVGKALSDACMGTIASFLSKYQDIIIEHQKVVKGNQKRLESLRELAGKENLEYPSVTLPPQPHTKEGVDAYNEVIARVRMWVNLNLWQKLKLSRDDAKPLLRLKGFPSFPLVERQANEVDWWDMVCNVKKLINEKKEDGKVFWQNLAGYKRQEALRPYLSSEEDRKKGKKFARYQLGDLLLHLEKKHPEDWGKVYDEAWERIDKKVEGLSKHIKLEEERRSEDAQSKAALTDWLRAKASFVIEGLKEADKDEFCRCELKLQKWYGDLRGKPFAIEAENSILDISGFSKQYNCAFIWQKDGVKKLNLYLIINYFKGGKLRFKKIKPEAFEANRFYTVINKKSGEIVPMEVNFNFDDPNLIILPLAFGKRQGREFIWNDLLSLETGSLKLANGRVIEKTLYNRRTRQDEPALFVALTFERREVLDSSNIKPMNLIGVDRGENIPAVIALTDPEGCPLSRFKDSLGNPTHILRIGESYKEKQRTIQAKKEVEQRRAGGYSRKYASKAKNLADDMVRNTARDLLYYAVTQDAMLIFENLSRGFGRQGKRTFMAERQYTRMEDWLTAKLAYEGLPSKTYLSKTLAQYTSKTCSNCGFTITSADYDRVLEKLKKTATGWMTTINGKELKVEGQITYYNRYKRQNVVKDLSVELDRLSEESVNNDISSWTKGRSGEALSLLKKRFSHRPVQEKFVCLNCGFETHADEQAALNIARSWLFLRSQEYKKYQTNKTTGNTDKRAFVETWQSFYRKKLKEVWKPAV

SEQ ID NO: 40680 - protein, 978 aa, synthetic construct
  REGION 1..978: note = engineered CasX variant
QEIKRINKIRRRLVKDSNTKKAGKTGPMKTLLVRVMTPDLRERLENLRKKPENIPQPISNTSRANLNKLLTDYTEMKKAILHVYWEEFQKDPVGLMSRVAQPASKKIDQNKLKPEMDEKGNLTTAGFACSQCGQPLFVYKLEQVSEKGKAYTNYFGRCNVAEHEKLIKLAQLKPEKDSDEAVTYSLGKFGQRALDFYSIHVTKESTHPVKPLAQIAGNRYASSPVGKALSDACMGTIASFLSKYQDIIIEHQKVVKGNQKRLESLRELAGKENLEYPSVTLPPQPHTKEGVDAYNEVIARVRMWVNLNLWQKLKLSRDDAKPLLRLKGFPSFPLVERQANEVDWWDMVCNVKKLINEKKEDGKVFWQNLAGYKRQEALRPYLSSEEDRKKGKKFARYQLGDLLLHLEKKHPEDWGKVYDEAWERIDKKVEGLSKHIKLEEERRSEDAQSKAALTDWLRAKASFVIEGLKEADKDEFCRCELKLQKWYGDLRGKPFAIEAENSILDISGFSKQYNCAFIWQKDGVKKLNLYLIINYFKGGKLRFKKIKPEAFEANRFYTVINKKSGEIVPMEVNFNFDDPNLIILPLAFGKRQGREFIWNDLLSLETGSLKLANGRVIEKTLYNRRTRQDEPALFVALTFERREVLDSSNIKPMNLIGVDRGENIPAVIALTDPEGCPLSRFKDSLGNPTHILRIGESYKEKQRTIQAKKEVEQRRAGGYSRKYASKAKNLADDMVRNTARDLLYYAVTQDAMLIFENLSRGFGRQGKRTFMAERQYTRMEDWLTAKLAYEGLPSKTYLSKTLAQYTSKTCSNCGFTITSADYDRVLEKLKKTATGWMTTINGKELKVEGQITYYNRYKRQNVVKDLSVELDRLSEESVNNDISSWTKGRSGEALSLLKKRFSHRPVQEKFVCLNCGFETHADEQAALNIARSWLFLRSQEYKKYQTNKTTGNTDKRAFVETWQSFYRKKLKEVWKPAV

SEQ ID NO: 40681 - protein, 980 aa, synthetic construct
  REGION 1..980: note = engineered CasX variant
QEIKRINKIRRRLVKDSNTKKAGKTGPMKTLLVRVMTPDLRERLENLRKKPENIPQPISNTSRANLNKLLTDYTEMKKAILHVYWEEFQKDPVGLMSRVAQPASKKIDQNKLKPEMDEKGNLTTAGFACSQCGQPLFVYKLEQVSEKGKAYTNYFGRCNVAEHEKLILLAQLKPEKDSDEAVTYSLGKFGQRALDFYSIHVTKESTHPVKPLAQIAGNRYASSYPVGKALSDACMGTIASFLSKYQDIIIEHQKVVKGNQKRLESLRELAGKENLEYPSVTLPPQPHTKEGVDAYNEVIARVRMWVNLNLWQKLKLSRDDAKPLLRLKGFPSFPLVERQANEVDWWDMVCNVKKLINEKKEDGKVFWQNLAGYKRQEALRPYLSSEEDRKKGKKFARYQLGDLLLHLEKKHGERDWGKVYDEAWERIDKKVEGLSKHIKLEEERRSEDAQSKAALTDWLRAKASFVIEGLKEADKDEFCRCELKLQKWYGDLRGKPFAIEAENSILDISGFSKQYNCAFIWQKDGVKKLNLYLIINYFKGGKLRFKKIKPEAFEANRFYTVINKKSGEIVPMEVNFNFDDPNLIILPLAFGKRQGREFIWNDLLSLETGSLKLANGRVIEKTLYNRRTRQDEPALFVALTFERREVLDSSNIKPMNLIGVDRGENIPAVIALTDPEGCPLSRFKDSLGNPTHILRIGESYKEKQRTIQAKKEVEQRRAGGYSRKYASKAKNLADDMVRNTARDLLYYAVTQDAMLIFENLSRGFGRQGKRTFMAERQYTRMEDWLTAKLAYEGLPSKTYLSKTLAQYTSKTCSNCGFTITSADYDRVLEKLKKTATGWMTTINGKELKVEGQITYYNRYKRQNVVKDLSVELDRLSEESVNNDISSWTKGRSGEALSLLKKRFSHRPVQEKFVCLNCGFETHADEQAALNIARSWLFLRSQEYKKYQTNKTTGNTDKRAFVETWQSFYRKKLKEVWKPAV

SEQ ID NO: 40682 - protein, 980 aa, synthetic construct
  REGION 1..980: note = engineered CasX variant
QEIKRINKIRRRLVKDSNTKKAGKTGPMKTLLVRVMTPDLRERLENLRKKPENIPQPISNTSRANLNKLLTDYTEMKKAILHVYWEEFQKDPVGLMSRVAQPASKKIDQNKLKPEMDEKGNLTTAGFACSQCGQPLFVYKLEQVSEKGKAYTNYFGRCNVAEHEKLILLAQLKPEKDSDEAVTYSLGKFGQRALDFYSIHVTKESTHPVKPLAQIAGNRYASSHPVGKALSDACMGTIASFLSKYQDIIIEHQKVVKGNQKRLESLRELAGKENLEYPSVTLPPQPHTKEGVDAYNEVIARVRMWVNLNLWQKLKLSRDDAKPLLRLKGFPSFPLVERQANEVDWWDMVCNVKKLINEKKEDGKVFWQNLAGYKRQEALRPYLSSEEDRKKGKKFARYQLGDLLLHLEKKHGERDWGKVYDEAWERIDKKVEGLSKHIKLEEERRSEDAQSKAALTDWLRAKASFVIEGLKEADKDEFCRCELKLQKWYGDLRGKPFAIEAENSILDISGFSKQYNCAFIWQKDGVKKLNLYLIINYFKGGKLRFKKIKPEAFEANRFYTVINKKSGEIVPMEVNFNFDDPNLIILPLAFGKRQGREFIWNDLLSLETGSLKLANGRVIEKTLYNRRTRQDEPALFVALTFERREVLDSSNIKPMNLIGVDRGENIPAVIALTDPEGCPLSRFKDSLGNPTHILRIGESYKEKQRTIQAKKEVEQRRAGGYSRKYASKAKNLADDMVRNTARDLLYYAVTQDAMLIFENLSRGFGRQGKRTFMAERQYTRMEDWLTAKLAYEGLPSKTYLSKTLAQYTSKTCSNCGFTITSADYDRVLEKLKKTATGWMTTINGKELKVEGQITYYNRYKRQNVVKDLSVELDRLSEESVNNDISSWTKGRSGEALSLLKKRFSHRPVQEKFVCLNCGFETHADEQAALNIARSWLFLRSQEYKKYQTNKTTGNTDKRAFVETWQSFYRKKLKEVWKPAV

SEQ ID NO: 40683 - protein, 980 aa, synthetic construct
  REGION 1..980: note = engineered CasX variant
QEIKRINKIRRRLVKDSNTKKAGKTGPMKTLLVRVMTPDLRERLENLRKKPENIPQPISNTSRANLNKLLTDYTEMKKAILHVYWEEFQKDPVGLMSRVAQPASKKIDQNKLKPEMDEKGNLTTAGFACSQCGQPLFVYKLEQVSEKGKAYTNYFGRCNVAEHEKLILLAQLKPEKDSDEAVTYSLGKFGQRALDFYSIHVTKESTHPVKPLAQIAGNRYASSSPVGKALSDACMGTIASFLSKYQDIIIEHQKVVKGNQKRLESLRELAGKENLEYPSVTLPPQPHTKEGVDAYNEVIARVRMWVNLNLWQKLKLSRDDAKPLLRLKGFPSFPLVERQANEVDWWDMVCNVKKLINEKKEDGKVFWQNLAGYKRQEALRPYLSSEEDRKKGKKFARYQLGDLLLHLEKKHGERDWGKVYDEAWERIDKKVEGLSKHIKLEEERRSEDAQSKAALTDWLRAKASFVIEGLKEADKDEFCRCELKLQKWYGDLRGKPFAIEAENSILDISGFSKQYNCAFIWQKDGVKKLNLYLIINYFKGGKLRFKKIKPEAFEANRFYTVINKKSGEIVPMEVNFNFDDPNLIILPLAFGKRQGREFIWNDLLSLETGSLKLANGRVIEKTLYNRRTRQDEPALFVALTFERREVLDSSNIKPMNLIGVDRGENIPAVIALTDPEGCPLSRFKDSLGNPTHILRIGESYKEKQRTIQAKKEVEQRRAGGYSRKYASKAKNLADDMVRNTARDLLYYAVTQDAMLIFENLSRGFGRQGKRTFMAERQYTRMEDWLTAKLAYEGLPSKTYLSKTLAQYTSKTCSNCGFTITSADYDRVLEKLKKTATGWMTTINGKELKVEGQITYYNRYKRQNVVKDLSVELDRLSEESVNNDISSWTKGRSGEALSLLKKRFSHRPVQEKFVCLNCGFETHADEQAALNIARSWLFLRSQEYKKYQTNKTTGNTDKRAFVETWQSFYRKKLKEVWKPAV

SEQ ID NO: 40684 - protein, 980 aa, synthetic construct
  REGION 1..980: note = engineered CasX variant
QEIKRINKIRRRLVKDSNTKKAGKTGPMKTLLVRVMTPDLRERLENLRKKPENIPQPISNTSRANLNKLLTDYTEMKKAILHVYWEEFQKDPVGLMSRVAQPASKKIDQNKLKPEMDEKGNLTTAGFACSQCGQPLFVYKLEQVSEKGKAYTNYFGRCNVAEHEKLILLAQLKPEKDSDEAVTYSLGKFGQRALDFYSIHVTKESTHPVKPLAQIAGNRYASSTPVGKALSDACMGTIASFLSKYQDIIIEHQKVVKGNQKRLESLRELAGKENLEYPSVTLPPQPHTKEGVDAYNEVIARVRMWVNLNLWQKLKLSRDDAKPLLRLKGFPSFPLVERQANEVDWWDMVCNVKKLINEKKEDGKVFWQNLAGYKRQEALRPYLSSEEDRKKGKKFARYQLGDLLLHLEKKHGERDWGKVYDEAWERIDKKVEGLSKHIKLEEERRSEDAQSKAALTDWLRAKASFVIEGLKEADKDEFCRCELKLQKWYGDLRGKPFAIEAENSILDISGFSKQYNCAFIWQKDGVKKLNLYLIINYFKGGKLRFKKIKPEAFEANRFYTVINKKSGEIVPMEVNFNFDDPNLIILPLAFGKRQGREFIWNDLLSLETGSLKLANGRVIEKTLYNRRTRQDEPALFVALTFERREVLDSSNIKPMNLIGVDRGENIPAVIALTDPEGCPLSRFKDSLGNPTHILRIGESYKEKQRTIQAKKEVEQRRAGGYSRKYASKAKNLADDMVRNTARDLLYYAVTQDAMLIFENLSRGFGRQGKRTFMAERQYTRMEDWLTAKLAYEGLPSKTYLSKTLAQYTSKTCSNCGFTITSADYDRVLEKLKKTATGWMTTINGKELKVEGQITYYNRYKRQNVVKDLSVELDRLSEESVNNDISSWTKGRSGEALSLLKKRFSHRPVQEKFVCLNCGFETHADEQAALNIARSWLFLRSQEYKKYQTNKTTGNTDKRAFVETWQSFYRKKLKEVWKPAV

SEQ ID NO: 40685 - protein, 980 aa, synthetic construct
  REGION 1..980: note = engineered CasX variant
QEIKRINKIRRRLVKDSNTKKAGKTGPMKTLLVRVMTPDLRERLENLRKKPENIPQPISNTSRANLNKLLTDYTEMKKAILHVYWEEFQKDPVGLMSRVAQPASKKIDQNKLKPEMDEKGNLTTAGFACSQCGQPLFVYKLEQVSEKGKAYTNYFGRCNVAEHEKLILLAQLKPEKDSDEAVTYSLGKFGQRALDFYSIHVTKESTHPVKPLAQIAGNRYASSAPVGKALSDACMGTIASFLSKYQDIIIEHQKVVKGNQKRLESLRELAGKENLEYPSVTLPPQPHTKEGVDAYNEVIARVRMWVNLNLWQKLKLSRDDAKPLLRLKGFPSFPLVERQANEVDWWDMVCNVKKLINEKKEDGKVFWQNLAGYKRQEALRPYLSSEEDRKKGKKFARYQLGDLLLHLEKKHGERDWGKVYDEAWERIDKKVEGLSKHIKLEEERRSEDAQSKAALTDWLRAKASFVIEGLKEADKDEFCRCELKLQKWYGDLRGKPFAIEAENSILDISGFSKQYNCAFIWQKDGVKKLNLYLIINYFKGGKLRFKKIKPEAFEANRFYTVINKKSGEIVPMEVNFNFDDPNLIILPLAFGKRQGREFIWNDLLSLETGSLKLANGRVIEKTLYNRRTRQDEPALFVALTFERREVLDSSNIKPMNLIGVDRGENIPAVIALTDPEGCPLSRFKDSLGNPTHILRIGESYKEKQRTIQAKKEVEQRRAGGYSRKYASKAKNLADDMVRNTARDLLYYAVTQDAMLIFENLSRGFGRQGKRTFMAERQYTRMEDWLTAKLAYEGLPSKTYLSKTLAQYTSKTCSNCGFTITSADYDRVLEKLKKTATGWMTTINGKELKVEGQITYYNRYKRQNVVKDLSVELDRLSEESVNNDISSWTKGRSGEALSLLKKRFSHRPVQEKFVCLNCGFETHADEQAALNIARSWLFLRSQEYKKYQTNKTTGNTDKRAFVETWQSFYRKKLKEVWKPAV

SEQ ID NO: 40686 - protein, 980 aa, synthetic construct
  REGION 1..980: note = engineered CasX variant
QEIKRINKIRRRLVKDSNTKKAGKTGPMKTLLVRVMTPDLRERLENLRKKPENIPQPISNTSRANLNKLLTDYTEMKKAILHVYWEEFQKDPVGLMSRVAQPASKKIDQNKLKPEMDEKGNLTTAGFACSQCGQPLFVYKLEQVSEKGKAYTNYFGRCNVAEHEKLILLAQLKPEKDSDEAVTYSLGKFGQRALDFYSIHVTKESTHPVKPLAQIAGNRYASSVPVGKALSDACMGTIASFLSKYQDIIIEHQKVVKGNQKRLESLRELAGKENLEYPSVTLPPQPHTKEGVDAYNEVIARVRMWVNLNLWQKLKLSRDDAKPLLRLKGFPSFPLVERQANEVDWWDMVCNVKKLINEKKEDGKVFWQNLAGYKRQEALRPYLSSEEDRKKGKKFARYQLGDLLLHLEKKHGERDWGKVYDEAWERIDKKVEGLSKHIKLEEERRSEDAQSKAALTDWLRAKASFVIEGLKEADKDEFCRCELKLQKWYGDLRGKPFAIEAENSILDISGFSKQYNCAFIWQKDGVKKLNLYLIINYFKGGKLRFKKIKPEAFEANRFYTVINKKSGEIVPMEVNFNFDDPNLIILPLAFGKRQGREFIWNDLLSLETGSLKLANGRVIEKTLYNRRTRQDEPALFVALTFERREVLDSSNIKPMNLIGVDRGENIPAVIALTDPEGCPLSRFKDSLGNPTHILRIGESYKEKQRTIQAKKEVEQRRAGGYSRKYASKAKNLADDMVRNTARDLLYYAVTQDAMLIFENLSRGFGRQGKRTFMAERQYTRMEDWLTAKLAYEGLPSKTYLSKTLAQYTSKTCSNCGFTITSADYDRVLEKLKKTATGWMTTINGKELKVEGQITYYNRYKRQNVVKDLSVELDRLSEESVNNDISSWTKGRSGEALSLLKKRFSHRPVQEKFVCLNCGFETHADEQAALNIARSWLFLRSQEYKKYQTNKTTGNTDKRAFVETWQSFYRKKLKEVWKPAV

SEQ ID NO: 40687 - protein, 979 aa, synthetic construct
  REGION 1..979: note = engineered CasX variant
QEIKRINKIRRRLVKDSNTKKAGKTGPMKTLLVRVMTPDLRERLENLRKKPENIPQPISNTSRANLNKLLTDYTEMKKAILHVYWEEFQKDPVGLMSRVAQPASKKIDQNKLKPEMDEKGNLTTAGFACSQCGQPLFVYKLEQVSEKGKAYTNYFGRCNVAEHEKLIKLAQLKPEKDSDEAVTYSLGKFGQRALDFYSIHVTKESTHPVKPLAQIAGNRYASSPVGKALSDACMGTIASFLSKYQDIIIEHQKVVKGNQKRLESLRELAGKENLEYPSVTLPPQPHTKEGVDAYNEVIARVRMWVNLNLWQKLKLSRDDAKPLLRLKGFPSFPLVERQANEVDWWDMVCNVKKLINEKKEDGKVFWQNLAGYKRQEALRPYLSSEEDRKKGKKFARYQLGDLLLHLEKKHGERDWGKVYDEAWERIDKKVEGLSKHIKLEEERRSEDAQSKAALTDWLRAKASFVIEGLKEADKDEFCRCELKLQKWYGDLRGKPFAIEAENSILDISGFSKQYNCAFIWQKDGVKKLNLYLIINYFKGGKLRFKKIKPEAFEANRFYTVINKKSGEIVPMEVNFNFDDPNLIILPLAFGKRQGREFIWNDLLSLETGSLKLANGRVIEKTLYNRRTRQDEPALFVALTFERREVLDSSNIKPMNLIGVDRGENIPAVIALTDPEGCPLSRFKDSLGNPTHILRIGESYKEKQRTIQAKKEVEQRRAGGYSRKYASKAKNLADDMVRNTARDLLYYAVTQDAMLIFENLSRGFGRQGKRTFMAERQYTRMEDWLTAKLAYEGLPSKTYLSKTLAQYTSKTCSNCGFTITSADYDRVLEKLKKTATGWMTTINGKELKVEGQITYYNRYKRQNVVKDLSVELDRLSEESVNNDISSWTKGRSGEALSLLKKRFSHRPVQEKFVCLNCGFETHADEQAALNIARSWLFLRSQEYKKYQTNKTTGNTDKRAFVETWQSFYRKKLKEVWKPAV

SEQ ID NO: 40688 - protein, 980 aa, synthetic construct
  REGION 1..980: note = engineered CasX variant
QEIKRINKIRRRLVKDSNTKKAGKTGPMKTLLVRVMTPDLRERLENLRKKPENIPQPISNTSRANLNKLLTDYTEMKKAILHVYWEEFQKDPVGLMSRVAQPASKKIDQNKLKPEMDEKGNLTTAGFACSQCGQPLFVYKLEQVSEKGKAYTNYFGRCNVAEHEKLILLAQLKPEKDSDEAVTYSLGKFGQRALDFYSIHVTKESTHPVKPLAQIAGNRYASSYPVGKALSDACMGTIASFLSKYQDIIIEHQKVVKGNQKRLESLRELAGKENLEYPSVTLPPQPHTKEGVDAYNEVIARVRMWVNLNLWQKLKLSRDDAKPLLRLKGFPSFPLVERQANEVDWWDMVCNVKKLINEKKEDGKVFWQNLAGYKRQEALRPYLSSEEDRKKGKKFARYQLGDLLLHLEKKHGEYDWGKVYDEAWERIDKKVEGLSKHIKLEEERRSEDAQSKAALTDWLRAKASFVIEGLKEADKDEFCRCELKLQKWYGDLRGKPFAIEAENSILDISGFSKQYNCAFIWQKDGVKKLNLYLIINYFKGGKLRFKKIKPEAFEANRFYTVINKKSGEIVPMEVNFNFDDPNLIILPLAFGKRQGREFIWNDLLSLETGSLKLANGRVIEKTLYNRRTRQDEPALFVALTFERREVLDSSNIKPMNLIGVDRGENIPAVIALTDPEGCPLSRFKDSLGNPTHILRIGESYKEKQRTIQAKKEVEQRRAGGYSRKYASKAKNLADDMVRNTARDLLYYAVTQDAMLIFENLSRGFGRQGKRTFMAERQYTRMEDWLTAKLAYEGLPSKTYLSKTLAQYTSKTCSNCGFTITSADYDRVLEKLKKTATGWMTTINGKELKVEGQITYYNRYKRQNVVKDLSVELDRLSEESVNNDISSWTKGRSGEALSLLKKRFSHRPVQEKFVCLNCGFETHADEQAALNIARSWLFLRSQEYKKYQTNKTTGNTDKRAFVETWQSFYRKKLKEVWKPAV

SEQ ID NO: 40689 - protein, 980 aa, synthetic construct
  REGION 1..980: note = engineered CasX variant
QEIKRINKIRRRLVKDSNTKKAGKTGPMKTLLVRVMTPDLRERLENLRKKPENIPQPISNTSRANLNKLLTDYTEMKKAILHVYWEEFQKDPVGLMSRVAQPASKKIDQNKLKPEMDEKGNLTTAGFACSQCGQPLFVYKLEQVSEKGKAYTNYFGRCNVAEHEKLILLAQLKPEKDSDEAVTYSLGKFGQRALDFYSIHVTKESTHPVKPLAQIAGNRYASSHPVGKALSDACMGTIASFLSKYQDIIIEHQKVVKGNQKRLESLRELAGKENLEYPSVTLPPQPHTKEGVDAYNEVIARVRMWVNLNLWQKLKLSRDDAKPLLRLKGFPSFPLVERQANEVDWWDMVCNVKKLINEKKEDGKVFWQNLAGYKRQEALRPYLSSEEDRKKGKKFARYQLGDLLLHLEKKHGEYDWGKVYDEAWERIDKKVEGLSKHIKLEEERRSEDAQSKAALTDWLRAKASFVIEGLKEADKDEFCRCELKLQKWYGDLRGKPFAIEAENSILDISGFSKQYNCAFIWQKDGVKKLNLYLIINYFKGGKLRFKKIKPEAFEANRFYTVINKKSGEIVPMEVNFNFDDPNLIILPLAFGKRQGREFIWNDLLSLETGSLKLANGRVIEKTLYNRRTRQDEPALFVALTFERREVLDSSNIKPMNLIGVDRGENIPAVIALTDPEGCPLSRFKDSLGNPTHILRIGESYKEKQRTIQAKKEVEQRRAGGYSRKYASKAKNLADDMVRNTARDLLYYAVTQDAMLIFENLSRGFGRQGKRTFMAERQYTRMEDWLTAKLAYEGLPSKTYLSKTLAQYTSKTCSNCGFTITSADYDRVLEKLKKTATGWMTTINGKELKVEGQITYYNRYKRQNVVKDLSVELDRLSEESVNNDISSWTKGRSGEALSLLKKRFSHRPVQEKFVCLNCGFETHADEQAALNIARSWLFLRSQEYKKYQTNKTTGNTDKRAFVETWQSFYRKKLKEVWKPAV

SEQ ID NO: 40690 - protein, 980 aa, synthetic construct
  REGION 1..980: note = engineered CasX variant
QEIKRINKIRRRLVKDSNTKKAGKTGPMKTLLVRVMTPDLRERLENLRKKPENIPQPISNTSRANLNKLLTDYTEMKKAILHVYWEEFQKDPVGLMSRVAQPASKKIDQNKLKPEMDEKGNLTTAGFACSQCGQPLFVYKLEQVSEKGKAYTNYFGRCNVAEHEKLILLAQLKPEKDSDEAVTYSLGKFGQRALDFYSIHVTKESTHPVKPLAQIAGNRYASSSPVGKALSDACMGTIASFLSKYQDIIIEHQKVVKGNQKRLESLRELAGKENLEYPSVTLPPQPHTKEGVDAYNEVIARVRMWVNLNLWQKLKLSRDDAKPLLRLKGFPSFPLVERQANEVDWWDMVCNVKKLINEKKEDGKVFWQNLAGYKRQEALRPYLSSEEDRKKGKKFARYQLGDLLLHLEKKHGEYDWGKVYDEAWERIDKKVEGLSKHIKLEEERRSEDAQSKAALTDWLRAKASFVIEGLKEADKDEFCRCELKLQKWYGDLRGKPFAIEAENSILDISGFSKQYNCAFIWQKDGVKKLNLYLIINYFKGGKLRFKKIKPEAFEANRFYTVINKKSGEIVPMEVNFNFDDPNLIILPLAFGKRQGREFIWNDLLSLETGSLKLANGRVIEKTLYNRRTRQDEPALFVALTFERREVLDSSNIKPMNLIGVDRGENIPAVIALTDPEGCPLSRFKDSLGNPTHILRIGESYKEKQRTIQAKKEVEQRRAGGYSRKYASKAKNLADDMVRNTARDLLYYAVTQDAMLIFENLSRGFGRQGKRTFMAERQYTRMEDWLTAKLAYEGLPSKTYLSKTLAQYTSKTCSNCGFTITSADYDRVLEKLKKTATGWMTTINGKELKVEGQITYYNRYKRQNVVKDLSVELDRLSEESVNNDISSWTKGRSGEALSLLKKRFSHRPVQEKFVCLNCGFETHADEQAALNIARSWLFLRSQEYKKYQTNKTTGNTDKRAFVETWQSFYRKKLKEVWKPAV

SEQ ID NO: 40691 - protein, 980 aa, synthetic construct
  REGION 1..980: note = engineered CasX variant
QEIKRINKIRRRLVKDSNTKKAGKTGPMKTLLVRVMTPDLRERLENLRKKPENIPQPISNTSRANLNKLLTDYTEMKKAILHVYWEEFQKDPVGLMSRVAQPASKKIDQNKLKPEMDEKGNLTTAGFACSQCGQPLFVYKLEQVSEKGKAYTNYFGRCNVAEHEKLILLAQLKPEKDSDEAVTYSLGKFGQRALDFYSIHVTKESTHPVKPLAQIAGNRYASSTPVGKALSDACMGTIASFLSKYQDIIIEHQKVVKGNQKRLESLRELAGKENLEYPSVTLPPQPHTKEGVDAYNEVIARVRMWVNLNLWQKLKLSRDDAKPLLRLKGFPSFPLVERQANEVDWWDMVCNVKKLINEKKEDGKVFWQNLAGYKRQEALRPYLSSEEDRKKGKKFARYQLGDLLLHLEKKHGEYDWGKVYDEAWERIDKKVEGLSKHIKLEEERRSEDAQSKAALTDWLRAKASFVIEGLKEADKDEFCRCELKLQKWYGDLRGKPFAIEAENSILDISGFSKQYNCAFIWQKDGVKKLNLYLIINYFKGGKLRFKKIKPEAFEANRFYTVINKKSGEIVPMEVNFNFDDPNLIILPLAFGKRQGREFIWNDLLSLETGSLKLANGRVIEKTLYNRRTRQDEPALFVALTFERREVLDSSNIKPMNLIGVDRGENIPAVIALTDPEGCPLSRFKDSLGNPTHILRIGESYKEKQRTIQAKKEVEQRRAGGYSRKYASKAKNLADDMVRNTARDLLYYAVTQDAMLIFENLSRGFGRQGKRTFMAERQYTRMEDWLTAKLAYEGLPSKTYLSKTLAQYTSKTCSNCGFTITSADYDRVLEKLKKTATGWMTTINGKELKVEGQITYYNRYKRQNVVKDLSVELDRLSEESVNNDISSWTKGRSGEALSLLKKRFSHRPVQEKFVCLNCGFETHADEQAALNIARSWLFLRSQEYKKYQTNKTTGNTDKRAFVETWQSFYRKKLKEVWKPAV

SEQ ID NO: 40692 - protein, 980 aa, synthetic construct
  REGION 1..980: note = engineered CasX variant
QEIKRINKIRRRLVKDSNTKKAGKTGPMKTLLVRVMTPDLRERLENLRKKPENIPQPISNTSRANLNKLLTDYTEMKKAILHVYWEEFQKDPVGLMSRVAQPASKKIDQNKLKPEMDEKGNLTTAGFACSQCGQPLFVYKLEQVSEKGKAYTNYFGRCNVAEHEKLILLAQLKPEKDSDEAVTYSLGKFGQRALDFYSIHVTKESTHPVKPLAQIAGNRYASSAPVGKALSDACMGTIASFLSKYQDIIIEHQKVVKGNQKRLESLRELAGKENLEYPSVTLPPQPHTKEGVDAYNEVIARVRMWVNLNLWQKLKLSRDDAKPLLRLKGFPSFPLVERQANEVDWWDMVCNVKKLINEKKEDGKVFWQNLAGYKRQEALRPYLSSEEDRKKGKKFARYQLGDLLLHLEKKHGEYDWGKVYDEAWERIDKKVEGLSKHIKLEEERRSEDAQSKAALTDWLRAKASFVIEGLKEADKDEFCRCELKLQKWYGDLRGKPFAIEAENSILDISGFSKQYNCAFIWQKDGVKKLNLYLIINYFKGGKLRFKKIKPEAFEANRFYTVINKKSGEIVPMEVNFNFDDPNLIILPLAFGKRQGREFIWNDLLSLETGSLKLANGRVIEKTLYNRRTRQDEPALFVALTFERREVLDSSNIKPMNLIGVDRGENIPAVIALTDPEGCPLSRFKDSLGNPTHILRIGESYKEKQRTIQAKKEVEQRRAGGYSRKYASKAKNLADDMVRNTARDLLYYAVTQDAMLIFENLSRGFGRQGKRTFMAERQYTRMEDWLTAKLAYEGLPSKTYLSKTLAQYTSKTCSNCGFTITSADYDRVLEKLKKTATGWMTTINGKELKVEGQITYYNRYKRQNVVKDLSVELDRLSEESVNNDISSWTKGRSGEALSLLKKRFSHRPVQEKFVCLNCGFETHADEQAALNIARSWLFLRSQEYKKYQTNKTTGNTDKRAFVETWQSFYRKKLKEVWKPAV

SEQ ID NO: 40693 - protein, 980 aa, synthetic construct
  REGION 1..980: note = engineered CasX variant
QEIKRINKIRRRLVKDSNTKKAGKTGPMKTLLVRVMTPDLRERLENLRKKPENIPQPISNTSRANLNKLLTDYTEMKKAILHVYWEEFQKDPVGLMSRVAQPASKKIDQNKLKPEMDEKGNLTTAGFACSQCGQPLFVYKLEQVSEKGKAYTNYFGRCNVAEHEKLILLAQLKPEKDSDEAVTYSLGKFGQRALDFYSIHVTKESTHPVKPLAQIAGNRYASSVPVGKALSDACMGTIASFLSKYQDIIIEHQKVVKGNQKRLESLRELAGKENLEYPSVTLPPQPHTKEGVDAYNEVIARVRMWVNLNLWQKLKLSRDDAKPLLRLKGFPSFPLVERQANEVDWWDMVCNVKKLINEKKEDGKVFWQNLAGYKRQEALRPYLSSEEDRKKGKKFARYQLGDLLLHLEKKHGEYDWGKVYDEAWERIDKKVEGLSKHIKLEEERRSEDAQSKAALTDWLRAKASFVIEGLKEADKDEFCRCELKLQKWYGDLRGKPFAIEAENSILDISGFSKQYNCAFIWQKDGVKKLNLYLIINYFKGGKLRFKKIKPEAFEANRFYTVINKKSGEIVPMEVNFNFDDPNLIILPLAFGKRQGREFIWNDLLSLETGSLKLANGRVIEKTLYNRRTRQDEPALFVALTFERREVLDSSNIKPMNLIGVDRGENIPAVIALTDPEGCPLSRFKDSLGNPTHILRIGESYKEKQRTIQAKKEVEQRRAGGYSRKYASKAKNLADDMVRNTARDLLYYAVTQDAMLIFENLSRGFGRQGKRTFMAERQYTRMEDWLTAKLAYEGLPSKTYLSKTLAQYTSKTCSNCGFTITSADYDRVLEKLKKTATGWMTTINGKELKVEGQITYYNRYKRQNVVKDLSVELDRLSEESVNNDISSWTKGRSGEALSLLKKRFSHRPVQEKFVCLNCGFETHADEQAALNIARSWLFLRSQEYKKYQTNKTTGNTDKRAFVETWQSFYRKKLKEVWKPAV

SEQ ID NO: 40694 - protein, 979 aa, synthetic construct
  REGION 1..979: note = engineered CasX variant
QEIKRINKIRRRLVKDSNTKKAGKTGPMKTLLVRVMTPDLRERLENLRKKPENIPQPISNTSRANLNKLLTDYTEMKKAILHVYWEEFQKDPVGLMSRVAQPASKKIDQNKLKPEMDEKGNLTTAGFACSQCGQPLFVYKLEQVSEKGKAYTNYFGRCNVAEHEKLIKLAQLKPEKDSDEAVTYSLGKFGQRALDFYSIHVTKESTHPVKPLAQIAGNRYASSPVGKALSDACMGTIASFLSKYQDIIIEHQKVVKGNQKRLESLRELAGKENLEYPSVTLPPQPHTKEGVDAYNEVIARVRMWVNLNLWQKLKLSRDDAKPLLRLKGFPSFPLVERQANEVDWWDMVCNVKKLINEKKEDGKVFWQNLAGYKRQEALRPYLSSEEDRKKGKKFARYQLGDLLLHLEKKHGEYDWGKVYDEAWERIDKKVEGLSKHIKLEEERRSEDAQSKAALTDWLRAKASFVIEGLKEADKDEFCRCELKLQKWYGDLRGKPFAIEAENSILDISGFSKQYNCAFIWQKDGVKKLNLYLIINYFKGGKLRFKKIKPEAFEANRFYTVINKKSGEIVPMEVNFNFDDPNLIILPLAFGKRQGREFIWNDLLSLETGSLKLANGRVIEKTLYNRRTRQDEPALFVALTFERREVLDSSNIKPMNLIGVDRGENIPAVIALTDPEGCPLSRFKDSLGNPTHILRIGESYKEKQRTIQAKKEVEQRRAGGYSRKYASKAKNLADDMVRNTARDLLYYAVTQDAMLIFENLSRGFGRQGKRTFMAERQYTRMEDWLTAKLAYEGLPSKTYLSKTLAQYTSKTCSNCGFTITSADYDRVLEKLKKTATGWMTTINGKELKVEGQITYYNRYKRQNVVKDLSVELDRLSEESVNNDISSWTKGRSGEALSLLKKRFSHRPVQEKFVCLNCGFETHADEQAALNIARSWLFLRSQEYKKYQTNKTTGNTDKRAFVETWQSFYRKKLKEVWKPAV

SEQ ID NO: 40695 - protein, 979 aa, synthetic construct
  REGION 1..979: note = engineered CasX variant
QEIKRINKIRRRLVKDSNTKKAGKTGPMKTLLVRVMTPDLRERLENLRKKPENIPQPISNTSRANLNKLLTDYTEMKKAILHVYWEEFQKDPVGLMSRVAQPASKKIDQNKLKPEMDEKGNLTTAGFACSQCGQPLFVYKLEQVSEKGKAYTNYFGRCNVAEHEKLILLAQLKPEKDSDEAVTYSLGKFGQRALDFYSIHVTKESTHPVKPLAQIAGNRYASSYPVGKALSDACMGTIASFLSKYQDIIIEHQKVVKGNQKRLESLRELAGKENLEYPSVTLPPQPHTKEGVDAYNEVIARVRMWVNLNLWQKLKLSRDDAKPLLRLKGFPSFPLVERQANEVDWWDMVCNVKKLINEKKEDGKVFWQNLAGYKRQEALRPYLSSEEDRKKGKKFARYQLGDLLLHLEKKHGEDWGDVYDEAWERIDKKVEGLSKHIKLEEERRSEDAQSKAALTDWLRAKASFVIEGLKEADKDEFCRCELKLQKWYGDLRGKPFAIEAENSILDISGFSKQYNCAFIWQKDGVKKLNLYLIINYFKGGKLRFKKIKPEAFEANRFYTVINKKSGEIVPMEVNFNFDDPNLIILPLAFGKRQGREFIWNDLLSLETGSLKLANGRVIEKTLYNRRTRQDEPALFVALTFERREVLDSSNIKPMNLIGVDRGENIPAVIALTDPEGCPLSRFKDSLGNPTHILRIGESYKEKQRTIQAKKEVEQRRAGGYSRKYASKAKNLADDMVRNTARDLLYYAVTQDAMLIFENLSRGFGRQGKRTFMAERQYTRMEDWLTAKLAYEGLPSKTYLSKTLAQYTSKTCSNCGFTITSADYDRVLEKLKKTATGWMTTINGKELKVEGQITYYNRYKRQNVVKDLSVELDRLSEESVNNDISSWTKGRSGEALSLLKKRFSHRPVQEKFVCLNCGFETHADEQAALNIARSWLFLRSQEYKKYQTNKTTGNTDKRAFVETWQSFYRKKLKEVWKPAV

SEQ ID NO: 40696 - protein, 979 aa, synthetic construct
  REGION 1..979: note = engineered CasX variant
QEIKRINKIRRRLVKDSNTKKAGKTGPMKTLLVRVMTPDLRERLENLRKKPENIPQPISNTSRANLNKLLTDYTEMKKAILHVYWEEFQKDPVGLMSRVAQPASKKIDQNKLKPEMDEKGNLTTAGFACSQCGQPLFVYKLEQVSEKGKAYTNYFGRCNVAEHEKLILLAQLKPEKDSDEAVTYSLGKFGQRALDFYSIHVTKESTHPVKPLAQIAGNRYASSHPVGKALSDACMGTIASFLSKYQDIIIEHQKVVKGNQKRLESLRELAGKENLEYPSVTLPPQPHTKEGVDAYNEVIARVRMWVNLNLWQKLKLSRDDAKPLLRLKGFPSFPLVERQANEVDWWDMVCNVKKLINEKKEDGKVFWQNLAGYKRQEALRPYLSSEEDRKKGKKFARYQLGDLLLHLEKKHGEDWGDVYDEAWERIDKKVEGLSKHIKLEEERRSEDAQSKAALTDWLRAKASFVIEGLKEADKDEFCRCELKLQKWYGDLRGKPFAIEAENSILDISGFSKQYNCAFIWQKDGVKKLNLYLIINYFKGGKLRFKKIKPEAFEANRFYTVINKKSGEIVPMEVNFNFDDPNLIILPLAFGKRQGREFIWNDLLSLETGSLKLANGRVIEKTLYNRRTRQDEPALFVALTFERREVLDSSNIKPMNLIGVDRGENIPAVIALTDPEGCPLSRFKDSLGNPTHILRIGESYKEKQRTIQAKKEVEQRRAGGYSRKYASKAKNLADDMVRNTARDLLYYAVTQDAMLIFENLSRGFGRQGKRTFMAERQYTRMEDWLTAKLAYEGLPSKTYLSKTLAQYTSKTCSNCGFTITSADYDRVLEKLKKTATGWMTTINGKELKVEGQITYYNRYKRQNVVKDLSVELDRLSEESVNNDISSWTKGRSGEALSLLKKRFSHRPVQEKFVCLNCGFETHADEQAALNIARSWLFLRSQEYKKYQTNKTTGNTDKRAFVETWQSFYRKKLKEVWKPAV

SEQ ID NO: 40697 - protein, 979 aa, synthetic construct
  REGION 1..979: note = engineered CasX variant
QEIKRINKIRRRLVKDSNTKKAGKTGPMKTLLVRVMTPDLRERLENLRKKPENIPQPISNTSRANLNKLLTDYTEMKKAILHVYWEEFQKDPVGLMSRVAQPASKKIDQNKLKPEMDEKGNLTTAGFACSQCGQPLFVYKLEQVSEKGKAYTNYFGRCNVAEHEKLILLAQLKPEKDSDEAVTYSLGKFGQRALDFYSIHVTKESTHPVKPLAQIAGNRYASSSPVGKALSDACMGTIASFLSKYQDIIIEHQKVVKGNQKRLESLRELAGKENLEYPSVTLPPQPHTKEGVDAYNEVIARVRMWVNLNLWQKLKLSRDDAKPLLRLKGFPSFPLVERQANEVDWWDMVCNVKKLINEKKEDGKVFWQNLAGYKRQEALRPYLSSEEDRKKGKKFARYQLGDLLLHLEKKHGEDWGDVYDEAWERIDKKVEGLSKHIKLEEERRSEDAQSKAALTDWLRAKASFVIEGLKEADKDEFCRCELKLQKWYGDLRGKPFAIEAENSILDISGFSKQYNCAFIWQKDGVKKLNLYLIINYFKGGKLRFKKIKPEAFEANRFYTVINKKSGEIVPMEVNFNFDDPNLIILPLAFGKRQGREFIWNDLLSLETGSLKLANGRVIEKTLYNRRTRQDEPALFVALTFERREVLDSSNIKPMNLIGVDRGENIPAVIALTDPEGCPLSRFKDSLGNPTHILRIGESYKEKQRTIQAKKEVEQRRAGGYSRKYASKAKNLADDMVRNTARDLLYYAVTQDAMLIFENLSRGFGRQGKRTFMAERQYTRMEDWLTAKLAYEGLPSKTYLSKTLAQYTSKTCSNCGFTITSADYDRVLEKLKKTATGWMTTINGKELKVEGQITYYNRYKRQNVVKDLSVELDRLSEESVNNDISSWTKGRSGEALSLLKKRFSHRPVQEKFVCLNCGFETHADEQAALNIARSWLFLRSQEYKKYQTNKTTGNTDKRAFVETWQSFYRKKLKEVWKPAV

SEQ ID NO: 40698 - protein, 979 aa, synthetic construct
  REGION 1..979: note = engineered CasX variant
QEIKRINKIRRRLVKDSNTKKAGKTGPMKTLLVRVMTPDLRERLENLRKKPENIPQPISNTSRANLNKLLTDYTEMKKAILHVYWEEFQKDPVGLMSRVAQPASKKIDQNKLKPEMDEKGNLTTAGFACSQCGQPLFVYKLEQVSEKGKAYTNYFGRCNVAEHEKLILLAQLKPEKDSDEAVTYSLGKFGQRALDFYSIHVTKESTHPVKPLAQIAGNRYASSTPVGKALSDACMGTIASFLSKYQDIIIEHQKVVKGNQKRLESLRELAGKENLEYPSVTLPPQPHTKEGVDAYNEVIARVRMWVNLNLWQKLKLSRDDAKPLLRLKGFPSFPLVERQANEVDWWDMVCNVKKLINEKKEDGKVFWQNLAGYKRQEALRPYLSSEEDRKKGKKFARYQLGDLLLHLEKKHGEDWGDVYDEAWERIDKKVEGLSKHIKLEEERRSEDAQSKAALTDWLRAKASFVIEGLKEADKDEFCRCELKLQKWYGDLRGKPFAIEAENSILDISGFSKQYNCAFIWQKDGVKKLNLYLIINYFKGGKLRFKKIKPEAFEANRFYTVINKKSGEIVPMEVNFNFDDPNLIILPLAFGKRQGREFIWNDLLSLETGSLKLANGRVIEKTLYNRRTRQDEPALFVALTFERREVLDSSNIKPMNLIGVDRGENIPAVIALTDPEGCPLSRFKDSLGNPTHILRIGESYKEKQRTIQAKKEVEQRRAGGYSRKYASKAKNLADDMVRNTARDLLYYAVTQDAMLIFENLSRGFGRQGKRTFMAERQYTRMEDWLTAKLAYEGLPSKTYLSKTLAQYTSKTCSNCGFTITSADYDRVLEKLKKTATGWMTTINGKELKVEGQITYYNRYKRQNVVKDLSVELDRLSEESVNNDISSWTKGRSGEALSLLKKRFSHRPVQEKFVCLNCGFETHADEQAALNIARSWLFLRSQEYKKYQTNKTTGNTDKRAFVETWQSFYRKKLKEVWKPAV

SEQ ID NO: 40699 - protein, 979 aa, synthetic construct
  REGION 1..979: note = engineered CasX variant
QEIKRINKIRRRLVKDSNTKKAGKTGPMKTLLVRVMTPDLRERLENLRKKPENIPQPISNTSRANLNKLLTDYTEMKKAILHVYWEEFQKDPVGLMSRVAQPASKKIDQNKLKPEMDEKGNLTTAGFACSQCGQPLFVYKLEQVSEKGKAYTNYFGRCNVAEHEKLILLAQLKPEKDSDEAVTYSLGKFGQRALDFYSIHVTKESTHPVKPLAQIAGNRYASSAPVGKALSDACMGTIASFLSKYQDIIIEHQKVVKGNQKRLESLRELAGKENLEYPSVTLPPQPHTKEGVDAYNEVIARVRMWVNLNLWQKLKLSRDDAKPLLRLKGFPSFPLVERQANEVDWWDMVCNVKKLINEKKEDGKVFWQNLAGYKRQEALRPYLSSEEDRKKGKKFARYQLGDLLLHLEKKHGEDWGDVYDEAWERIDKKVEGLSKHIKLEEERRSEDAQSKAALTDWLRAKASFVIEGLKEADKDEFCRCELKLQKWYGDLRGKPFAIEAENSILDISGFSKQYNCAFIWQKDGVKKLNLYLIINYFKGGKLRFKKIKPEAFEANRFYTVINKKSGEIVPMEVNFNFDDPNLIILPLAFGKRQGREFIWNDLLSLETGSLKLANGRVIEKTLYNRRTRQDEPALFVALTFERREVLDSSNIKPMNLIGVDRGENIPAVIALTDPEGCPLSRFKDSLGNPTHILRIGESYKEKQRTIQAKKEVEQRRAGGYSRKYASKAKNLADDMVRNTARDLLYYAVTQDAMLIFENLSRGFGRQGKRTFMAERQYTRMEDWLTAKLAYEGLPSKTYLSKTLAQYTSKTCSNCGFTITSADYDRVLEKLKKTATGWMTTINGKELKVEGQITYYNRYKRQNVVKDLSVELDRLSEESVNNDISSWTKGRSGEALSLLKKRFSHRPVQEKFVCLNCGFETHADEQAALNIARSWLFLRSQEYKKYQTNKTTGNTDKRAFVETWQSFYRKKLKEVWKPAV

SEQ ID NO: 40700 - protein, 979 aa, synthetic construct
  REGION 1..979: note = engineered CasX variant
QEIKRINKIRRRLVKDSNTKKAGKTGPMKTLLVRVMTPDLRERLENLRKKPENIPQPISNTSRANLNKLLTDYTEMKKAILHVYWEEFQKDPVGLMSRVAQPASKKIDQNKLKPEMDEKGNLTTAGFACSQCGQPLFVYKLEQVSEKGKAYTNYFGRCNVAEHEKLILLAQLKPEKDSDEAVTYSLGKFGQRALDFYSIHVTKESTHPVKPLAQIAGNRYASSVPVGKALSDACMGTIASFLSKYQDIIIEHQKVVKGNQKRLESLRELAGKENLEYPSVTLPPQPHTKEGVDAYNEVIARVRMWVNLNLWQKLKLSRDDAKPLLRLKGFPSFPLVERQANEVDWWDMVCNVKKLINEKKEDGKVFWQNLAGYKRQEALRPYLSSEEDRKKGKKFARYQLGDLLLHLEKKHGEDWGDVYDEAWERIDKKVEGLSKHIKLEEERRSEDAQSKAALTDWLRAKASFVIEGLKEADKDEFCRCELKLQKWYGDLRGKPFAIEAENSILDISGFSKQYNCAFIWQKDGVKKLNLYLIINYFKGGKLRFKKIKPEAFEANRFYTVINKKSGEIVPMEVNFNFDDPNLIILPLAFGKRQGREFIWNDLLSLETGSLKLANGRVIEKTLYNRRTRQDEPALFVALTFERREVLDSSNIKPMNLIGVDRGENIPAVIALTDPEGCPLSRFKDSLGNPTHILRIGESYKEKQRTIQAKKEVEQRRAGGYSRKYASKAKNLADDMVRNTARDLLYYAVTQDAMLIFENLSRGFGRQGKRTFMAERQYTRMEDWLTAKLAYEGLPSKTYLSKTLAQYTSKTCSNCGFTITSADYDRVLEKLKKTATGWMTTINGKELKVEGQITYYNRYKRQNVVKDLSVELDRLSEESVNNDISSWTKGRSGEALSLLKKRFSHRPVQEKFVCLNCGFETHADEQAALNIARSWLFLRSQEYKKYQTNKTTGNTDKRAFVETWQSFYRKKLKEVWKPAV

SEQ ID NO: 40701 - protein, 978 aa, synthetic construct
  REGION 1..978: note = engineered CasX variant
QEIKRINKIRRRLVKDSNTKKAGKTGPMKTLLVRVMTPDLRERLENLRKKPENIPQPISNTSRANLNKLLTDYTEMKKAILHVYWEEFQKDPVGLMSRVAQPASKKIDQNKLKPEMDEKGNLTTAGFACSQCGQPLFVYKLEQVSEKGKAYTNYFGRCNVAEHEKLIKLAQLKPEKDSDEAVTYSLGKFGQRALDFYSIHVTKESTHPVKPLAQIAGNRYASSPVGKALSDACMGTIASFLSKYQDIIIEHQKVVKGNQKRLESLRELAGKENLEYPSVTLPPQPHTKEGVDAYNEVIARVRMWVNLNLWQKLKLSRDDAKPLLRLKGFPSFPLVERQANEVDWWDMVCNVKKLINEKKEDGKVFWQNLAGYKRQEALRPYLSSEEDRKKGKKFARYQLGDLLLHLEKKHGEDWGDVYDEAWERIDKKVEGLSKHIKLEEERRSEDAQSKAALTDWLRAKASFVIEGLKEADKDEFCRCELKLQKWYGDLRGKPFAIEAENSILDISGFSKQYNCAFIWQKDGVKKLNLYLIINYFKGGKLRFKKIKPEAFEANRFYTVINKKSGEIVPMEVNFNFDDPNLIILPLAFGKRQGREFIWNDLLSLETGSLKLANGRVIEKTLYNRRTRQDEPALFVALTFERREVLDSSNIKPMNLIGVDRGENIPAVIALTDPEGCPLSRFKDSLGNPTHILRIGESYKEKQRTIQAKKEVEQRRAGGYSRKYASKAKNLADDMVRNTARDLLYYAVTQDAMLIFENLSRGFGRQGKRTFMAERQYTRMEDWLTAKLAYEGLPSKTYLSKTLAQYTSKTCSNCGFTITSADYDRVLEKLKKTATGWMTTINGKELKVEGQITYYNRYKRQNVVKDLSVELDRLSEESVNNDISSWTKGRSGEALSLLKKRFSHRPVQEKFVCLNCGFETHADEQAALNIARSWLFLRSQEYKKYQTNKTTGNTDKRAFVETWQSFYRKKLKEVWKPAV

SEQ ID NO: 40702 - protein, 979 aa, synthetic construct
  REGION 1..979: note = engineered CasX variant
QEIKRINKIRRRLVKDSNTKKAGKTGPMKTLLVRVMTPDLRERLENLRKKPENIPQPISNTSRANLNKLLTDYTEMKKAILHVYWEEFQKDPVGLMSRVAQPASKKIDQNKLKPEMDEKGNLTTAGFACSQCGQPLFVYKLEQVSEKGKAYTNYFGRCNVAEHEKLILLAQLKPEKDSDEAVTYSLGKFGQRALDFYSIHVTKESTHPVKPLAQIAGNRYASSYPVGKALSDACMGTIASFLSKYQDIIIEHQKVVKGNQKRLESLRELAGKENLEYPSVTLPPQPHTKEGVDAYNEVIARVRMWVNLNLWQKLKLSRDDAKPLLRLKGFPSFPLVERQANEVDWWDMVCNVKKLINEKKEDGKVFWQNLAGYKRQEALRPYLSSEEDRKKGKKFARYQLGDLLLHLEKKHGEDWGKVYGEAWERIDKKVEGLSKHIKLEEERRSEDAQSKAALTDWLRAKASFVIEGLKEADKDEFCRCELKLQKWYGDLRGKPFAIEAENSILDISGFSKQYNCAFIWQKDGVKKLNLYLIINYFKGGKLRFKKIKPEAFEANRFYTVINKKSGEIVPMEVNFNFDDPNLIILPLAFGKRQGREFIWNDLLSLETGSLKLANGRVIEKTLYNRRTRQDEPALFVALTFERREVLDSSNIKPMNLIGVDRGENIPAVIALTDPEGCPLSRFKDSLGNPTHILRIGESYKEKQRTIQAKKEVEQRRAGGYSRKYASKAKNLADDMVRNTARDLLYYAVTQDAMLIFENLSRGFGRQGKRTFMAERQYTRMEDWLTAKLAYEGLPSKTYLSKTLAQYTSKTCSNCGFTITSADYDRVLEKLKKTATGWMTTINGKELKVEGQITYYNRYKRQNVVKDLSVELDRLSEESVNNDISSWTKGRSGEALSLLKKRFSHRPVQEKFVCLNCGFETHADEQAALNIARSWLFLRSQEYKKYQTNKTTGNTDKRAFVETWQSFYRKKLKEVWKPAV

SEQ ID NO: 40703 - protein, 979 aa, synthetic construct
  REGION 1..979: note = engineered CasX variant
QEIKRINKIRRRLVKDSNTKKAGKTGPMKTLLVRVMTPDLRERLENLRKKPENIPQPISNTSRANLNKLLTDYTEMKKAILHVYWEEFQKDPVGLMSRVAQPASKKIDQNKLKPEMDEKGNLTTAGFACSQCGQPLFVYKLEQVSEKGKAYTNYFGRCNVAEHEKLILLAQLKPEKDSDEAVTYSLGKFGQRALDFYSIHVTKESTHPVKPLAQIAGNRYASSHPVGKALSDACMGTIASFLSKYQDIIIEHQKVVKGNQKRLESLRELAGKENLEYPSVTLPPQPHTKEGVDAYNEVIARVRMWVNLNLWQKLKLSRDDAKPLLRLKGFPSFPLVERQANEVDWWDMVCNVKKLINEKKEDGKVFWQNLAGYKRQEALRPYLSSEEDRKKGKKFARYQLGDLLLHLEKKHGEDWGKVYGEAWERIDKKVEGLSKHIKLEEERRSEDAQSKAALTDWLRAKASFVIEGLKEADKDEFCRCELKLQKWYGDLRGKPFAIEAENSILDISGFSKQYNCAFIWQKDGVKKLNLYLIINYFKGGKLRFKKIKPEAFEANRFYTVINKKSGEIVPMEVNFNFDDPNLIILPLAFGKRQGREFIWNDLLSLETGSLKLANGRVIEKTLYNRRTRQDEPALFVALTFERREVLDSSNIKPMNLIGVDRGENIPAVIALTDPEGCPLSRFKDSLGNPTHILRIGESYKEKQRTIQAKKEVEQRRAGGYSRKYASKAKNLADDMVRNTARDLLYYAVTQDAMLIFENLSRGFGRQGKRTFMAERQYTRMEDWLTAKLAYEGLPSKTYLSKTLAQYTSKTCSNCGFTITSADYDRVLEKLKKTATGWMTTINGKELKVEGQITYYNRYKRQNVVKDLSVELDRLSEESVNNDISSWTKGRSGEALSLLKKRFSHRPVQEKFVCLNCGFETHADEQAALNIARSWLFLRSQEYKKYQTNKTTGNTDKRAFVETWQSFYRKKLKEVWKPAV

SEQ ID NO: 40704 - protein, 979 aa, synthetic construct
  REGION 1..979: note = engineered CasX variant
QEIKRINKIRRRLVKDSNTKKAGKTGPMKTLLVRVMTPDLRERLENLRKKPENIPQPISNTSRANLNKLLTDYTEMKKAILHVYWEEFQKDPVGLMSRVAQPASKKIDQNKLKPEMDEKGNLTTAGFACSQCGQPLFVYKLEQVSEKGKAYTNYFGRCNVAEHEKLILLAQLKPEKDSDEAVTYSLGKFGQRALDFYSIHVTKESTHPVKPLAQIAGNRYASSSPVGKALSDACMGTIASFLSKYQDIIIEHQKVVKGNQKRLESLRELAGKENLEYPSVTLPPQPHTKEGVDAYNEVIARVRMWVNLNLWQKLKLSRDDAKPLLRLKGFPSFPLVERQANEVDWWDMVCNVKKLINEKKEDGKVFWQNLAGYKRQEALRPYLSSEEDRKKGKKFARYQLGDLLLHLEKKHGEDWGKVYGEAWERIDKKVEGLSKHIKLEEERRSEDAQSKAALTDWLRAKASFVIEGLKEADKDEFCRCELKLQKWYGDLRGKPFAIEAENSILDISGFSKQYNCAFIWQKDGVKKLNLYLIINYFKGGKLRFKKIKPEAFEANRFYTVINKKSGEIVPMEVNFNFDDPNLIILPLAFGKRQGREFIWNDLLSLETGSLKLANGRVIEKTLYNRRTRQDEPALFVALTFERREVLDSSNIKPMNLIGVDRGENIPAVIALTDPEGCPLSRFKDSLGNPTHILRIGESYKEKQRTIQAKKEVEQRRAGGYSRKYASKAKNLADDMVRNTARDLLYYAVTQDAMLIFENLSRGFGRQGKRTFMAERQYTRMEDWLTAKLAYEGLPSKTYLSKTLAQYTSKTCSNCGFTITSADYDRVLEKLKKTATGWMTTINGKELKVEGQITYYNRYKRQNVVKDLSVELDRLSEESVNNDISSWTKGRSGEALSLLKKRFSHRPVQEKFVCLNCGFETHADEQAALNIARSWLFLRSQEYKKYQTNKTTGNTDKRAFVETWQSFYRKKLKEVWKPAV

SEQ ID NO: 40705 - protein, 979 aa, synthetic construct
  REGION 1..979: note = engineered CasX variant
QEIKRINKIRRRLVKDSNTKKAGKTGPMKTLLVRVMTPDLRERLENLRKKPENIPQPISNTSRANLNKLLTDYTEMKKAILHVYWEEFQKDPVGLMSRVAQPASKKIDQNKLKPEMDEKGNLTTAGFACSQCGQPLFVYKLEQVSEKGKAYTNYFGRCNVAEHEKLILLAQLKPEKDSDEAVTYSLGKFGQRALDFYSIHVTKESTHPVKPLAQIAGNRYASSTPVGKALSDACMGTIASFLSKYQDIIIEHQKVVKGNQKRLESLRELAGKENLEYPSVTLPPQPHTKEGVDAYNEVIARVRMWVNLNLWQKLKLSRDDAKPLLRLKGFPSFPLVERQANEVDWWDMVCNVKKLINEKKEDGKVFWQNLAGYKRQEALRPYLSSEEDRKKGKKFARYQLGDLLLHLEKKHGEDWGKVYGEAWERIDKKVEGLSKHIKLEEERRSEDAQSKAALTDWLRAKASFVIEGLKEADKDEFCRCELKLQKWYGDLRGKPFAIEAENSILDISGFSKQYNCAFIWQKDGVKKLNLYLIINYFKGGKLRFKKIKPEAFEANRFYTVINKKSGEIVPMEVNFNFDDPNLIILPLAFGKRQGREFIWNDLLSLETGSLKLANGRVIEKTLYNRRTRQDEPALFVALTFERREVLDSSNIKPMNLIGVDRGENIPAVIALTDPEGCPLSRFKDSLGNPTHILRIGESYKEKQRTIQAKKEVEQRRAGGYSRKYASKAKNLADDMVRNTARDLLYYAVTQDAMLIFENLSRGFGRQGKRTFMAERQYTRMEDWLTAKLAYEGLPSKTYLSKTLAQYTSKTCSNCGFTITSADYDRVLEKLKKTATGWMTTINGKELKVEGQITYYNRYKRQNVVKDLSVELDRLSEESVNNDISSWTKGRSGEALSLLKKRFSHRPVQEKFVCLNCGFETHADEQAALNIARSWLFLRSQEYKKYQTNKTTGNTDKRAFVETWQSFYRKKLKEVWKPAV

SEQ ID NO: 40706 - protein, 979 aa, synthetic construct
  REGION 1..979: note = engineered CasX variant
QEIKRINKIRRRLVKDSNTKKAGKTGPMKTLLVRVMTPDLRERLENLRKKPENIPQPISNTSRANLNKLLTDYTEMKKAILHVYWEEFQKDPVGLMSRVAQPASKKIDQNKLKPEMDEKGNLTTAGFACSQCGQPLFVYKLEQVSEKGKAYTNYFGRCNVAEHEKLILLAQLKPEKDSDEAVTYSLGKFGQRALDFYSIHVTKESTHPVKPLAQIAGNRYASSAPVGKALSDACMGTIASFLSKYQDIIIEHQKVVKGNQKRLESLRELAGKENLEYPSVTLPPQPHTKEGVDAYNEVIARVRMWVNLNLWQKLKLSRDDAKPLLRLKGFPSFPLVERQANEVDWWDMVCNVKKLINEKKEDGKVFWQNLAGYKRQEALRPYLSSEEDRKKGKKFARYQLGDLLLHLEKKHGEDWGKVYGEAWERIDKKVEGLSKHIKLEEERRSEDAQSKAALTDWLRAKASFVIEGLKEADKDEFCRCELKLQKWYGDLRGKPFAIEAENSILDISGFSKQYNCAFIWQKDGVKKLNLYLIINYFKGGKLRFKKIKPEAFEANRFYTVINKKSGEIVPMEVNFNFDDPNLIILPLAFGKRQGREFIWNDLLSLETGSLKLANGRVIEKTLYNRRTRQDEPALFVALTFERREVLDSSNIKPMNLIGVDRGENIPAVIALTDPEGCPLSRFKDSLGNPTHILRIGESYKEKQRTIQAKKEVEQRRAGGYSRKYASKAKNLADDMVRNTARDLLYYAVTQDAMLIFENLSRGFGRQGKRTFMAERQYTRMEDWLTAKLAYEGLPSKTYLSKTLAQYTSKTCSNCGFTITSADYDRVLEKLKKTATGWMTTINGKELKVEGQITYYNRYKRQNVVKDLSVELDRLSEESVNNDISSWTKGRSGEALSLLKKRFSHRPVQEKFVCLNCGFETHADEQAALNIARSWLFLRSQEYKKYQTNKTTGNTDKRAFVETWQSFYRKKLKEVWKPAV

SEQ ID NO: 40707 - protein, 979 aa, synthetic construct
  REGION 1..979: note = engineered CasX variant
QEIKRINKIRRRLVKDSNTKKAGKTGPMKTLLVRVMTPDLRERLENLRKKPENIPQPISNTSRANLNKLLTDYTEMKKAILHVYWEEFQKDPVGLMSRVAQPASKKIDQNKLKPEMDEKGNLTTAGFACSQCGQPLFVYKLEQVSEKGKAYTNYFGRCNVAEHEKLILLAQLKPEKDSDEAVTYSLGKFGQRALDFYSIHVTKESTHPVKPLAQIAGNRYASSVPVGKALSDACMGTIASFLSKYQDIIIEHQKVVKGNQKRLESLRELAGKENLEYPSVTLPPQPHTKEGVDAYNEVIARVRMWVNLNLWQKLKLSRDDAKPLLRLKGFPSFPLVERQANEVDWWDMVCNVKKLINEKKEDGKVFWQNLAGYKRQEALRPYLSSEEDRKKGKKFARYQLGDLLLHLEKKHGEDWGKVYGEAWERIDKKVEGLSKHIKLEEERRSEDAQSKAALTDWLRAKASFVIEGLKEADKDEFCRCELKLQKWYGDLRGKPFAIEAENSILDISGFSKQYNCAFIWQKDGVKKLNLYLIINYFKGGKLRFKKIKPEAFEANRFYTVINKKSGEIVPMEVNFNFDDPNLIILPLAFGKRQGREFIWNDLLSLETGSLKLANGRVIEKTLYNRRTRQDEPALFVALTFERREVLDSSNIKPMNLIGVDRGENIPAVIALTDPEGCPLSRFKDSLGNPTHILRIGESYKEKQRTIQAKKEVEQRRAGGYSRKYASKAKNLADDMVRNTARDLLYYAVTQDAMLIFENLSRGFGRQGKRTFMAERQYTRMEDWLTAKLAYEGLPSKTYLSKTLAQYTSKTCSNCGFTITSADYDRVLEKLKKTATGWMTTINGKELKVEGQITYYNRYKRQNVVKDLSVELDRLSEESVNNDISSWTKGRSGEALSLLKKRFSHRPVQEKFVCLNCGFETHADEQAALNIARSWLFLRSQEYKKYQTNKTTGNTDKRAFVETWQSFYRKKLKEVWKPAV

SEQ ID NO: 40708 - protein, 978 aa, synthetic construct
  REGION 1..978: note = engineered CasX variant
QEIKRINKIRRRLVKDSNTKKAGKTGPMKTLLVRVMTPDLRERLENLRKKPENIPQPISNTSRANLNKLLTDYTEMKKAILHVYWEEFQKDPVGLMSRVAQPASKKIDQNKLKPEMDEKGNLTTAGFACSQCGQPLFVYKLEQVSEKGKAYTNYFGRCNVAEHEKLIKLAQLKPEKDSDEAVTYSLGKFGQRALDFYSIHVTKESTHPVKPLAQIAGNRYASSPVGKALSDACMGTIASFLSKYQDIIIEHQKVVKGNQKRLESLRELAGKENLEYPSVTLPPQPHTKEGVDAYNEVIARVRMWVNLNLWQKLKLSRDDAKPLLRLKGFPSFPLVERQANEVDWWDMVCNVKKLINEKKEDGKVFWQNLAGYKRQEALRPYLSSEEDRKKGKKFARYQLGDLLLHLEKKHGEDWGKVYGEAWERIDKKVEGLSKHIKLEEERRSEDAQSKAALTDWLRAKASFVIEGLKEADKDEFCRCELKLQKWYGDLRGKPFAIEAENSILDISGFSKQYNCAFIWQKDGVKKLNLYLIINYFKGGKLRFKKIKPEAFEANRFYTVINKKSGEIVPMEVNFNFDDPNLIILPLAFGKRQGREFIWNDLLSLETGSLKLANGRVIEKTLYNRRTRQDEPALFVALTFERREVLDSSNIKPMNLIGVDRGENIPAVIALTDPEGCPLSRFKDSLGNPTHILRIGESYKEKQRTIQAKKEVEQRRAGGYSRKYASKAKNLADDMVRNTARDLLYYAVTQDAMLIFENLSRGFGRQGKRTFMAERQYTRMEDWLTAKLAYEGLPSKTYLSKTLAQYTSKTCSNCGFTITSADYDRVLEKLKKTATGWMTTINGKELKVEGQITYYNRYKRQNVVKDLSVELDRLSEESVNNDISSWTKGRSGEALSLLKKRFSHRPVQEKFVCLNCGFETHADEQAALNIARSWLFLRSQEYKKYQTNKTTGNTDKRAFVETWQSFYRKKLKEVWKPAV

SEQ ID NO: 40709 - protein, 979 aa, synthetic construct
  REGION 1..979: note = engineered CasX variant
QEIKRINKIRRRLVKDSNTKKAGKTGPMKTLLVRVMTPDLRERLENLRKKPENIPQPISNTSRANLNKLLTDYTEMKKAILHVYWEEFQKDPVGLMSRVAQPASKKIDQNKLKPEMDEKGNLTTAGFACSQCGQPLFVYKLEQVSEKGKAYTNYFGRCNVAEHEKLILLAQLKPEKDSDEAVTYSLGKFGQRALDFYSIHVTKESTHPVKPLAQIAGNRYASSYPVGKALSDACMGTIASFLSKYQDIIIEHQKVVKGNQKRLESLRELAGKENLEYPSVTLPPQPHTKEGVDAYNEVIARVRMWVNLNLWQKLKLSRDDAKPLLRLKGFPSFPLVERQANEVDWWDMVCNVKKLINEKKEDGKVFWQNLAGYKRQEALRPYLSSEEDRKKGKKFARYQLGDLLLHLEKKHGEDWGKVYDEAWERIDKKVEGLSKHIKLEEERRSEDAQSKAALTDWLRAKASFVIEGKKEADKDEFCRCELKLQKWYGDLRGKPFAIEAENSILDISGFSKQYNCAFIWQKDGVKKLNLYLIINYFKGGKLRFKKIKPEAFEANRFYTVINKKSGEIVPMEVNFNFDDPNLIILPLAFGKRQGREFIWNDLLSLETGSLKLANGRVIEKTLYNRRTRQDEPALFVALTFERREVLDSSNIKPMNLIGVDRGENIPAVIALTDPEGCPLSRFKDSLGNPTHILRIGESYKEKQRTIQAKKEVEQRRAGGYSRKYASKAKNLADDMVRNTARDLLYYAVTQDAMLIFENLSRGFGRQGKRTFMAERQYTRMEDWLTAKLAYEGLPSKTYLSKTLAQYTSKTCSNCGFTITSADYDRVLEKLKKTATGWMTTINGKELKVEGQITYYNRYKRQNVVKDLSVELDRLSEESVNNDISSWTKGRSGEALSLLKKRFSHRPVQEKFVCLNCGFETHADEQAALNIARSWLFLRSQEYKKYQTNKTTGNTDKRAFVETWQSFYRKKLKEVWKPAV

SEQ ID NO: 40710 - protein, 979 aa, synthetic construct
  REGION 1..979: note = engineered CasX variant
QEIKRINKIRRRLVKDSNTKKAGKTGPMKTLLVRVMTPDLRERLENLRKKPENIPQPISNTSRANLNKLLTDYTEMKKAILHVYWEEFQKDPVGLMSRVAQPASKKIDQNKLKPEMDEKGNLTTAGFACSQCGQPLFVYKLEQVSEKGKAYTNYFGRCNVAEHEKLILLAQLKPEKDSDEAVTYSLGKFGQRALDFYSIHVTKESTHPVKPLAQIAGNRYASSHPVGKALSDACMGTIASFLSKYQDIIIEHQKVVKGNQKRLESLRELAGKENLEYPSVTLPPQPHTKEGVDAYNEVIARVRMWVNLNLWQKLKLSRDDAKPLLRLKGFPSFPLVERQANEVDWWDMVCNVKKLINEKKEDGKVFWQNLAGYKRQEALRPYLSSEEDRKKGKKFARYQLGDLLLHLEKKHGEDWGKVYDEAWERIDKKVEGLSKHIKLEEERRSEDAQSKAALTDWLRAKASFVIEGKKEADKDEFCRCELKLQKWYGDLRGKPFAIEAENSILDISGFSKQYNCAFIWQKDGVKKLNLYLIINYFKGGKLRFKKIKPEAFEANRFYTVINKKSGEIVPMEVNFNFDDPNLIILPLAFGKRQGREFIWNDLLSLETGSLKLANGRVIEKTLYNRRTRQDEPALFVALTFERREVLDSSNIKPMNLIGVDRGENIPAVIALTDPEGCPLSRFKDSLGNPTHILRIGESYKEKQRTIQAKKEVEQRRAGGYSRKYASKAKNLADDMVRNTARDLLYYAVTQDAMLIFENLSRGFGRQGKRTFMAERQYTRMEDWLTAKLAYEGLPSKTYLSKTLAQYTSKTCSNCGFTITSADYDRVLEKLKKTATGWMTTINGKELKVEGQITYYNRYKRQNVVKDLSVELDRLSEESVNNDISSWTKGRSGEALSLLKKRFSHRPVQEKFVCLNCGFETHADEQAALNIARSWLFLRSQEYKKYQTNKTTGNTDKRAFVETWQSFYRKKLKEVWKPAV

SEQ ID NO: 40711 - protein, 979 aa, synthetic construct
  REGION 1..979: note = engineered CasX variant
QEIKRINKIRRRLVKDSNTKKAGKTGPMKTLLVRVMTPDLRERLENLRKKPENIPQPISNTSRANLNKLLTDYTEMKKAILHVYWEEFQKDPVGLMSRVAQPASKKIDQNKLKPEMDEKGNLTTAGFACSQCGQPLFVYKLEQVSEKGKAYTNYFGRCNVAEHEKLILLAQLKPEKDSDEAVTYSLGKFGQRALDFYSIHVTKESTHPVKPLAQIAGNRYASSSPVGKALSDACMGTIASFLSKYQDIIIEHQKVVKGNQKRLESLRELAGKENLEYPSVTLPPQPHTKEGVDAYNEVIARVRMWVNLNLWQKLKLSRDDAKPLLRLKGFPSFPLVERQANEVDWWDMVCNVKKLINEKKEDGKVFWQNLAGYKRQEALRPYLSSEEDRKKGKKFARYQLGDLLLHLEKKHGEDWGKVYDEAWERIDKKVEGLSKHIKLEEERRSEDAQSKAALTDWLRAKASFVIEGKKEADKDEFCRCELKLQKWYGDLRGKPFAIEAENSILDISGFSKQYNCAFIWQKDGVKKLNLYLIINYFKGGKLRFKKIKPEAFEANRFYTVINKKSGEIVPMEVNFNFDDPNLIILPLAFGKRQGREFIWNDLLSLETGSLKLANGRVIEKTLYNRRTRQDEPALFVALTFERREVLDSSNIKPMNLIGVDRGENIPAVIALTDPEGCPLSRFKDSLGNPTHILRIGESYKEKQRTIQAKKEVEQRRAGGYSRKYASKAKNLADDMVRNTARDLLYYAVTQDAMLIFENLSRGFGRQGKRTFMAERQYTRMEDWLTAKLAYEGLPSKTYLSKTLAQYTSKTCSNCGFTITSADYDRVLEKLKKTATGWMTTINGKELKVEGQITYYNRYKRQNVVKDLSVELDRLSEESVNNDISSWTKGRSGEALSLLKKRFSHRPVQEKFVCLNCGFETHADEQAALNIARSWLFLRSQEYKKYQTNKTTGNTDKRAFVETWQSFYRKKLKEVWKPAV

SEQ ID NO: 40712 - protein, 979 aa, synthetic construct
  REGION 1..979: note = engineered CasX variant
QEIKRINKIRRRLVKDSNTKKAGKTGPMKTLLVRVMTPDLRERLENLRKKPENIPQPISNTSRANLNKLLTDYTEMKKAILHVYWEEFQKDPVGLMSRVAQPASKKIDQNKLKPEMDEKGNLTTAGFACSQCGQPLFVYKLEQVSEKGKAYTNYFGRCNVAEHEKLILLAQLKPEKDSDEAVTYSLGKFGQRALDFYSIHVTKESTHPVKPLAQIAGNRYASSTPVGKALSDACMGTIASFLSKYQDIIIEHQKVVKGNQKRLESLRELAGKENLEYPSVTLPPQPHTKEGVDAYNEVIARVRMWVNLNLWQKLKLSRDDAKPLLRLKGFPSFPLVERQANEVDWWDMVCNVKKLINEKKEDGKVFWQNLAGYKRQEALRPYLSSEEDRKKGKKFARYQLGDLLLHLEKKHGEDWGKVYDEAWERIDKKVEGLSKHIKLEEERRSEDAQSKAALTDWLRAKASFVIEGKKEADKDEFCRCELKLQKWYGDLRGKPFAIEAENSILDISGFSKQYNCAFIWQKDGVKKLNLYLIINYFKGGKLRFKKIKPEAFEANRFYTVINKKSGEIVPMEVNFNFDDPNLIILPLAFGKRQGREFIWNDLLSLETGSLKLANGRVIEKTLYNRRTRQDEPALFVALTFERREVLDSSNIKPMNLIGVDRGENIPAVIALTDPEGCPLSRFKDSLGNPTHILRIGESYKEKQRTIQAKKEVEQRRAGGYSRKYASKAKNLADDMVRNTARDLLYYAVTQDAMLIFENLSRGFGRQGKRTFMAERQYTRMEDWLTAKLAYEGLPSKTYLSKTLAQYTSKTCSNCGFTITSADYDRVLEKLKKTATGWMTTINGKELKVEGQITYYNRYKRQNVVKDLSVELDRLSEESVNNDISSWTKGRSGEALSLLKKRFSHRPVQEKFVCLNCGFETHADEQAALNIARSWLFLRSQEYKKYQTNKTTGNTDKRAFVETWQSFYRKKLKEVWKPAV

SEQ ID NO: 40713 - protein, 979 aa, synthetic construct
  REGION 1..979: note = engineered CasX variant
QEIKRINKIRRRLVKDSNTKKAGKTGPMKTLLVRVMTPDLRERLENLRKKPENIPQPISNTSRANLNKLLTDYTEMKKAILHVYWEEFQKDPVGLMSRVAQPASKKIDQNKLKPEMDEKGNLTTAGFACSQCGQPLFVYKLEQVSEKGKAYTNYFGRCNVAEHEKLILLAQLKPEKDSDEAVTYSLGKFGQRALDFYSIHVTKESTHPVKPLAQIAGNRYASSAPVGKALSDACMGTIASFLSKYQDIIIEHQKVVKGNQKRLESLRELAGKENLEYPSVTLPPQPHTKEGVDAYNEVIARVRMWVNLNLWQKLKLSRDDAKPLLRLKGFPSFPLVERQANEVDWWDMVCNVKKLINEKKEDGKVFWQNLAGYKRQEALRPYLSSEEDRKKGKKFARYQLGDLLLHLEKKHGEDWGKVYDEAWERIDKKVEGLSKHIKLEEERRSEDAQSKAALTDWLRAKASFVIEGKKEADKDEFCRCELKLQKWYGDLRGKPFAIEAENSILDISGFSKQYNCAFIWQKDGVKKLNLYLIINYFKGGKLRFKKIKPEAFEANRFYTVINKKSGEIVPMEVNFNFDDPNLIILPLAFGKRQGREFIWNDLLSLETGSLKLANGRVIEKTLYNRRTRQDEPALFVALTFERREVLDSSNIKPMNLIGVDRGENIPAVIALTDPEGCPLSRFKDSLGNPTHILRIGESYKEKQRTIQAKKEVEQRRAGGYSRKYASKAKNLADDMVRNTARDLLYYAVTQDAMLIFENLSRGFGRQGKRTFMAERQYTRMEDWLTAKLAYEGLPSKTYLSKTLAQYTSKTCSNCGFTITSADYDRVLEKLKKTATGWMTTINGKELKVEGQITYYNRYKRQNVVKDLSVELDRLSEESVNNDISSWTKGRSGEALSLLKKRFSHRPVQEKFVCLNCGFETHADEQAALNIARSWLFLRSQEYKKYQTNKTTGNTDKRAFVETWQSFYRKKLKEVWKPAV

SEQ ID NO: 40714 - protein, 979 aa, synthetic construct
  REGION 1..979: note = engineered CasX variant
QEIKRINKIRRRLVKDSNTKKAGKTGPMKTLLVRVMTPDLRERLENLRKKPENIPQPISNTSRANLNKLLTDYTEMKKAILHVYWEEFQKDPVGLMSRVAQPASKKIDQNKLKPEMDEKGNLTTAGFACSQCGQPLFVYKLEQVSEKGKAYTNYFGRCNVAEHEKLILLAQLKPEKDSDEAVTYSLGKFGQRALDFYSIHVTKESTHPVKPLAQIAGNRYASSVPVGKALSDACMGTIASFLSKYQDIIIEHQKVVKGNQKRLESLRELAGKENLEYPSVTLPPQPHTKEGVDAYNEVIARVRMWVNLNLWQKLKLSRDDAKPLLRLKGFPSFPLVERQANEVDWWDMVCNVKKLINEKKEDGKVFWQNLAGYKRQEALRPYLSSEEDRKKGKKFARYQLGDLLLHLEKKHGEDWGKVYDEAWERIDKKVEGLSKHIKLEEERRSEDAQSKAALTDWLRAKASFVIEGKKEADKDEFCRCELKLQKWYGDLRGKPFAIEAENSILDISGFSKQYNCAFIWQKDGVKKLNLYLIINYFKGGKLRFKKIKPEAFEANRFYTVINKKSGEIVPMEVNFNFDDPNLIILPLAFGKRQGREFIWNDLLSLETGSLKLANGRVIEKTLYNRRTRQDEPALFVALTFERREVLDSSNIKPMNLIGVDRGENIPAVIALTDPEGCPLSRFKDSLGNPTHILRIGESYKEKQRTIQAKKEVEQRRAGGYSRKYASKAKNLADDMVRNTARDLLYYAVTQDAMLIFENLSRGFGRQGKRTFMAERQYTRMEDWLTAKLAYEGLPSKTYLSKTLAQYTSKTCSNCGFTITSADYDRVLEKLKKTATGWMTTINGKELKVEGQITYYNRYKRQNVVKDLSVELDRLSEESVNNDISSWTKGRSGEALSLLKKRFSHRPVQEKFVCLNCGFETHADEQAALNIARSWLFLRSQEYKKYQTNKTTGNTDKRAFVETWQSFYRKKLKEVWKPAV

SEQ ID NO: 40715 - protein, 978 aa, synthetic construct
  REGION 1..978: note = engineered CasX variant
QEIKRINKIRRRLVKDSNTKKAGKTGPMKTLLVRVMTPDLRERLENLRKKPENIPQPISNTSRANLNKLLTDYTEMKKAILHVYWEEFQKDPVGLMSRVAQPASKKIDQNKLKPEMDEKGNLTTAGFACSQCGQPLFVYKLEQVSEKGKAYTNYFGRCNVAEHEKLIKLAQLKPEKDSDEAVTYSLGKFGQRALDFYSIHVTKESTHPVKPLAQIAGNRYASSPVGKALSDACMGTIASFLSKYQDIIIEHQKVVKGNQKRLESLRELAGKENLEYPSVTLPPQPHTKEGVDAYNEVIARVRMWVNLNLWQKLKLSRDDAKPLLRLKGFPSFPLVERQANEVDWWDMVCNVKKLINEKKEDGKVFWQNLAGYKRQEALRPYLSSEEDRKKGKKFARYQLGDLLLHLEKKHGEDWGKVYDEAWERIDKKVEGLSKHIKLEEERRSEDAQSKAALTDWLRAKASFVIEGKKEADKDEFCRCELKLQKWYGDLRGKPFAIEAENSILDISGFSKQYNCAFIWQKDGVKKLNLYLIINYFKGGKLRFKKIKPEAFEANRFYTVINKKSGEIVPMEVNFNFDDPNLIILPLAFGKRQGREFIWNDLLSLETGSLKLANGRVIEKTLYNRRTRQDEPALFVALTFERREVLDSSNIKPMNLIGVDRGENIPAVIALTDPEGCPLSRFKDSLGNPTHILRIGESYKEKQRTIQAKKEVEQRRAGGYSRKYASKAKNLADDMVRNTARDLLYYAVTQDAMLIFENLSRGFGRQGKRTFMAERQYTRMEDWLTAKLAYEGLPSKTYLSKTLAQYTSKTCSNCGFTITSADYDRVLEKLKKTATGWMTTINGKELKVEGQITYYNRYKRQNVVKDLSVELDRLSEESVNNDISSWTKGRSGEALSLLKKRFSHRPVQEKFVCLNCGFETHADEQAALNIARSWLFLRSQEYKKYQTNKTTGNTDKRAFVETWQSFYRKKLKEVWKPAV

SEQ ID NO: 40716 - protein, 979 aa, synthetic construct
  REGION 1..979: note = engineered CasX variant
QEIKRINKIRRRLVKDSNTKKAGKTGPMKTLLVRVMTPDLRERLENLRKKPENIPQPISNTSRANLNKLLTDYTEMKKAILHVYWEEFQKDPVGLMSRVAQPASKKIDQNKLKPEMDEKGNLTTAGFACSQCGQPLFVYKLEQVSEKGKAYTNYFGRCNVAEHEKLILLAQLKPEKDSDEAVTYSLGKFGQRALDFYSIHVTKESTHPVKPLAQIAGNRYASSYPVGKALSDACMGTIASFLSKYQDIIIEHQKVVKGNQKRLESLRELAGKENLEYPSVTLPPQPHTKEGVDAYNEVIARVRMWVNLNLWQKLKLSRDDAKPLLRLKGFPSFPLVERQANEVDWWDMVCNVKKLINEKKEDGKVFWQNLAGYKRQEALRPYLSSEEDRKKGKKFARYQLGDLLLHLEKKHGEDWGKVYDEAWERIDKKVEGLSKHIKLEEERRSEDAQSKAALTDWLRAKASFVIEGSKEADKDEFCRCELKLQKWYGDLRGKPFAIEAENSILDISGFSKQYNCAFIWQKDGVKKLNLYLIINYFKGGKLRFKKIKPEAFEANRFYTVINKKSGEIVPMEVNFNFDDPNLIILPLAFGKRQGREFIWNDLLSLETGSLKLANGRVIEKTLYNRRTRQDEPALFVALTFERREVLDSSNIKPMNLIGVDRGENIPAVIALTDPEGCPLSRFKDSLGNPTHILRIGESYKEKQRTIQAKKEVEQRRAGGYSRKYASKAKNLADDMVRNTARDLLYYAVTQDAMLIFENLSRGFGRQGKRTFMAERQYTRMEDWLTAKLAYEGLPSKTYLSKTLAQYTSKTCSNCGFTITSADYDRVLEKLKKTATGWMTTINGKELKVEGQITYYNRYKRQNVVKDLSVELDRLSEESVNNDISSWTKGRSGEALSLLKKRFSHRPVQEKFVCLNCGFETHADEQAALNIARSWLFLRSQEYKKYQTNKTTGNTDKRAFVETWQSFYRKKLKEVWKPAV

SEQ ID NO: 40717 - protein, 979 aa, synthetic construct
  REGION 1..979: note = engineered CasX variant
QEIKRINKIRRRLVKDSNTKKAGKTGPMKTLLVRVMTPDLRERLENLRKKPENIPQPISNTSRANLNKLLTDYTEMKKAILHVYWEEFQKDPVGLMSRVAQPASKKIDQNKLKPEMDEKGNLTTAGFACSQCGQPLFVYKLEQVSEKGKAYTNYFGRCNVAEHEKLILLAQLKPEKDSDEAVTYSLGKFGQRALDFYSIHVTKESTHPVKPLAQIAGNRYASSHPVGKALSDACMGTIASFLSKYQDIIIEHQKVVKGNQKRLESLRELAGKENLEYPSVTLPPQPHTKEGVDAYNEVIARVRMWVNLNLWQKLKLSRDDAKPLLRLKGFPSFPLVERQANEVDWWDMVCNVKKLINEKKEDGKVFWQNLAGYKRQEALRPYLSSEEDRKKGKKFARYQLGDLLLHLEKKHGEDWGKVYDEAWERIDKKVEGLSKHIKLEEERRSEDAQSKAALTDWLRAKASFVIEGSKEADKDEFCRCELKLQKWYGDLRGKPFAIEAENSILDISGFSKQYNCAFIWQKDGVKKLNLYLIINYFKGGKLRFKKIKPEAFEANRFYTVINKKSGEIVPMEVNFNFDDPNLIILPLAFGKRQGREFIWNDLLSLETGSLKLANGRVIEKTLYNRRTRQDEPALFVALTFERREVLDSSNIKPMNLIGVDRGENIPAVIALTDPEGCPLSRFKDSLGNPTHILRIGESYKEKQRTIQAKKEVEQRRAGGYSRKYASKAKNLADDMVRNTARDLLYYAVTQDAMLIFENLSRGFGRQGKRTFMAERQYTRMEDWLTAKLAYEGLPSKTYLSKTLAQYTSKTCSNCGFTITSADYDRVLEKLKKTATGWMTTINGKELKVEGQITYYNRYKRQNVVKDLSVELDRLSEESVNNDISSWTKGRSGEALSLLKKRFSHRPVQEKFVCLNCGFETHADEQAALNIARSWLFLRSQEYKKYQTNKTTGNTDKRAFVETWQSFYRKKLKEVWKPAV

SEQ ID NO: 40718 - protein, 979 aa, synthetic construct
  REGION 1..979: note = engineered CasX variant
QEIKRINKIRRRLVKDSNTKKAGKTGPMKTLLVRVMTPDLRERLENLRKKPENIPQPISNTSRANLNKLLTDYTEMKKAILHVYWEEFQKDPVGLMSRVAQPASKKIDQNKLKPEMDEKGNLTTAGFACSQCGQPLFVYKLEQVSEKGKAYTNYFGRCNVAEHEKLILLAQLKPEKDSDEAVTYSLGKFGQRALDFYSIHVTKESTHPVKPLAQIAGNRYASSSPVGKALSDACMGTIASFLSKYQDIIIEHQKVVKGNQKRLESLRELAGKENLEYPSVTLPPQPHTKEGVDAYNEVIARVRMWVNLNLWQKLKLSRDDAKPLLRLKGFPSFPLVERQANEVDWWDMVCNVKKLINEKKEDGKVFWQNLAGYKRQEALRPYLSSEEDRKKGKKFARYQLGDLLLHLEKKHGEDWGKVYDEAWERIDKKVEGLSKHIKLEEERRSEDAQSKAALTDWLRAKASFVIEGSKEADKDEFCRCELKLQKWYGDLRGKPFAIEAENSILDISGFSKQYNCAFIWQKDGVKKLNLYLIINYFKGGKLRFKKIKPEAFEANRFYTVINKKSGEIVPMEVNFNFDDPNLIILPLAFGKRQGREFIWNDLLSLETGSLKLANGRVIEKTLYNRRTRQDEPALFVALTFERREVLDSSNIKPMNLIGVDRGENIPAVIALTDPEGCPLSRFKDSLGNPTHILRIGESYKEKQRTIQAKKEVEQRRAGGYSRKYASKAKNLADDMVRNTARDLLYYAVTQDAMLIFENLSRGFGRQGKRTFMAERQYTRMEDWLTAKLAYEGLPSKTYLSKTLAQYTSKTCSNCGFTITSADYDRVLEKLKKTATGWMTTINGKELKVEGQITYYNRYKRQNVVKDLSVELDRLSEESVNNDISSWTKGRSGEALSLLKKRFSHRPVQEKFVCLNCGFETHADEQAALNIARSWLFLRSQEYKKYQTNKTTGNTDKRAFVETWQSFYRKKLKEVWKPAV

SEQ ID NO: 40719 - protein, 979 aa, synthetic construct
  REGION 1..979: note = engineered CasX variant
QEIKRINKIRRRLVKDSNTKKAGKTGPMKTLLVRVMTPDLRERLENLRKKPENIPQPISNTSRANLNKLLTDYTEMKKAILHVYWEEFQKDPVGLMSRVAQPASKKIDQNKLKPEMDEKGNLTTAGFACSQCGQPLFVYKLEQVSEKGKAYTNYFGRCNVAEHEKLILLAQLKPEKDSDEAVTYSLGKFGQRALDFYSIHVTKESTHPVKPLAQIAGNRYASSTPVGKALSDACMGTIASFLSKYQDIIIEHQKVVKGNQKRLESLRELAGKENLEYPSVTLPPQPHTKEGVDAYNEVIARVRMWVNLNLWQKLKLSRDDAKPLLRLKGFPSFPLVERQANEVDWWDMVCNVKKLINEKKEDGKVFWQNLAGYKRQEALRPYLSSEEDRKKGKKFARYQLGDLLLHLEKKHGEDWGKVYDEAWERIDKKVEGLSKHIKLEEERRSEDAQSKAALTDWLRAKASFVIEGSKEADKDEFCRCELKLQKWYGDLRGKPFAIEAENSILDISGFSKQYNCAFIWQKDGVKKLNLYLIINYFKGGKLRFKKIKPEAFEANRFYTVINKKSGEIVPMEVNFNFDDPNLIILPLAFGKRQGREFIWNDLLSLETGSLKLANGRVIEKTLYNRRTRQDEPALFVALTFERREVLDSSNIKPMNLIGVDRGENIPAVIALTDPEGCPLSRFKDSLGNPTHILRIGESYKEKQRTIQAKKEVEQRRAGGYSRKYASKAKNLADDMVRNTARDLLYYAVTQDAMLIFENLSRGFGRQGKRTFMAERQYTRMEDWLTAKLAYEGLPSKTYLSKTLAQYTSKTCSNCGFTITSADYDRVLEKLKKTATGWMTTINGKELKVEGQITYYNRYKRQNVVKDLSVELDRLSEESVNNDISSWTKGRSGEALSLLKKRFSHRPVQEKFVCLNCGFETHADEQAALNIARSWLFLRSQEYKKYQTNKTTGNTDKRAFVETWQSFYRKKLKEVWKPAV

SEQ ID NO: 40720 - protein, 979 aa, synthetic construct
  REGION 1..979: note = engineered CasX variant
QEIKRINKIRRRLVKDSNTKKAGKTGPMKTLLVRVMTPDLRERLENLRKKPENIPQPISNTSRANLNKLLTDYTEMKKAILHVYWEEFQKDPVGLMSRVAQPASKKIDQNKLKPEMDEKGNLTTAGFACSQCGQPLFVYKLEQVSEKGKAYTNYFGRCNVAEHEKLILLAQLKPEKDSDEAVTYSLGKFGQRALDFYSIHVTKESTHPVKPLAQIAGNRYASSAPVGKALSDACMGTIASFLSKYQDIIIEHQKVVKGNQKRLESLRELAGKENLEYPSVTLPPQPHTKEGVDAYNEVIARVRMWVNLNLWQKLKLSRDDAKPLLRLKGFPSFPLVERQANEVDWWDMVCNVKKLINEKKEDGKVFWQNLAGYKRQEALRPYLSSEEDRKKGKKFARYQLGDLLLHLEKKHGEDWGKVYDEAWERIDKKVEGLSKHIKLEEERRSEDAQSKAALTDWLRAKASFVIEGSKEADKDEFCRCELKLQKWYGDLRGKPFAIEAENSILDISGFSKQYNCAFIWQKDGVKKLNLYLIINYFKGGKLRFKKIKPEAFEANRFYTVINKKSGEIVPMEVNFNFDDPNLIILPLAFGKRQGREFIWNDLLSLETGSLKLANGRVIEKTLYNRRTRQDEPALFVALTFERREVLDSSNIKPMNLIGVDRGENIPAVIALTDPEGCPLSRFKDSLGNPTHILRIGESYKEKQRTIQAKKEVEQRRAGGYSRKYASKAKNLADDMVRNTARDLLYYAVTQDAMLIFENLSRGFGRQGKRTFMAERQYTRMEDWLTAKLAYEGLPSKTYLSKTLAQYTSKTCSNCGFTITSADYDRVLEKLKKTATGWMTTINGKELKVEGQITYYNRYKRQNVVKDLSVELDRLSEESVNNDISSWTKGRSGEALSLLKKRFSHRPVQEKFVCLNCGFETHADEQAALNIARSWLFLRSQEYKKYQTNKTTGNTDKRAFVETWQSFYRKKLKEVWKPAV

SEQ ID NO: 40721 - protein, 979 aa, synthetic construct
  REGION 1..979: note = engineered CasX variant
QEIKRINKIRRRLVKDSNTKKAGKTGPMKTLLVRVMTPDLRERLENLRKKPENIPQPISNTSRANLNKLLTDYTEMKKAILHVYWEEFQKDPVGLMSRVAQPASKKIDQNKLKPEMDEKGNLTTAGFACSQCGQPLFVYKLEQVSEKGKAYTNYFGRCNVAEHEKLILLAQLKPEKDSDEAVTYSLGKFGQRALDFYSIHVTKESTHPVKPLAQIAGNRYASSVPVGKALSDACMGTIASFLSKYQDIIIEHQKVVKGNQKRLESLRELAGKENLEYPSVTLPPQPHTKEGVDAYNEVIARVRMWVNLNLWQKLKLSRDDAKPLLRLKGFPSFPLVERQANEVDWWDMVCNVKKLINEKKEDGKVFWQNLAGYKRQEALRPYLSSEEDRKKGKKFARYQLGDLLLHLEKKHGEDWGKVYDEAWERIDKKVEGLSKHIKLEEERRSEDAQSKAALTDWLRAKASFVIEGSKEADKDEFCRCELKLQKWYGDLRGKPFAIEAENSILDISGFSKQYNCAFIWQKDGVKKLNLYLIINYFKGGKLRFKKIKPEAFEANRFYTVINKKSGEIVPMEVNFNFDDPNLIILPLAFGKRQGREFIWNDLLSLETGSLKLANGRVIEKTLYNRRTRQDEPALFVALTFERREVLDSSNIKPMNLIGVDRGENIPAVIALTDPEGCPLSRFKDSLGNPTHILRIGESYKEKQRTIQAKKEVEQRRAGGYSRKYASKAKNLADDMVRNTARDLLYYAVTQDAMLIFENLSRGFGRQGKRTFMAERQYTRMEDWLTAKLAYEGLPSKTYLSKTLAQYTSKTCSNCGFTITSADYDRVLEKLKKTATGWMTTINGKELKVEGQITYYNRYKRQNVVKDLSVELDRLSEESVNNDISSWTKGRSGEALSLLKKRFSHRPVQEKFVCLNCGFETHADEQAALNIARSWLFLRSQEYKKYQTNKTTGNTDKRAFVETWQSFYRKKLKEVWKPAV

SEQ ID NO: 40722 - protein, 978 aa, synthetic construct
  REGION 1..978: note = engineered CasX variant
QEIKRINKIRRRLVKDSNTKKAGKTGPMKTLLVRVMTPDLRERLENLRKKPENIPQPISNTSRANLNKLLTDYTEMKKAILHVYWEEFQKDPVGLMSRVAQPASKKIDQNKLKPEMDEKGNLTTAGFACSQCGQPLFVYKLEQVSEKGKAYTNYFGRCNVAEHEKLIKLAQLKPEKDSDEAVTYSLGKFGQRALDFYSIHVTKESTHPVKPLAQIAGNRYASSPVGKALSDACMGTIASFLSKYQDIIIEHQKVVKGNQKRLESLRELAGKENLEYPSVTLPPQPHTKEGVDAYNEVIARVRMWVNLNLWQKLKLSRDDAKPLLRLKGFPSFPLVERQANEVDWWDMVCNVKKLINEKKEDGKVFWQNLAGYKRQEALRPYLSSEEDRKKGKKFARYQLGDLLLHLEKKHGEDWGKVYDEAWERIDKKVEGLSKHIKLEEERRSEDAQSKAALTDWLRAKASFVIEGSKEADKDEFCRCELKLQKWYGDLRGKPFAIEAENSILDISGFSKQYNCAFIWQKDGVKKLNLYLIINYFKGGKLRFKKIKPEAFEANRFYTVINKKSGEIVPMEVNFNFDDPNLIILPLAFGKRQGREFIWNDLLSLETGSLKLANGRVIEKTLYNRRTRQDEPALFVALTFERREVLDSSNIKPMNLIGVDRGENIPAVIALTDPEGCPLSRFKDSLGNPTHILRIGESYKEKQRTIQAKKEVEQRRAGGYSRKYASKAKNLADDMVRNTARDLLYYAVTQDAMLIFENLSRGFGRQGKRTFMAERQYTRMEDWLTAKLAYEGLPSKTYLSKTLAQYTSKTCSNCGFTITSADYDRVLEKLKKTATGWMTTINGKELKVEGQITYYNRYKRQNVVKDLSVELDRLSEESVNNDISSWTKGRSGEALSLLKKRFSHRPVQEKFVCLNCGFETHADEQAALNIARSWLFLRSQEYKKYQTNKTTGNTDKRAFVETWQSFYRKKLKEVWKPAV

SEQ ID NO: 40723 - protein, 980 aa, synthetic construct
  REGION 1..980: note = engineered CasX variant
QEIKRINKIRRRLVKDSNTKKAGKTGPMKTLLVRVMTPDLRERLENLRKKPENIPQPISNTSRANLNKLLTDYTEMKKAILHVYWEEFQKDPVGLMSRVAQPASKKIDQNKLKPEMDEKGNLTTAGFACSQCGQPLFVYKLEQVSEKGKAYTNYFGRCNVAEHEKLILLAQLKPEKDSDEAVTYSLGKFGQRALDFYSIHVTKESTHPVKPLAQIAGNRYASSYPVGKALSDACMGTIASFLSKYQDIIIEHQKVVKGNQKRLESLRELAGKENLEYPSVTLPPQPHTKEGVDAYNEVIARVRMWVNLNLWQKLKLSRDDAKPLLRLKGFPSFPLVERQANEVDWWDMVCNVKKLINEKKEDGKVFWQNLAGYKRQEALRPYLSSEEDRKKGKKFARYQLGDLLLHLEKKHGEDWGKVYDEAWERIDKKVEGLSKHIKLEEERRSEDAQSKAALTDWLRAKASFVIEGLKEADDKDEFCRCELKLQKWYGDLRGKPFAIEAENSILDISGFSKQYNCAFIWQKDGVKKLNLYLIINYFKGGKLRFKKIKPEAFEANRFYTVINKKSGEIVPMEVNFNFDDPNLIILPLAFGKRQGREFIWNDLLSLETGSLKLANGRVIEKTLYNRRTRQDEPALFVALTFERREVLDSSNIKPMNLIGVDRGENIPAVIALTDPEGCPLSRFKDSLGNPTHILRIGESYKEKQRTIQAKKEVEQRRAGGYSRKYASKAKNLADDMVRNTARDLLYYAVTQDAMLIFENLSRGFGRQGKRTFMAERQYTRMEDWLTAKLAYEGLPSKTYLSKTLAQYTSKTCSNCGFTITSADYDRVLEKLKKTATGWMTTINGKELKVEGQITYYNRYKRQNVVKDLSVELDRLSEESVNNDISSWTKGRSGEALSLLKKRFSHRPVQEKFVCLNCGFETHADEQAALNIARSWLFLRSQEYKKYQTNKTTGNTDKRAFVETWQSFYRKKLKEVWKPAV

SEQ ID NO: 40724 - protein, 980 aa, synthetic construct
  REGION 1..980: note = engineered CasX variant
QEIKRINKIRRRLVKDSNTKKAGKTGPMKTLLVRVMTPDLRERLENLRKKPENIPQPISNTSRANLNKLLTDYTEMKKAILHVYWEEFQKDPVGLMSRVAQPASKKIDQNKLKPEMDEKGNLTTAGFACSQCGQPLFVYKLEQVSEKGKAYTNYFGRCNVAEHEKLILLAQLKPEKDSDEAVTYSLGKFGQRALDFYSIHVTKESTHPVKPLAQIAGNRYASSHPVGKALSDACMGTIASFLSKYQDIIIEHQKVVKGNQKRLESLRELAGKENLEYPSVTLPPQPHTKEGVDAYNEVIARVRMWVNLNLWQKLKLSRDDAKPLLRLKGFPSFPLVERQANEVDWWDMVCNVKKLINEKKEDGKVFWQNLAGYKRQEALRPYLSSEEDRKKGKKFARYQLGDLLLHLEKKHGEDWGKVYDEAWERIDKKVEGLSKHIKLEEERRSEDAQSKAALTDWLRAKASFVIEGLKEADDKDEFCRCELKLQKWYGDLRGKPFAIEAENSILDISGFSKQYNCAFIWQKDGVKKLNLYLIINYFKGGKLRFKKIKPEAFEANRFYTVINKKSGEIVPMEVNFNFDDPNLIILPLAFGKRQGREFIWNDLLSLETGSLKLANGRVIEKTLYNRRTRQDEPALFVALTFERREVLDSSNIKPMNLIGVDRGENIPAVIALTDPEGCPLSRFKDSLGNPTHILRIGESYKEKQRTIQAKKEVEQRRAGGYSRKYASKAKNLADDMVRNTARDLLYYAVTQDAMLIFENLSRGFGRQGKRTFMAERQYTRMEDWLTAKLAYEGLPSKTYLSKTLAQYTSKTCSNCGFTITSADYDRVLEKLKKTATGWMTTINGKELKVEGQITYYNRYKRQNVVKDLSVELDRLSEESVNNDISSWTKGRSGEALSLLKKRFSHRPVQEKFVCLNCGFETHADEQAALNIARSWLFLRSQEYKKYQTNKTTGNTDKRAFVETWQSFYRKKLKEVWKPAV

SEQ ID NO: 40725 - protein, 980 aa, synthetic construct
  REGION 1..980: note = engineered CasX variant
QEIKRINKIRRRLVKDSNTKKAGKTGPMKTLLVRVMTPDLRERLENLRKKPENIPQPISNTSRANLNKLLTDYTEMKKAILHVYWEEFQKDPVGLMSRVAQPASKKIDQNKLKPEMDEKGNLTTAGFACSQCGQPLFVYKLEQVSEKGKAYTNYFGRCNVAEHEKLILLAQLKPEKDSDEAVTYSLGKFGQRALDFYSIHVTKESTHPVKPLAQIAGNRYASSSPVGKALSDACMGTIASFLSKYQDIIIEHQKVVKGNQKRLESLRELAGKENLEYPSVTLPPQPHTKEGVDAYNEVIARVRMWVNLNLWQKLKLSRDDAKPLLRLKGFPSFPLVERQANEVDWWDMVCNVKKLINEKKEDGKVFWQNLAGYKRQEALRPYLSSEEDRKKGKKFARYQLGDLLLHLEKKHGEDWGKVYDEAWERIDKKVEGLSKHIKLEEERRSEDAQSKAALTDWLRAKASFVIEGLKEADDKDEFCRCELKLQKWYGDLRGKPFAIEAENSILDISGFSKQYNCAFIWQKDGVKKLNLYLIINYFKGGKLRFKKIKPEAFEANRFYTVINKKSGEIVPMEVNFNFDDPNLIILPLAFGKRQGREFIWNDLLSLETGSLKLANGRVIEKTLYNRRTRQDEPALFVALTFERREVLDSSNIKPMNLIGVDRGENIPAVIALTDPEGCPLSRFKDSLGNPTHILRIGESYKEKQRTIQAKKEVEQRRAGGYSRKYASKAKNLADDMVRNTARDLLYYAVTQDAMLIFENLSRGFGRQGKRTFMAERQYTRMEDWLTAKLAYEGLPSKTYLSKTLAQYTSKTCSNCGFTITSADYDRVLEKLKKTATGWMTTINGKELKVEGQITYYNRYKRQNVVKDLSVELDRLSEESVNNDISSWTKGRSGEALSLLKKRFSHRPVQEKFVCLNCGFETHADEQAALNIARSWLFLRSQEYKKYQTNKTTGNTDKRAFVETWQSFYRKKLKEVWKPAV

SEQ ID NO: 40726 - protein, 980 aa, synthetic construct
  REGION 1..980: note = engineered CasX variant
QEIKRINKIRRRLVKDSNTKKAGKTGPMKTLLVRVMTPDLRERLENLRKKPENIPQPISNTSRANLNKLLTDYTEMKKAILHVYWEEFQKDPVGLMSRVAQPASKKIDQNKLKPEMDEKGNLTTAGFACSQCGQPLFVYKLEQVSEKGKAYTNYFGRCNVAEHEKLILLAQLKPEKDSDEAVTYSLGKFGQRALDFYSIHVTKESTHPVKPLAQIAGNRYASSTPVGKALSDACMGTIASFLSKYQDIIIEHQKVVKGNQKRLESLRELAGKENLEYPSVTLPPQPHTKEGVDAYNEVIARVRMWVNLNLWQKLKLSRDDAKPLLRLKGFPSFPLVERQANEVDWWDMVCNVKKLINEKKEDGKVFWQNLAGYKRQEALRPYLSSEEDRKKGKKFARYQLGDLLLHLEKKHGEDWGKVYDEAWERIDKKVEGLSKHIKLEEERRSEDAQSKAALTDWLRAKASFVIEGLKEADDKDEFCRCELKLQKWYGDLRGKPFAIEAENSILDISGFSKQYNCAFIWQKDGVKKLNLYLIINYFKGGKLRFKKIKPEAFEANRFYTVINKKSGEIVPMEVNFNFDDPNLIILPLAFGKRQGREFIWNDLLSLETGSLKLANGRVIEKTLYNRRTRQDEPALFVALTFERREVLDSSNIKPMNLIGVDRGENIPAVIALTDPEGCPLSRFKDSLGNPTHILRIGESYKEKQRTIQAKKEVEQRRAGGYSRKYASKAKNLADDMVRNTARDLLYYAVTQDAMLIFENLSRGFGRQGKRTFMAERQYTRMEDWLTAKLAYEGLPSKTYLSKTLAQYTSKTCSNCGFTITSADYDRVLEKLKKTATGWMTTINGKELKVEGQITYYNRYKRQNVVKDLSVELDRLSEESVNNDISSWTKGRSGEALSLLKKRFSHRPVQEKFVCLNCGFETHADEQAALNIARSWLFLRSQEYKKYQTNKTTGNTDKRAFVETWQSFYRKKLKEVWKPAV

SEQ ID NO: 40727 - protein, 980 aa, synthetic construct
  REGION 1..980: note = engineered CasX variant
QEIKRINKIRRRLVKDSNTKKAGKTGPMKTLLVRVMTPDLRERLENLRKKPENIPQPISNTSRANLNKLLTDYTEMKKAILHVYWEEFQKDPVGLMSRVAQPASKKIDQNKLKPEMDEKGNLTTAGFACSQCGQPLFVYKLEQVSEKGKAYTNYFGRCNVAEHEKLILLAQLKPEKDSDEAVTYSLGKFGQRALDFYSIHVTKESTHPVKPLAQIAGNRYASSAPVGKALSDACMGTIASFLSKYQDIIIEHQKVVKGNQKRLESLRELAGKENLEYPSVTLPPQPHTKEGVDAYNEVIARVRMWVNLNLWQKLKLSRDDAKPLLRLKGFPSFPLVERQANEVDWWDMVCNVKKLINEKKEDGKVFWQNLAGYKRQEALRPYLSSEEDRKKGKKFARYQLGDLLLHLEKKHGEDWGKVYDEAWERIDKKVEGLSKHIKLEEERRSEDAQSKAALTDWLRAKASFVIEGLKEADDKDEFCRCELKLQKWYGDLRGKPFAIEAENSILDISGFSKQYNCAFIWQKDGVKKLNLYLIINYFKGGKLRFKKIKPEAFEANRFYTVINKKSGEIVPMEVNFNFDDPNLIILPLAFGKRQGREFIWNDLLSLETGSLKLANGRVIEKTLYNRRTRQDEPALFVALTFERREVLDSSNIKPMNLIGVDRGENIPAVIALTDPEGCPLSRFKDSLGNPTHILRIGESYKEKQRTIQAKKEVEQRRAGGYSRKYASKAKNLADDMVRNTARDLLYYAVTQDAMLIFENLSRGFGRQGKRTFMAERQYTRMEDWLTAKLAYEGLPSKTYLSKTLAQYTSKTCSNCGFTITSADYDRVLEKLKKTATGWMTTINGKELKVEGQITYYNRYKRQNVVKDLSVELDRLSEESVNNDISSWTKGRSGEALSLLKKRFSHRPVQEKFVCLNCGFETHADEQAALNIARSWLFLRSQEYKKYQTNKTTGNTDKRAFVETWQSFYRKKLKEVWKPAV

SEQ ID NO: 40728 - protein, 980 aa, synthetic construct
  REGION 1..980: note = engineered CasX variant
QEIKRINKIRRRLVKDSNTKKAGKTGPMKTLLVRVMTPDLRERLENLRKKPENIPQPISNTSRANLNKLLTDYTEMKKAILHVYWEEFQKDPVGLMSRVAQPASKKIDQNKLKPEMDEKGNLTTAGFACSQCGQPLFVYKLEQVSEKGKAYTNYFGRCNVAEHEKLILLAQLKPEKDSDEAVTYSLGKFGQRALDFYSIHVTKESTHPVKPLAQIAGNRYASSVPVGKALSDACMGTIASFLSKYQDIIIEHQKVVKGNQKRLESLRELAGKENLEYPSVTLPPQPHTKEGVDAYNEVIARVRMWVNLNLWQKLKLSRDDAKPLLRLKGFPSFPLVERQANEVDWWDMVCNVKKLINEKKEDGKVFWQNLAGYKRQEALRPYLSSEEDRKKGKKFARYQLGDLLLHLEKKHGEDWGKVYDEAWERIDKKVEGLSKHIKLEEERRSEDAQSKAALTDWLRAKASFVIEGLKEADDKDEFCRCELKLQKWYGDLRGKPFAIEAENSILDISGFSKQYNCAFIWQKDGVKKLNLYLIINYFKGGKLRFKKIKPEAFEANRFYTVINKKSGEIVPMEVNFNFDDPNLIILPLAFGKRQGREFIWNDLLSLETGSLKLANGRVIEKTLYNRRTRQDEPALFVALTFERREVLDSSNIKPMNLIGVDRGENIPAVIALTDPEGCPLSRFKDSLGNPTHILRIGESYKEKQRTIQAKKEVEQRRAGGYSRKYASKAKNLADDMVRNTARDLLYYAVTQDAMLIFENLSRGFGRQGKRTFMAERQYTRMEDWLTAKLAYEGLPSKTYLSKTLAQYTSKTCSNCGFTITSADYDRVLEKLKKTATGWMTTINGKELKVEGQITYYNRYKRQNVVKDLSVELDRLSEESVNNDISSWTKGRSGEALSLLKKRFSHRPVQEKFVCLNCGFETHADEQAALNIARSWLFLRSQEYKKYQTNKTTGNTDKRAFVETWQSFYRKKLKEVWKPAV

SEQ ID NO: 40729 - protein, 979 aa, synthetic construct
  REGION 1..979: note = engineered CasX variant
QEIKRINKIRRRLVKDSNTKKAGKTGPMKTLLVRVMTPDLRERLENLRKKPENIPQPISNTSRANLNKLLTDYTEMKKAILHVYWEEFQKDPVGLMSRVAQPASKKIDQNKLKPEMDEKGNLTTAGFACSQCGQPLFVYKLEQVSEKGKAYTNYFGRCNVAEHEKLIKLAQLKPEKDSDEAVTYSLGKFGQRALDFYSIHVTKESTHPVKPLAQIAGNRYASSPVGKALSDACMGTIASFLSKYQDIIIEHQKVVKGNQKRLESLRELAGKENLEYPSVTLPPQPHTKEGVDAYNEVIARVRMWVNLNLWQKLKLSRDDAKPLLRLKGFPSFPLVERQANEVDWWDMVCNVKKLINEKKEDGKVFWQNLAGYKRQEALRPYLSSEEDRKKGKKFARYQLGDLLLHLEKKHGEDWGKVYDEAWERIDKKVEGLSKHIKLEEERRSEDAQSKAALTDWLRAKASFVIEGLKEADDKDEFCRCELKLQKWYGDLRGKPFAIEAENSILDISGFSKQYNCAFIWQKDGVKKLNLYLIINYFKGGKLRFKKIKPEAFEANRFYTVINKKSGEIVPMEVNFNFDDPNLIILPLAFGKRQGREFIWNDLLSLETGSLKLANGRVIEKTLYNRRTRQDEPALFVALTFERREVLDSSNIKPMNLIGVDRGENIPAVIALTDPEGCPLSRFKDSLGNPTHILRIGESYKEKQRTIQAKKEVEQRRAGGYSRKYASKAKNLADDMVRNTARDLLYYAVTQDAMLIFENLSRGFGRQGKRTFMAERQYTRMEDWLTAKLAYEGLPSKTYLSKTLAQYTSKTCSNCGFTITSADYDRVLEKLKKTATGWMTTINGKELKVEGQITYYNRYKRQNVVKDLSVELDRLSEESVNNDISSWTKGRSGEALSLLKKRFSHRPVQEKFVCLNCGFETHADEQAALNIARSWLFLRSQEYKKYQTNKTTGNTDKRAFVETWQSFYRKKLKEVWKPAV

SEQ ID NO: 40730 - protein, 980 aa, synthetic construct
  REGION 1..980: note = engineered CasX variant
QEIKRINKIRRRLVKDSNTKKAGKTGPMKTLLVRVMTPDLRERLENLRKKPENIPQPISNTSRANLNKLLTDYTEMKKAILHVYWEEFQKDPVGLMSRVAQPASKKIDQNKLKPEMDEKGNLTTAGFACSQCGQPLFVYKLEQVSEKGKAYTNYFGRCNVAEHEKLILLAQLKPEKDSDEAVTYSLGKFGQRALDFYSIHVTKESTHPVKPLAQIAGNRYASSYPVGKALSDACMGTIASFLSKYQDIIIEHQKVVKGNQKRLESLRELAGKENLEYPSVTLPPQPHTKEGVDAYNEVIARVRMWVNLNLWQKLKLSRDDAKPLLRLKGFPSFPLVERQANEVDWWDMVCNVKKLINEKKEDGKVFWQNLAGYKRQEALRPYLSSEEDRKKGKKFARYQLGDLLLHLEKKHGEDWGKVYDEAWERIDKKVEGLSKHIKLEEERRSEDAQSKAALTDWLRAKASFVIEGLKEADKDEFCRCELKLQKWYGDLRGKPFAIEAENSILDISGFSKQYNCAFIWQKDGVKKLNLYLIINYFKGGKLRFKKIKPEAFEANRFYTVINKKSGEIVPMEVNFNFDDPNLIILPLAFGKRQGREFIWNDLLSLETGSLKLANGRVIEKTLYNRRTRQDEPALFVALTFERREVLDSSNIKPMNLIGVDRGENIPAVIALTDPEGCPLSRFKDSLGNPTHILRIGESYKEKQRTIQAKKEVEQRRAGGYSRKYASKAKNLADDMVRNTARDLLYYAVTQDAMLIFENLSRGFGRQGKRTFMAERQYTRMEDWLTAKLAYEGLPSKTYLSKTLAQYTSKTCSNCGFTITSADYDRVLEKLKKTATGWMTTINGKELKVEGQITYYNRYKRQNVVKDLSVELDRLSEESVNNDISSWTKGRSGNEALSLLKKRFSHRPVQEKFVCLNCGFETHADEQAALNIARSWLFLRSQEYKKYQTNKTTGNTDKRAFVETWQSFYRKKLKEVWKPAV

SEQ ID NO: 40731 - protein, 980 aa, synthetic construct
  REGION 1..980: note = engineered CasX variant
QEIKRINKIRRRLVKDSNTKKAGKTGPMKTLLVRVMTPDLRERLENLRKKPENIPQPISNTSRANLNKLLTDYTEMKKAILHVYWEEFQKDPVGLMSRVAQPASKKIDQNKLKPEMDEKGNLTTAGFACSQCGQPLFVYKLEQVSEKGKAYTNYFGRCNVAEHEKLILLAQLKPEKDSDEAVTYSLGKFGQRALDFYSIHVTKESTHPVKPLAQIAGNRYASSHPVGKALSDACMGTIASFLSKYQDIIIEHQKVVKGNQKRLESLRELAGKENLEYPSVTLPPQPHTKEGVDAYNEVIARVRMWVNLNLWQKLKLSRDDAKPLLRLKGFPSFPLVERQANEVDWWDMVCNVKKLINEKKEDGKVFWQNLAGYKRQEALRPYLSSEEDRKKGKKFARYQLGDLLLHLEKKHGEDWGKVYDEAWERIDKKVEGLSKHIKLEEERRSEDAQSKAALTDWLRAKASFVIEGLKEADKDEFCRCELKLQKWYGDLRGKPFAIEAENSILDISGFSKQYNCAFIWQKDGVKKLNLYLIINYFKGGKLRFKKIKPEAFEANRFYTVINKKSGEIVPMEVNFNFDDPNLIILPLAFGKRQGREFIWNDLLSLETGSLKLANGRVIEKTLYNRRTRQDEPALFVALTFERREVLDSSNIKPMNLIGVDRGENIPAVIALTDPEGCPLSRFKDSLGNPTHILRIGESYKEKQRTIQAKKEVEQRRAGGYSRKYASKAKNLADDMVRNTARDLLYYAVTQDAMLIFENLSRGFGRQGKRTFMAERQYTRMEDWLTAKLAYEGLPSKTYLSKTLAQYTSKTCSNCGFTITSADYDRVLEKLKKTATGWMTTINGKELKVEGQITYYNRYKRQNVVKDLSVELDRLSEESVNNDISSWTKGRSGNEALSLLKKRFSHRPVQEKFVCLNCGFETHADEQAALNIARSWLFLRSQEYKKYQTNKTTGNTDKRAFVETWQSFYRKKLKEVWKPAV

SEQ ID NO: 40732 - protein, 980 aa, synthetic construct
  REGION 1..980: note = engineered CasX variant
QEIKRINKIRRRLVKDSNTKKAGKTGPMKTLLVRVMTPDLRERLENLRKKPENIPQPISNTSRANLNKLLTDYTEMKKAILHVYWEEFQKDPVGLMSRVAQPASKKIDQNKLKPEMDEKGNLTTAGFACSQCGQPLFVYKLEQVSEKGKAYTNYFGRCNVAEHEKLILLAQLKPEKDSDEAVTYSLGKFGQRALDFYSIHVTKESTHPVKPLAQIAGNRYASSSPVGKALSDACMGTIASFLSKYQDIIIEHQKVVKGNQKRLESLRELAGKENLEYPSVTLPPQPHTKEGVDAYNEVIARVRMWVNLNLWQKLKLSRDDAKPLLRLKGFPSFPLVERQANEVDWWDMVCNVKKLINEKKEDGKVFWQNLAGYKRQEALRPYLSSEEDRKKGKKFARYQLGDLLLHLEKKHGEDWGKVYDEAWERIDKKVEGLSKHIKLEEERRSEDAQSKAALTDWLRAKASFVIEGLKEADKDEFCRCELKLQKWYGDLRGKPFAIEAENSILDISGFSKQYNCAFIWQKDGVKKLNLYLIINYFKGGKLRFKKIKPEAFEANRFYTVINKKSGEIVPMEVNFNFDDPNLIILPLAFGKRQGREFIWNDLLSLETGSLKLANGRVIEKTLYNRRTRQDEPALFVALTFERREVLDSSNIKPMNLIGVDRGENIPAVIALTDPEGCPLSRFKDSLGNPTHILRIGESYKEKQRTIQAKKEVEQRRAGGYSRKYASKAKNLADDMVRNTARDLLYYAVTQDAMLIFENLSRGFGRQGKRTFMAERQYTRMEDWLTAKLAYEGLPSKTYLSKTLAQYTSKTCSNCGFTITSADYDRVLEKLKKTATGWMTTINGKELKVEGQITYYNRYKRQNVVKDLSVELDRLSEESVNNDISSWTKGRSGNEALSLLKKRFSHRPVQEKFVCLNCGFETHADEQAALNIARSWLFLRSQEYKKYQTNKTTGNTDKRAFVETWQSFYRKKLKEVWKPAV

SEQ ID NO: 40733 - protein, 980 aa, synthetic construct
  REGION 1..980: note = engineered CasX variant
QEIKRINKIRRRLVKDSNTKKAGKTGPMKTLLVRVMTPDLRERLENLRKKPENIPQPISNTSRANLNKLLTDYTEMKKAILHVYWEEFQKDPVGLMSRVAQPASKKIDQNKLKPEMDEKGNLTTAGFACSQCGQPLFVYKLEQVSEKGKAYTNYFGRCNVAEHEKLILLAQLKPEKDSDEAVTYSLGKFGQRALDFYSIHVTKESTHPVKPLAQIAGNRYASSTPVGKALSDACMGTIASFLSKYQDIIIEHQKVVKGNQKRLESLRELAGKENLEYPSVTLPPQPHTKEGVDAYNEVIARVRMWVNLNLWQKLKLSRDDAKPLLRLKGFPSFPLVERQANEVDWWDMVCNVKKLINEKKEDGKVFWQNLAGYKRQEALRPYLSSEEDRKKGKKFARYQLGDLLLHLEKKHGEDWGKVYDEAWERIDKKVEGLSKHIKLEEERRSEDAQSKAALTDWLRAKASFVIEGLKEADKDEFCRCELKLQKWYGDLRGKPFAIEAENSILDISGFSKQYNCAFIWQKDGVKKLNLYLIINYFKGGKLRFKKIKPEAFEANRFYTVINKKSGEIVPMEVNFNFDDPNLIILPLAFGKRQGREFIWNDLLSLETGSLKLANGRVIEKTLYNRRTRQDEPALFVALTFERREVLDSSNIKPMNLIGVDRGENIPAVIALTDPEGCPLSRFKDSLGNPTHILRIGESYKEKQRTIQAKKEVEQRRAGGYSRKYASKAKNLADDMVRNTARDLLYYAVTQDAMLIFENLSRGFGRQGKRTFMAERQYTRMEDWLTAKLAYEGLPSKTYLSKTLAQYTSKTCSNCGFTITSADYDRVLEKLKKTATGWMTTINGKELKVEGQITYYNRYKRQNVVKDLSVELDRLSEESVNNDISSWTKGRSGNEALSLLKKRFSHRPVQEKFVCLNCGFETHADEQAALNIARSWLFLRSQEYKKYQTNKTTGNTDKRAFVETWQSFYRKKLKEVWKPAV

SEQ ID NO: 40734 - protein, 980 aa, synthetic construct
  REGION 1..980: note = engineered CasX variant
QEIKRINKIRRRLVKDSNTKKAGKTGPMKTLLVRVMTPDLRERLENLRKKPENIPQPISNTSRANLNKLLTDYTEMKKAILHVYWEEFQKDPVGLMSRVAQPASKKIDQNKLKPEMDEKGNLTTAGFACSQCGQPLFVYKLEQVSEKGKAYTNYFGRCNVAEHEKLILLAQLKPEKDSDEAVTYSLGKFGQRALDFYSIHVTKESTHPVKPLAQIAGNRYASSAPVGKALSDACMGTIASFLSKYQDIIIEHQKVVKGNQKRLESLRELAGKENLEYPSVTLPPQPHTKEGVDAYNEVIARVRMWVNLNLWQKLKLSRDDAKPLLRLKGFPSFPLVERQANEVDWWDMVCNVKKLINEKKEDGKVFWQNLAGYKRQEALRPYLSSEEDRKKGKKFARYQLGDLLLHLEKKHGEDWGKVYDEAWERIDKKVEGLSKHIKLEEERRSEDAQSKAALTDWLRAKASFVIEGLKEADKDEFCRCELKLQKWYGDLRGKPFAIEAENSILDISGFSKQYNCAFIWQKDGVKKLNLYLIINYFKGGKLRFKKIKPEAFEANRFYTVINKKSGEIVPMEVNFNFDDPNLIILPLAFGKRQGREFIWNDLLSLETGSLKLANGRVIEKTLYNRRTRQDEPALFVALTFERREVLDSSNIKPMNLIGVDRGENIPAVIALTDPEGCPLSRFKDSLGNPTHILRIGESYKEKQRTIQAKKEVEQRRAGGYSRKYASKAKNLADDMVRNTARDLLYYAVTQDAMLIFENLSRGFGRQGKRTFMAERQYTRMEDWLTAKLAYEGLPSKTYLSKTLAQYTSKTCSNCGFTITSADYDRVLEKLKKTATGWMTTINGKELKVEGQITYYNRYKRQNVVKDLSVELDRLSEESVNNDISSWTKGRSGNEALSLLKKRFSHRPVQEKFVCLNCGFETHADEQAALNIARSWLFLRSQEYKKYQTNKTTGNTDKRAFVETWQSFYRKKLKEVWKPAV

SEQ ID NO: 40735 - protein, 980 aa, synthetic construct
  REGION 1..980: note = engineered CasX variant
QEIKRINKIRRRLVKDSNTKKAGKTGPMKTLLVRVMTPDLRERLENLRKKPENIPQPISNTSRANLNKLLTDYTEMKKAILHVYWEEFQKDPVGLMSRVAQPASKKIDQNKLKPEMDEKGNLTTAGFACSQCGQPLFVYKLEQVSEKGKAYTNYFGRCNVAEHEKLILLAQLKPEKDSDEAVTYSLGKFGQRALDFYSIHVTKESTHPVKPLAQIAGNRYASSVPVGKALSDACMGTIASFLSKYQDIIIEHQKVVKGNQKRLESLRELAGKENLEYPSVTLPPQPHTKEGVDAYNEVIARVRMWVNLNLWQKLKLSRDDAKPLLRLKGFPSFPLVERQANEVDWWDMVCNVKKLINEKKEDGKVFWQNLAGYKRQEALRPYLSSEEDRKKGKKFARYQLGDLLLHLEKKHGEDWGKVYDEAWERIDKKVEGLSKHIKLEEERRSEDAQSKAALTDWLRAKASFVIEGLKEADKDEFCRCELKLQKWYGDLRGKPFAIEAENSILDISGFSKQYNCAFIWQKDGVKKLNLYLIINYFKGGKLRFKKIKPEAFEANRFYTVINKKSGEIVPMEVNFNFDDPNLIILPLAFGKRQGREFIWNDLLSLETGSLKLANGRVIEKTLYNRRTRQDEPALFVALTFERREVLDSSNIKPMNLIGVDRGENIPAVIALTDPEGCPLSRFKDSLGNPTHILRIGESYKEKQRTIQAKKEVEQRRAGGYSRKYASKAKNLADDMVRNTARDLLYYAVTQDAMLIFENLSRGFGRQGKRTFMAERQYTRMEDWLTAKLAYEGLPSKTYLSKTLAQYTSKTCSNCGFTITSADYDRVLEKLKKTATGWMTTINGKELKVEGQITYYNRYKRQNVVKDLSVELDRLSEESVNNDISSWTKGRSGNEALSLLKKRFSHRPVQEKFVCLNCGFETHADEQAALNIARSWLFLRSQEYKKYQTNKTTGNTDKRAFVETWQSFYRKKLKEVWKPAV

SEQ ID NO: 40736 - protein, 979 aa, synthetic construct
  REGION 1..979: note = engineered CasX variant
QEIKRINKIRRRLVKDSNTKKAGKTGPMKTLLVRVMTPDLRERLENLRKKPENIPQPISNTSRANLNKLLTDYTEMKKAILHVYWEEFQKDPVGLMSRVAQPASKKIDQNKLKPEMDEKGNLTTAGFACSQCGQPLFVYKLEQVSEKGKAYTNYFGRCNVAEHEKLIKLAQLKPEKDSDEAVTYSLGKFGQRALDFYSIHVTKESTHPVKPLAQIAGNRYASSPVGKALSDACMGTIASFLSKYQDIIIEHQKVVKGNQKRLESLRELAGKENLEYPSVTLPPQPHTKEGVDAYNEVIARVRMWVNLNLWQKLKLSRDDAKPLLRLKGFPSFPLVERQANEVDWWDMVCNVKKLINEKKEDGKVFWQNLAGYKRQEALRPYLSSEEDRKKGKKFARYQLGDLLLHLEKKHGEDWGKVYDEAWERIDKKVEGLSKHIKLEEERRSEDAQSKAALTDWLRAKASFVIEGLKEADKDEFCRCELKLQKWYGDLRGKPFAIEAENSILDISGFSKQYNCAFIWQKDGVKKLNLYLIINYFKGGKLRFKKIKPEAFEANRFYTVINKKSGEIVPMEVNFNFDDPNLIILPLAFGKRQGREFIWNDLLSLETGSLKLANGRVIEKTLYNRRTRQDEPALFVALTFERREVLDSSNIKPMNLIGVDRGENIPAVIALTDPEGCPLSRFKDSLGNPTHILRIGESYKEKQRTIQAKKEVEQRRAGGYSRKYASKAKNLADDMVRNTARDLLYYAVTQDAMLIFENLSRGFGRQGKRTFMAERQYTRMEDWLTAKLAYEGLPSKTYLSKTLAQYTSKTCSNCGFTITSADYDRVLEKLKKTATGWMTTINGKELKVEGQITYYNRYKRQNVVKDLSVELDRLSEESVNNDISSWTKGRSGNEALSLLKKRFSHRPVQEKFVCLNCGFETHADEQAALNIARSWLFLRSQEYKKYQTNKTTGNTDKRAFVETWQSFYRKKLKEVWKPAV

SEQ ID NO: 40737 - protein, 979 aa, synthetic construct
  REGION 1..979: note = engineered CasX variant
QEIKRINKIRRRLVKDSNTKKAGKTGPMKTLLVRVMTPDLRERLENLRKKPENIPQPISNTSRANLNKLLTDYTEMKKAILHVYWEEFQKDPVGLMSRVAQPASKKIDQNKLKPEMDEKGNLTTAGFACSQCGQPLFVYKLEQVSEKGKAYTNYFGRCNVAEHEKLILLAQLKPEKDSDEAVTYSLGKFGQRALDFYSIHVTKESTHPVKPLAQIAGNRYASSYPVGKALSDACMGTIASFLSKYQDIIIEHQKVVKGNQKRLESLRELAGKENLEYPSVTLPPQPHTKEGVDAYNEVIARVRMWVNLNLWQKLKLSRDDAKPLLRLKGFPSFPLVERQANEVDWWDMVCNVKKLINEKKEDGKVFWQNLAGYKRQEALRPYLSSEEDRQKGKKFARYQLGDLLLHLEKKHGEDWGKVYDEAWERIDKKVEGLSKHIKLEEERRSEDAQSKAALTDWLRAKASFVIEGLKEADKDEFCRCELKLQKWYGDLRGKPFAIEAENSILDISGFSKQYNCAFIWQKDGVKKLNLYLIINYFKGGKLRFKKIKPEAFEANRFYTVINKKSGEIVPMEVNFNFDDPNLIILPLAFGKRQGREFIWNDLLSLETGSLKLANGRVIEKTLYNRRTRQDEPALFVALTFERREVLDSSNIKPMNLIGVDRGENIPAVIALTDPEGCPLSRFKDSLGNPTHILRIGESYKEKQRTIQAKKEVEQRRAGGYSRKYASKAKNLADDMVRNTARDLLYYAVTQDAMLIFENLSRGFGRQGKRTFMAERQYTRMEDWLTAKLAYEGLPSKTYLSKTLAQYTSKTCSNCGFTITSADYDRVLEKLKKTATGWMTTINGKELKVEGQITYYNRYKRQNVVKDLSVELDRLSEESVNNDISSWTKGRSGEALSLLKKRFSHRPVQEKFVCLNCGFETHADEQAALNIARSWLFLRSQEYKKYQTNKTTGNTDKRAFVETWQSFYRKKLKEVWKPAV

SEQ ID NO: 40738 - protein, 979 aa, synthetic construct
  REGION 1..979: note = engineered CasX variant
QEIKRINKIRRRLVKDSNTKKAGKTGPMKTLLVRVMTPDLRERLENLRKKPENIPQPISNTSRANLNKLLTDYTEMKKAILHVYWEEFQKDPVGLMSRVAQPASKKIDQNKLKPEMDEKGNLTTAGFACSQCGQPLFVYKLEQVSEKGKAYTNYFGRCNVAEHEKLILLAQLKPEKDSDEAVTYSLGKFGQRALDFYSIHVTKESTHPVKPLAQIAGNRYASSHPVGKALSDACMGTIASFLSKYQDIIIEHQKVVKGNQKRLESLRELAGKENLEYPSVTLPPQPHTKEGVDAYNEVIARVRMWVNLNLWQKLKLSRDDAKPLLRLKGFPSFPLVERQANEVDWWDMVCNVKKLINEKKEDGKVFWQNLAGYKRQEALRPYLSSEEDRQKGKKFARYQLGDLLLHLEKKHGEDWGKVYDEAWERIDKKVEGLSKHIKLEEERRSEDAQSKAALTDWLRAKASFVIEGLKEADKDEFCRCELKLQKWYGDLRGKPFAIEAENSILDISGFSKQYNCAFIWQKDGVKKLNLYLIINYFKGGKLRFKKIKPEAFEANRFYTVINKKSGEIVPMEVNFNFDDPNLIILPLAFGKRQGREFIWNDLLSLETGSLKLANGRVIEKTLYNRRTRQDEPALFVALTFERREVLDSSNIKPMNLIGVDRGENIPAVIALTDPEGCPLSRFKDSLGNPTHILRIGESYKEKQRTIQAKKEVEQRRAGGYSRKYASKAKNLADDMVRNTARDLLYYAVTQDAMLIFENLSRGFGRQGKRTFMAERQYTRMEDWLTAKLAYEGLPSKTYLSKTLAQYTSKTCSNCGFTITSADYDRVLEKLKKTATGWMTTINGKELKVEGQITYYNRYKRQNVVKDLSVELDRLSEESVNNDISSWTKGRSGEALSLLKKRFSHRPVQEKFVCLNCGFETHADEQAALNIARSWLFLRSQEYKKYQTNKTTGNTDKRAFVETWQSFYRKKLKEVWKPAV

SEQ ID NO: 40739 - protein, 979 aa, synthetic construct
  REGION 1..979: note = engineered CasX variant
QEIKRINKIRRRLVKDSNTKKAGKTGPMKTLLVRVMTPDLRERLENLRKKPENIPQPISNTSRANLNKLLTDYTEMKKAILHVYWEEFQKDPVGLMSRVAQPASKKIDQNKLKPEMDEKGNLTTAGFACSQCGQPLFVYKLEQVSEKGKAYTNYFGRCNVAEHEKLILLAQLKPEKDSDEAVTYSLGKFGQRALDFYSIHVTKESTHPVKPLAQIAGNRYASSSPVGKALSDACMGTIASFLSKYQDIIIEHQKVVKGNQKRLESLRELAGKENLEYPSVTLPPQPHTKEGVDAYNEVIARVRMWVNLNLWQKLKLSRDDAKPLLRLKGFPSFPLVERQANEVDWWDMVCNVKKLINEKKEDGKVFWQNLAGYKRQEALRPYLSSEEDRQKGKKFARYQLGDLLLHLEKKHGEDWGKVYDEAWERIDKKVEGLSKHIKLEEERRSEDAQSKAALTDWLRAKASFVIEGLKEADKDEFCRCELKLQKWYGDLRGKPFAIEAENSILDISGFSKQYNCAFIWQKDGVKKLNLYLIINYFKGGKLRFKKIKPEAFEANRFYTVINKKSGEIVPMEVNFNFDDPNLIILPLAFGKRQGREFIWNDLLSLETGSLKLANGRVIEKTLYNRRTRQDEPALFVALTFERREVLDSSNIKPMNLIGVDRGENIPAVIALTDPEGCPLSRFKDSLGNPTHILRIGESYKEKQRTIQAKKEVEQRRAGGYSRKYASKAKNLADDMVRNTARDLLYYAVTQDAMLIFENLSRGFGRQGKRTFMAERQYTRMEDWLTAKLAYEGLPSKTYLSKTLAQYTSKTCSNCGFTITSADYDRVLEKLKKTATGWMTTINGKELKVEGQITYYNRYKRQNVVKDLSVELDRLSEESVNNDISSWTKGRSGEALSLLKKRFSHRPVQEKFVCLNCGFETHADEQAALNIARSWLFLRSQEYKKYQTNKTTGNTDKRAFVETWQSFYRKKLKEVWKPAV

SEQ ID NO: 40740 - protein, 979 aa, synthetic construct
  REGION 1..979: note = engineered CasX variant
QEIKRINKIRRRLVKDSNTKKAGKTGPMKTLLVRVMTPDLRERLENLRKKPENIPQPISNTSRANLNKLLTDYTEMKKAILHVYWEEFQKDPVGLMSRVAQPASKKIDQNKLKPEMDEKGNLTTAGFACSQCGQPLFVYKLEQVSEKGKAYTNYFGRCNVAEHEKLILLAQLKPEKDSDEAVTYSLGKFGQRALDFYSIHVTKESTHPVKPLAQIAGNRYASSTPVGKALSDACMGTIASFLSKYQDIIIEHQKVVKGNQKRLESLRELAGKENLEYPSVTLPPQPHTKEGVDAYNEVIARVRMWVNLNLWQKLKLSRDDAKPLLRLKGFPSFPLVERQANEVDWWDMVCNVKKLINEKKEDGKVFWQNLAGYKRQEALRPYLSSEEDRQKGKKFARYQLGDLLLHLEKKHGEDWGKVYDEAWERIDKKVEGLSKHIKLEEERRSEDAQSKAALTDWLRAKASFVIEGLKEADKDEFCRCELKLQKWYGDLRGKPFAIEAENSILDISGFSKQYNCAFIWQKDGVKKLNLYLIINYFKGGKLRFKKIKPEAFEANRFYTVINKKSGEIVPMEVNFNFDDPNLIILPLAFGKRQGREFIWNDLLSLETGSLKLANGRVIEKTLYNRRTRQDEPALFVALTFERREVLDSSNIKPMNLIGVDRGENIPAVIALTDPEGCPLSRFKDSLGNPTHILRIGESYKEKQRTIQAKKEVEQRRAGGYSRKYASKAKNLADDMVRNTARDLLYYAVTQDAMLIFENLSRGFGRQGKRTFMAERQYTRMEDWLTAKLAYEGLPSKTYLSKTLAQYTSKTCSNCGFTITSADYDRVLEKLKKTATGWMTTINGKELKVEGQITYYNRYKRQNVVKDLSVELDRLSEESVNNDISSWTKGRSGEALSLLKKRFSHRPVQEKFVCLNCGFETHADEQAALNIARSWLFLRSQEYKKYQTNKTTGNTDKRAFVETWQSFYRKKLKEVWKPAV

SEQ ID NO: 40741 - protein, 979 aa, synthetic construct
  REGION 1..979: note = engineered CasX variant
QEIKRINKIRRRLVKDSNTKKAGKTGPMKTLLVRVMTPDLRERLENLRKKPENIPQPISNTSRANLNKLLTDYTEMKKAILHVYWEEFQKDPVGLMSRVAQPASKKIDQNKLKPEMDEKGNLTTAGFACSQCGQPLFVYKLEQVSEKGKAYTNYFGRCNVAEHEKLILLAQLKPEKDSDEAVTYSLGKFGQRALDFYSIHVTKESTHPVKPLAQIAGNRYASSAPVGKALSDACMGTIASFLSKYQDIIIEHQKVVKGNQKRLESLRELAGKENLEYPSVTLPPQPHTKEGVDAYNEVIARVRMWVNLNLWQKLKLSRDDAKPLLRLKGFPSFPLVERQANEVDWWDMVCNVKKLINEKKEDGKVFWQNLAGYKRQEALRPYLSSEEDRQKGKKFARYQLGDLLLHLEKKHGEDWGKVYDEAWERIDKKVEGLSKHIKLEEERRSEDAQSKAALTDWLRAKASFVIEGLKEADKDEFCRCELKLQKWYGDLRGKPFAIEAENSILDISGFSKQYNCAFIWQKDGVKKLNLYLIINYFKGGKLRFKKIKPEAFEANRFYTVINKKSGEIVPMEVNFNFDDPNLIILPLAFGKRQGREFIWNDLLSLETGSLKLANGRVIEKTLYNRRTRQDEPALFVALTFERREVLDSSNIKPMNLIGVDRGENIPAVIALTDPEGCPLSRFKDSLGNPTHILRIGESYKEKQRTIQAKKEVEQRRAGGYSRKYASKAKNLADDMVRNTARDLLYYAVTQDAMLIFENLSRGFGRQGKRTFMAERQYTRMEDWLTAKLAYEGLPSKTYLSKTLAQYTSKTCSNCGFTITSADYDRVLEKLKKTATGWMTTINGKELKVEGQITYYNRYKRQNVVKDLSVELDRLSEESVNNDISSWTKGRSGEALSLLKKRFSHRPVQEKFVCLNCGFETHADEQAALNIARSWLFLRSQEYKKYQTNKTTGNTDKRAFVETWQSFYRKKLKEVWKPAV

SEQ ID NO: 40742 - protein, 979 aa, synthetic construct
  REGION 1..979: note = engineered CasX variant
QEIKRINKIRRRLVKDSNTKKAGKTGPMKTLLVRVMTPDLRERLENLRKKPENIPQPISNTSRANLNKLLTDYTEMKKAILHVYWEEFQKDPVGLMSRVAQPASKKIDQNKLKPEMDEKGNLTTAGFACSQCGQPLFVYKLEQVSEKGKAYTNYFGRCNVAEHEKLILLAQLKPEKDSDEAVTYSLGKFGQRALDFYSIHVTKESTHPVKPLAQIAGNRYASSVPVGKALSDACMGTIASFLSKYQDIIIEHQKVVKGNQKRLESLRELAGKENLEYPSVTLPPQPHTKEGVDAYNEVIARVRMWVNLNLWQKLKLSRDDAKPLLRLKGFPSFPLVERQANEVDWWDMVCNVKKLINEKKEDGKVFWQNLAGYKRQEALRPYLSSEEDRQKGKKFARYQLGDLLLHLEKKHGEDWGKVYDEAWERIDKKVEGLSKHIKLEEERRSEDAQSKAALTDWLRAKASFVIEGLKEADKDEFCRCELKLQKWYGDLRGKPFAIEAENSILDISGFSKQYNCAFIWQKDGVKKLNLYLIINYFKGGKLRFKKIKPEAFEANRFYTVINKKSGEIVPMEVNFNFDDPNLIILPLAFGKRQGREFIWNDLLSLETGSLKLANGRVIEKTLYNRRTRQDEPALFVALTFERREVLDSSNIKPMNLIGVDRGENIPAVIALTDPEGCPLSRFKDSLGNPTHILRIGESYKEKQRTIQAKKEVEQRRAGGYSRKYASKAKNLADDMVRNTARDLLYYAVTQDAMLIFENLSRGFGRQGKRTFMAERQYTRMEDWLTAKLAYEGLPSKTYLSKTLAQYTSKTCSNCGFTITSADYDRVLEKLKKTATGWMTTINGKELKVEGQITYYNRYKRQNVVKDLSVELDRLSEESVNNDISSWTKGRSGEALSLLKKRFSHRPVQEKFVCLNCGFETHADEQAALNIARSWLFLRSQEYKKYQTNKTTGNTDKRAFVETWQSFYRKKLKEVWKPAV

SEQ ID NO: 40743 - protein, 978 aa, synthetic construct
  REGION 1..978: note = engineered CasX variant
QEIKRINKIRRRLVKDSNTKKAGKTGPMKTLLVRVMTPDLRERLENLRKKPENIPQPISNTSRANLNKLLTDYTEMKKAILHVYWEEFQKDPVGLMSRVAQPASKKIDQNKLKPEMDEKGNLTTAGFACSQCGQPLFVYKLEQVSEKGKAYTNYFGRCNVAEHEKLIKLAQLKPEKDSDEAVTYSLGKFGQRALDFYSIHVTKESTHPVKPLAQIAGNRYASSPVGKALSDACMGTIASFLSKYQDIIIEHQKVVKGNQKRLESLRELAGKENLEYPSVTLPPQPHTKEGVDAYNEVIARVRMWVNLNLWQKLKLSRDDAKPLLRLKGFPSFPLVERQANEVDWWDMVCNVKKLINEKKEDGKVFWQNLAGYKRQEALRPYLSSEEDRQKGKKFARYQLGDLLLHLEKKHGEDWGKVYDEAWERIDKKVEGLSKHIKLEEERRSEDAQSKAALTDWLRAKASFVIEGLKEADKDEFCRCELKLQKWYGDLRGKPFAIEAENSILDISGFSKQYNCAFIWQKDGVKKLNLYLIINYFKGGKLRFKKIKPEAFEANRFYTVINKKSGEIVPMEVNFNFDDPNLIILPLAFGKRQGREFIWNDLLSLETGSLKLANGRVIEKTLYNRRTRQDEPALFVALTFERREVLDSSNIKPMNLIGVDRGENIPAVIALTDPEGCPLSRFKDSLGNPTHILRIGESYKEKQRTIQAKKEVEQRRAGGYSRKYASKAKNLADDMVRNTARDLLYYAVTQDAMLIFENLSRGFGRQGKRTFMAERQYTRMEDWLTAKLAYEGLPSKTYLSKTLAQYTSKTCSNCGFTITSADYDRVLEKLKKTATGWMTTINGKELKVEGQITYYNRYKRQNVVKDLSVELDRLSEESVNNDISSWTKGRSGEALSLLKKRFSHRPVQEKFVCLNCGFETHADEQAALNIARSWLFLRSQEYKKYQTNKTTGNTDKRAFVETWQSFYRKKLKEVWKPAV

SEQ ID NO: 40744 - protein, 979 aa, synthetic construct
  REGION 1..979: note = engineered CasX variant
QEIKRINKIRRRLVKDSNTKKAGKTGPMKTLLVRVMTPDLRERLENLRKKPENIPQPISNTSRANLNKLLTDYTEMKKAILHVYWEEFQKDPVGLMSRVAQPASKKIDQNKLKPEMDEKGNLTTAGFACSQCGQPLFVYKLEQVSEKGKAYTNYFGRCNVAEHEKLILLAQLKPEKDSDEAVTYSLGKFGQRALDFYSIHVTKESTHPVKPLAQIAGNRYASSYPVGKALSDACMGTIASFLSKYQDIIIEHQKVVKGNQKRLESLRELAGKENLEYPSVTLPPQPHTKEGVDAYNEVIARVRMWVNLNLWQKLKLSRDDAKPLLRLKGFPSFPLVERQANEVDWWDMVCNVKKLINEKKEDGKVFWQNLAGYKRQEALRPYLSSEEDRKKGKKFARYQLGDLLLHLEKKHGEDWGKVYDEAWERIDKKVEGLSKHIKLEEERRSEDAQSKAALTDWLRAKASFVIEGLKEADKDEFCRCELKLQKWYGDLRGKPFAIEAENSILDISGFSKQYNCAFIWQKDGVKKLNLYLIINYFKGGKLRFKKIKPEAFEANRFYTVINKKSGEIVPMEVNFNFDDPNLIILPLAFGKRQGREFIWNDLLSLETGSLKLANGRVIEKTLYNRRTRQDEPALFVALTFERREVLDSSNIKPMNLIGVDRGENIPAVIALTDPEGCPLSRFKDSLGNPTHILRIGESYKEKQRTIQAKKEVEQRRAGGYSRKYASKAKNLADDMVRNTARDLLYYAVTQDAMLIFENLSRGFGRQGKRTFMAERQYTRMEDWLTAKLAYEGLPSQTYLSKTLAQYTSKTCSNCGFTITSADYDRVLEKLKKTATGWMTTINGKELKVEGQITYYNRYKRQNVVKDLSVELDRLSEESVNNDISSWTKGRSGEALSLLKKRFSHRPVQEKFVCLNCGFETHADEQAALNIARSWLFLRSQEYKKYQTNKTTGNTDKRAFVETWQSFYRKKLKEVWKPAV

SEQ ID NO: 40745 - protein, 979 aa, synthetic construct
  REGION 1..979: note = engineered CasX variant
QEIKRINKIRRRLVKDSNTKKAGKTGPMKTLLVRVMTPDLRERLENLRKKPENIPQPISNTSRANLNKLLTDYTEMKKAILHVYWEEFQKDPVGLMSRVAQPASKKIDQNKLKPEMDEKGNLTTAGFACSQCGQPLFVYKLEQVSEKGKAYTNYFGRCNVAEHEKLILLAQLKPEKDSDEAVTYSLGKFGQRALDFYSIHVTKESTHPVKPLAQIAGNRYASSHPVGKALSDACMGTIASFLSKYQDIIIEHQKVVKGNQKRLESLRELAGKENLEYPSVTLPPQPHTKEGVDAYNEVIARVRMWVNLNLWQKLKLSRDDAKPLLRLKGFPSFPLVERQANEVDWWDMVCNVKKLINEKKEDGKVFWQNLAGYKRQEALRPYLSSEEDRKKGKKFARYQLGDLLLHLEKKHGEDWGKVYDEAWERIDKKVEGLSKHIKLEEERRSEDAQSKAALTDWLRAKASFVIEGLKEADKDEFCRCELKLQKWYGDLRGKPFAIEAENSILDISGFSKQYNCAFIWQKDGVKKLNLYLIINYFKGGKLRFKKIKPEAFEANRFYTVINKKSGEIVPMEVNFNFDDPNLIILPLAFGKRQGREFIWNDLLSLETGSLKLANGRVIEKTLYNRRTRQDEPALFVALTFERREVLDSSNIKPMNLIGVDRGENIPAVIALTDPEGCPLSRFKDSLGNPTHILRIGESYKEKQRTIQAKKEVEQRRAGGYSRKYASKAKNLADDMVRNTARDLLYYAVTQDAMLIFENLSRGFGRQGKRTFMAERQYTRMEDWLTAKLAYEGLPSQTYLSKTLAQYTSKTCSNCGFTITSADYDRVLEKLKKTATGWMTTINGKELKVEGQITYYNRYKRQNVVKDLSVELDRLSEESVNNDISSWTKGRSGEALSLLKKRFSHRPVQEKFVCLNCGFETHADEQAALNIARSWLFLRSQEYKKYQTNKTTGNTDKRAFVETWQSFYRKKLKEVWKPAV

SEQ ID NO: 40746 - protein, 979 aa, synthetic construct
  REGION 1..979: note = engineered CasX variant
QEIKRINKIRRRLVKDSNTKKAGKTGPMKTLLVRVMTPDLRERLENLRKKPENIPQPISNTSRANLNKLLTDYTEMKKAILHVYWEEFQKDPVGLMSRVAQPASKKIDQNKLKPEMDEKGNLTTAGFACSQCGQPLFVYKLEQVSEKGKAYTNYFGRCNVAEHEKLILLAQLKPEKDSDEAVTYSLGKFGQRALDFYSIHVTKESTHPVKPLAQIAGNRYASSSPVGKALSDACMGTIASFLSKYQDIIIEHQKVVKGNQKRLESLRELAGKENLEYPSVTLPPQPHTKEGVDAYNEVIARVRMWVNLNLWQKLKLSRDDAKPLLRLKGFPSFPLVERQANEVDWWDMVCNVKKLINEKKEDGKVFWQNLAGYKRQEALRPYLSSEEDRKKGKKFARYQLGDLLLHLEKKHGEDWGKVYDEAWERIDKKVEGLSKHIKLEEERRSEDAQSKAALTDWLRAKASFVIEGLKEADKDEFCRCELKLQKWYGDLRGKPFAIEAENSILDISGFSKQYNCAFIWQKDGVKKLNLYLIINYFKGGKLRFKKIKPEAFEANRFYTVINKKSGEIVPMEVNFNFDDPNLIILPLAFGKRQGREFIWNDLLSLETGSLKLANGRVIEKTLYNRRTRQDEPALFVALTFERREVLDSSNIKPMNLIGVDRGENIPAVIALTDPEGCPLSRFKDSLGNPTHILRIGESYKEKQRTIQAKKEVEQRRAGGYSRKYASKAKNLADDMVRNTARDLLYYAVTQDAMLIFENLSRGFGRQGKRTFMAERQYTRMEDWLTAKLAYEGLPSQTYLSKTLAQYTSKTCSNCGFTITSADYDRVLEKLKKTATGWMTTINGKELKVEGQITYYNRYKRQNVVKDLSVELDRLSEESVNNDISSWTKGRSGEALSLLKKRFSHRPVQEKFVCLNCGFETHADEQAALNIARSWLFLRSQEYKKYQTNKTTGNTDKRAFVETWQSFYRKKLKEVWKPAV

SEQ ID NO: 40747 - protein, 979 aa, synthetic construct
  REGION 1..979: note = engineered CasX variant
QEIKRINKIRRRLVKDSNTKKAGKTGPMKTLLVRVMTPDLRERLENLRKKPENIPQPISNTSRANLNKLLTDYTEMKKAILHVYWEEFQKDPVGLMSRVAQPASKKIDQNKLKPEMDEKGNLTTAGFACSQCGQPLFVYKLEQVSEKGKAYTNYFGRCNVAEHEKLILLAQLKPEKDSDEAVTYSLGKFGQRALDFYSIHVTKESTHPVKPLAQIAGNRYASSTPVGKALSDACMGTIASFLSKYQDIIIEHQKVVKGNQKRLESLRELAGKENLEYPSVTLPPQPHTKEGVDAYNEVIARVRMWVNLNLWQKLKLSRDDAKPLLRLKGFPSFPLVERQANEVDWWDMVCNVKKLINEKKEDGKVFWQNLAGYKRQEALRPYLSSEEDRKKGKKFARYQLGDLLLHLEKKHGEDWGKVYDEAWERIDKKVEGLSKHIKLEEERRSEDAQSKAALTDWLRAKASFVIEGLKEADKDEFCRCELKLQKWYGDLRGKPFAIEAENSILDISGFSKQYNCAFIWQKDGVKKLNLYLIINYFKGGKLRFKKIKPEAFEANRFYTVINKKSGEIVPMEVNFNFDDPNLIILPLAFGKRQGREFIWNDLLSLETGSLKLANGRVIEKTLYNRRTRQDEPALFVALTFERREVLDSSNIKPMNLIGVDRGENIPAVIALTDPEGCPLSRFKDSLGNPTHILRIGESYKEKQRTIQAKKEVEQRRAGGYSRKYASKAKNLADDMVRNTARDLLYYAVTQDAMLIFENLSRGFGRQGKRTFMAERQYTRMEDWLTAKLAYEGLPSQTYLSKTLAQYTSKTCSNCGFTITSADYDRVLEKLKKTATGWMTTINGKELKVEGQITYYNRYKRQNVVKDLSVELDRLSEESVNNDISSWTKGRSGEALSLLKKRFSHRPVQEKFVCLNCGFETHADEQAALNIARSWLFLRSQEYKKYQTNKTTGNTDKRAFVETWQSFYRKKLKEVWKPAV

SEQ ID NO: 40748 - protein, 979 aa, synthetic construct
  REGION 1..979: note = engineered CasX variant
QEIKRINKIRRRLVKDSNTKKAGKTGPMKTLLVRVMTPDLRERLENLRKKPENIPQPISNTSRANLNKLLTDYTEMKKAILHVYWEEFQKDPVGLMSRVAQPASKKIDQNKLKPEMDEKGNLTTAGFACSQCGQPLFVYKLEQVSEKGKAYTNYFGRCNVAEHEKLILLAQLKPEKDSDEAVTYSLGKFGQRALDFYSIHVTKESTHPVKPLAQIAGNRYASSAPVGKALSDACMGTIASFLSKYQDIIIEHQKVVKGNQKRLESLRELAGKENLEYPSVTLPPQPHTKEGVDAYNEVIARVRMWVNLNLWQKLKLSRDDAKPLLRLKGFPSFPLVERQANEVDWWDMVCNVKKLINEKKEDGKVFWQNLAGYKRQEALRPYLSSEEDRKKGKKFARYQLGDLLLHLEKKHGEDWGKVYDEAWERIDKKVEGLSKHIKLEEERRSEDAQSKAALTDWLRAKASFVIEGLKEADKDEFCRCELKLQKWYGDLRGKPFAIEAENSILDISGFSKQYNCAFIWQKDGVKKLNLYLIINYFKGGKLRFKKIKPEAFEANRFYTVINKKSGEIVPMEVNFNFDDPNLIILPLAFGKRQGREFIWNDLLSLETGSLKLANGRVIEKTLYNRRTRQDEPALFVALTFERREVLDSSNIKPMNLIGVDRGENIPAVIALTDPEGCPLSRFKDSLGNPTHILRIGESYKEKQRTIQAKKEVEQRRAGGYSRKYASKAKNLADDMVRNTARDLLYYAVTQDAMLIFENLSRGFGRQGKRTFMAERQYTRMEDWLTAKLAYEGLPSQTYLSKTLAQYTSKTCSNCGFTITSADYDRVLEKLKKTATGWMTTINGKELKVEGQITYYNRYKRQNVVKDLSVELDRLSEESVNNDISSWTKGRSGEALSLLKKRFSHRPVQEKFVCLNCGFETHADEQAALNIARSWLFLRSQEYKKYQTNKTTGNTDKRAFVETWQSFYRKKLKEVWKPAV

SEQ ID NO: 40749 - protein, 979 aa, synthetic construct
  REGION 1..979: note = engineered CasX variant
QEIKRINKIRRRLVKDSNTKKAGKTGPMKTLLVRVMTPDLRERLENLRKKPENIPQPISNTSRANLNKLLTDYTEMKKAILHVYWEEFQKDPVGLMSRVAQPASKKIDQNKLKPEMDEKGNLTTAGFACSQCGQPLFVYKLEQVSEKGKAYTNYFGRCNVAEHEKLILLAQLKPEKDSDEAVTYSLGKFGQRALDFYSIHVTKESTHPVKPLAQIAGNRYASSVPVGKALSDACMGTIASFLSKYQDIIIEHQKVVKGNQKRLESLRELAGKENLEYPSVTLPPQPHTKEGVDAYNEVIARVRMWVNLNLWQKLKLSRDDAKPLLRLKGFPSFPLVERQANEVDWWDMVCNVKKLINEKKEDGKVFWQNLAGYKRQEALRPYLSSEEDRKKGKKFARYQLGDLLLHLEKKHGEDWGKVYDEAWERIDKKVEGLSKHIKLEEERRSEDAQSKAALTDWLRAKASFVIEGLKEADKDEFCRCELKLQKWYGDLRGKPFAIEAENSILDISGFSKQYNCAFIWQKDGVKKLNLYLIINYFKGGKLRFKKIKPEAFEANRFYTVINKKSGEIVPMEVNFNFDDPNLIILPLAFGKRQGREFIWNDLLSLETGSLKLANGRVIEKTLYNRRTRQDEPALFVALTFERREVLDSSNIKPMNLIGVDRGENIPAVIALTDPEGCPLSRFKDSLGNPTHILRIGESYKEKQRTIQAKKEVEQRRAGGYSRKYASKAKNLADDMVRNTARDLLYYAVTQDAMLIFENLSRGFGRQGKRTFMAERQYTRMEDWLTAKLAYEGLPSQTYLSKTLAQYTSKTCSNCGFTITSADYDRVLEKLKKTATGWMTTINGKELKVEGQITYYNRYKRQNVVKDLSVELDRLSEESVNNDISSWTKGRSGEALSLLKKRFSHRPVQEKFVCLNCGFETHADEQAALNIARSWLFLRSQEYKKYQTNKTTGNTDKRAFVETWQSFYRKKLKEVWKPAV

SEQ ID NO: 40750 - protein, 978 aa, synthetic construct
  REGION 1..978: note = engineered CasX variant
QEIKRINKIRRRLVKDSNTKKAGKTGPMKTLLVRVMTPDLRERLENLRKKPENIPQPISNTSRANLNKLLTDYTEMKKAILHVYWEEFQKDPVGLMSRVAQPASKKIDQNKLKPEMDEKGNLTTAGFACSQCGQPLFVYKLEQVSEKGKAYTNYFGRCNVAEHEKLIKLAQLKPEKDSDEAVTYSLGKFGQRALDFYSIHVTKESTHPVKPLAQIAGNRYASSPVGKALSDACMGTIASFLSKYQDIIIEHQKVVKGNQKRLESLRELAGKENLEYPSVTLPPQPHTKEGVDAYNEVIARVRMWVNLNLWQKLKLSRDDAKPLLRLKGFPSFPLVERQANEVDWWDMVCNVKKLINEKKEDGKVFWQNLAGYKRQEALRPYLSSEEDRKKGKKFARYQLGDLLLHLEKKHGEDWGKVYDEAWERIDKKVEGLSKHIKLEEERRSEDAQSKAALTDWLRAKASFVIEGLKEADKDEFCRCELKLQKWYGDLRGKPFAIEAENSILDISGFSKQYNCAFIWQKDGVKKLNLYLIINYFKGGKLRFKKIKPEAFEANRFYTVINKKSGEIVPMEVNFNFDDPNLIILPLAFGKRQGREFIWNDLLSLETGSLKLANGRVIEKTLYNRRTRQDEPALFVALTFERREVLDSSNIKPMNLIGVDRGENIPAVIALTDPEGCPLSRFKDSLGNPTHILRIGESYKEKQRTIQAKKEVEQRRAGGYSRKYASKAKNLADDMVRNTARDLLYYAVTQDAMLIFENLSRGFGRQGKRTFMAERQYTRMEDWLTAKLAYEGLPSQTYLSKTLAQYTSKTCSNCGFTITSADYDRVLEKLKKTATGWMTTINGKELKVEGQITYYNRYKRQNVVKDLSVELDRLSEESVNNDISSWTKGRSGEALSLLKKRFSHRPVQEKFVCLNCGFETHADEQAALNIARSWLFLRSQEYKKYQTNKTTGNTDKRAFVETWQSFYRKKLKEVWKPAV

SEQ ID NO: 40751 - protein, 979 aa, synthetic construct
  REGION 1..979: note = engineered CasX variant
QEIKRINKIRRRLVKDSNTKKAGKTGPMKTLLVRVMTPDLRERLENLRKKPENIPQPISNTSRANLNKLLTDYTEMKKAILHVYWEEFQKDPVGLMSRVAQPASKKIDQNKLKPEMDEKGNLTTAGFACSQCGQPLFVYKLEQVSEKGKAYTNYFGRCNVAEHEKLILLAQLKPEKDSDEAVTYSLGKFGQRALDFYSIHVTKESTHPVKPLAQIAGNRYASSYPVGKALSDACMGTIASFLSKYQDIIIEHQKVVKGNQKRLESLRELAGKENLEYPSVTLPPQPHTKEGVDAYNEVIARVRMWVNLNLWQKLKLSRDDAKPLLRLKGFPSFPLVERQANEVDWWDMVCNVKKLINEKKEDGKVFWQNLAGYKRQEALRPYLSSEEDRKKGKKFARYQLGDLLLHLEKKHGEDWGKVYDEAWERIDKKVEGLSKHIKLEEERRSEDAQSKAALTDWLRAKASFVIEGLKEADKDEFCRCELKLQKWYGDLRGKPFAIEAENSILDISGFSKQYNCAFIWQKDGVKKLNLYLIINYFKGGKLRFKKIKPEAFEANRFYTVINKKSGEIVPMEVNFNFDDPNLIILPLAFGKRQGREFIWNDLLSLETGSLKLANGRVIEKTLYNRRTRQDEPALFVALTFERREVLDSSNIKPMNLIGVDRGENIPAVIALTDPEGCPLSRFKDSLGNPTHILRIGESYKEKQRTIQAKKEVEQRRAGGYSRKYASKAKNLADDMVRNTARDLLYYAVTQDAMLIFENLSRGFGRQGKRTFMAERQYTRMEDWLTAKLAYNGLPSKTYLSKTLAQYTSKTCSNCGFTITSADYDRVLEKLKKTATGWMTTINGKELKVEGQITYYNRYKRQNVVKDLSVELDRLSEESVNNDISSWTKGRSGEALSLLKKRFSHRPVQEKFVCLNCGFETHADEQAALNIARSWLFLRSQEYKKYQTNKTTGNTDKRAFVETWQSFYRKKLKEVWKPAV

SEQ ID NO: 40752 - protein, 979 aa, synthetic construct
  REGION 1..979: note = engineered CasX variant
QEIKRINKIRRRLVKDSNTKKAGKTGPMKTLLVRVMTPDLRERLENLRKKPENIPQPISNTSRANLNKLLTDYTEMKKAILHVYWEEFQKDPVGLMSRVAQPASKKIDQNKLKPEMDEKGNLTTAGFACSQCGQPLFVYKLEQVSEKGKAYTNYFGRCNVAEHEKLILLAQLKPEKDSDEAVTYSLGKFGQRALDFYSIHVTKESTHPVKPLAQIAGNRYASSHPVGKALSDACMGTIASFLSKYQDIIIEHQKVVKGNQKRLESLRELAGKENLEYPSVTLPPQPHTKEGVDAYNEVIARVRMWVNLNLWQKLKLSRDDAKPLLRLKGFPSFPLVERQANEVDWWDMVCNVKKLINEKKEDGKVFWQNLAGYKRQEALRPYLSSEEDRKKGKKFARYQLGDLLLHLEKKHGEDWGKVYDEAWERIDKKVEGLSKHIKLEEERRSEDAQSKAALTDWLRAKASFVIEGLKEADKDEFCRCELKLQKWYGDLRGKPFAIEAENSILDISGFSKQYNCAFIWQKDGVKKLNLYLIINYFKGGKLRFKKIKPEAFEANRFYTVINKKSGEIVPMEVNFNFDDPNLIILPLAFGKRQGREFIWNDLLSLETGSLKLANGRVIEKTLYNRRTRQDEPALFVALTFERREVLDSSNIKPMNLIGVDRGENIPAVIALTDPEGCPLSRFKDSLGNPTHILRIGESYKEKQRTIQAKKEVEQRRAGGYSRKYASKAKNLADDMVRNTARDLLYYAVTQDAMLIFENLSRGFGRQGKRTFMAERQYTRMEDWLTAKLAYNGLPSKTYLSKTLAQYTSKTCSNCGFTITSADYDRVLEKLKKTATGWMTTINGKELKVEGQITYYNRYKRQNVVKDLSVELDRLSEESVNNDISSWTKGRSGEALSLLKKRFSHRPVQEKFVCLNCGFETHADEQAALNIARSWLFLRSQEYKKYQTNKTTGNTDKRAFVETWQSFYRKKLKEVWKPAV

SEQ ID NO: 40753 - protein, 979 aa, synthetic construct
  REGION 1..979: note = engineered CasX variant
QEIKRINKIRRRLVKDSNTKKAGKTGPMKTLLVRVMTPDLRERLENLRKKPENIPQPISNTSRANLNKLLTDYTEMKKAILHVYWEEFQKDPVGLMSRVAQPASKKIDQNKLKPEMDEKGNLTTAGFACSQCGQPLFVYKLEQVSEKGKAYTNYFGRCNVAEHEKLILLAQLKPEKDSDEAVTYSLGKFGQRALDFYSIHVTKESTHPVKPLAQIAGNRYASSSPVGKALSDACMGTIASFLSKYQDIIIEHQKVVKGNQKRLESLRELAGKENLEYPSVTLPPQPHTKEGVDAYNEVIARVRMWVNLNLWQKLKLSRDDAKPLLRLKGFPSFPLVERQANEVDWWDMVCNVKKLINEKKEDGKVFWQNLAGYKRQEALRPYLSSEEDRKKGKKFARYQLGDLLLHLEKKHGEDWGKVYDEAWERIDKKVEGLSKHIKLEEERRSEDAQSKAALTDWLRAKASFVIEGLKEADKDEFCRCELKLQKWYGDLRGKPFAIEAENSILDISGFSKQYNCAFIWQKDGVKKLNLYLIINYFKGGKLRFKKIKPEAFEANRFYTVINKKSGEIVPMEVNFNFDDPNLIILPLAFGKRQGREFIWNDLLSLETGSLKLANGRVIEKTLYNRRTRQDEPALFVALTFERREVLDSSNIKPMNLIGVDRGENIPAVIALTDPEGCPLSRFKDSLGNPTHILRIGESYKEKQRTIQAKKEVEQRRAGGYSRKYASKAKNLADDMVRNTARDLLYYAVTQDAMLIFENLSRGFGRQGKRTFMAERQYTRMEDWLTAKLAYNGLPSKTYLSKTLAQYTSKTCSNCGFTITSADYDRVLEKLKKTATGWMTTINGKELKVEGQITYYNRYKRQNVVKDLSVELDRLSEESVNNDISSWTKGRSGEALSLLKKRFSHRPVQEKFVCLNCGFETHADEQAALNIARSWLFLRSQEYKKYQTNKTTGNTDKRAFVETWQSFYRKKLKEVWKPAV

SEQ ID NO: 40754 - protein, 979 aa, synthetic construct
  REGION 1..979: note = engineered CasX variant
QEIKRINKIRRRLVKDSNTKKAGKTGPMKTLLVRVMTPDLRERLENLRKKPENIPQPISNTSRANLNKLLTDYTEMKKAILHVYWEEFQKDPVGLMSRVAQPASKKIDQNKLKPEMDEKGNLTTAGFACSQCGQPLFVYKLEQVSEKGKAYTNYFGRCNVAEHEKLILLAQLKPEKDSDEAVTYSLGKFGQRALDFYSIHVTKESTHPVKPLAQIAGNRYASSTPVGKALSDACMGTIASFLSKYQDIIIEHQKVVKGNQKRLESLRELAGKENLEYPSVTLPPQPHTKEGVDAYNEVIARVRMWVNLNLWQKLKLSRDDAKPLLRLKGFPSFPLVERQANEVDWWDMVCNVKKLINEKKEDGKVFWQNLAGYKRQEALRPYLSSEEDRKKGKKFARYQLGDLLLHLEKKHGEDWGKVYDEAWERIDKKVEGLSKHIKLEEERRSEDAQSKAALTDWLRAKASFVIEGLKEADKDEFCRCELKLQKWYGDLRGKPFAIEAENSILDISGFSKQYNCAFIWQKDGVKKLNLYLIINYFKGGKLRFKKIKPEAFEANRFYTVINKKSGEIVPMEVNFNFDDPNLIILPLAFGKRQGREFIWNDLLSLETGSLKLANGRVIEKTLYNRRTRQDEPALFVALTFERREVLDSSNIKPMNLIGVDRGENIPAVIALTDPEGCPLSRFKDSLGNPTHILRIGESYKEKQRTIQAKKEVEQRRAGGYSRKYASKAKNLADDMVRNTARDLLYYAVTQDAMLIFENLSRGFGRQGKRTFMAERQYTRMEDWLTAKLAYNGLPSKTYLSKTLAQYTSKTCSNCGFTITSADYDRVLEKLKKTATGWMTTINGKELKVEGQITYYNRYKRQNVVKDLSVELDRLSEESVNNDISSWTKGRSGEALSLLKKRFSHRPVQEKFVCLNCGFETHADEQAALNIARSWLFLRSQEYKKYQTNKTTGNTDKRAFVETWQSFYRKKLKEVWKPAV

SEQ ID NO: 40755 - protein, 979 aa, synthetic construct
  REGION 1..979: note = engineered CasX variant
QEIKRINKIRRRLVKDSNTKKAGKTGPMKTLLVRVMTPDLRERLENLRKKPENIPQPISNTSRANLNKLLTDYTEMKKAILHVYWEEFQKDPVGLMSRVAQPASKKIDQNKLKPEMDEKGNLTTAGFACSQCGQPLFVYKLEQVSEKGKAYTNYFGRCNVAEHEKLILLAQLKPEKDSDEAVTYSLGKFGQRALDFYSIHVTKESTHPVKPLAQIAGNRYASSAPVGKALSDACMGTIASFLSKYQDIIIEHQKVVKGNQKRLESLRELAGKENLEYPSVTLPPQPHTKEGVDAYNEVIARVRMWVNLNLWQKLKLSRDDAKPLLRLKGFPSFPLVERQANEVDWWDMVCNVKKLINEKKEDGKVFWQNLAGYKRQEALRPYLSSEEDRKKGKKFARYQLGDLLLHLEKKHGEDWGKVYDEAWERIDKKVEGLSKHIKLEEERRSEDAQSKAALTDWLRAKASFVIEGLKEADKDEFCRCELKLQKWYGDLRGKPFAIEAENSILDISGFSKQYNCAFIWQKDGVKKLNLYLIINYFKGGKLRFKKIKPEAFEANRFYTVINKKSGEIVPMEVNFNFDDPNLIILPLAFGKRQGREFIWNDLLSLETGSLKLANGRVIEKTLYNRRTRQDEPALFVALTFERREVLDSSNIKPMNLIGVDRGENIPAVIALTDPEGCPLSRFKDSLGNPTHILRIGESYKEKQRTIQAKKEVEQRRAGGYSRKYASKAKNLADDMVRNTARDLLYYAVTQDAMLIFENLSRGFGRQGKRTFMAERQYTRMEDWLTAKLAYNGLPSKTYLSKTLAQYTSKTCSNCGFTITSADYDRVLEKLKKTATGWMTTINGKELKVEGQITYYNRYKRQNVVKDLSVELDRLSEESVNNDISSWTKGRSGEALSLLKKRFSHRPVQEKFVCLNCGFETHADEQAALNIARSWLFLRSQEYKKYQTNKTTGNTDKRAFVETWQSFYRKKLKEVWKPAV

SEQ ID NO: 40756 - protein, 979 aa, synthetic construct
  REGION 1..979: note = engineered CasX variant
QEIKRINKIRRRLVKDSNTKKAGKTGPMKTLLVRVMTPDLRERLENLRKKPENIPQPISNTSRANLNKLLTDYTEMKKAILHVYWEEFQKDPVGLMSRVAQPASKKIDQNKLKPEMDEKGNLTTAGFACSQCGQPLFVYKLEQVSEKGKAYTNYFGRCNVAEHEKLILLAQLKPEKDSDEAVTYSLGKFGQRALDFYSIHVTKESTHPVKPLAQIAGNRYASSVPVGKALSDACMGTIASFLSKYQDIIIEHQKVVKGNQKRLESLRELAGKENLEYPSVTLPPQPHTKEGVDAYNEVIARVRMWVNLNLWQKLKLSRDDAKPLLRLKGFPSFPLVERQANEVDWWDMVCNVKKLINEKKEDGKVFWQNLAGYKRQEALRPYLSSEEDRKKGKKFARYQLGDLLLHLEKKHGEDWGKVYDEAWERIDKKVEGLSKHIKLEEERRSEDAQSKAALTDWLRAKASFVIEGLKEADKDEFCRCELKLQKWYGDLRGKPFAIEAENSILDISGFSKQYNCAFIWQKDGVKKLNLYLIINYFKGGKLRFKKIKPEAFEANRFYTVINKKSGEIVPMEVNFNFDDPNLIILPLAFGKRQGREFIWNDLLSLETGSLKLANGRVIEKTLYNRRTRQDEPALFVALTFERREVLDSSNIKPMNLIGVDRGENIPAVIALTDPEGCPLSRFKDSLGNPTHILRIGESYKEKQRTIQAKKEVEQRRAGGYSRKYASKAKNLADDMVRNTARDLLYYAVTQDAMLIFENLSRGFGRQGKRTFMAERQYTRMEDWLTAKLAYNGLPSKTYLSKTLAQYTSKTCSNCGFTITSADYDRVLEKLKKTATGWMTTINGKELKVEGQITYYNRYKRQNVVKDLSVELDRLSEESVNNDISSWTKGRSGEALSLLKKRFSHRPVQEKFVCLNCGFETHADEQAALNIARSWLFLRSQEYKKYQTNKTTGNTDKRAFVETWQSFYRKKLKEVWKPAV

SEQ ID NO: 40757 - protein, 978 aa, synthetic construct
  REGION 1..978: note = engineered CasX variant
QEIKRINKIRRRLVKDSNTKKAGKTGPMKTLLVRVMTPDLRERLENLRKKPENIPQPISNTSRANLNKLLTDYTEMKKAILHVYWEEFQKDPVGLMSRVAQPASKKIDQNKLKPEMDEKGNLTTAGFACSQCGQPLFVYKLEQVSEKGKAYTNYFGRCNVAEHEKLIKLAQLKPEKDSDEAVTYSLGKFGQRALDFYSIHVTKESTHPVKPLAQIAGNRYASSPVGKALSDACMGTIASFLSKYQDIIIEHQKVVKGNQKRLESLRELAGKENLEYPSVTLPPQPHTKEGVDAYNEVIARVRMWVNLNLWQKLKLSRDDAKPLLRLKGFPSFPLVERQANEVDWWDMVCNVKKLINEKKEDGKVFWQNLAGYKRQEALRPYLSSEEDRKKGKKFARYQLGDLLLHLEKKHGEDWGKVYDEAWERIDKKVEGLSKHIKLEEERRSEDAQSKAALTDWLRAKASFVIEGLKEADKDEFCRCELKLQKWYGDLRGKPFAIEAENSILDISGFSKQYNCAFIWQKDGVKKLNLYLIINYFKGGKLRFKKIKPEAFEANRFYTVINKKSGEIVPMEVNFNFDDPNLIILPLAFGKRQGREFIWNDLLSLETGSLKLANGRVIEKTLYNRRTRQDEPALFVALTFERREVLDSSNIKPMNLIGVDRGENIPAVIALTDPEGCPLSRFKDSLGNPTHILRIGESYKEKQRTIQAKKEVEQRRAGGYSRKYASKAKNLADDMVRNTARDLLYYAVTQDAMLIFENLSRGFGRQGKRTFMAERQYTRMEDWLTAKLAYNGLPSKTYLSKTLAQYTSKTCSNCGFTITSADYDRVLEKLKKTATGWMTTINGKELKVEGQITYYNRYKRQNVVKDLSVELDRLSEESVNNDISSWTKGRSGEALSLLKKRFSHRPVQEKFVCLNCGFETHADEQAALNIARSWLFLRSQEYKKYQTNKTTGNTDKRAFVETWQSFYRKKLKEVWKPAV

SEQ ID NO: 40758 - protein, 979 aa, synthetic construct
  REGION 1..979: note = engineered CasX variant
QEIKRINKIRRRLVKDSNTKKAGKTGPMKTLLVRVMTPDLRERLENLRKKPENIPQPISNTSRANLNKLLTDYTEMKKAILHVYWEEFQKDPVGLMSRVAQPASKKIDQNKLKPEMDEKGNLTTAGFACSQCGQPLFVYKLEQVSEKGKAYTNYFGRCNVAEHEKLIQLAQLKPEKDSDEAVTYSLGKFGQRALDFYSIHVTKESTHPVKPLAQIAGNRYASSYPVGKALSDACMGTIASFLSKYQDIIIEHQKVVKGNQKRLESLRELAGKENLEYPSVTLPPQPHTKEGVDAYNEVIARVRMWVNLNLWQKLKLSRDDAKPLLRLKGFPSFPLVERQANEVDWWDMVCNVKKLINEKKEDGKVFWQNLAGYKRQEALRPYLSSEEDRKKGKKFARYQLGDLLLHLEKKHGEDWGKVYDEAWERIDKKVEGLSKHIKLEEERRSEDAQSKAALTDWLRAKASFVIEGLKEADKDEFCRCELKLQKWYGDLRGKPFAIEAENSILDISGFSKQYNCAFIWQKDGVKKLNLYLIINYFKGGKLRFKKIKPEAFEANRFYTVINKKSGEIVPMEVNFNFDDPNLIILPLAFGKRQGREFIWNDLLSLETGSLKLANGRVIEKTLYNRRTRQDEPALFVALTFERREVLDSSNIKPMNLIGVDRGENIPAVIALTDPEGCPLSRFKDSLGNPTHILRIGESYKEKQRTIQAKKEVEQRRAGGYSRKYASKAKNLADDMVRNTARDLLYYAVTQDAMLIFENLSRGFGRQGKRTFMAERQYTRMEDWLTAKLAYEGLPSKTYLSKTLAQYTSKTCSNCGFTITSADYDRVLEKLKKTATGWMTTINGKELKVEGQITYYNRYKRQNVVKDLSVELDRLSEESVNNDISSWTKGRSGEALSLLKKRFSHRPVQEKFVCLNCGFETHADEQAALNIARSWLFLRSQEYKKYQTNKTTGNTDKRAFVETWQSFYRKKLKEVWKPAV

SEQ ID NO: 40759 - protein, 979 aa, synthetic construct
  REGION 1..979: note = engineered CasX variant
QEIKRINKIRRRLVKDSNTKKAGKTGPMKTLLVRVMTPDLRERLENLRKKPENIPQPISNTSRANLNKLLTDYTEMKKAILHVYWEEFQKDPVGLMSRVAQPASKKIDQNKLKPEMDEKGNLTTAGFACSQCGQPLFVYKLEQVSEKGKAYTNYFGRCNVAEHEKLIQLAQLKPEKDSDEAVTYSLGKFGQRALDFYSIHVTKESTHPVKPLAQIAGNRYASSHPVGKALSDACMGTIASFLSKYQDIIIEHQKVVKGNQKRLESLRELAGKENLEYPSVTLPPQPHTKEGVDAYNEVIARVRMWVNLNLWQKLKLSRDDAKPLLRLKGFPSFPLVERQANEVDWWDMVCNVKKLINEKKEDGKVFWQNLAGYKRQEALRPYLSSEEDRKKGKKFARYQLGDLLLHLEKKHGEDWGKVYDEAWERIDKKVEGLSKHIKLEEERRSEDAQSKAALTDWLRAKASFVIEGLKEADKDEFCRCELKLQKWYGDLRGKPFAIEAENSILDISGFSKQYNCAFIWQKDGVKKLNLYLIINYFKGGKLRFKKIKPEAFEANRFYTVINKKSGEIVPMEVNFNFDDPNLIILPLAFGKRQGREFIWNDLLSLETGSLKLANGRVIEKTLYNRRTRQDEPALFVALTFERREVLDSSNIKPMNLIGVDRGENIPAVIALTDPEGCPLSRFKDSLGNPTHILRIGESYKEKQRTIQAKKEVEQRRAGGYSRKYASKAKNLADDMVRNTARDLLYYAVTQDAMLIFENLSRGFGRQGKRTFMAERQYTRMEDWLTAKLAYEGLPSKTYLSKTLAQYTSKTCSNCGFTITSADYDRVLEKLKKTATGWMTTINGKELKVEGQITYYNRYKRQNVVKDLSVELDRLSEESVNNDISSWTKGRSGEALSLLKKRFSHRPVQEKFVCLNCGFETHADEQAALNIARSWLFLRSQEYKKYQTNKTTGNTDKRAFVETWQSFYRKKLKEVWKPAV

SEQ ID NO: 40760 - protein, 979 aa, synthetic construct
  REGION 1..979: note = engineered CasX variant
QEIKRINKIRRRLVKDSNTKKAGKTGPMKTLLVRVMTPDLRERLENLRKKPENIPQPISNTSRANLNKLLTDYTEMKKAILHVYWEEFQKDPVGLMSRVAQPASKKIDQNKLKPEMDEKGNLTTAGFACSQCGQPLFVYKLEQVSEKGKAYTNYFGRCNVAEHEKLIQLAQLKPEKDSDEAVTYSLGKFGQRALDFYSIHVTKESTHPVKPLAQIAGNRYASSSPVGKALSDACMGTIASFLSKYQDIIIEHQKVVKGNQKRLESLRELAGKENLEYPSVTLPPQPHTKEGVDAYNEVIARVRMWVNLNLWQKLKLSRDDAKPLLRLKGFPSFPLVERQANEVDWWDMVCNVKKLINEKKEDGKVFWQNLAGYKRQEALRPYLSSEEDRKKGKKFARYQLGDLLLHLEKKHGEDWGKVYDEAWERIDKKVEGLSKHIKLEEERRSEDAQSKAALTDWLRAKASFVIEGLKEADKDEFCRCELKLQKWYGDLRGKPFAIEAENSILDISGFSKQYNCAFIWQKDGVKKLNLYLIINYFKGGKLRFKKIKPEAFEANRFYTVINKKSGEIVPMEVNFNFDDPNLIILPLAFGKRQGREFIWNDLLSLETGSLKLANGRVIEKTLYNRRTRQDEPALFVALTFERREVLDSSNIKPMNLIGVDRGENIPAVIALTDPEGCPLSRFKDSLGNPTHILRIGESYKEKQRTIQAKKEVEQRRAGGYSRKYASKAKNLADDMVRNTARDLLYYAVTQDAMLIFENLSRGFGRQGKRTFMAERQYTRMEDWLTAKLAYEGLPSKTYLSKTLAQYTSKTCSNCGFTITSADYDRVLEKLKKTATGWMTTINGKELKVEGQITYYNRYKRQNVVKDLSVELDRLSEESVNNDISSWTKGRSGEALSLLKKRFSHRPVQEKFVCLNCGFETHADEQAALNIARSWLFLRSQEYKKYQTNKTTGNTDKRAFVETWQSFYRKKLKEVWKPAV

SEQ ID NO: 40761 - protein, 979 aa, synthetic construct
  REGION 1..979: note = engineered CasX variant
QEIKRINKIRRRLVKDSNTKKAGKTGPMKTLLVRVMTPDLRERLENLRKKPENIPQPISNTSRANLNKLLTDYTEMKKAILHVYWEEFQKDPVGLMSRVAQPASKKIDQNKLKPEMDEKGNLTTAGFACSQCGQPLFVYKLEQVSEKGKAYTNYFGRCNVAEHEKLIQLAQLKPEKDSDEAVTYSLGKFGQRALDFYSIHVTKESTHPVKPLAQIAGNRYASSTPVGKALSDACMGTIASFLSKYQDIIIEHQKVVKGNQKRLESLRELAGKENLEYPSVTLPPQPHTKEGVDAYNEVIARVRMWVNLNLWQKLKLSRDDAKPLLRLKGFPSFPLVERQANEVDWWDMVCNVKKLINEKKEDGKVFWQNLAGYKRQEALRPYLSSEEDRKKGKKFARYQLGDLLLHLEKKHGEDWGKVYDEAWERIDKKVEGLSKHIKLEEERRSEDAQSKAALTDWLRAKASFVIEGLKEADKDEFCRCELKLQKWYGDLRGKPFAIEAENSILDISGFSKQYNCAFIWQKDGVKKLNLYLIINYFKGGKLRFKKIKPEAFEANRFYTVINKKSGEIVPMEVNFNFDDPNLIILPLAFGKRQGREFIWNDLLSLETGSLKLANGRVIEKTLYNRRTRQDEPALFVALTFERREVLDSSNIKPMNLIGVDRGENIPAVIALTDPEGCPLSRFKDSLGNPTHILRIGESYKEKQRTIQAKKEVEQRRAGGYSRKYASKAKNLADDMVRNTARDLLYYAVTQDAMLIFENLSRGFGRQGKRTFMAERQYTRMEDWLTAKLAYEGLPSKTYLSKTLAQYTSKTCSNCGFTITSADYDRVLEKLKKTATGWMTTINGKELKVEGQITYYNRYKRQNVVKDLSVELDRLSEESVNNDISSWTKGRSGEALSLLKKRFSHRPVQEKFVCLNCGFETHADEQAALNIARSWLFLRSQEYKKYQTNKTTGNTDKRAFVETWQSFYRKKLKEVWKPAV

SEQ ID NO: 40762 - protein, 979 aa, synthetic construct
  REGION 1..979: note = engineered CasX variant
QEIKRINKIRRRLVKDSNTKKAGKTGPMKTLLVRVMTPDLRERLENLRKKPENIPQPISNTSRANLNKLLTDYTEMKKAILHVYWEEFQKDPVGLMSRVAQPASKKIDQNKLKPEMDEKGNLTTAGFACSQCGQPLFVYKLEQVSEKGKAYTNYFGRCNVAEHEKLIQLAQLKPEKDSDEAVTYSLGKFGQRALDFYSIHVTKESTHPVKPLAQIAGNRYASSAPVGKALSDACMGTIASFLSKYQDIIIEHQKVVKGNQKRLESLRELAGKENLEYPSVTLPPQPHTKEGVDAYNEVIARVRMWVNLNLWQKLKLSRDDAKPLLRLKGFPSFPLVERQANEVDWWDMVCNVKKLINEKKEDGKVFWQNLAGYKRQEALRPYLSSEEDRKKGKKFARYQLGDLLLHLEKKHGEDWGKVYDEAWERIDKKVEGLSKHIKLEEERRSEDAQSKAALTDWLRAKASFVIEGLKEADKDEFCRCELKLQKWYGDLRGKPFAIEAENSILDISGFSKQYNCAFIWQKDGVKKLNLYLIINYFKGGKLRFKKIKPEAFEANRFYTVINKKSGEIVPMEVNFNFDDPNLIILPLAFGKRQGREFIWNDLLSLETGSLKLANGRVIEKTLYNRRTRQDEPALFVALTFERREVLDSSNIKPMNLIGVDRGENIPAVIALTDPEGCPLSRFKDSLGNPTHILRIGESYKEKQRTIQAKKEVEQRRAGGYSRKYASKAKNLADDMVRNTARDLLYYAVTQDAMLIFENLSRGFGRQGKRTFMAERQYTRMEDWLTAKLAYEGLPSKTYLSKTLAQYTSKTCSNCGFTITSADYDRVLEKLKKTATGWMTTINGKELKVEGQITYYNRYKRQNVVKDLSVELDRLSEESVNNDISSWTKGRSGEALSLLKKRFSHRPVQEKFVCLNCGFETHADEQAALNIARSWLFLRSQEYKKYQTNKTTGNTDKRAFVETWQSFYRKKLKEVWKPAV

SEQ ID NO: 40763 - protein, 979 aa, synthetic construct
  REGION 1..979: note = engineered CasX variant
QEIKRINKIRRRLVKDSNTKKAGKTGPMKTLLVRVMTPDLRERLENLRKKPENIPQPISNTSRANLNKLLTDYTEMKKAILHVYWEEFQKDPVGLMSRVAQPASKKIDQNKLKPEMDEKGNLTTAGFACSQCGQPLFVYKLEQVSEKGKAYTNYFGRCNVAEHEKLIQLAQLKPEKDSDEAVTYSLGKFGQRALDFYSIHVTKESTHPVKPLAQIAGNRYASSVPVGKALSDACMGTIASFLSKYQDIIIEHQKVVKGNQKRLESLRELAGKENLEYPSVTLPPQPHTKEGVDAYNEVIARVRMWVNLNLWQKLKLSRDDAKPLLRLKGFPSFPLVERQANEVDWWDMVCNVKKLINEKKEDGKVFWQNLAGYKRQEALRPYLSSEEDRKKGKKFARYQLGDLLLHLEKKHGEDWGKVYDEAWERIDKKVEGLSKHIKLEEERRSEDAQSKAALTDWLRAKASFVIEGLKEADKDEFCRCELKLQKWYGDLRGKPFAIEAENSILDISGFSKQYNCAFIWQKDGVKKLNLYLIINYFKGGKLRFKKIKPEAFEANRFYTVINKKSGEIVPMEVNFNFDDPNLIILPLAFGKRQGREFIWNDLLSLETGSLKLANGRVIEKTLYNRRTRQDEPALFVALTFERREVLDSSNIKPMNLIGVDRGENIPAVIALTDPEGCPLSRFKDSLGNPTHILRIGESYKEKQRTIQAKKEVEQRRAGGYSRKYASKAKNLADDMVRNTARDLLYYAVTQDAMLIFENLSRGFGRQGKRTFMAERQYTRMEDWLTAKLAYEGLPSKTYLSKTLAQYTSKTCSNCGFTITSADYDRVLEKLKKTATGWMTTINGKELKVEGQITYYNRYKRQNVVKDLSVELDRLSEESVNNDISSWTKGRSGEALSLLKKRFSHRPVQEKFVCLNCGFETHADEQAALNIARSWLFLRSQEYKKYQTNKTTGNTDKRAFVETWQSFYRKKLKEVWKPAV

SEQ ID NO: 40764 - protein, 979 aa, synthetic construct
  REGION 1..979: note = engineered CasX variant
QEIKRINKIRRRLVKDSNTKKAGKTGPMKTLLVRVMTPDLRERLENLRKKPENIPQPISNTSRANLNKLLTDYTEMKKAILHVYWEEFQKDPVGLMSRVAQPASKKIDQNKLKPEMDEKGNLTTAGFACSQCGQPLFVYKLEQVSEKGKAYTNYFGRCNVAEHEKLIQKLAQLKPEKDSDEAVTYSLGKFGQRALDFYSIHVTKESTHPVKPLAQIAGNRYASSPVGKALSDACMGTIASFLSKYQDIIIEHQKVVKGNQKRLESLRELAGKENLEYPSVTLPPQPHTKEGVDAYNEVIARVRMWVNLNLWQKLKLSRDDAKPLLRLKGFPSFPLVERQANEVDWWDMVCNVKKLINEKKEDGKVFWQNLAGYKRQEALRPYLSSEEDRKKGKKFARYQLGDLLLHLEKKHGEDWGKVYDEAWERIDKKVEGLSKHIKLEEERRSEDAQSKAALTDWLRAKASFVIEGLKEADKDEFCRCELKLQKWYGDLRGKPFAIEAENSILDISGFSKQYNCAFIWQKDGVKKLNLYLIINYFKGGKLRFKKIKPEAFEANRFYTVINKKSGEIVPMEVNFNFDDPNLIILPLAFGKRQGREFIWNDLLSLETGSLKLANGRVIEKTLYNRRTRQDEPALFVALTFERREVLDSSNIKPMNLIGVDRGENIPAVIALTDPEGCPLSRFKDSLGNPTHILRIGESYKEKQRTIQAKKEVEQRRAGGYSRKYASKAKNLADDMVRNTARDLLYYAVTQDAMLIFENLSRGFGRQGKRTFMAERQYTRMEDWLTAKLAYEGLPSKTYLSKTLAQYTSKTCSNCGFTITSADYDRVLEKLKKTATGWMTTINGKELKVEGQITYYNRYKRQNVVKDLSVELDRLSEESVNNDISSWTKGRSGEALSLLKKRFSHRPVQEKFVCLNCGFETHADEQAALNIARSWLFLRSQEYKKYQTNKTTGNTDKRAFVETWQSFYRKKLKEVWKPAV

SEQ ID NO: 40765 - protein, 979 aa, synthetic construct
  REGION 1..979: note = engineered CasX variant
QEIKRINKIRRRLVKDSNTKKAGKTGPMKTLLVRVMTPDLRERLENLRKKPENIPQPISNTSRANLNKLLTDYTEMKKAILHVYWEEFQKDPVGLMSRVAQPASKKIDQNKLKPEMDEKGNLTTAGFACSQCGQPLFVYKLEQVSEKGKAYTNYFGRCNVAEHEKLILLAQLKPEKDSDEAVTYSLGKFGQRALDFYSIHVTKESTHPVKPLAQIAGNRYASSYPVGKALSDACMGTIASFLSKYQDIIIEHQKVVKGNQKRLESLRELAGKENLEYPSVTLPPQPHTKEGVDAYNEVIARVRMWVNLNLWQKLKLSRDDAKPLLRLKGFPSFPLVERQANEVDWWDMVCNVKKLINEKKEDGKVFWQNLAIYKRQEALRPYLSSEEDRKKGKKFARYQLGDLLLHLEKKHGEDWGKVYDEAWERIDKKVEGLSKHIKLEEERRSEDAQSKAALTDWLRAKASFVIEGLKEADKDEFCRCELKLQKWYGDLRGKPFAIEAENSILDISGFSKQYNCAFIWQKDGVKKLNLYLIINYFKGGKLRFKKIKPEAFEANRFYTVINKKSGEIVPMEVNFNFDDPNLIILPLAFGKRQGREFIWNDLLSLETGSLKLANGRVIEKTLYNRRTRQDEPALFVALTFERREVLDSSNIKPMNLIGVDRGENIPAVIALTDPEGCPLSRFKDSLGNPTHILRIGESYKEKQRTIQAKKEVEQRRAGGYSRKYASKAKNLADDMVRNTARDLLYYAVTQDAMLIFENLSRGFGRQGKRTFMAERQYTRMEDWLTAKLAYEGLPSKTYLSKTLAQYTSKTCSNCGFTITSADYDRVLEKLKKTATGWMTTINGKELKVEGQITYYNRYKRQNVVKDLSVELDRLSEESVNNDISSWTKGRSGEALSLLKKRFSHRPVQEKFVCLNCGFETHADEQAALNIARSWLFLRSQEYKKYQTNKTTGNTDKRAFVETWQSFYRKKLKEVWKPAV

SEQ ID NO: 40766 - protein, 979 aa, synthetic construct
  REGION 1..979: note = engineered CasX variant
QEIKRINKIRRRLVKDSNTKKAGKTGPMKTLLVRVMTPDLRERLENLRKKPENIPQPISNTSRANLNKLLTDYTEMKKAILHVYWEEFQKDPVGLMSRVAQPASKKIDQNKLKPEMDEKGNLTTAGFACSQCGQPLFVYKLEQVSEKGKAYTNYFGRCNVAEHEKLILLAQLKPEKDSDEAVTYSLGKFGQRALDFYSIHVTKESTHPVKPLAQIAGNRYASSHPVGKALSDACMGTIASFLSKYQDIIIEHQKVVKGNQKRLESLRELAGKENLEYPSVTLPPQPHTKEGVDAYNEVIARVRMWVNLNLWQKLKLSRDDAKPLLRLKGFPSFPLVERQANEVDWWDMVCNVKKLINEKKEDGKVFWQNLAIYKRQEALRPYLSSEEDRKKGKKFARYQLGDLLLHLEKKHGEDWGKVYDEAWERIDKKVEGLSKHIKLEEERRSEDAQSKAALTDWLRAKASFVIEGLKEADKDEFCRCELKLQKWYGDLRGKPFAIEAENSILDISGFSKQYNCAFIWQKDGVKKLNLYLIINYFKGGKLRFKKIKPEAFEANRFYTVINKKSGEIVPMEVNFNFDDPNLIILPLAFGKRQGREFIWNDLLSLETGSLKLANGRVIEKTLYNRRTRQDEPALFVALTFERREVLDSSNIKPMNLIGVDRGENIPAVIALTDPEGCPLSRFKDSLGNPTHILRIGESYKEKQRTIQAKKEVEQRRAGGYSRKYASKAKNLADDMVRNTARDLLYYAVTQDAMLIFENLSRGFGRQGKRTFMAERQYTRMEDWLTAKLAYEGLPSKTYLSKTLAQYTSKTCSNCGFTITSADYDRVLEKLKKTATGWMTTINGKELKVEGQITYYNRYKRQNVVKDLSVELDRLSEESVNNDISSWTKGRSGEALSLLKKRFSHRPVQEKFVCLNCGFETHADEQAALNIARSWLFLRSQEYKKYQTNKTTGNTDKRAFVETWQSFYRKKLKEVWKPAV

SEQ ID NO: 40767 - protein, 979 aa, synthetic construct
  REGION 1..979: note = engineered CasX variant
QEIKRINKIRRRLVKDSNTKKAGKTGPMKTLLVRVMTPDLRERLENLRKKPENIPQPISNTSRANLNKLLTDYTEMKKAILHVYWEEFQKDPVGLMSRVAQPASKKIDQNKLKPEMDEKGNLTTAGFACSQCGQPLFVYKLEQVSEKGKAYTNYFGRCNVAEHEKLILLAQLKPEKDSDEAVTYSLGKFGQRALDFYSIHVTKESTHPVKPLAQIAGNRYASSSPVGKALSDACMGTIASFLSKYQDIIIEHQKVVKGNQKRLESLRELAGKENLEYPSVTLPPQPHTKEGVDAYNEVIARVRMWVNLNLWQKLKLSRDDAKPLLRLKGFPSFPLVERQANEVDWWDMVCNVKKLINEKKEDGKVFWQNLAIYKRQEALRPYLSSEEDRKKGKKFARYQLGDLLLHLEKKHGEDWGKVYDEAWERIDKKVEGLSKHIKLEEERRSEDAQSKAALTDWLRAKASFVIEGLKEADKDEFCRCELKLQKWYGDLRGKPFAIEAENSILDISGFSKQYNCAFIWQKDGVKKLNLYLIINYFKGGKLRFKKIKPEAFEANRFYTVINKKSGEIVPMEVNFNFDDPNLIILPLAFGKRQGREFIWNDLLSLETGSLKLANGRVIEKTLYNRRTRQDEPALFVALTFERREVLDSSNIKPMNLIGVDRGENIPAVIALTDPEGCPLSRFKDSLGNPTHILRIGESYKEKQRTIQAKKEVEQRRAGGYSRKYASKAKNLADDMVRNTARDLLYYAVTQDAMLIFENLSRGFGRQGKRTFMAERQYTRMEDWLTAKLAYEGLPSKTYLSKTLAQYTSKTCSNCGFTITSADYDRVLEKLKKTATGWMTTINGKELKVEGQITYYNRYKRQNVVKDLSVELDRLSEESVNNDISSWTKGRSGEALSLLKKRFSHRPVQEKFVCLNCGFETHADEQAALNIARSWLFLRSQEYKKYQTNKTTGNTDKRAFVETWQSFYRKKLKEVWKPAV

SEQ ID NO: 40768 - protein, 979 aa, synthetic construct
  REGION 1..979: note = engineered CasX variant
QEIKRINKIRRRLVKDSNTKKAGKTGPMKTLLVRVMTPDLRERLENLRKKPENIPQPISNTSRANLNKLLTDYTEMKKAILHVYWEEFQKDPVGLMSRVAQPASKKIDQNKLKPEMDEKGNLTTAGFACSQCGQPLFVYKLEQVSEKGKAYTNYFGRCNVAEHEKLILLAQLKPEKDSDEAVTYSLGKFGQRALDFYSIHVTKESTHPVKPLAQIAGNRYASSTPVGKALSDACMGTIASFLSKYQDIIIEHQKVVKGNQKRLESLRELAGKENLEYPSVTLPPQPHTKEGVDAYNEVIARVRMWVNLNLWQKLKLSRDDAKPLLRLKGFPSFPLVERQANEVDWWDMVCNVKKLINEKKEDGKVFWQNLAIYKRQEALRPYLSSEEDRKKGKKFARYQLGDLLLHLEKKHGEDWGKVYDEAWERIDKKVEGLSKHIKLEEERRSEDAQSKAALTDWLRAKASFVIEGLKEADKDEFCRCELKLQKWYGDLRGKPFAIEAENSILDISGFSKQYNCAFIWQKDGVKKLNLYLIINYFKGGKLRFKKIKPEAFEANRFYTVINKKSGEIVPMEVNFNFDDPNLIILPLAFGKRQGREFIWNDLLSLETGSLKLANGRVIEKTLYNRRTRQDEPALFVALTFERREVLDSSNIKPMNLIGVDRGENIPAVIALTDPEGCPLSRFKDSLGNPTHILRIGESYKEKQRTIQAKKEVEQRRAGGYSRKYASKAKNLADDMVRNTARDLLYYAVTQDAMLIFENLSRGFGRQGKRTFMAERQYTRMEDWLTAKLAYEGLPSKTYLSKTLAQYTSKTCSNCGFTITSADYDRVLEKLKKTATGWMTTINGKELKVEGQITYYNRYKRQNVVKDLSVELDRLSEESVNNDISSWTKGRSGEALSLLKKRFSHRPVQEKFVCLNCGFETHADEQAALNIARSWLFLRSQEYKKYQTNKTTGNTDKRAFVETWQSFYRKKLKEVWKPAV

SEQ ID NO: 40769 - protein, 979 aa, synthetic construct
  REGION 1..979: note = engineered CasX variant
QEIKRINKIRRRLVKDSNTKKAGKTGPMKTLLVRVMTPDLRERLENLRKKPENIPQPISNTSRANLNKLLTDYTEMKKAILHVYWEEFQKDPVGLMSRVAQPASKKIDQNKLKPEMDEKGNLTTAGFACSQCGQPLFVYKLEQVSEKGKAYTNYFGRCNVAEHEKLILLAQLKPEKDSDEAVTYSLGKFGQRALDFYSIHVTKESTHPVKPLAQIAGNRYASSAPVGKALSDACMGTIASFLSKYQDIIIEHQKVVKGNQKRLESLRELAGKENLEYPSVTLPPQPHTKEGVDAYNEVIARVRMWVNLNLWQKLKLSRDDAKPLLRLKGFPSFPLVERQANEVDWWDMVCNVKKLINEKKEDGKVFWQNLAIYKRQEALRPYLSSEEDRKKGKKFARYQLGDLLLHLEKKHGEDWGKVYDEAWERIDKKVEGLSKHIKLEEERRSEDAQSKAALTDWLRAKASFVIEGLKEADKDEFCRCELKLQKWYGDLRGKPFAIEAENSILDISGFSKQYNCAFIWQKDGVKKLNLYLIINYFKGGKLRFKKIKPEAFEANRFYTVINKKSGEIVPMEVNFNFDDPNLIILPLAFGKRQGREFIWNDLLSLETGSLKLANGRVIEKTLYNRRTRQDEPALFVALTFERREVLDSSNIKPMNLIGVDRGENIPAVIALTDPEGCPLSRFKDSLGNPTHILRIGESYKEKQRTIQAKKEVEQRRAGGYSRKYASKAKNLADDMVRNTARDLLYYAVTQDAMLIFENLSRGFGRQGKRTFMAERQYTRMEDWLTAKLAYEGLPSKTYLSKTLAQYTSKTCSNCGFTITSADYDRVLEKLKKTATGWMTTINGKELKVEGQITYYNRYKRQNVVKDLSVELDRLSEESVNNDISSWTKGRSGEALSLLKKRFSHRPVQEKFVCLNCGFETHADEQAALNIARSWLFLRSQEYKKYQTNKTTGNTDKRAFVETWQSFYRKKLKEVWKPAV

SEQ ID NO: 40770 - protein, 979 aa, synthetic construct
  REGION 1..979: note = engineered CasX variant
QEIKRINKIRRRLVKDSNTKKAGKTGPMKTLLVRVMTPDLRERLENLRKKPENIPQPISNTSRANLNKLLTDYTEMKKAILHVYWEEFQKDPVGLMSRVAQPASKKIDQNKLKPEMDEKGNLTTAGFACSQCGQPLFVYKLEQVSEKGKAYTNYFGRCNVAEHEKLILLAQLKPEKDSDEAVTYSLGKFGQRALDFYSIHVTKESTHPVKPLAQIAGNRYASSVPVGKALSDACMGTIASFLSKYQDIIIEHQKVVKGNQKRLESLRELAGKENLEYPSVTLPPQPHTKEGVDAYNEVIARVRMWVNLNLWQKLKLSRDDAKPLLRLKGFPSFPLVERQANEVDWWDMVCNVKKLINEKKEDGKVFWQNLAIYKRQEALRPYLSSEEDRKKGKKFARYQLGDLLLHLEKKHGEDWGKVYDEAWERIDKKVEGLSKHIKLEEERRSEDAQSKAALTDWLRAKASFVIEGLKEADKDEFCRCELKLQKWYGDLRGKPFAIEAENSILDISGFSKQYNCAFIWQKDGVKKLNLYLIINYFKGGKLRFKKIKPEAFEANRFYTVINKKSGEIVPMEVNFNFDDPNLIILPLAFGKRQGREFIWNDLLSLETGSLKLANGRVIEKTLYNRRTRQDEPALFVALTFERREVLDSSNIKPMNLIGVDRGENIPAVIALTDPEGCPLSRFKDSLGNPTHILRIGESYKEKQRTIQAKKEVEQRRAGGYSRKYASKAKNLADDMVRNTARDLLYYAVTQDAMLIFENLSRGFGRQGKRTFMAERQYTRMEDWLTAKLAYEGLPSKTYLSKTLAQYTSKTCSNCGFTITSADYDRVLEKLKKTATGWMTTINGKELKVEGQITYYNRYKRQNVVKDLSVELDRLSEESVNNDISSWTKGRSGEALSLLKKRFSHRPVQEKFVCLNCGFETHADEQAALNIARSWLFLRSQEYKKYQTNKTTGNTDKRAFVETWQSFYRKKLKEVWKPAV

SEQ ID NO: 40771 - protein, 978 aa, synthetic construct
  REGION 1..978: note = engineered CasX variant
QEIKRINKIRRRLVKDSNTKKAGKTGPMKTLLVRVMTPDLRERLENLRKKPENIPQPISNTSRANLNKLLTDYTEMKKAILHVYWEEFQKDPVGLMSRVAQPASKKIDQNKLKPEMDEKGNLTTAGFACSQCGQPLFVYKLEQVSEKGKAYTNYFGRCNVAEHEKLIKLAQLKPEKDSDEAVTYSLGKFGQRALDFYSIHVTKESTHPVKPLAQIAGNRYASSPVGKALSDACMGTIASFLSKYQDIIIEHQKVVKGNQKRLESLRELAGKENLEYPSVTLPPQPHTKEGVDAYNEVIARVRMWVNLNLWQKLKLSRDDAKPLLRLKGFPSFPLVERQANEVDWWDMVCNVKKLINEKKEDGKVFWQNLAIYKRQEALRPYLSSEEDRKKGKKFARYQLGDLLLHLEKKHGEDWGKVYDEAWERIDKKVEGLSKHIKLEEERRSEDAQSKAALTDWLRAKASFVIEGLKEADKDEFCRCELKLQKWYGDLRGKPFAIEAENSILDISGFSKQYNCAFIWQKDGVKKLNLYLIINYFKGGKLRFKKIKPEAFEANRFYTVINKKSGEIVPMEVNFNFDDPNLIILPLAFGKRQGREFIWNDLLSLETGSLKLANGRVIEKTLYNRRTRQDEPALFVALTFERREVLDSSNIKPMNLIGVDRGENIPAVIALTDPEGCPLSRFKDSLGNPTHILRIGESYKEKQRTIQAKKEVEQRRAGGYSRKYASKAKNLADDMVRNTARDLLYYAVTQDAMLIFENLSRGFGRQGKRTFMAERQYTRMEDWLTAKLAYEGLPSKTYLSKTLAQYTSKTCSNCGFTITSADYDRVLEKLKKTATGWMTTINGKELKVEGQITYYNRYKRQNVVKDLSVELDRLSEESVNNDISSWTKGRSGEALSLLKKRFSHRPVQEKFVCLNCGFETHADEQAALNIARSWLFLRSQEYKKYQTNKTTGNTDKRAFVETWQSFYRKKLKEVWKPAV

SEQ ID NO: 40772 - protein, 979 aa, synthetic construct
  REGION 1..979: note = engineered CasX variant
QEIKRINKIRRRLVKDSNTKKAGKTGPMKTLLVRVMTPDLRERLENLRKKPENIPQPISNTSRANLNKLLTDYTEMKKAILHVYWEEFQKDPVGLMSRVAQPASKKIDQNKLKPEMDEKGNLTTAGFACSQCGQPLFVYKLEQVSEKGKAYTNYFGRCNVAEHEKLILLAQLKPEKDSDEAVTYSLGKFGQRALDFYSIHVTKESTHPVKPLAQIAGNRYASSYPVGKALSDACMGTIASFLSKYQDIIIEHQKVVKGNQKRLESLRELAGKENLEYPSVTLPPQPHTKEGVDAYNEVIARVRMWVNLNLWQKLKLSRDDAKPLLRLKGFPSFPLVERQANEVDWWDMVCNVKKLINEKKEDGKVFWQNLAGYKRQEALRPYLSSEEDREKGKKFARYQLGDLLLHLEKKHGEDWGKVYDEAWERIDKKVEGLSKHIKLEEERRSEDAQSKAALTDWLRAKASFVIEGLKEADKDEFCRCELKLQKWYGDLRGKPFAIEAENSILDISGFSKQYNCAFIWQKDGVKKLNLYLIINYFKGGKLRFKKIKPEAFEANRFYTVINKKSGEIVPMEVNFNFDDPNLIILPLAFGKRQGREFIWNDLLSLETGSLKLANGRVIEKTLYNRRTRQDEPALFVALTFERREVLDSSNIKPMNLIGVDRGENIPAVIALTDPEGCPLSRFKDSLGNPTHILRIGESYKEKQRTIQAKKEVEQRRAGGYSRKYASKAKNLADDMVRNTARDLLYYAVTQDAMLIFENLSRGFGRQGKRTFMAERQYTRMEDWLTAKLAYEGLPSKTYLSKTLAQYTSKTCSNCGFTITSADYDRVLEKLKKTATGWMTTINGKELKVEGQITYYNRYKRQNVVKDLSVELDRLSEESVNNDISSWTKGRSGEALSLLKKRFSHRPVQEKFVCLNCGFETHADEQAALNIARSWLFLRSQEYKKYQTNKTTGNTDKRAFVETWQSFYRKKLKEVWKPAV

SEQ ID NO: 40773 - protein, 979 aa, synthetic construct
  REGION 1..979: note = engineered CasX variant
QEIKRINKIRRRLVKDSNTKKAGKTGPMKTLLVRVMTPDLRERLENLRKKPENIPQPISNTSRANLNKLLTDYTEMKKAILHVYWEEFQKDPVGLMSRVAQPASKKIDQNKLKPEMDEKGNLTTAGFACSQCGQPLFVYKLEQVSEKGKAYTNYFGRCNVAEHEKLILLAQLKPEKDSDEAVTYSLGKFGQRALDFYSIHVTKESTHPVKPLAQIAGNRYASSHPVGKALSDACMGTIASFLSKYQDIIIEHQKVVKGNQKRLESLRELAGKENLEYPSVTLPPQPHTKEGVDAYNEVIARVRMWVNLNLWQKLKLSRDDAKPLLRLKGFPSFPLVERQANEVDWWDMVCNVKKLINEKKEDGKVFWQNLAGYKRQEALRPYLSSEEDREKGKKFARYQLGDLLLHLEKKHGEDWGKVYDEAWERIDKKVEGLSKHIKLEEERRSEDAQSKAALTDWLRAKASFVIEGLKEADKDEFCRCELKLQKWYGDLRGKPFAIEAENSILDISGFSKQYNCAFIWQKDGVKKLNLYLIINYFKGGKLRFKKIKPEAFEANRFYTVINKKSGEIVPMEVNFNFDDPNLIILPLAFGKRQGREFIWNDLLSLETGSLKLANGRVIEKTLYNRRTRQDEPALFVALTFERREVLDSSNIKPMNLIGVDRGENIPAVIALTDPEGCPLSRFKDSLGNPTHILRIGESYKEKQRTIQAKKEVEQRRAGGYSRKYASKAKNLADDMVRNTARDLLYYAVTQDAMLIFENLSRGFGRQGKRTFMAERQYTRMEDWLTAKLAYEGLPSKTYLSKTLAQYTSKTCSNCGFTITSADYDRVLEKLKKTATGWMTTINGKELKVEGQITYYNRYKRQNVVKDLSVELDRLSEESVNNDISSWTKGRSGEALSLLKKRFSHRPVQEKFVCLNCGFETHADEQAALNIARSWLFLRSQEYKKYQTNKTTGNTDKRAFVETWQSFYRKKLKEVWKPAV

SEQ ID NO: 40774 - protein, 979 aa, synthetic construct
  REGION 1..979: note = engineered CasX variant
QEIKRINKIRRRLVKDSNTKKAGKTGPMKTLLVRVMTPDLRERLENLRKKPENIPQPISNTSRANLNKLLTDYTEMKKAILHVYWEEFQKDPVGLMSRVAQPASKKIDQNKLKPEMDEKGNLTTAGFACSQCGQPLFVYKLEQVSEKGKAYTNYFGRCNVAEHEKLILLAQLKPEKDSDEAVTYSLGKFGQRALDFYSIHVTKESTHPVKPLAQIAGNRYASSSPVGKALSDACMGTIASFLSKYQDIIIEHQKVVKGNQKRLESLRELAGKENLEYPSVTLPPQPHTKEGVDAYNEVIARVRMWVNLNLWQKLKLSRDDAKPLLRLKGFPSFPLVERQANEVDWWDMVCNVKKLINEKKEDGKVFWQNLAGYKRQEALRPYLSSEEDREKGKKFARYQLGDLLLHLEKKHGEDWGKVYDEAWERIDKKVEGLSKHIKLEEERRSEDAQSKAALTDWLRAKASFVIEGLKEADKDEFCRCELKLQKWYGDLRGKPFAIEAENSILDISGFSKQYNCAFIWQKDGVKKLNLYLIINYFKGGKLRFKKIKPEAFEANRFYTVINKKSGEIVPMEVNFNFDDPNLIILPLAFGKRQGREFIWNDLLSLETGSLKLANGRVIEKTLYNRRTRQDEPALFVALTFERREVLDSSNIKPMNLIGVDRGENIPAVIALTDPEGCPLSRFKDSLGNPTHILRIGESYKEKQRTIQAKKEVEQRRAGGYSRKYASKAKNLADDMVRNTARDLLYYAVTQDAMLIFENLSRGFGRQGKRTFMAERQYTRMEDWLTAKLAYEGLPSKTYLSKTLAQYTSKTCSNCGFTITSADYDRVLEKLKKTATGWMTTINGKELKVEGQITYYNRYKRQNVVKDLSVELDRLSEESVNNDISSWTKGRSGEALSLLKKRFSHRPVQEKFVCLNCGFETHADEQAALNIARSWLFLRSQEYKKYQTNKTTGNTDKRAFVETWQSFYRKKLKEVWKPAV

SEQ ID NO: 40775 - protein, 979 aa, synthetic construct
  REGION 1..979: note = engineered CasX variant
QEIKRINKIRRRLVKDSNTKKAGKTGPMKTLLVRVMTPDLRERLENLRKKPENIPQPISNTSRANLNKLLTDYTEMKKAILHVYWEEFQKDPVGLMSRVAQPASKKIDQNKLKPEMDEKGNLTTAGFACSQCGQPLFVYKLEQVSEKGKAYTNYFGRCNVAEHEKLILLAQLKPEKDSDEAVTYSLGKFGQRALDFYSIHVTKESTHPVKPLAQIAGNRYASSTPVGKALSDACMGTIASFLSKYQDIIIEHQKVVKGNQKRLESLRELAGKENLEYPSVTLPPQPHTKEGVDAYNEVIARVRMWVNLNLWQKLKLSRDDAKPLLRLKGFPSFPLVERQANEVDWWDMVCNVKKLINEKKEDGKVFWQNLAGYKRQEALRPYLSSEEDREKGKKFARYQLGDLLLHLEKKHGEDWGKVYDEAWERIDKKVEGLSKHIKLEEERRSEDAQSKAALTDWLRAKASFVIEGLKEADKDEFCRCELKLQKWYGDLRGKPFAIEAENSILDISGFSKQYNCAFIWQKDGVKKLNLYLIINYFKGGKLRFKKIKPEAFEANRFYTVINKKSGEIVPMEVNFNFDDPNLIILPLAFGKRQGREFIWNDLLSLETGSLKLANGRVIEKTLYNRRTRQDEPALFVALTFERREVLDSSNIKPMNLIGVDRGENIPAVIALTDPEGCPLSRFKDSLGNPTHILRIGESYKEKQRTIQAKKEVEQRRAGGYSRKYASKAKNLADDMVRNTARDLLYYAVTQDAMLIFENLSRGFGRQGKRTFMAERQYTRMEDWLTAKLAYEGLPSKTYLSKTLAQYTSKTCSNCGFTITSADYDRVLEKLKKTATGWMTTINGKELKVEGQITYYNRYKRQNVVKDLSVELDRLSEESVNNDISSWTKGRSGEALSLLKKRFSHRPVQEKFVCLNCGFETHADEQAALNIARSWLFLRSQEYKKYQTNKTTGNTDKRAFVETWQSFYRKKLKEVWKPAV

SEQ ID NO: 40776 - protein, 979 aa, synthetic construct
  REGION 1..979: note = engineered CasX variant
QEIKRINKIRRRLVKDSNTKKAGKTGPMKTLLVRVMTPDLRERLENLRKKPENIPQPISNTSRANLNKLLTDYTEMKKAILHVYWEEFQKDPVGLMSRVAQPASKKIDQNKLKPEMDEKGNLTTAGFACSQCGQPLFVYKLEQVSEKGKAYTNYFGRCNVAEHEKLILLAQLKPEKDSDEAVTYSLGKFGQRALDFYSIHVTKESTHPVKPLAQIAGNRYASSAPVGKALSDACMGTIASFLSKYQDIIIEHQKVVKGNQKRLESLRELAGKENLEYPSVTLPPQPHTKEGVDAYNEVIARVRMWVNLNLWQKLKLSRDDAKPLLRLKGFPSFPLVERQANEVDWWDMVCNVKKLINEKKEDGKVFWQNLAGYKRQEALRPYLSSEEDREKGKKFARYQLGDLLLHLEKKHGEDWGKVYDEAWERIDKKVEGLSKHIKLEEERRSEDAQSKAALTDWLRAKASFVIEGLKEADKDEFCRCELKLQKWYGDLRGKPFAIEAENSILDISGFSKQYNCAFIWQKDGVKKLNLYLIINYFKGGKLRFKKIKPEAFEANRFYTVINKKSGEIVPMEVNFNFDDPNLIILPLAFGKRQGREFIWNDLLSLETGSLKLANGRVIEKTLYNRRTRQDEPALFVALTFERREVLDSSNIKPMNLIGVDRGENIPAVIALTDPEGCPLSRFKDSLGNPTHILRIGESYKEKQRTIQAKKEVEQRRAGGYSRKYASKAKNLADDMVRNTARDLLYYAVTQDAMLIFENLSRGFGRQGKRTFMAERQYTRMEDWLTAKLAYEGLPSKTYLSKTLAQYTSKTCSNCGFTITSADYDRVLEKLKKTATGWMTTINGKELKVEGQITYYNRYKRQNVVKDLSVELDRLSEESVNNDISSWTKGRSGEALSLLKKRFSHRPVQEKFVCLNCGFETHADEQAALNIARSWLFLRSQEYKKYQTNKTTGNTDKRAFVETWQSFYRKKLKEVWKPAV

SEQ ID NO: 40777 - protein, 979 aa, synthetic construct
  REGION 1..979: note = engineered CasX variant
QEIKRINKIRRRLVKDSNTKKAGKTGPMKTLLVRVMTPDLRERLENLRKKPENIPQPISNTSRANLNKLLTDYTEMKKAILHVYWEEFQKDPVGLMSRVAQPASKKIDQNKLKPEMDEKGNLTTAGFACSQCGQPLFVYKLEQVSEKGKAYTNYFGRCNVAEHEKLILLAQLKPEKDSDEAVTYSLGKFGQRALDFYSIHVTKESTHPVKPLAQIAGNRYASSVPVGKALSDACMGTIASFLSKYQDIIIEHQKVVKGNQKRLESLRELAGKENLEYPSVTLPPQPHTKEGVDAYNEVIARVRMWVNLNLWQKLKLSRDDAKPLLRLKGFPSFPLVERQANEVDWWDMVCNVKKLINEKKEDGKVFWQNLAGYKRQEALRPYLSSEEDREKGKKFARYQLGDLLLHLEKKHGEDWGKVYDEAWERIDKKVEGLSKHIKLEEERRSEDAQSKAALTDWLRAKASFVIEGLKEADKDEFCRCELKLQKWYGDLRGKPFAIEAENSILDISGFSKQYNCAFIWQKDGVKKLNLYLIINYFKGGKLRFKKIKPEAFEANRFYTVINKKSGEIVPMEVNFNFDDPNLIILPLAFGKRQGREFIWNDLLSLETGSLKLANGRVIEKTLYNRRTRQDEPALFVALTFERREVLDSSNIKPMNLIGVDRGENIPAVIALTDPEGCPLSRFKDSLGNPTHILRIGESYKEKQRTIQAKKEVEQRRAGGYSRKYASKAKNLADDMVRNTARDLLYYAVTQDAMLIFENLSRGFGRQGKRTFMAERQYTRMEDWLTAKLAYEGLPSKTYLSKTLAQYTSKTCSNCGFTITSADYDRVLEKLKKTATGWMTTINGKELKVEGQITYYNRYKRQNVVKDLSVELDRLSEESVNNDISSWTKGRSGEALSLLKKRFSHRPVQEKFVCLNCGFETHADEQAALNIARSWLFLRSQEYKKYQTNKTTGNTDKRAFVETWQSFYRKKLKEVWKPAV

SEQ ID NO: 40778 - protein, 978 aa, synthetic construct
  REGION 1..978: note = engineered CasX variant
QEIKRINKIRRRLVKDSNTKKAGKTGPMKTLLVRVMTPDLRERLENLRKKPENIPQPISNTSRANLNKLLTDYTEMKKAILHVYWEEFQKDPVGLMSRVAQPASKKIDQNKLKPEMDEKGNLTTAGFACSQCGQPLFVYKLEQVSEKGKAYTNYFGRCNVAEHEKLIKLAQLKPEKDSDEAVTYSLGKFGQRALDFYSIHVTKESTHPVKPLAQIAGNRYASSPVGKALSDACMGTIASFLSKYQDIIIEHQKVVKGNQKRLESLRELAGKENLEYPSVTLPPQPHTKEGVDAYNEVIARVRMWVNLNLWQKLKLSRDDAKPLLRLKGFPSFPLVERQANEVDWWDMVCNVKKLINEKKEDGKVFWQNLAGYKRQEALRPYLSSEEDREKGKKFARYQLGDLLLHLEKKHGEDWGKVYDEAWERIDKKVEGLSKHIKLEEERRSEDAQSKAALTDWLRAKASFVIEGLKEADKDEFCRCELKLQKWYGDLRGKPFAIEAENSILDISGFSKQYNCAFIWQKDGVKKLNLYLIINYFKGGKLRFKKIKPEAFEANRFYTVINKKSGEIVPMEVNFNFDDPNLIILPLAFGKRQGREFIWNDLLSLETGSLKLANGRVIEKTLYNRRTRQDEPALFVALTFERREVLDSSNIKPMNLIGVDRGENIPAVIALTDPEGCPLSRFKDSLGNPTHILRIGESYKEKQRTIQAKKEVEQRRAGGYSRKYASKAKNLADDMVRNTARDLLYYAVTQDAMLIFENLSRGFGRQGKRTFMAERQYTRMEDWLTAKLAYEGLPSKTYLSKTLAQYTSKTCSNCGFTITSADYDRVLEKLKKTATGWMTTINGKELKVEGQITYYNRYKRQNVVKDLSVELDRLSEESVNNDISSWTKGRSGEALSLLKKRFSHRPVQEKFVCLNCGFETHADEQAALNIARSWLFLRSQEYKKYQTNKTTGNTDKRAFVETWQSFYRKKLKEVWKPAV

SEQ ID NO: 40779 - protein, 979 aa, synthetic construct
  REGION 1..979: note = engineered CasX variant
QEIKRINKIRRRLVKDSNTKKAGKTGPMKTLLVRVMTPDLRERLENLRKKPENIPQPISNTSRANLNKLLTDYTEMKKAILHVYWEEFQKDPVGLMSRVAQPASKKIDQNKLKPEMDEKGNLTTAGFACSQCGQPLFVYKLEQVSEKGKAYTNYFGRCNVAEHEKLILLAQLKPEKDSDEAVTYSLGKFGQRALDFYSIHVTKESTHPVKPLAQIAGNRYASSYPVGKALSDACMGTIASFLSKYQDIIIEHQKVVKGNQKRLESLRELAGKENLEYPSVTLPPQPHTKEGVDAYNEVIARVRMWVNLNLWQKLKLSRDDAKPLLRLKGFPSFPLVERQANEVDWWDMVCNVKKLINEKKEDGKVFWQNLAGYKRQEALRPYLSSEEDRKKGKKFARYQLGDLLLHLEKKHGEDWGKVYDEAWERIDKKVEGLSKHIKLEEERRSEDAQSKAALTDWLRAKASFVIEGLKEADKDEFCRCELKLQKWYGDLRGKPFAIEAENSILDISGFSKQYNCAFIWQKDGVKKLNLYLIINYFKGGKLRFKKIKPEAFEANRFYTVINKKSGEIVIMEVNFNFDDPNLIILPLAFGKRQGREFIWNDLLSLETGSLKLANGRVIEKTLYNRRTRQDEPALFVALTFERREVLDSSNIKPMNLIGVDRGENIPAVIALTDPEGCPLSRFKDSLGNPTHILRIGESYKEKQRTIQAKKEVEQRRAGGYSRKYASKAKNLADDMVRNTARDLLYYAVTQDAMLIFENLSRGFGRQGKRTFMAERQYTRMEDWLTAKLAYEGLPSKTYLSKTLAQYTSKTCSNCGFTITSADYDRVLEKLKKTATGWMTTINGKELKVEGQITYYNRYKRQNVVKDLSVELDRLSEESVNNDISSWTKGRSGEALSLLKKRFSHRPVQEKFVCLNCGFETHADEQAALNIARSWLFLRSQEYKKYQTNKTTGNTDKRAFVETWQSFYRKKLKEVWKPAV

SEQ ID NO: 40780 - protein, 979 aa, synthetic construct
  REGION 1..979: note = engineered CasX variant
QEIKRINKIRRRLVKDSNTKKAGKTGPMKTLLVRVMTPDLRERLENLRKKPENIPQPISNTSRANLNKLLTDYTEMKKAILHVYWEEFQKDPVGLMSRVAQPASKKIDQNKLKPEMDEKGNLTTAGFACSQCGQPLFVYKLEQVSEKGKAYTNYFGRCNVAEHEKLILLAQLKPEKDSDEAVTYSLGKFGQRALDFYSIHVTKESTHPVKPLAQIAGNRYASSHPVGKALSDACMGTIASFLSKYQDIIIEHQKVVKGNQKRLESLRELAGKENLEYPSVTLPPQPHTKEGVDAYNEVIARVRMWVNLNLWQKLKLSRDDAKPLLRLKGFPSFPLVERQANEVDWWDMVCNVKKLINEKKEDGKVFWQNLAGYKRQEALRPYLSSEEDRKKGKKFARYQLGDLLLHLEKKHGEDWGKVYDEAWERIDKKVEGLSKHIKLEEERRSEDAQSKAALTDWLRAKASFVIEGLKEADKDEFCRCELKLQKWYGDLRGKPFAIEAENSILDISGFSKQYNCAFIWQKDGVKKLNLYLIINYFKGGKLRFKKIKPEAFEANRFYTVINKKSGEIVIMEVNFNFDDPNLIILPLAFGKRQGREFIWNDLLSLETGSLKLANGRVIEKTLYNRRTRQDEPALFVALTFERREVLDSSNIKPMNLIGVDRGENIPAVIALTDPEGCPLSRFKDSLGNPTHILRIGESYKEKQRTIQAKKEVEQRRAGGYSRKYASKAKNLADDMVRNTARDLLYYAVTQDAMLIFENLSRGFGRQGKRTFMAERQYTRMEDWLTAKLAYEGLPSKTYLSKTLAQYTSKTCSNCGFTITSADYDRVLEKLKKTATGWMTTINGKELKVEGQITYYNRYKRQNVVKDLSVELDRLSEESVNNDISSWTKGRSGEALSLLKKRFSHRPVQEKFVCLNCGFETHADEQAALNIARSWLFLRSQEYKKYQTNKTTGNTDKRAFVETWQSFYRKKLKEVWKPAV

SEQ ID NO: 40781 - protein, 979 aa, synthetic construct
  REGION 1..979: note = engineered CasX variant
QEIKRINKIRRRLVKDSNTKKAGKTGPMKTLLVRVMTPDLRERLENLRKKPENIPQPISNTSRANLNKLLTDYTEMKKAILHVYWEEFQKDPVGLMSRVAQPASKKIDQNKLKPEMDEKGNLTTAGFACSQCGQPLFVYKLEQVSEKGKAYTNYFGRCNVAEHEKLILLAQLKPEKDSDEAVTYSLGKFGQRALDFYSIHVTKESTHPVKPLAQIAGNRYASSSPVGKALSDACMGTIASFLSKYQDIIIEHQKVVKGNQKRLESLRELAGKENLEYPSVTLPPQPHTKEGVDAYNEVIARVRMWVNLNLWQKLKLSRDDAKPLLRLKGFPSFPLVERQANEVDWWDMVCNVKKLINEKKEDGKVFWQNLAGYKRQEALRPYLSSEEDRKKGKKFARYQLGDLLLHLEKKHGEDWGKVYDEAWERIDKKVEGLSKHIKLEEERRSEDAQSKAALTDWLRAKASFVIEGLKEADKDEFCRCELKLQKWYGDLRGKPFAIEAENSILDISGFSKQYNCAFIWQKDGVKKLNLYLIINYFKGGKLRFKKIKPEAFEANRFYTVINKKSGEIVIMEVNFNFDDPNLIILPLAFGKRQGREFIWNDLLSLETGSLKLANGRVIEKTLYNRRTRQDEPALFVALTFERREVLDSSNIKPMNLIGVDRGENIPAVIALTDPEGCPLSRFKDSLGNPTHILRIGESYKEKQRTIQAKKEVEQRRAGGYSRKYASKAKNLADDMVRNTARDLLYYAVTQDAMLIFENLSRGFGRQGKRTFMAERQYTRMEDWLTAKLAYEGLPSKTYLSKTLAQYTSKTCSNCGFTITSADYDRVLEKLKKTATGWMTTINGKELKVEGQITYYNRYKRQNVVKDLSVELDRLSEESVNNDISSWTKGRSGEALSLLKKRFSHRPVQEKFVCLNCGFETHADEQAALNIARSWLFLRSQEYKKYQTNKTTGNTDKRAFVETWQSFYRKKLKEVWKPAV

SEQ ID NO: 40782 - protein, 979 aa, synthetic construct
  REGION 1..979: note = engineered CasX variant
QEIKRINKIRRRLVKDSNTKKAGKTGPMKTLLVRVMTPDLRERLENLRKKPENIPQPISNTSRANLNKLLTDYTEMKKAILHVYWEEFQKDPVGLMSRVAQPASKKIDQNKLKPEMDEKGNLTTAGFACSQCGQPLFVYKLEQVSEKGKAYTNYFGRCNVAEHEKLILLAQLKPEKDSDEAVTYSLGKFGQRALDFYSIHVTKESTHPVKPLAQIAGNRYASSTPVGKALSDACMGTIASFLSKYQDIIIEHQKVVKGNQKRLESLRELAGKENLEYPSVTLPPQPHTKEGVDAYNEVIARVRMWVNLNLWQKLKLSRDDAKPLLRLKGFPSFPLVERQANEVDWWDMVCNVKKLINEKKEDGKVFWQNLAGYKRQEALRPYLSSEEDRKKGKKFARYQLGDLLLHLEKKHGEDWGKVYDEAWERIDKKVEGLSKHIKLEEERRSEDAQSKAALTDWLRAKASFVIEGLKEADKDEFCRCELKLQKWYGDLRGKPFAIEAENSILDISGFSKQYNCAFIWQKDGVKKLNLYLIINYFKGGKLRFKKIKPEAFEANRFYTVINKKSGEIVIMEVNFNFDDPNLIILPLAFGKRQGREFIWNDLLSLETGSLKLANGRVIEKTLYNRRTRQDEPALFVALTFERREVLDSSNIKPMNLIGVDRGENIPAVIALTDPEGCPLSRFKDSLGNPTHILRIGESYKEKQRTIQAKKEVEQRRAGGYSRKYASKAKNLADDMVRNTARDLLYYAVTQDAMLIFENLSRGFGRQGKRTFMAERQYTRMEDWLTAKLAYEGLPSKTYLSKTLAQYTSKTCSNCGFTITSADYDRVLEKLKKTATGWMTTINGKELKVEGQITYYNRYKRQNVVKDLSVELDRLSEESVNNDISSWTKGRSGEALSLLKKRFSHRPVQEKFVCLNCGFETHADEQAALNIARSWLFLRSQEYKKYQTNKTTGNTDKRAFVETWQSFYRKKLKEVWKPAV

SEQ ID NO: 40783 - protein, 979 aa, synthetic construct
  REGION 1..979: note = engineered CasX variant
QEIKRINKIRRRLVKDSNTKKAGKTGPMKTLLVRVMTPDLRERLENLRKKPENIPQPISNTSRANLNKLLTDYTEMKKAILHVYWEEFQKDPVGLMSRVAQPASKKIDQNKLKPEMDEKGNLTTAGFACSQCGQPLFVYKLEQVSEKGKAYTNYFGRCNVAEHEKLILLAQLKPEKDSDEAVTYSLGKFGQRALDFYSIHVTKESTHPVKPLAQIAGNRYASSAPVGKALSDACMGTIASFLSKYQDIIIEHQKVVKGNQKRLESLRELAGKENLEYPSVTLPPQPHTKEGVDAYNEVIARVRMWVNLNLWQKLKLSRDDAKPLLRLKGFPSFPLVERQANEVDWWDMVCNVKKLINEKKEDGKVFWQNLAGYKRQEALRPYLSSEEDRKKGKKFARYQLGDLLLHLEKKHGEDWGKVYDEAWERIDKKVEGLSKHIKLEEERRSEDAQSKAALTDWLRAKASFVIEGLKEADKDEFCRCELKLQKWYGDLRGKPFAIEAENSILDISGFSKQYNCAFIWQKDGVKKLNLYLIINYFKGGKLRFKKIKPEAFEANRFYTVINKKSGEIVIMEVNFNFDDPNLIILPLAFGKRQGREFIWNDLLSLETGSLKLANGRVIEKTLYNRRTRQDEPALFVALTFERREVLDSSNIKPMNLIGVDRGENIPAVIALTDPEGCPLSRFKDSLGNPTHILRIGESYKEKQRTIQAKKEVEQRRAGGYSRKYASKAKNLADDMVRNTARDLLYYAVTQDAMLIFENLSRGFGRQGKRTFMAERQYTRMEDWLTAKLAYEGLPSKTYLSKTLAQYTSKTCSNCGFTITSADYDRVLEKLKKTATGWMTTINGKELKVEGQITYYNRYKRQNVVKDLSVELDRLSEESVNNDISSWTKGRSGEALSLLKKRFSHRPVQEKFVCLNCGFETHADEQAALNIARSWLFLRSQEYKKYQTNKTTGNTDKRAFVETWQSFYRKKLKEVWKPAV

SEQ ID NO: 40784 - protein, 979 aa, synthetic construct
  REGION 1..979: note = engineered CasX variant
QEIKRINKIRRRLVKDSNTKKAGKTGPMKTLLVRVMTPDLRERLENLRKKPENIPQPISNTSRANLNKLLTDYTEMKKAILHVYWEEFQKDPVGLMSRVAQPASKKIDQNKLKPEMDEKGNLTTAGFACSQCGQPLFVYKLEQVSEKGKAYTNYFGRCNVAEHEKLILLAQLKPEKDSDEAVTYSLGKFGQRALDFYSIHVTKESTHPVKPLAQIAGNRYASSVPVGKALSDACMGTIASFLSKYQDIIIEHQKVVKGNQKRLESLRELAGKENLEYPSVTLPPQPHTKEGVDAYNEVIARVRMWVNLNLWQKLKLSRDDAKPLLRLKGFPSFPLVERQANEVDWWDMVCNVKKLINEKKEDGKVFWQNLAGYKRQEALRPYLSSEEDRKKGKKFARYQLGDLLLHLEKKHGEDWGKVYDEAWERIDKKVEGLSKHIKLEEERRSEDAQSKAALTDWLRAKASFVIEGLKEADKDEFCRCELKLQKWYGDLRGKPFAIEAENSILDISGFSKQYNCAFIWQKDGVKKLNLYLIINYFKGGKLRFKKIKPEAFEANRFYTVINKKSGEIVIMEVNFNFDDPNLIILPLAFGKRQGREFIWNDLLSLETGSLKLANGRVIEKTLYNRRTRQDEPALFVALTFERREVLDSSNIKPMNLIGVDRGENIPAVIALTDPEGCPLSRFKDSLGNPTHILRIGESYKEKQRTIQAKKEVEQRRAGGYSRKYASKAKNLADDMVRNTARDLLYYAVTQDAMLIFENLSRGFGRQGKRTFMAERQYTRMEDWLTAKLAYEGLPSKTYLSKTLAQYTSKTCSNCGFTITSADYDRVLEKLKKTATGWMTTINGKELKVEGQITYYNRYKRQNVVKDLSVELDRLSEESVNNDISSWTKGRSGEALSLLKKRFSHRPVQEKFVCLNCGFETHADEQAALNIARSWLFLRSQEYKKYQTNKTTGNTDKRAFVETWQSFYRKKLKEVWKPAV

SEQ ID NO: 40785 - protein, 978 aa, synthetic construct
  REGION 1..978: note = engineered CasX variant
QEIKRINKIRRRLVKDSNTKKAGKTGPMKTLLVRVMTPDLRERLENLRKKPENIPQPISNTSRANLNKLLTDYTEMKKAILHVYWEEFQKDPVGLMSRVAQPASKKIDQNKLKPEMDEKGNLTTAGFACSQCGQPLFVYKLEQVSEKGKAYTNYFGRCNVAEHEKLIKLAQLKPEKDSDEAVTYSLGKFGQRALDFYSIHVTKESTHPVKPLAQIAGNRYASSPVGKALSDACMGTIASFLSKYQDIIIEHQKVVKGNQKRLESLRELAGKENLEYPSVTLPPQPHTKEGVDAYNEVIARVRMWVNLNLWQKLKLSRDDAKPLLRLKGFPSFPLVERQANEVDWWDMVCNVKKLINEKKEDGKVFWQNLAGYKRQEALRPYLSSEEDRKKGKKFARYQLGDLLLHLEKKHGEDWGKVYDEAWERIDKKVEGLSKHIKLEEERRSEDAQSKAALTDWLRAKASFVIEGLKEADKDEFCRCELKLQKWYGDLRGKPFAIEAENSILDISGFSKQYNCAFIWQKDGVKKLNLYLIINYFKGGKLRFKKIKPEAFEANRFYTVINKKSGEIVIMEVNFNFDDPNLIILPLAFGKRQGREFIWNDLLSLETGSLKLANGRVIEKTLYNRRTRQDEPALFVALTFERREVLDSSNIKPMNLIGVDRGENIPAVIALTDPEGCPLSRFKDSLGNPTHILRIGESYKEKQRTIQAKKEVEQRRAGGYSRKYASKAKNLADDMVRNTARDLLYYAVTQDAMLIFENLSRGFGRQGKRTFMAERQYTRMEDWLTAKLAYEGLPSKTYLSKTLAQYTSKTCSNCGFTITSADYDRVLEKLKKTATGWMTTINGKELKVEGQITYYNRYKRQNVVKDLSVELDRLSEESVNNDISSWTKGRSGEALSLLKKRFSHRPVQEKFVCLNCGFETHADEQAALNIARSWLFLRSQEYKKYQTNKTTGNTDKRAFVETWQSFYRKKLKEVWKPAV

SEQ ID NO: 40786 - protein, 978 aa, synthetic construct
  REGION 1..978: note = engineered CasX variant
QEIKRINKIRRRLVKDSNTKKAGKTGPMKTLLVRVMTPDLRERLENLRKKPENIPQPISNTSRANLNKLLTDYTEMKKAILHVYWEEFQKDPVGLMSRVAQPASKKIDQNKLKPEMDEKGNLTTAGFACSQCGQPLFVYKLEQVSEKGKAYTNYFGRCNVAEHEKLILLDQLKPEKDSDEAVTYSLGKFGQRALDFYSIHVTKESTHPVKPLAQIAGNRYASYPVGKALSGACMGTIASFLSKYQDIIIEHQKVVKGNQKRLESLRELAGKENLEYPSVTLPPQPHTKEGVDAYNEVIARVRMWVNLNLWQKLKLSRDDAKPLLRLKGFPSFPLVERQANEVDWWDMVCNVKKLINEKKEDGKVFWQNLAGYKRQEALRPYLSSEEDRKKGKKFARYQLGDLLLHLEKKHGEDWGKVYDEAWERIDKKVEGLSKHIKLEEERRSEDAQSKAALTDWLRAKASFVIEGLKEADKDEFCRCELKLQKWYGDLRGKPFAIEAENSILDISGFSKQYNCAFIWQKDGVKKLNLYLIINYFKGGKLRFKKIKPEAFEANRFYTVINKKSGEIVPMEVNFNFDDPNLIILPLAFGKRQGREFIWNDLLSLETGSLKLANGRVIEKTLYNRRTRQDEPALFVALTFERREVLDSSNIKPMNLIGVDRGENIPAVIALTDPEGCPLSRFKDSLGNPTHILRIGESYKEKQRTIQAKKEVEQRRAGGYSRKYASKAKNLADDMVRNTARDLLYYAVTQDAMLIFENLSRGFGRQGKRTFMAERQYTRMEDWLTAKLAYEGLPSKTYLSKTLAQYTSKTCSNCGFTITSADYDRVLEKLKKTATGWMTTINGKELKVEGQITYYNRYKRQNVVKDLSVELDRLSEESVNNDISSWTKGRSGEALSLLKKRFSHRPVQEKFVCLNCGFETHADEQAALNIARSWLFLRSQEYKKYQTNKTTGNTDKRAFVETWQSFYRKKLKEVWKPAV

SEQ ID NO: 40787 - protein, 978 aa, synthetic construct
  REGION 1..978: note = engineered CasX variant
QEIKRINKIRRRLVKDSNTKKAGKTGPMKTLLVRVMTPDLRERLENLRKKPENIPQPISNTSRANLNKLLTDYTEMKKAILHVYWEEFQKDPVGLMSRVAQPASKKIDQNKLKPEMDEKGNLTTAGFACSQCGQPLFVYKLEQVSEKGKAYTNYFGRCNVAEHEKLILLDQLKPEKDSDEAVTYSLGKFGQRALDFYSIHVTKESTHPVKPLAQIAGNRYASHPVGKALSGACMGTIASFLSKYQDIIIEHQKVVKGNQKRLESLRELAGKENLEYPSVTLPPQPHTKEGVDAYNEVIARVRMWVNLNLWQKLKLSRDDAKPLLRLKGFPSFPLVERQANEVDWWDMVCNVKKLINEKKEDGKVFWQNLAGYKRQEALRPYLSSEEDRKKGKKFARYQLGDLLLHLEKKHGEDWGKVYDEAWERIDKKVEGLSKHIKLEEERRSEDAQSKAALTDWLRAKASFVIEGLKEADKDEFCRCELKLQKWYGDLRGKPFAIEAENSILDISGFSKQYNCAFIWQKDGVKKLNLYLIINYFKGGKLRFKKIKPEAFEANRFYTVINKKSGEIVPMEVNFNFDDPNLIILPLAFGKRQGREFIWNDLLSLETGSLKLANGRVIEKTLYNRRTRQDEPALFVALTFERREVLDSSNIKPMNLIGVDRGENIPAVIALTDPEGCPLSRFKDSLGNPTHILRIGESYKEKQRTIQAKKEVEQRRAGGYSRKYASKAKNLADDMVRNTARDLLYYAVTQDAMLIFENLSRGFGRQGKRTFMAERQYTRMEDWLTAKLAYEGLPSKTYLSKTLAQYTSKTCSNCGFTITSADYDRVLEKLKKTATGWMTTINGKELKVEGQITYYNRYKRQNVVKDLSVELDRLSEESVNNDISSWTKGRSGEALSLLKKRFSHRPVQEKFVCLNCGFETHADEQAALNIARSWLFLRSQEYKKYQTNKTTGNTDKRAFVETWQSFYRKKLKEVWKPAV

SEQ ID NO: 40788 - protein, 978 aa, synthetic construct
  REGION 1..978: note = engineered CasX variant
QEIKRINKIRRRLVKDSNTKKAGKTGPMKTLLVRVMTPDLRERLENLRKKPENIPQPISNTSRANLNKLLTDYTEMKKAILHVYWEEFQKDPVGLMSRVAQPASKKIDQNKLKPEMDEKGNLTTAGFACSQCGQPLFVYKLEQVSEKGKAYTNYFGRCNVAEHEKLILLDQLKPEKDSDEAVTYSLGKFGQRALDFYSIHVTKESTHPVKPLAQIAGNRYASSPVGKALSGACMGTIASFLSKYQDIIIEHQKVVKGNQKRLESLRELAGKENLEYPSVTLPPQPHTKEGVDAYNEVIARVRMWVNLNLWQKLKLSRDDAKPLLRLKGFPSFPLVERQANEVDWWDMVCNVKKLINEKKEDGKVFWQNLAGYKRQEALRPYLSSEEDRKKGKKFARYQLGDLLLHLEKKHGEDWGKVYDEAWERIDKKVEGLSKHIKLEEERRSEDAQSKAALTDWLRAKASFVIEGLKEADKDEFCRCELKLQKWYGDLRGKPFAIEAENSILDISGFSKQYNCAFIWQKDGVKKLNLYLIINYFKGGKLRFKKIKPEAFEANRFYTVINKKSGEIVPMEVNFNFDDPNLIILPLAFGKRQGREFIWNDLLSLETGSLKLANGRVIEKTLYNRRTRQDEPALFVALTFERREVLDSSNIKPMNLIGVDRGENIPAVIALTDPEGCPLSRFKDSLGNPTHILRIGESYKEKQRTIQAKKEVEQRRAGGYSRKYASKAKNLADDMVRNTARDLLYYAVTQDAMLIFENLSRGFGRQGKRTFMAERQYTRMEDWLTAKLAYEGLPSKTYLSKTLAQYTSKTCSNCGFTITSADYDRVLEKLKKTATGWMTTINGKELKVEGQITYYNRYKRQNVVKDLSVELDRLSEESVNNDISSWTKGRSGEALSLLKKRFSHRPVQEKFVCLNCGFETHADEQAALNIARSWLFLRSQEYKKYQTNKTTGNTDKRAFVETWQSFYRKKLKEVWKPAV

SEQ ID NO: 40789 - protein, 978 aa, synthetic construct
  REGION 1..978: note = engineered CasX variant
QEIKRINKIRRRLVKDSNTKKAGKTGPMKTLLVRVMTPDLRERLENLRKKPENIPQPISNTSRANLNKLLTDYTEMKKAILHVYWEEFQKDPVGLMSRVAQPASKKIDQNKLKPEMDEKGNLTTAGFACSQCGQPLFVYKLEQVSEKGKAYTNYFGRCNVAEHEKLILLDQLKPEKDSDEAVTYSLGKFGQRALDFYSIHVTKESTHPVKPLAQIAGNRYASTPVGKALSGACMGTIASFLSKYQDIIIEHQKVVKGNQKRLESLRELAGKENLEYPSVTLPPQPHTKEGVDAYNEVIARVRMWVNLNLWQKLKLSRDDAKPLLRLKGFPSFPLVERQANEVDWWDMVCNVKKLINEKKEDGKVFWQNLAGYKRQEALRPYLSSEEDRKKGKKFARYQLGDLLLHLEKKHGEDWGKVYDEAWERIDKKVEGLSKHIKLEEERRSEDAQSKAALTDWLRAKASFVIEGLKEADKDEFCRCELKLQKWYGDLRGKPFAIEAENSILDISGFSKQYNCAFIWQKDGVKKLNLYLIINYFKGGKLRFKKIKPEAFEANRFYTVINKKSGEIVPMEVNFNFDDPNLIILPLAFGKRQGREFIWNDLLSLETGSLKLANGRVIEKTLYNRRTRQDEPALFVALTFERREVLDSSNIKPMNLIGVDRGENIPAVIALTDPEGCPLSRFKDSLGNPTHILRIGESYKEKQRTIQAKKEVEQRRAGGYSRKYASKAKNLADDMVRNTARDLLYYAVTQDAMLIFENLSRGFGRQGKRTFMAERQYTRMEDWLTAKLAYEGLPSKTYLSKTLAQYTSKTCSNCGFTITSADYDRVLEKLKKTATGWMTTINGKELKVEGQITYYNRYKRQNVVKDLSVELDRLSEESVNNDISSWTKGRSGEALSLLKKRFSHRPVQEKFVCLNCGFETHADEQAALNIARSWLFLRSQEYKKYQTNKTTGNTDKRAFVETWQSFYRKKLKEVWKPAV

SEQ ID NO: 40790 - protein, 978 aa, synthetic construct
  REGION 1..978: note = engineered CasX variant
QEIKRINKIRRRLVKDSNTKKAGKTGPMKTLLVRVMTPDLRERLENLRKKPENIPQPISNTSRANLNKLLTDYTEMKKAILHVYWEEFQKDPVGLMSRVAQPASKKIDQNKLKPEMDEKGNLTTAGFACSQCGQPLFVYKLEQVSEKGKAYTNYFGRCNVAEHEKLILLDQLKPEKDSDEAVTYSLGKFGQRALDFYSIHVTKESTHPVKPLAQIAGNRYASAPVGKALSGACMGTIASFLSKYQDIIIEHQKVVKGNQKRLESLRELAGKENLEYPSVTLPPQPHTKEGVDAYNEVIARVRMWVNLNLWQKLKLSRDDAKPLLRLKGFPSFPLVERQANEVDWWDMVCNVKKLINEKKEDGKVFWQNLAGYKRQEALRPYLSSEEDRKKGKKFARYQLGDLLLHLEKKHGEDWGKVYDEAWERIDKKVEGLSKHIKLEEERRSEDAQSKAALTDWLRAKASFVIEGLKEADKDEFCRCELKLQKWYGDLRGKPFAIEAENSILDISGFSKQYNCAFIWQKDGVKKLNLYLIINYFKGGKLRFKKIKPEAFEANRFYTVINKKSGEIVPMEVNFNFDDPNLIILPLAFGKRQGREFIWNDLLSLETGSLKLANGRVIEKTLYNRRTRQDEPALFVALTFERREVLDSSNIKPMNLIGVDRGENIPAVIALTDPEGCPLSRFKDSLGNPTHILRIGESYKEKQRTIQAKKEVEQRRAGGYSRKYASKAKNLADDMVRNTARDLLYYAVTQDAMLIFENLSRGFGRQGKRTFMAERQYTRMEDWLTAKLAYEGLPSKTYLSKTLAQYTSKTCSNCGFTITSADYDRVLEKLKKTATGWMTTINGKELKVEGQITYYNRYKRQNVVKDLSVELDRLSEESVNNDISSWTKGRSGEALSLLKKRFSHRPVQEKFVCLNCGFETHADEQAALNIARSWLFLRSQEYKKYQTNKTTGNTDKRAFVETWQSFYRKKLKEVWKPAV

SEQ ID NO: 40791 - protein, 978 aa, synthetic construct
  REGION 1..978: note = engineered CasX variant
QEIKRINKIRRRLVKDSNTKKAGKTGPMKTLLVRVMTPDLRERLENLRKKPENIPQPISNTSRANLNKLLTDYTEMKKAILHVYWEEFQKDPVGLMSRVAQPASKKIDQNKLKPEMDEKGNLTTAGFACSQCGQPLFVYKLEQVSEKGKAYTNYFGRCNVAEHEKLILLDQLKPEKDSDEAVTYSLGKFGQRALDFYSIHVTKESTHPVKPLAQIAGNRYASVPVGKALSGACMGTIASFLSKYQDIIIEHQKVVKGNQKRLESLRELAGKENLEYPSVTLPPQPHTKEGVDAYNEVIARVRMWVNLNLWQKLKLSRDDAKPLLRLKGFPSFPLVERQANEVDWWDMVCNVKKLINEKKEDGKVFWQNLAGYKRQEALRPYLSSEEDRKKGKKFARYQLGDLLLHLEKKHGEDWGKVYDEAWERIDKKVEGLSKHIKLEEERRSEDAQSKAALTDWLRAKASFVIEGLKEADKDEFCRCELKLQKWYGDLRGKPFAIEAENSILDISGFSKQYNCAFIWQKDGVKKLNLYLIINYFKGGKLRFKKIKPEAFEANRFYTVINKKSGEIVPMEVNFNFDDPNLIILPLAFGKRQGREFIWNDLLSLETGSLKLANGRVIEKTLYNRRTRQDEPALFVALTFERREVLDSSNIKPMNLIGVDRGENIPAVIALTDPEGCPLSRFKDSLGNPTHILRIGESYKEKQRTIQAKKEVEQRRAGGYSRKYASKAKNLADDMVRNTARDLLYYAVTQDAMLIFENLSRGFGRQGKRTFMAERQYTRMEDWLTAKLAYEGLPSKTYLSKTLAQYTSKTCSNCGFTITSADYDRVLEKLKKTATGWMTTINGKELKVEGQITYYNRYKRQNVVKDLSVELDRLSEESVNNDISSWTKGRSGEALSLLKKRFSHRPVQEKFVCLNCGFETHADEQAALNIARSWLFLRSQEYKKYQTNKTTGNTDKRAFVETWQSFYRKKLKEVWKPAV

SEQ ID NO: 40792 - protein, 978 aa, synthetic construct
  REGION 1..978: note = engineered CasX variant
QEIKRINKIRRRLVKDSNTKKAGKTGPMKTLLVRVMTPDLRERLENLRKKPENIPQPISNTSRANLNKLLTDYTEMKKAILHVYWEEFQKDPVGLMSRVAQPASKKIDQNKLKPEMDEKGNLTTAGFACSQCGQPLFVYKLEQVSEKGKAYTNYFGRCNVAEHEKLIKLDQLKPEKDSDEAVTYSLGKFGQRALDFYSIHVTKESTHPVKPLAQIAGNRYASGPVGKALSGACMGTIASFLSKYQDIIIEHQKVVKGNQKRLESLRELAGKENLEYPSVTLPPQPHTKEGVDAYNEVIARVRMWVNLNLWQKLKLSRDDAKPLLRLKGFPSFPLVERQANEVDWWDMVCNVKKLINEKKEDGKVFWQNLAGYKRQEALRPYLSSEEDRKKGKKFARYQLGDLLLHLEKKHGEDWGKVYDEAWERIDKKVEGLSKHIKLEEERRSEDAQSKAALTDWLRAKASFVIEGLKEADKDEFCRCELKLQKWYGDLRGKPFAIEAENSILDISGFSKQYNCAFIWQKDGVKKLNLYLIINYFKGGKLRFKKIKPEAFEANRFYTVINKKSGEIVPMEVNFNFDDPNLIILPLAFGKRQGREFIWNDLLSLETGSLKLANGRVIEKTLYNRRTRQDEPALFVALTFERREVLDSSNIKPMNLIGVDRGENIPAVIALTDPEGCPLSRFKDSLGNPTHILRIGESYKEKQRTIQAKKEVEQRRAGGYSRKYASKAKNLADDMVRNTARDLLYYAVTQDAMLIFENLSRGFGRQGKRTFMAERQYTRMEDWLTAKLAYEGLPSKTYLSKTLAQYTSKTCSNCGFTITSADYDRVLEKLKKTATGWMTTINGKELKVEGQITYYNRYKRQNVVKDLSVELDRLSEESVNNDISSWTKGRSGEALSLLKKRFSHRPVQEKFVCLNCGFETHADEQAALNIARSWLFLRSQEYKKYQTNKTTGNTDKRAFVETWQSFYRKKLKEVWKPAV

SEQ ID NO: 40793 - protein, 977 aa, synthetic construct
  REGION 1..977: note = engineered CasX variant
QEIKRINKIRRRLVKDSNTKKAGKTGPMKTLLVRVMTPDLRERLENLRKKPENIPQPISNTSRANLNKLLTDYTEMKKAILHVYWEEFQKDPVGLMSRVAQPASKKIDQNKLKPEMDEKGNLTTAGFACSQCGQPLFVYKLEQVSEKGKAYTNYFGRCNVAEHEKLILLDQLKPEKDSDEAVTYSLGKFGQRALDFYSIHVTKESTHPVKPLAQIAGNRYASPVGKALSGACMGTIASFLSKYQDIIIEHQKVVKGNQKRLESLRELAGKENLEYPSVTLPPQPHTKEGVDAYNEVIARVRMWVNLNLWQKLKLSRDDAKPLLRLKGFPSFPLVERQANEVDWWDMVCNVKKLINEKKEDGKVFWQNLAGYKRQEALRPYLSSEEDRKKGKKFARYQLGDLLLHLEKKHGEDWGKVYDEAWERIDKKVEGLSKHIKLEEERRSEDAQSKAALTDWLRAKASFVIEGLKEADKDEFCRCELKLQKWYGDLRGKPFAIEAENSILDISGFSKQYNCAFIWQKDGVKKLNLYLIINYFKGGKLRFKKIKPEAFEANRFYTVINKKSGEIVPMEVNFNFDDPNLIILPLAFGKRQGREFIWNDLLSLETGSLKLANGRVIEKTLYNRRTRQDEPALFVALTFERREVLDSSNIKPMNLIGVDRGENIPAVIALTDPEGCPLSRFKDSLGNPTHILRIGESYKEKQRTIQAKKEVEQRRAGGYSRKYASKAKNLADDMVRNTARDLLYYAVTQDAMLIFENLSRGFGRQGKRTFMAERQYTRMEDWLTAKLAYEGLPSKTYLSKTLAQYTSKTCSNCGFTITSADYDRVLEKLKKTATGWMTTINGKELKVEGQITYYNRYKRQNVVKDLSVELDRLSEESVNNDISSWTKGRSGEALSLLKKRFSHRPVQEKFVCLNCGFETHADEQAALNIARSWLFLRSQEYKKYQTNKTTGNTDKRAFVETWQSFYRKKLKEVWKPAV

SEQ ID NO: 40794 - protein, 978 aa, synthetic construct
  REGION 1..978: note = engineered CasX variant
QEIKRINKIRRRLVKDSNTKKAGKTGPMKTLLVRVMTPDLRERLENLRKKPENIPQPISNTSRANLNKLLTDYTEMKKAILHVYWEEFQKDPVGLMSRVAQPASKKIDQNKLKPEMDEKGNLTTAGFACSQCGQPLFVYKLEQVSEKGKAYTNYFGRCNVAEHEKLILLDQLKPEKDSDEAVTYSLGKFGQRALDFYSIHVTKESTHPVKPLAQIAGNRYASYPVGKALSDACMGTIASFLSKYQDIIIEHQKVVKGNQKRLESLRELAGKENLEYPSVTLPPQPHTKEGVDAYNEVIARVRMWVNLNLWQKLKLSRDDAKPLLRLKNFPSFPLVERQANEVDWWDMVCNVKKLINEKKEDGKVFWQNLAGYKRQEALRPYLSSEEDRKKGKKFARYQLGDLLLHLEKKHGEDWGKVYDEAWERIDKKVEGLSKHIKLEEERRSEDAQSKAALTDWLRAKASFVIEGLKEADKDEFCRCELKLQKWYGDLRGKPFAIEAENSILDISGFSKQYNCAFIWQKDGVKKLNLYLIINYFKGGKLRFKKIKPEAFEANRFYTVINKKSGEIVPMEVNFNFDDPNLIILPLAFGKRQGREFIWNDLLSLETGSLKLANGRVIEKTLYNRRTRQDEPALFVALTFERREVLDSSNIKPMNLIGVDRGENIPAVIALTDPEGCPLSRFKDSLGNPTHILRIGESYKEKQRTIQAKKEVEQRRAGGYSRKYASKAKNLADDMVRNTARDLLYYAVTQDAMLIFENLSRGFGRQGKRTFMAERQYTRMEDWLTAKLAYEGLPSKTYLSKTLAQYTSKTCSNCGFTITSADYDRVLEKLKKTATGWMTTINGKELKVEGQITYYNRYKRQNVVKDLSVELDRLSEESVNNDISSWTKGRSGEALSLLKKRFSHRPVQEKFVCLNCGFETHADEQAALNIARSWLFLRSQEYKKYQTNKTTGNTDKRAFVETWQSFYRKKLKEVWKPAV

SEQ ID NO: 40795 - protein, 978 aa, synthetic construct
  REGION 1..978: note = engineered CasX variant
QEIKRINKIRRRLVKDSNTKKAGKTGPMKTLLVRVMTPDLRERLENLRKKPENIPQPISNTSRANLNKLLTDYTEMKKAILHVYWEEFQKDPVGLMSRVAQPASKKIDQNKLKPEMDEKGNLTTAGFACSQCGQPLFVYKLEQVSEKGKAYTNYFGRCNVAEHEKLILLDQLKPEKDSDEAVTYSLGKFGQRALDFYSIHVTKESTHPVKPLAQIAGNRYASHPVGKALSDACMGTIASFLSKYQDIIIEHQKVVKGNQKRLESLRELAGKENLEYPSVTLPPQPHTKEGVDAYNEVIARVRMWVNLNLWQKLKLSRDDAKPLLRLKNFPSFPLVERQANEVDWWDMVCNVKKLINEKKEDGKVFWQNLAGYKRQEALRPYLSSEEDRKKGKKFARYQLGDLLLHLEKKHGEDWGKVYDEAWERIDKKVEGLSKHIKLEEERRSEDAQSKAALTDWLRAKASFVIEGLKEADKDEFCRCELKLQKWYGDLRGKPFAIEAENSILDISGFSKQYNCAFIWQKDGVKKLNLYLIINYFKGGKLRFKKIKPEAFEANRFYTVINKKSGEIVPMEVNFNFDDPNLIILPLAFGKRQGREFIWNDLLSLETGSLKLANGRVIEKTLYNRRTRQDEPALFVALTFERREVLDSSNIKPMNLIGVDRGENIPAVIALTDPEGCPLSRFKDSLGNPTHILRIGESYKEKQRTIQAKKEVEQRRAGGYSRKYASKAKNLADDMVRNTARDLLYYAVTQDAMLIFENLSRGFGRQGKRTFMAERQYTRMEDWLTAKLAYEGLPSKTYLSKTLAQYTSKTCSNCGFTITSADYDRVLEKLKKTATGWMTTINGKELKVEGQITYYNRYKRQNVVKDLSVELDRLSEESVNNDISSWTKGRSGEALSLLKKRFSHRPVQEKFVCLNCGFETHADEQAALNIARSWLFLRSQEYKKYQTNKTTGNTDKRAFVETWQSFYRKKLKEVWKPAV

SEQ ID NO: 40796 - protein, 978 aa, synthetic construct
  REGION 1..978: note = engineered CasX variant
QEIKRINKIRRRLVKDSNTKKAGKTGPMKTLLVRVMTPDLRERLENLRKKPENIPQPISNTSRANLNKLLTDYTEMKKAILHVYWEEFQKDPVGLMSRVAQPASKKIDQNKLKPEMDEKGNLTTAGFACSQCGQPLFVYKLEQVSEKGKAYTNYFGRCNVAEHEKLILLDQLKPEKDSDEAVTYSLGKFGQRALDFYSIHVTKESTHPVKPLAQIAGNRYASSPVGKALSDACMGTIASFLSKYQDIIIEHQKVVKGNQKRLESLRELAGKENLEYPSVTLPPQPHTKEGVDAYNEVIARVRMWVNLNLWQKLKLSRDDAKPLLRLKNFPSFPLVERQANEVDWWDMVCNVKKLINEKKEDGKVFWQNLAGYKRQEALRPYLSSEEDRKKGKKFARYQLGDLLLHLEKKHGEDWGKVYDEAWERIDKKVEGLSKHIKLEEERRSEDAQSKAALTDWLRAKASFVIEGLKEADKDEFCRCELKLQKWYGDLRGKPFAIEAENSILDISGFSKQYNCAFIWQKDGVKKLNLYLIINYFKGGKLRFKKIKPEAFEANRFYTVINKKSGEIVPMEVNFNFDDPNLIILPLAFGKRQGREFIWNDLLSLETGSLKLANGRVIEKTLYNRRTRQDEPALFVALTFERREVLDSSNIKPMNLIGVDRGENIPAVIALTDPEGCPLSRFKDSLGNPTHILRIGESYKEKQRTIQAKKEVEQRRAGGYSRKYASKAKNLADDMVRNTARDLLYYAVTQDAMLIFENLSRGFGRQGKRTFMAERQYTRMEDWLTAKLAYEGLPSKTYLSKTLAQYTSKTCSNCGFTITSADYDRVLEKLKKTATGWMTTINGKELKVEGQITYYNRYKRQNVVKDLSVELDRLSEESVNNDISSWTKGRSGEALSLLKKRFSHRPVQEKFVCLNCGFETHADEQAALNIARSWLFLRSQEYKKYQTNKTTGNTDKRAFVETWQSFYRKKLKEVWKPAV

SEQ ID NO: 40797 - protein, 978 aa, synthetic construct
  REGION 1..978: note = engineered CasX variant
QEIKRINKIRRRLVKDSNTKKAGKTGPMKTLLVRVMTPDLRERLENLRKKPENIPQPISNTSRANLNKLLTDYTEMKKAILHVYWEEFQKDPVGLMSRVAQPASKKIDQNKLKPEMDEKGNLTTAGFACSQCGQPLFVYKLEQVSEKGKAYTNYFGRCNVAEHEKLILLDQLKPEKDSDEAVTYSLGKFGQRALDFYSIHVTKESTHPVKPLAQIAGNRYASTPVGKALSDACMGTIASFLSKYQDIIIEHQKVVKGNQKRLESLRELAGKENLEYPSVTLPPQPHTKEGVDAYNEVIARVRMWVNLNLWQKLKLSRDDAKPLLRLKNFPSFPLVERQANEVDWWDMVCNVKKLINEKKEDGKVFWQNLAGYKRQEALRPYLSSEEDRKKGKKFARYQLGDLLLHLEKKHGEDWGKVYDEAWERIDKKVEGLSKHIKLEEERRSEDAQSKAALTDWLRAKASFVIEGLKEADKDEFCRCELKLQKWYGDLRGKPFAIEAENSILDISGFSKQYNCAFIWQKDGVKKLNLYLIINYFKGGKLRFKKIKPEAFEANRFYTVINKKSGEIVPMEVNFNFDDPNLIILPLAFGKRQGREFIWNDLLSLETGSLKLANGRVIEKTLYNRRTRQDEPALFVALTFERREVLDSSNIKPMNLIGVDRGENIPAVIALTDPEGCPLSRFKDSLGNPTHILRIGESYKEKQRTIQAKKEVEQRRAGGYSRKYASKAKNLADDMVRNTARDLLYYAVTQDAMLIFENLSRGFGRQGKRTFMAERQYTRMEDWLTAKLAYEGLPSKTYLSKTLAQYTSKTCSNCGFTITSADYDRVLEKLKKTATGWMTTINGKELKVEGQITYYNRYKRQNVVKDLSVELDRLSEESVNNDISSWTKGRSGEALSLLKKRFSHRPVQEKFVCLNCGFETHADEQAALNIARSWLFLRSQEYKKYQTNKTTGNTDKRAFVETWQSFYRKKLKEVWKPAV

SEQ ID NO: 40798 - protein, 978 aa, synthetic construct
  REGION 1..978: note = engineered CasX variant
QEIKRINKIRRRLVKDSNTKKAGKTGPMKTLLVRVMTPDLRERLENLRKKPENIPQPISNTSRANLNKLLTDYTEMKKAILHVYWEEFQKDPVGLMSRVAQPASKKIDQNKLKPEMDEKGNLTTAGFACSQCGQPLFVYKLEQVSEKGKAYTNYFGRCNVAEHEKLILLDQLKPEKDSDEAVTYSLGKFGQRALDFYSIHVTKESTHPVKPLAQIAGNRYASAPVGKALSDACMGTIASFLSKYQDIIIEHQKVVKGNQKRLESLRELAGKENLEYPSVTLPPQPHTKEGVDAYNEVIARVRMWVNLNLWQKLKLSRDDAKPLLRLKNFPSFPLVERQANEVDWWDMVCNVKKLINEKKEDGKVFWQNLAGYKRQEALRPYLSSEEDRKKGKKFARYQLGDLLLHLEKKHGEDWGKVYDEAWERIDKKVEGLSKHIKLEEERRSEDAQSKAALTDWLRAKASFVIEGLKEADKDEFCRCELKLQKWYGDLRGKPFAIEAENSILDISGFSKQYNCAFIWQKDGVKKLNLYLIINYFKGGKLRFKKIKPEAFEANRFYTVINKKSGEIVPMEVNFNFDDPNLIILPLAFGKRQGREFIWNDLLSLETGSLKLANGRVIEKTLYNRRTRQDEPALFVALTFERREVLDSSNIKPMNLIGVDRGENIPAVIALTDPEGCPLSRFKDSLGNPTHILRIGESYKEKQRTIQAKKEVEQRRAGGYSRKYASKAKNLADDMVRNTARDLLYYAVTQDAMLIFENLSRGFGRQGKRTFMAERQYTRMEDWLTAKLAYEGLPSKTYLSKTLAQYTSKTCSNCGFTITSADYDRVLEKLKKTATGWMTTINGKELKVEGQITYYNRYKRQNVVKDLSVELDRLSEESVNNDISSWTKGRSGEALSLLKKRFSHRPVQEKFVCLNCGFETHADEQAALNIARSWLFLRSQEYKKYQTNKTTGNTDKRAFVETWQSFYRKKLKEVWKPAV

SEQ ID NO: 40799 - protein, 978 aa, synthetic construct
  REGION 1..978: note = engineered CasX variant
QEIKRINKIRRRLVKDSNTKKAGKTGPMKTLLVRVMTPDLRERLENLRKKPENIPQPISNTSRANLNKLLTDYTEMKKAILHVYWEEFQKDPVGLMSRVAQPASKKIDQNKLKPEMDEKGNLTTAGFACSQCGQPLFVYKLEQVSEKGKAYTNYFGRCNVAEHEKLILLDQLKPEKDSDEAVTYSLGKFGQRALDFYSIHVTKESTHPVKPLAQIAGNRYASVPVGKALSDACMGTIASFLSKYQDIIIEHQKVVKGNQKRLESLRELAGKENLEYPSVTLPPQPHTKEGVDAYNEVIARVRMWVNLNLWQKLKLSRDDAKPLLRLKNFPSFPLVERQANEVDWWDMVCNVKKLINEKKEDGKVFWQNLAGYKRQEALRPYLSSEEDRKKGKKFARYQLGDLLLHLEKKHGEDWGKVYDEAWERIDKKVEGLSKHIKLEEERRSEDAQSKAALTDWLRAKASFVIEGLKEADKDEFCRCELKLQKWYGDLRGKPFAIEAENSILDISGFSKQYNCAFIWQKDGVKKLNLYLIINYFKGGKLRFKKIKPEAFEANRFYTVINKKSGEIVPMEVNFNFDDPNLIILPLAFGKRQGREFIWNDLLSLETGSLKLANGRVIEKTLYNRRTRQDEPALFVALTFERREVLDSSNIKPMNLIGVDRGENIPAVIALTDPEGCPLSRFKDSLGNPTHILRIGESYKEKQRTIQAKKEVEQRRAGGYSRKYASKAKNLADDMVRNTARDLLYYAVTQDAMLIFENLSRGFGRQGKRTFMAERQYTRMEDWLTAKLAYEGLPSKTYLSKTLAQYTSKTCSNCGFTITSADYDRVLEKLKKTATGWMTTINGKELKVEGQITYYNRYKRQNVVKDLSVELDRLSEESVNNDISSWTKGRSGEALSLLKKRFSHRPVQEKFVCLNCGFETHADEQAALNIARSWLFLRSQEYKKYQTNKTTGNTDKRAFVETWQSFYRKKLKEVWKPAV

SEQ ID NO: 40800 - protein, 978 aa, synthetic construct
  REGION 1..978: note = engineered CasX variant
QEIKRINKIRRRLVKDSNTKKAGKTGPMKTLLVRVMTPDLRERLENLRKKPENIPQPISNTSRANLNKLLTDYTEMKKAILHVYWEEFQKDPVGLMSRVAQPASKKIDQNKLKPEMDEKGNLTTAGFACSQCGQPLFVYKLEQVSEKGKAYTNYFGRCNVAEHEKLIKLDQLKPEKDSDEAVTYSLGKFGQRALDFYSIHVTKESTHPVKPLAQIAGNRYASGPVGKALSDACMGTIASFLSKYQDIIIEHQKVVKGNQKRLESLRELAGKENLEYPSVTLPPQPHTKEGVDAYNEVIARVRMWVNLNLWQKLKLSRDDAKPLLRLKNFPSFPLVERQANEVDWWDMVCNVKKLINEKKEDGKVFWQNLAGYKRQEALRPYLSSEEDRKKGKKFARYQLGDLLLHLEKKHGEDWGKVYDEAWERIDKKVEGLSKHIKLEEERRSEDAQSKAALTDWLRAKASFVIEGLKEADKDEFCRCELKLQKWYGDLRGKPFAIEAENSILDISGFSKQYNCAFIWQKDGVKKLNLYLIINYFKGGKLRFKKIKPEAFEANRFYTVINKKSGEIVPMEVNFNFDDPNLIILPLAFGKRQGREFIWNDLLSLETGSLKLANGRVIEKTLYNRRTRQDEPALFVALTFERREVLDSSNIKPMNLIGVDRGENIPAVIALTDPEGCPLSRFKDSLGNPTHILRIGESYKEKQRTIQAKKEVEQRRAGGYSRKYASKAKNLADDMVRNTARDLLYYAVTQDAMLIFENLSRGFGRQGKRTFMAERQYTRMEDWLTAKLAYEGLPSKTYLSKTLAQYTSKTCSNCGFTITSADYDRVLEKLKKTATGWMTTINGKELKVEGQITYYNRYKRQNVVKDLSVELDRLSEESVNNDISSWTKGRSGEALSLLKKRFSHRPVQEKFVCLNCGFETHADEQAALNIARSWLFLRSQEYKKYQTNKTTGNTDKRAFVETWQSFYRKKLKEVWKPAV

SEQ ID NO: 40801 - protein, 977 aa, synthetic construct
  REGION 1..977: note = engineered CasX variant
QEIKRINKIRRRLVKDSNTKKAGKTGPMKTLLVRVMTPDLRERLENLRKKPENIPQPISNTSRANLNKLLTDYTEMKKAILHVYWEEFQKDPVGLMSRVAQPASKKIDQNKLKPEMDEKGNLTTAGFACSQCGQPLFVYKLEQVSEKGKAYTNYFGRCNVAEHEKLILLDQLKPEKDSDEAVTYSLGKFGQRALDFYSIHVTKESTHPVKPLAQIAGNRYASPVGKALSDACMGTIASFLSKYQDIIIEHQKVVKGNQKRLESLRELAGKENLEYPSVTLPPQPHTKEGVDAYNEVIARVRMWVNLNLWQKLKLSRDDAKPLLRLKNFPSFPLVERQANEVDWWDMVCNVKKLINEKKEDGKVFWQNLAGYKRQEALRPYLSSEEDRKKGKKFARYQLGDLLLHLEKKHGEDWGKVYDEAWERIDKKVEGLSKHIKLEEERRSEDAQSKAALTDWLRAKASFVIEGLKEADKDEFCRCELKLQKWYGDLRGKPFAIEAENSILDISGFSKQYNCAFIWQKDGVKKLNLYLIINYFKGGKLRFKKIKPEAFEANRFYTVINKKSGEIVPMEVNFNFDDPNLIILPLAFGKRQGREFIWNDLLSLETGSLKLANGRVIEKTLYNRRTRQDEPALFVALTFERREVLDSSNIKPMNLIGVDRGENIPAVIALTDPEGCPLSRFKDSLGNPTHILRIGESYKEKQRTIQAKKEVEQRRAGGYSRKYASKAKNLADDMVRNTARDLLYYAVTQDAMLIFENLSRGFGRQGKRTFMAERQYTRMEDWLTAKLAYEGLPSKTYLSKTLAQYTSKTCSNCGFTITSADYDRVLEKLKKTATGWMTTINGKELKVEGQITYYNRYKRQNVVKDLSVELDRLSEESVNNDISSWTKGRSGEALSLLKKRFSHRPVQEKFVCLNCGFETHADEQAALNIARSWLFLRSQEYKKYQTNKTTGNTDKRAFVETWQSFYRKKLKEVWKPAV

SEQ ID NO: 40802 - protein, 978 aa, synthetic construct
  REGION 1..978: note = engineered CasX variant
QEIKRINKIRRRLVKDSNTKKAGKTGPMKTLLVRVMTPDLRERLENLRKKPENIPQPISNTSRANLNKLLTDYTEMKKAILHVYWEEFQKDPVGLMSRVAQPASKKIDQNKLKPEMDEKGNLTTAGFACSQCGQPLFVYKLEQVSEKGKAYTNYFGRCNVAEHEKLILLDQLKPEKDSDEAVTYSLGKFGQRALDFYSIHVTKESTHPVKPLAQIAGNRYASYPVGKALSDACMGTIASFLSKYQDIIIEHQKVVKGNQKRLESLRELAGKENLEYPSVTLPPQPHTKEGVDAYNEVIARVRMWVNLNLWQKLKLSRDDAKPLLRLKGFPSFPLVERQANEVDWWDMVCNVKKLINEKKEDGKVFWQNLAGYKRQEALRPYLSSEEDRKKGKKFARYQLGDLLNHLEKKHGEDWGKVYDEAWERIDKKVEGLSKHIKLEEERRSEDAQSKAALTDWLRAKASFVIEGLKEADKDEFCRCELKLQKWYGDLRGKPFAIEAENSILDISGFSKQYNCAFIWQKDGVKKLNLYLIINYFKGGKLRFKKIKPEAFEANRFYTVINKKSGEIVPMEVNFNFDDPNLIILPLAFGKRQGREFIWNDLLSLETGSLKLANGRVIEKTLYNRRTRQDEPALFVALTFERREVLDSSNIKPMNLIGVDRGENIPAVIALTDPEGCPLSRFKDSLGNPTHILRIGESYKEKQRTIQAKKEVEQRRAGGYSRKYASKAKNLADDMVRNTARDLLYYAVTQDAMLIFENLSRGFGRQGKRTFMAERQYTRMEDWLTAKLAYEGLPSKTYLSKTLAQYTSKTCSNCGFTITSADYDRVLEKLKKTATGWMTTINGKELKVEGQITYYNRYKRQNVVKDLSVELDRLSEESVNNDISSWTKGRSGEALSLLKKRFSHRPVQEKFVCLNCGFETHADEQAALNIARSWLFLRSQEYKKYQTNKTTGNTDKRAFVETWQSFYRKKLKEVWKPAV

SEQ ID NO: 40803 - protein, 978 aa, synthetic construct
  REGION 1..978: note = engineered CasX variant
QEIKRINKIRRRLVKDSNTKKAGKTGPMKTLLVRVMTPDLRERLENLRKKPENIPQPISNTSRANLNKLLTDYTEMKKAILHVYWEEFQKDPVGLMSRVAQPASKKIDQNKLKPEMDEKGNLTTAGFACSQCGQPLFVYKLEQVSEKGKAYTNYFGRCNVAEHEKLILLDQLKPEKDSDEAVTYSLGKFGQRALDFYSIHVTKESTHPVKPLAQIAGNRYASHPVGKALSDACMGTIASFLSKYQDIIIEHQKVVKGNQKRLESLRELAGKENLEYPSVTLPPQPHTKEGVDAYNEVIARVRMWVNLNLWQKLKLSRDDAKPLLRLKGFPSFPLVERQANEVDWWDMVCNVKKLINEKKEDGKVFWQNLAGYKRQEALRPYLSSEEDRKKGKKFARYQLGDLLNHLEKKHGEDWGKVYDEAWERIDKKVEGLSKHIKLEEERRSEDAQSKAALTDWLRAKASFVIEGLKEADKDEFCRCELKLQKWYGDLRGKPFAIEAENSILDISGFSKQYNCAFIWQKDGVKKLNLYLIINYFKGGKLRFKKIKPEAFEANRFYTVINKKSGEIVPMEVNFNFDDPNLIILPLAFGKRQGREFIWNDLLSLETGSLKLANGRVIEKTLYNRRTRQDEPALFVALTFERREVLDSSNIKPMNLIGVDRGENIPAVIALTDPEGCPLSRFKDSLGNPTHILRIGESYKEKQRTIQAKKEVEQRRAGGYSRKYASKAKNLADDMVRNTARDLLYYAVTQDAMLIFENLSRGFGRQGKRTFMAERQYTRMEDWLTAKLAYEGLPSKTYLSKTLAQYTSKTCSNCGFTITSADYDRVLEKLKKTATGWMTTINGKELKVEGQITYYNRYKRQNVVKDLSVELDRLSEESVNNDISSWTKGRSGEALSLLKKRFSHRPVQEKFVCLNCGFETHADEQAALNIARSWLFLRSQEYKKYQTNKTTGNTDKRAFVETWQSFYRKKLKEVWKPAV

SEQ ID NO: 40804 - protein, 978 aa, synthetic construct
  REGION 1..978: note = engineered CasX variant
QEIKRINKIRRRLVKDSNTKKAGKTGPMKTLLVRVMTPDLRERLENLRKKPENIPQPISNTSRANLNKLLTDYTEMKKAILHVYWEEFQKDPVGLMSRVAQPASKKIDQNKLKPEMDEKGNLTTAGFACSQCGQPLFVYKLEQVSEKGKAYTNYFGRCNVAEHEKLILLDQLKPEKDSDEAVTYSLGKFGQRALDFYSIHVTKESTHPVKPLAQIAGNRYASSPVGKALSDACMGTIASFLSKYQDIIIEHQKVVKGNQKRLESLRELAGKENLEYPSVTLPPQPHTKEGVDAYNEVIARVRMWVNLNLWQKLKLSRDDAKPLLRLKGFPSFPLVERQANEVDWWDMVCNVKKLINEKKEDGKVFWQNLAGYKRQEALRPYLSSEEDRKKGKKFARYQLGDLLNHLEKKHGEDWGKVYDEAWERIDKKVEGLSKHIKLEEERRSEDAQSKAALTDWLRAKASFVIEGLKEADKDEFCRCELKLQKWYGDLRGKPFAIEAENSILDISGFSKQYNCAFIWQKDGVKKLNLYLIINYFKGGKLRFKKIKPEAFEANRFYTVINKKSGEIVPMEVNFNFDDPNLIILPLAFGKRQGREFIWNDLLSLETGSLKLANGRVIEKTLYNRRTRQDEPALFVALTFERREVLDSSNIKPMNLIGVDRGENIPAVIALTDPEGCPLSRFKDSLGNPTHILRIGESYKEKQRTIQAKKEVEQRRAGGYSRKYASKAKNLADDMVRNTARDLLYYAVTQDAMLIFENLSRGFGRQGKRTFMAERQYTRMEDWLTAKLAYEGLPSKTYLSKTLAQYTSKTCSNCGFTITSADYDRVLEKLKKTATGWMTTINGKELKVEGQITYYNRYKRQNVVKDLSVELDRLSEESVNNDISSWTKGRSGEALSLLKKRFSHRPVQEKFVCLNCGFETHADEQAALNIARSWLFLRSQEYKKYQTNKTTGNTDKRAFVETWQSFYRKKLKEVWKPAV

SEQ ID NO: 40805 - protein, 978 aa, synthetic construct
  REGION 1..978: note = engineered CasX variant
QEIKRINKIRRRLVKDSNTKKAGKTGPMKTLLVRVMTPDLRERLENLRKKPENIPQPISNTSRANLNKLLTDYTEMKKAILHVYWEEFQKDPVGLMSRVAQPASKKIDQNKLKPEMDEKGNLTTAGFACSQCGQPLFVYKLEQVSEKGKAYTNYFGRCNVAEHEKLILLDQLKPEKDSDEAVTYSLGKFGQRALDFYSIHVTKESTHPVKPLAQIAGNRYASTPVGKALSDACMGTIASFLSKYQDIIIEHQKVVKGNQKRLESLRELAGKENLEYPSVTLPPQPHTKEGVDAYNEVIARVRMWVNLNLWQKLKLSRDDAKPLLRLKGFPSFPLVERQANEVDWWDMVCNVKKLINEKKEDGKVFWQNLAGYKRQEALRPYLSSEEDRKKGKKFARYQLGDLLNHLEKKHGEDWGKVYDEAWERIDKKVEGLSKHIKLEEERRSEDAQSKAALTDWLRAKASFVIEGLKEADKDEFCRCELKLQKWYGDLRGKPFAIEAENSILDISGFSKQYNCAFIWQKDGVKKLNLYLIINYFKGGKLRFKKIKPEAFEANRFYTVINKKSGEIVPMEVNFNFDDPNLIILPLAFGKRQGREFIWNDLLSLETGSLKLANGRVIEKTLYNRRTRQDEPALFVALTFERREVLDSSNIKPMNLIGVDRGENIPAVIALTDPEGCPLSRFKDSLGNPTHILRIGESYKEKQRTIQAKKEVEQRRAGGYSRKYASKAKNLADDMVRNTARDLLYYAVTQDAMLIFENLSRGFGRQGKRTFMAERQYTRMEDWLTAKLAYEGLPSKTYLSKTLAQYTSKTCSNCGFTITSADYDRVLEKLKKTATGWMTTINGKELKVEGQITYYNRYKRQNVVKDLSVELDRLSEESVNNDISSWTKGRSGEALSLLKKRFSHRPVQEKFVCLNCGFETHADEQAALNIARSWLFLRSQEYKKYQTNKTTGNTDKRAFVETWQSFYRKKLKEVWKPAV

SEQ ID NO: 40806 - protein, 978 aa, synthetic construct
  REGION 1..978: note = engineered CasX variant
QEIKRINKIRRRLVKDSNTKKAGKTGPMKTLLVRVMTPDLRERLENLRKKPENIPQPISNTSRANLNKLLTDYTEMKKAILHVYWEEFQKDPVGLMSRVAQPASKKIDQNKLKPEMDEKGNLTTAGFACSQCGQPLFVYKLEQVSEKGKAYTNYFGRCNVAEHEKLILLDQLKPEKDSDEAVTYSLGKFGQRALDFYSIHVTKESTHPVKPLAQIAGNRYASAPVGKALSDACMGTIASFLSKYQDIIIEHQKVVKGNQKRLESLRELAGKENLEYPSVTLPPQPHTKEGVDAYNEVIARVRMWVNLNLWQKLKLSRDDAKPLLRLKGFPSFPLVERQANEVDWWDMVCNVKKLINEKKEDGKVFWQNLAGYKRQEALRPYLSSEEDRKKGKKFARYQLGDLLNHLEKKHGEDWGKVYDEAWERIDKKVEGLSKHIKLEEERRSEDAQSKAALTDWLRAKASFVIEGLKEADKDEFCRCELKLQKWYGDLRGKPFAIEAENSILDISGFSKQYNCAFIWQKDGVKKLNLYLIINYFKGGKLRFKKIKPEAFEANRFYTVINKKSGEIVPMEVNFNFDDPNLIILPLAFGKRQGREFIWNDLLSLETGSLKLANGRVIEKTLYNRRTRQDEPALFVALTFERREVLDSSNIKPMNLIGVDRGENIPAVIALTDPEGCPLSRFKDSLGNPTHILRIGESYKEKQRTIQAKKEVEQRRAGGYSRKYASKAKNLADDMVRNTARDLLYYAVTQDAMLIFENLSRGFGRQGKRTFMAERQYTRMEDWLTAKLAYEGLPSKTYLSKTLAQYTSKTCSNCGFTITSADYDRVLEKLKKTATGWMTTINGKELKVEGQITYYNRYKRQNVVKDLSVELDRLSEESVNNDISSWTKGRSGEALSLLKKRFSHRPVQEKFVCLNCGFETHADEQAALNIARSWLFLRSQEYKKYQTNKTTGNTDKRAFVETWQSFYRKKLKEVWKPAV

SEQ ID NO: 40807 - protein, 978 aa, synthetic construct
  REGION 1..978: note = engineered CasX variant
QEIKRINKIRRRLVKDSNTKKAGKTGPMKTLLVRVMTPDLRERLENLRKKPENIPQPISNTSRANLNKLLTDYTEMKKAILHVYWEEFQKDPVGLMSRVAQPASKKIDQNKLKPEMDEKGNLTTAGFACSQCGQPLFVYKLEQVSEKGKAYTNYFGRCNVAEHEKLILLDQLKPEKDSDEAVTYSLGKFGQRALDFYSIHVTKESTHPVKPLAQIAGNRYASVPVGKALSDACMGTIASFLSKYQDIIIEHQKVVKGNQKRLESLRELAGKENLEYPSVTLPPQPHTKEGVDAYNEVIARVRMWVNLNLWQKLKLSRDDAKPLLRLKGFPSFPLVERQANEVDWWDMVCNVKKLINEKKEDGKVFWQNLAGYKRQEALRPYLSSEEDRKKGKKFARYQLGDLLNHLEKKHGEDWGKVYDEAWERIDKKVEGLSKHIKLEEERRSEDAQSKAALTDWLRAKASFVIEGLKEADKDEFCRCELKLQKWYGDLRGKPFAIEAENSILDISGFSKQYNCAFIWQKDGVKKLNLYLIINYFKGGKLRFKKIKPEAFEANRFYTVINKKSGEIVPMEVNFNFDDPNLIILPLAFGKRQGREFIWNDLLSLETGSLKLANGRVIEKTLYNRRTRQDEPALFVALTFERREVLDSSNIKPMNLIGVDRGENIPAVIALTDPEGCPLSRFKDSLGNPTHILRIGESYKEKQRTIQAKKEVEQRRAGGYSRKYASKAKNLADDMVRNTARDLLYYAVTQDAMLIFENLSRGFGRQGKRTFMAERQYTRMEDWLTAKLAYEGLPSKTYLSKTLAQYTSKTCSNCGFTITSADYDRVLEKLKKTATGWMTTINGKELKVEGQITYYNRYKRQNVVKDLSVELDRLSEESVNNDISSWTKGRSGEALSLLKKRFSHRPVQEKFVCLNCGFETHADEQAALNIARSWLFLRSQEYKKYQTNKTTGNTDKRAFVETWQSFYRKKLKEVWKPAV

SEQ ID NO: 40808 - protein, 978 aa, synthetic construct
  REGION 1..978: note = engineered CasX variant
QEIKRINKIRRRLVKDSNTKKAGKTGPMKTLLVRVMTPDLRERLENLRKKPENIPQPISNTSRANLNKLLTDYTEMKKAILHVYWEEFQKDPVGLMSRVAQPASKKIDQNKLKPEMDEKGNLTTAGFACSQCGQPLFVYKLEQVSEKGKAYTNYFGRCNVAEHEKLIKLDQLKPEKDSDEAVTYSLGKFGQRALDFYSIHVTKESTHPVKPLAQIAGNRYASGPVGKALSDACMGTIASFLSKYQDIIIEHQKVVKGNQKRLESLRELAGKENLEYPSVTLPPQPHTKEGVDAYNEVIARVRMWVNLNLWQKLKLSRDDAKPLLRLKGFPSFPLVERQANEVDWWDMVCNVKKLINEKKEDGKVFWQNLAGYKRQEALRPYLSSEEDRKKGKKFARYQLGDLLNHLEKKHGEDWGKVYDEAWERIDKKVEGLSKHIKLEEERRSEDAQSKAALTDWLRAKASFVIEGLKEADKDEFCRCELKLQKWYGDLRGKPFAIEAENSILDISGFSKQYNCAFIWQKDGVKKLNLYLIINYFKGGKLRFKKIKPEAFEANRFYTVINKKSGEIVPMEVNFNFDDPNLIILPLAFGKRQGREFIWNDLLSLETGSLKLANGRVIEKTLYNRRTRQDEPALFVALTFERREVLDSSNIKPMNLIGVDRGENIPAVIALTDPEGCPLSRFKDSLGNPTHILRIGESYKEKQRTIQAKKEVEQRRAGGYSRKYASKAKNLADDMVRNTARDLLYYAVTQDAMLIFENLSRGFGRQGKRTFMAERQYTRMEDWLTAKLAYEGLPSKTYLSKTLAQYTSKTCSNCGFTITSADYDRVLEKLKKTATGWMTTINGKELKVEGQITYYNRYKRQNVVKDLSVELDRLSEESVNNDISSWTKGRSGEALSLLKKRFSHRPVQEKFVCLNCGFETHADEQAALNIARSWLFLRSQEYKKYQTNKTTGNTDKRAFVETWQSFYRKKLKEVWKPAV

SEQ ID NO: 40809 - protein, 977 aa, synthetic construct
  REGION 1..977: note = engineered CasX variant
QEIKRINKIRRRLVKDSNTKKAGKTGPMKTLLVRVMTPDLRERLENLRKKPENIPQPISNTSRANLNKLLTDYTEMKKAILHVYWEEFQKDPVGLMSRVAQPASKKIDQNKLKPEMDEKGNLTTAGFACSQCGQPLFVYKLEQVSEKGKAYTNYFGRCNVAEHEKLILLDQLKPEKDSDEAVTYSLGKFGQRALDFYSIHVTKESTHPVKPLAQIAGNRYASPVGKALSDACMGTIASFLSKYQDIIIEHQKVVKGNQKRLESLRELAGKENLEYPSVTLPPQPHTKEGVDAYNEVIARVRMWVNLNLWQKLKLSRDDAKPLLRLKGFPSFPLVERQANEVDWWDMVCNVKKLINEKKEDGKVFWQNLAGYKRQEALRPYLSSEEDRKKGKKFARYQLGDLLNHLEKKHGEDWGKVYDEAWERIDKKVEGLSKHIKLEEERRSEDAQSKAALTDWLRAKASFVIEGLKEADKDEFCRCELKLQKWYGDLRGKPFAIEAENSILDISGFSKQYNCAFIWQKDGVKKLNLYLIINYFKGGKLRFKKIKPEAFEANRFYTVINKKSGEIVPMEVNFNFDDPNLIILPLAFGKRQGREFIWNDLLSLETGSLKLANGRVIEKTLYNRRTRQDEPALFVALTFERREVLDSSNIKPMNLIGVDRGENIPAVIALTDPEGCPLSRFKDSLGNPTHILRIGESYKEKQRTIQAKKEVEQRRAGGYSRKYASKAKNLADDMVRNTARDLLYYAVTQDAMLIFENLSRGFGRQGKRTFMAERQYTRMEDWLTAKLAYEGLPSKTYLSKTLAQYTSKTCSNCGFTITSADYDRVLEKLKKTATGWMTTINGKELKVEGQITYYNRYKRQNVVKDLSVELDRLSEESVNNDISSWTKGRSGEALSLLKKRFSHRPVQEKFVCLNCGFETHADEQAALNIARSWLFLRSQEYKKYQTNKTTGNTDKRAFVETWQSFYRKKLKEVWKPAV

SEQ ID NO: 40810 - protein, 978 aa, synthetic construct
  REGION 1..978: note = engineered CasX variant
QEIKRINKIRRRLVKDSNTKKAGKTGPMKTLLVRVMTPDLRERLENLRKKPENIPQPISNTSRANLNKLLTDYTEMKKAILHVYWEEFQKDPVGLMSRVAQPASKKIDQNKLKPEMDEKGNLTTAGFACSQCGQPLFVYKLEQVSEKGKAYTNYFGRCNVAEHEKLILLDQLKPEKDSDEAVTYSLGKFGQRALDFYSIHVTKESTHPVKPLAQIAGNRYASYPVGKALSDACMGTIASFLSKYQDIIIEHQKVVKGNQKRLESLRELAGKENLEYPSVTLPPQPHTKEGVDAYNEVIARVRMWVNLNLWQKLKLSRDDAKPLLRLKGFPSFPLVERQANEVDWWDMVCNVKKLINEKKEDGKVFWQNLAGYKRQEALRPYLSSEEDRKKGKKFARYQLGDLLWHLEKKHGEDWGKVYDEAWERIDKKVEGLSKHIKLEEERRSEDAQSKAALTDWLRAKASFVIEGLKEADKDEFCRCELKLQKWYGDLRGKPFAIEAENSILDISGFSKQYNCAFIWQKDGVKKLNLYLIINYFKGGKLRFKKIKPEAFEANRFYTVINKKSGEIVPMEVNFNFDDPNLIILPLAFGKRQGREFIWNDLLSLETGSLKLANGRVIEKTLYNRRTRQDEPALFVALTFERREVLDSSNIKPMNLIGVDRGENIPAVIALTDPEGCPLSRFKDSLGNPTHILRIGESYKEKQRTIQAKKEVEQRRAGGYSRKYASKAKNLADDMVRNTARDLLYYAVTQDAMLIFENLSRGFGRQGKRTFMAERQYTRMEDWLTAKLAYEGLPSKTYLSKTLAQYTSKTCSNCGFTITSADYDRVLEKLKKTATGWMTTINGKELKVEGQITYYNRYKRQNVVKDLSVELDRLSEESVNNDISSWTKGRSGEALSLLKKRFSHRPVQEKFVCLNCGFETHADEQAALNIARSWLFLRSQEYKKYQTNKTTGNTDKRAFVETWQSFYRKKLKEVWKPAV

SEQ ID NO: 40811 - protein, 978 aa, synthetic construct
  REGION 1..978: note = engineered CasX variant
QEIKRINKIRRRLVKDSNTKKAGKTGPMKTLLVRVMTPDLRERLENLRKKPENIPQPISNTSRANLNKLLTDYTEMKKAILHVYWEEFQKDPVGLMSRVAQPASKKIDQNKLKPEMDEKGNLTTAGFACSQCGQPLFVYKLEQVSEKGKAYTNYFGRCNVAEHEKLILLDQLKPEKDSDEAVTYSLGKFGQRALDFYSIHVTKESTHPVKPLAQIAGNRYASHPVGKALSDACMGTIASFLSKYQDIIIEHQKVVKGNQKRLESLRELAGKENLEYPSVTLPPQPHTKEGVDAYNEVIARVRMWVNLNLWQKLKLSRDDAKPLLRLKGFPSFPLVERQANEVDWWDMVCNVKKLINEKKEDGKVFWQNLAGYKRQEALRPYLSSEEDRKKGKKFARYQLGDLLWHLEKKHGEDWGKVYDEAWERIDKKVEGLSKHIKLEEERRSEDAQSKAALTDWLRAKASFVIEGLKEADKDEFCRCELKLQKWYGDLRGKPFAIEAENSILDISGFSKQYNCAFIWQKDGVKKLNLYLIINYFKGGKLRFKKIKPEAFEANRFYTVINKKSGEIVPMEVNFNFDDPNLIILPLAFGKRQGREFIWNDLLSLETGSLKLANGRVIEKTLYNRRTRQDEPALFVALTFERREVLDSSNIKPMNLIGVDRGENIPAVIALTDPEGCPLSRFKDSLGNPTHILRIGESYKEKQRTIQAKKEVEQRRAGGYSRKYASKAKNLADDMVRNTARDLLYYAVTQDAMLIFENLSRGFGRQGKRTFMAERQYTRMEDWLTAKLAYEGLPSKTYLSKTLAQYTSKTCSNCGFTITSADYDRVLEKLKKTATGWMTTINGKELKVEGQITYYNRYKRQNVVKDLSVELDRLSEESVNNDISSWTKGRSGEALSLLKKRFSHRPVQEKFVCLNCGFETHADEQAALNIARSWLFLRSQEYKKYQTNKTTGNTDKRAFVETWQSFYRKKLKEVWKPAV

SEQ ID NO: 40812 - protein, 978 aa, synthetic construct
  REGION 1..978: note = engineered CasX variant
QEIKRINKIRRRLVKDSNTKKAGKTGPMKTLLVRVMTPDLRERLENLRKKPENIPQPISNTSRANLNKLLTDYTEMKKAILHVYWEEFQKDPVGLMSRVAQPASKKIDQNKLKPEMDEKGNLTTAGFACSQCGQPLFVYKLEQVSEKGKAYTNYFGRCNVAEHEKLILLDQLKPEKDSDEAVTYSLGKFGQRALDFYSIHVTKESTHPVKPLAQIAGNRYASSPVGKALSDACMGTIASFLSKYQDIIIEHQKVVKGNQKRLESLRELAGKENLEYPSVTLPPQPHTKEGVDAYNEVIARVRMWVNLNLWQKLKLSRDDAKPLLRLKGFPSFPLVERQANEVDWWDMVCNVKKLINEKKEDGKVFWQNLAGYKRQEALRPYLSSEEDRKKGKKFARYQLGDLLWHLEKKHGEDWGKVYDEAWERIDKKVEGLSKHIKLEEERRSEDAQSKAALTDWLRAKASFVIEGLKEADKDEFCRCELKLQKWYGDLRGKPFAIEAENSILDISGFSKQYNCAFIWQKDGVKKLNLYLIINYFKGGKLRFKKIKPEAFEANRFYTVINKKSGEIVPMEVNFNFDDPNLIILPLAFGKRQGREFIWNDLLSLETGSLKLANGRVIEKTLYNRRTRQDEPALFVALTFERREVLDSSNIKPMNLIGVDRGENIPAVIALTDPEGCPLSRFKDSLGNPTHILRIGESYKEKQRTIQAKKEVEQRRAGGYSRKYASKAKNLADDMVRNTARDLLYYAVTQDAMLIFENLSRGFGRQGKRTFMAERQYTRMEDWLTAKLAYEGLPSKTYLSKTLAQYTSKTCSNCGFTITSADYDRVLEKLKKTATGWMTTINGKELKVEGQITYYNRYKRQNVVKDLSVELDRLSEESVNNDISSWTKGRSGEALSLLKKRFSHRPVQEKFVCLNCGFETHADEQAALNIARSWLFLRSQEYKKYQTNKTTGNTDKRAFVETWQSFYRKKLKEVWKPAV

SEQ ID NO: 40813 - protein, 978 aa, synthetic construct
  REGION 1..978: note = engineered CasX variant
QEIKRINKIRRRLVKDSNTKKAGKTGPMKTLLVRVMTPDLRERLENLRKKPENIPQPISNTSRANLNKLLTDYTEMKKAILHVYWEEFQKDPVGLMSRVAQPASKKIDQNKLKPEMDEKGNLTTAGFACSQCGQPLFVYKLEQVSEKGKAYTNYFGRCNVAEHEKLILLDQLKPEKDSDEAVTYSLGKFGQRALDFYSIHVTKESTHPVKPLAQIAGNRYASTPVGKALSDACMGTIASFLSKYQDIIIEHQKVVKGNQKRLESLRELAGKENLEYPSVTLPPQPHTKEGVDAYNEVIARVRMWVNLNLWQKLKLSRDDAKPLLRLKGFPSFPLVERQANEVDWWDMVCNVKKLINEKKEDGKVFWQNLAGYKRQEALRPYLSSEEDRKKGKKFARYQLGDLLWHLEKKHGEDWGKVYDEAWERIDKKVEGLSKHIKLEEERRSEDAQSKAALTDWLRAKASFVIEGLKEADKDEFCRCELKLQKWYGDLRGKPFAIEAENSILDISGFSKQYNCAFIWQKDGVKKLNLYLIINYFKGGKLRFKKIKPEAFEANRFYTVINKKSGEIVPMEVNFNFDDPNLIILPLAFGKRQGREFIWNDLLSLETGSLKLANGRVIEKTLYNRRTRQDEPALFVALTFERREVLDSSNIKPMNLIGVDRGENIPAVIALTDPEGCPLSRFKDSLGNPTHILRIGESYKEKQRTIQAKKEVEQRRAGGYSRKYASKAKNLADDMVRNTARDLLYYAVTQDAMLIFENLSRGFGRQGKRTFMAERQYTRMEDWLTAKLAYEGLPSKTYLSKTLAQYTSKTCSNCGFTITSADYDRVLEKLKKTATGWMTTINGKELKVEGQITYYNRYKRQNVVKDLSVELDRLSEESVNNDISSWTKGRSGEALSLLKKRFSHRPVQEKFVCLNCGFETHADEQAALNIARSWLFLRSQEYKKYQTNKTTGNTDKRAFVETWQSFYRKKLKEVWKPAV

SEQ ID NO: 40814 - protein, 978 aa, synthetic construct
  REGION 1..978: note = engineered CasX variant
QEIKRINKIRRRLVKDSNTKKAGKTGPMKTLLVRVMTPDLRERLENLRKKPENIPQPISNTSRANLNKLLTDYTEMKKAILHVYWEEFQKDPVGLMSRVAQPASKKIDQNKLKPEMDEKGNLTTAGFACSQCGQPLFVYKLEQVSEKGKAYTNYFGRCNVAEHEKLILLDQLKPEKDSDEAVTYSLGKFGQRALDFYSIHVTKESTHPVKPLAQIAGNRYASAPVGKALSDACMGTIASFLSKYQDIIIEHQKVVKGNQKRLESLRELAGKENLEYPSVTLPPQPHTKEGVDAYNEVIARVRMWVNLNLWQKLKLSRDDAKPLLRLKGFPSFPLVERQANEVDWWDMVCNVKKLINEKKEDGKVFWQNLAGYKRQEALRPYLSSEEDRKKGKKFARYQLGDLLWHLEKKHGEDWGKVYDEAWERIDKKVEGLSKHIKLEEERRSEDAQSKAALTDWLRAKASFVIEGLKEADKDEFCRCELKLQKWYGDLRGKPFAIEAENSILDISGFSKQYNCAFIWQKDGVKKLNLYLIINYFKGGKLRFKKIKPEAFEANRFYTVINKKSGEIVPMEVNFNFDDPNLIILPLAFGKRQGREFIWNDLLSLETGSLKLANGRVIEKTLYNRRTRQDEPALFVALTFERREVLDSSNIKPMNLIGVDRGENIPAVIALTDPEGCPLSRFKDSLGNPTHILRIGESYKEKQRTIQAKKEVEQRRAGGYSRKYASKAKNLADDMVRNTARDLLYYAVTQDAMLIFENLSRGFGRQGKRTFMAERQYTRMEDWLTAKLAYEGLPSKTYLSKTLAQYTSKTCSNCGFTITSADYDRVLEKLKKTATGWMTTINGKELKVEGQITYYNRYKRQNVVKDLSVELDRLSEESVNNDISSWTKGRSGEALSLLKKRFSHRPVQEKFVCLNCGFETHADEQAALNIARSWLFLRSQEYKKYQTNKTTGNTDKRAFVETWQSFYRKKLKEVWKPAV

SEQ ID NO: 40815 - protein, 978 aa, synthetic construct
  REGION 1..978: note = engineered CasX variant
QEIKRINKIRRRLVKDSNTKKAGKTGPMKTLLVRVMTPDLRERLENLRKKPENIPQPISNTSRANLNKLLTDYTEMKKAILHVYWEEFQKDPVGLMSRVAQPASKKIDQNKLKPEMDEKGNLTTAGFACSQCGQPLFVYKLEQVSEKGKAYTNYFGRCNVAEHEKLILLDQLKPEKDSDEAVTYSLGKFGQRALDFYSIHVTKESTHPVKPLAQIAGNRYASVPVGKALSDACMGTIASFLSKYQDIIIEHQKVVKGNQKRLESLRELAGKENLEYPSVTLPPQPHTKEGVDAYNEVIARVRMWVNLNLWQKLKLSRDDAKPLLRLKGFPSFPLVERQANEVDWWDMVCNVKKLINEKKEDGKVFWQNLAGYKRQEALRPYLSSEEDRKKGKKFARYQLGDLLWHLEKKHGEDWGKVYDEAWERIDKKVEGLSKHIKLEEERRSEDAQSKAALTDWLRAKASFVIEGLKEADKDEFCRCELKLQKWYGDLRGKPFAIEAENSILDISGFSKQYNCAFIWQKDGVKKLNLYLIINYFKGGKLRFKKIKPEAFEANRFYTVINKKSGEIVPMEVNFNFDDPNLIILPLAFGKRQGREFIWNDLLSLETGSLKLANGRVIEKTLYNRRTRQDEPALFVALTFERREVLDSSNIKPMNLIGVDRGENIPAVIALTDPEGCPLSRFKDSLGNPTHILRIGESYKEKQRTIQAKKEVEQRRAGGYSRKYASKAKNLADDMVRNTARDLLYYAVTQDAMLIFENLSRGFGRQGKRTFMAERQYTRMEDWLTAKLAYEGLPSKTYLSKTLAQYTSKTCSNCGFTITSADYDRVLEKLKKTATGWMTTINGKELKVEGQITYYNRYKRQNVVKDLSVELDRLSEESVNNDISSWTKGRSGEALSLLKKRFSHRPVQEKFVCLNCGFETHADEQAALNIARSWLFLRSQEYKKYQTNKTTGNTDKRAFVETWQSFYRKKLKEVWKPAV

SEQ ID NO: 40816 - protein, 978 aa, synthetic construct
  REGION 1..978: note = engineered CasX variant
QEIKRINKIRRRLVKDSNTKKAGKTGPMKTLLVRVMTPDLRERLENLRKKPENIPQPISNTSRANLNKLLTDYTEMKKAILHVYWEEFQKDPVGLMSRVAQPASKKIDQNKLKPEMDEKGNLTTAGFACSQCGQPLFVYKLEQVSEKGKAYTNYFGRCNVAEHEKLIKLDQLKPEKDSDEAVTYSLGKFGQRALDFYSIHVTKESTHPVKPLAQIAGNRYASGPVGKALSDACMGTIASFLSKYQDIIIEHQKVVKGNQKRLESLRELAGKENLEYPSVTLPPQPHTKEGVDAYNEVIARVRMWVNLNLWQKLKLSRDDAKPLLRLKGFPSFPLVERQANEVDWWDMVCNVKKLINEKKEDGKVFWQNLAGYKRQEALRPYLSSEEDRKKGKKFARYQLGDLLWHLEKKHGEDWGKVYDEAWERIDKKVEGLSKHIKLEEERRSEDAQSKAALTDWLRAKASFVIEGLKEADKDEFCRCELKLQKWYGDLRGKPFAIEAENSILDISGFSKQYNCAFIWQKDGVKKLNLYLIINYFKGGKLRFKKIKPEAFEANRFYTVINKKSGEIVPMEVNFNFDDPNLIILPLAFGKRQGREFIWNDLLSLETGSLKLANGRVIEKTLYNRRTRQDEPALFVALTFERREVLDSSNIKPMNLIGVDRGENIPAVIALTDPEGCPLSRFKDSLGNPTHILRIGESYKEKQRTIQAKKEVEQRRAGGYSRKYASKAKNLADDMVRNTARDLLYYAVTQDAMLIFENLSRGFGRQGKRTFMAERQYTRMEDWLTAKLAYEGLPSKTYLSKTLAQYTSKTCSNCGFTITSADYDRVLEKLKKTATGWMTTINGKELKVEGQITYYNRYKRQNVVKDLSVELDRLSEESVNNDISSWTKGRSGEALSLLKKRFSHRPVQEKFVCLNCGFETHADEQAALNIARSWLFLRSQEYKKYQTNKTTGNTDKRAFVETWQSFYRKKLKEVWKPAV

SEQ ID NO: 40817 - protein, 977 aa, synthetic construct
  REGION 1..977: note = engineered CasX variant
QEIKRINKIRRRLVKDSNTKKAGKTGPMKTLLVRVMTPDLRERLENLRKKPENIPQPISNTSRANLNKLLTDYTEMKKAILHVYWEEFQKDPVGLMSRVAQPASKKIDQNKLKPEMDEKGNLTTAGFACSQCGQPLFVYKLEQVSEKGKAYTNYFGRCNVAEHEKLILLDQLKPEKDSDEAVTYSLGKFGQRALDFYSIHVTKESTHPVKPLAQIAGNRYASPVGKALSDACMGTIASFLSKYQDIIIEHQKVVKGNQKRLESLRELAGKENLEYPSVTLPPQPHTKEGVDAYNEVIARVRMWVNLNLWQKLKLSRDDAKPLLRLKGFPSFPLVERQANEVDWWDMVCNVKKLINEKKEDGKVFWQNLAGYKRQEALRPYLSSEEDRKKGKKFARYQLGDLLWHLEKKHGEDWGKVYDEAWERIDKKVEGLSKHIKLEEERRSEDAQSKAALTDWLRAKASFVIEGLKEADKDEFCRCELKLQKWYGDLRGKPFAIEAENSILDISGFSKQYNCAFIWQKDGVKKLNLYLIINYFKGGKLRFKKIKPEAFEANRFYTVINKKSGEIVPMEVNFNFDDPNLIILPLAFGKRQGREFIWNDLLSLETGSLKLANGRVIEKTLYNRRTRQDEPALFVALTFERREVLDSSNIKPMNLIGVDRGENIPAVIALTDPEGCPLSRFKDSLGNPTHILRIGESYKEKQRTIQAKKEVEQRRAGGYSRKYASKAKNLADDMVRNTARDLLYYAVTQDAMLIFENLSRGFGRQGKRTFMAERQYTRMEDWLTAKLAYEGLPSKTYLSKTLAQYTSKTCSNCGFTITSADYDRVLEKLKKTATGWMTTINGKELKVEGQITYYNRYKRQNVVKDLSVELDRLSEESVNNDISSWTKGRSGEALSLLKKRFSHRPVQEKFVCLNCGFETHADEQAALNIARSWLFLRSQEYKKYQTNKTTGNTDKRAFVETWQSFYRKKLKEVWKPAV

SEQ ID NO: 40818 - protein, 978 aa, synthetic construct
  REGION 1..978: note = engineered CasX variant
QEIKRINKIRRRLVKDSNTKKAGKTGPMKTLLVRVMTPDLRERLENLRKKPENIPQPISNTSRANLNKLLTDYTEMKKAILHVYWEEFQKDPVGLMSRVAQPASKKIDQNKLKPEMDEKGNLTTAGFACSQCGQPLFVYKLEQVSEKGKAYTNYFGRCNVAEHEKLILLDQLKPEKDSDEAVTYSLGKFGQRALDFYSIHVTKESTHPVKPLAQIAGNRYASYPVGKALSDACMGTIASFLSKYQDIIIEHQKVVKGNQKRLESLRELAGKENLEYPSVTLPPQPHTKEGVDAYNEVIARVRMWVNLNLWQKLKLSRDDAKPLLRLKGFPSFPLVERQANEVDWWDMVCNVKKLINEKKEDGKVFWQNLAGYKRQEALRPYLSSEEDRKKGKKFARYQLGDLLLHLYKKHGEDWGKVYDEAWERIDKKVEGLSKHIKLEEERRSEDAQSKAALTDWLRAKASFVIEGLKEADKDEFCRCELKLQKWYGDLRGKPFAIEAENSILDISGFSKQYNCAFIWQKDGVKKLNLYLIINYFKGGKLRFKKIKPEAFEANRFYTVINKKSGEIVPMEVNFNFDDPNLIILPLAFGKRQGREFIWNDLLSLETGSLKLANGRVIEKTLYNRRTRQDEPALFVALTFERREVLDSSNIKPMNLIGVDRGENIPAVIALTDPEGCPLSRFKDSLGNPTHILRIGESYKEKQRTIQAKKEVEQRRAGGYSRKYASKAKNLADDMVRNTARDLLYYAVTQDAMLIFENLSRGFGRQGKRTFMAERQYTRMEDWLTAKLAYEGLPSKTYLSKTLAQYTSKTCSNCGFTITSADYDRVLEKLKKTATGWMTTINGKELKVEGQITYYNRYKRQNVVKDLSVELDRLSEESVNNDISSWTKGRSGEALSLLKKRFSHRPVQEKFVCLNCGFETHADEQAALNIARSWLFLRSQEYKKYQTNKTTGNTDKRAFVETWQSFYRKKLKEVWKPAV

SEQ ID NO: 40819 - protein, 978 aa, synthetic construct
  REGION 1..978: note = engineered CasX variant
QEIKRINKIRRRLVKDSNTKKAGKTGPMKTLLVRVMTPDLRERLENLRKKPENIPQPISNTSRANLNKLLTDYTEMKKAILHVYWEEFQKDPVGLMSRVAQPASKKIDQNKLKPEMDEKGNLTTAGFACSQCGQPLFVYKLEQVSEKGKAYTNYFGRCNVAEHEKLILLDQLKPEKDSDEAVTYSLGKFGQRALDFYSIHVTKESTHPVKPLAQIAGNRYASHPVGKALSDACMGTIASFLSKYQDIIIEHQKVVKGNQKRLESLRELAGKENLEYPSVTLPPQPHTKEGVDAYNEVIARVRMWVNLNLWQKLKLSRDDAKPLLRLKGFPSFPLVERQANEVDWWDMVCNVKKLINEKKEDGKVFWQNLAGYKRQEALRPYLSSEEDRKKGKKFARYQLGDLLLHLYKKHGEDWGKVYDEAWERIDKKVEGLSKHIKLEEERRSEDAQSKAALTDWLRAKASFVIEGLKEADKDEFCRCELKLQKWYGDLRGKPFAIEAENSILDISGFSKQYNCAFIWQKDGVKKLNLYLIINYFKGGKLRFKKIKPEAFEANRFYTVINKKSGEIVPMEVNFNFDDPNLIILPLAFGKRQGREFIWNDLLSLETGSLKLANGRVIEKTLYNRRTRQDEPALFVALTFERREVLDSSNIKPMNLIGVDRGENIPAVIALTDPEGCPLSRFKDSLGNPTHILRIGESYKEKQRTIQAKKEVEQRRAGGYSRKYASKAKNLADDMVRNTARDLLYYAVTQDAMLIFENLSRGFGRQGKRTFMAERQYTRMEDWLTAKLAYEGLPSKTYLSKTLAQYTSKTCSNCGFTITSADYDRVLEKLKKTATGWMTTINGKELKVEGQITYYNRYKRQNVVKDLSVELDRLSEESVNNDISSWTKGRSGEALSLLKKRFSHRPVQEKFVCLNCGFETHADEQAALNIARSWLFLRSQEYKKYQTNKTTGNTDKRAFVETWQSFYRKKLKEVWKPAV

SEQ ID NO: 40820 - protein, 978 aa, synthetic construct
  REGION 1..978: note = engineered CasX variant
QEIKRINKIRRRLVKDSNTKKAGKTGPMKTLLVRVMTPDLRERLENLRKKPENIPQPISNTSRANLNKLLTDYTEMKKAILHVYWEEFQKDPVGLMSRVAQPASKKIDQNKLKPEMDEKGNLTTAGFACSQCGQPLFVYKLEQVSEKGKAYTNYFGRCNVAEHEKLILLDQLKPEKDSDEAVTYSLGKFGQRALDFYSIHVTKESTHPVKPLAQIAGNRYASSPVGKALSDACMGTIASFLSKYQDIIIEHQKVVKGNQKRLESLRELAGKENLEYPSVTLPPQPHTKEGVDAYNEVIARVRMWVNLNLWQKLKLSRDDAKPLLRLKGFPSFPLVERQANEVDWWDMVCNVKKLINEKKEDGKVFWQNLAGYKRQEALRPYLSSEEDRKKGKKFARYQLGDLLLHLYKKHGEDWGKVYDEAWERIDKKVEGLSKHIKLEEERRSEDAQSKAALTDWLRAKASFVIEGLKEADKDEFCRCELKLQKWYGDLRGKPFAIEAENSILDISGFSKQYNCAFIWQKDGVKKLNLYLIINYFKGGKLRFKKIKPEAFEANRFYTVINKKSGEIVPMEVNFNFDDPNLIILPLAFGKRQGREFIWNDLLSLETGSLKLANGRVIEKTLYNRRTRQDEPALFVALTFERREVLDSSNIKPMNLIGVDRGENIPAVIALTDPEGCPLSRFKDSLGNPTHILRIGESYKEKQRTIQAKKEVEQRRAGGYSRKYASKAKNLADDMVRNTARDLLYYAVTQDAMLIFENLSRGFGRQGKRTFMAERQYTRMEDWLTAKLAYEGLPSKTYLSKTLAQYTSKTCSNCGFTITSADYDRVLEKLKKTATGWMTTINGKELKVEGQITYYNRYKRQNVVKDLSVELDRLSEESVNNDISSWTKGRSGEALSLLKKRFSHRPVQEKFVCLNCGFETHADEQAALNIARSWLFLRSQEYKKYQTNKTTGNTDKRAFVETWQSFYRKKLKEVWKPAV

SEQ ID NO: 40821 - protein, 978 aa, synthetic construct
  REGION 1..978: note = engineered CasX variant
QEIKRINKIRRRLVKDSNTKKAGKTGPMKTLLVRVMTPDLRERLENLRKKPENIPQPISNTSRANLNKLLTDYTEMKKAILHVYWEEFQKDPVGLMSRVAQPASKKIDQNKLKPEMDEKGNLTTAGFACSQCGQPLFVYKLEQVSEKGKAYTNYFGRCNVAEHEKLILLDQLKPEKDSDEAVTYSLGKFGQRALDFYSIHVTKESTHPVKPLAQIAGNRYASTPVGKALSDACMGTIASFLSKYQDIIIEHQKVVKGNQKRLESLRELAGKENLEYPSVTLPPQPHTKEGVDAYNEVIARVRMWVNLNLWQKLKLSRDDAKPLLRLKGFPSFPLVERQANEVDWWDMVCNVKKLINEKKEDGKVFWQNLAGYKRQEALRPYLSSEEDRKKGKKFARYQLGDLLLHLYKKHGEDWGKVYDEAWERIDKKVEGLSKHIKLEEERRSEDAQSKAALTDWLRAKASFVIEGLKEADKDEFCRCELKLQKWYGDLRGKPFAIEAENSILDISGFSKQYNCAFIWQKDGVKKLNLYLIINYFKGGKLRFKKIKPEAFEANRFYTVINKKSGEIVPMEVNFNFDDPNLIILPLAFGKRQGREFIWNDLLSLETGSLKLANGRVIEKTLYNRRTRQDEPALFVALTFERREVLDSSNIKPMNLIGVDRGENIPAVIALTDPEGCPLSRFKDSLGNPTHILRIGESYKEKQRTIQAKKEVEQRRAGGYSRKYASKAKNLADDMVRNTARDLLYYAVTQDAMLIFENLSRGFGRQGKRTFMAERQYTRMEDWLTAKLAYEGLPSKTYLSKTLAQYTSKTCSNCGFTITSADYDRVLEKLKKTATGWMTTINGKELKVEGQITYYNRYKRQNVVKDLSVELDRLSEESVNNDISSWTKGRSGEALSLLKKRFSHRPVQEKFVCLNCGFETHADEQAALNIARSWLFLRSQEYKKYQTNKTTGNTDKRAFVETWQSFYRKKLKEVWKPAV

SEQ ID NO: 40822 - protein, 978 aa, synthetic construct
  REGION 1..978: note = engineered CasX variant
QEIKRINKIRRRLVKDSNTKKAGKTGPMKTLLVRVMTPDLRERLENLRKKPENIPQPISNTSRANLNKLLTDYTEMKKAILHVYWEEFQKDPVGLMSRVAQPASKKIDQNKLKPEMDEKGNLTTAGFACSQCGQPLFVYKLEQVSEKGKAYTNYFGRCNVAEHEKLILLDQLKPEKDSDEAVTYSLGKFGQRALDFYSIHVTKESTHPVKPLAQIAGNRYASAPVGKALSDACMGTIASFLSKYQDIIIEHQKVVKGNQKRLESLRELAGKENLEYPSVTLPPQPHTKEGVDAYNEVIARVRMWVNLNLWQKLKLSRDDAKPLLRLKGFPSFPLVERQANEVDWWDMVCNVKKLINEKKEDGKVFWQNLAGYKRQEALRPYLSSEEDRKKGKKFARYQLGDLLLHLYKKHGEDWGKVYDEAWERIDKKVEGLSKHIKLEEERRSEDAQSKAALTDWLRAKASFVIEGLKEADKDEFCRCELKLQKWYGDLRGKPFAIEAENSILDISGFSKQYNCAFIWQKDGVKKLNLYLIINYFKGGKLRFKKIKPEAFEANRFYTVINKKSGEIVPMEVNFNFDDPNLIILPLAFGKRQGREFIWNDLLSLETGSLKLANGRVIEKTLYNRRTRQDEPALFVALTFERREVLDSSNIKPMNLIGVDRGENIPAVIALTDPEGCPLSRFKDSLGNPTHILRIGESYKEKQRTIQAKKEVEQRRAGGYSRKYASKAKNLADDMVRNTARDLLYYAVTQDAMLIFENLSRGFGRQGKRTFMAERQYTRMEDWLTAKLAYEGLPSKTYLSKTLAQYTSKTCSNCGFTITSADYDRVLEKLKKTATGWMTTINGKELKVEGQITYYNRYKRQNVVKDLSVELDRLSEESVNNDISSWTKGRSGEALSLLKKRFSHRPVQEKFVCLNCGFETHADEQAALNIARSWLFLRSQEYKKYQTNKTTGNTDKRAFVETWQSFYRKKLKEVWKPAV

SEQ ID NO: 40823 - protein, 978 aa, synthetic construct
  REGION 1..978: note = engineered CasX variant
QEIKRINKIRRRLVKDSNTKKAGKTGPMKTLLVRVMTPDLRERLENLRKKPENIPQPISNTSRANLNKLLTDYTEMKKAILHVYWEEFQKDPVGLMSRVAQPASKKIDQNKLKPEMDEKGNLTTAGFACSQCGQPLFVYKLEQVSEKGKAYTNYFGRCNVAEHEKLILLDQLKPEKDSDEAVTYSLGKFGQRALDFYSIHVTKESTHPVKPLAQIAGNRYASVPVGKALSDACMGTIASFLSKYQDIIIEHQKVVKGNQKRLESLRELAGKENLEYPSVTLPPQPHTKEGVDAYNEVIARVRMWVNLNLWQKLKLSRDDAKPLLRLKGFPSFPLVERQANEVDWWDMVCNVKKLINEKKEDGKVFWQNLAGYKRQEALRPYLSSEEDRKKGKKFARYQLGDLLLHLYKKHGEDWGKVYDEAWERIDKKVEGLSKHIKLEEERRSEDAQSKAALTDWLRAKASFVIEGLKEADKDEFCRCELKLQKWYGDLRGKPFAIEAENSILDISGFSKQYNCAFIWQKDGVKKLNLYLIINYFKGGKLRFKKIKPEAFEANRFYTVINKKSGEIVPMEVNFNFDDPNLIILPLAFGKRQGREFIWNDLLSLETGSLKLANGRVIEKTLYNRRTRQDEPALFVALTFERREVLDSSNIKPMNLIGVDRGENIPAVIALTDPEGCPLSRFKDSLGNPTHILRIGESYKEKQRTIQAKKEVEQRRAGGYSRKYASKAKNLADDMVRNTARDLLYYAVTQDAMLIFENLSRGFGRQGKRTFMAERQYTRMEDWLTAKLAYEGLPSKTYLSKTLAQYTSKTCSNCGFTITSADYDRVLEKLKKTATGWMTTINGKELKVEGQITYYNRYKRQNVVKDLSVELDRLSEESVNNDISSWTKGRSGEALSLLKKRFSHRPVQEKFVCLNCGFETHADEQAALNIARSWLFLRSQEYKKYQTNKTTGNTDKRAFVETWQSFYRKKLKEVWKPAV

SEQ ID NO: 40824 - protein, 978 aa, synthetic construct
  REGION 1..978: note = engineered CasX variant
QEIKRINKIRRRLVKDSNTKKAGKTGPMKTLLVRVMTPDLRERLENLRKKPENIPQPISNTSRANLNKLLTDYTEMKKAILHVYWEEFQKDPVGLMSRVAQPASKKIDQNKLKPEMDEKGNLTTAGFACSQCGQPLFVYKLEQVSEKGKAYTNYFGRCNVAEHEKLIKLDQLKPEKDSDEAVTYSLGKFGQRALDFYSIHVTKESTHPVKPLAQIAGNRYASGPVGKALSDACMGTIASFLSKYQDIIIEHQKVVKGNQKRLESLRELAGKENLEYPSVTLPPQPHTKEGVDAYNEVIARVRMWVNLNLWQKLKLSRDDAKPLLRLKGFPSFPLVERQANEVDWWDMVCNVKKLINEKKEDGKVFWQNLAGYKRQEALRPYLSSEEDRKKGKKFARYQLGDLLLHLYKKHGEDWGKVYDEAWERIDKKVEGLSKHIKLEEERRSEDAQSKAALTDWLRAKASFVIEGLKEADKDEFCRCELKLQKWYGDLRGKPFAIEAENSILDISGFSKQYNCAFIWQKDGVKKLNLYLIINYFKGGKLRFKKIKPEAFEANRFYTVINKKSGEIVPMEVNFNFDDPNLIILPLAFGKRQGREFIWNDLLSLETGSLKLANGRVIEKTLYNRRTRQDEPALFVALTFERREVLDSSNIKPMNLIGVDRGENIPAVIALTDPEGCPLSRFKDSLGNPTHILRIGESYKEKQRTIQAKKEVEQRRAGGYSRKYASKAKNLADDMVRNTARDLLYYAVTQDAMLIFENLSRGFGRQGKRTFMAERQYTRMEDWLTAKLAYEGLPSKTYLSKTLAQYTSKTCSNCGFTITSADYDRVLEKLKKTATGWMTTINGKELKVEGQITYYNRYKRQNVVKDLSVELDRLSEESVNNDISSWTKGRSGEALSLLKKRFSHRPVQEKFVCLNCGFETHADEQAALNIARSWLFLRSQEYKKYQTNKTTGNTDKRAFVETWQSFYRKKLKEVWKPAV

SEQ ID NO: 40825 - protein, 977 aa, synthetic construct
  REGION 1..977: note = engineered CasX variant
QEIKRINKIRRRLVKDSNTKKAGKTGPMKTLLVRVMTPDLRERLENLRKKPENIPQPISNTSRANLNKLLTDYTEMKKAILHVYWEEFQKDPVGLMSRVAQPASKKIDQNKLKPEMDEKGNLTTAGFACSQCGQPLFVYKLEQVSEKGKAYTNYFGRCNVAEHEKLILLDQLKPEKDSDEAVTYSLGKFGQRALDFYSIHVTKESTHPVKPLAQIAGNRYASPVGKALSDACMGTIASFLSKYQDIIIEHQKVVKGNQKRLESLRELAGKENLEYPSVTLPPQPHTKEGVDAYNEVIARVRMWVNLNLWQKLKLSRDDAKPLLRLKGFPSFPLVERQANEVDWWDMVCNVKKLINEKKEDGKVFWQNLAGYKRQEALRPYLSSEEDRKKGKKFARYQLGDLLLHLYKKHGEDWGKVYDEAWERIDKKVEGLSKHIKLEEERRSEDAQSKAALTDWLRAKASFVIEGLKEADKDEFCRCELKLQKWYGDLRGKPFAIEAENSILDISGFSKQYNCAFIWQKDGVKKLNLYLIINYFKGGKLRFKKIKPEAFEANRFYTVINKKSGEIVPMEVNFNFDDPNLIILPLAFGKRQGREFIWNDLLSLETGSLKLANGRVIEKTLYNRRTRQDEPALFVALTFERREVLDSSNIKPMNLIGVDRGENIPAVIALTDPEGCPLSRFKDSLGNPTHILRIGESYKEKQRTIQAKKEVEQRRAGGYSRKYASKAKNLADDMVRNTARDLLYYAVTQDAMLIFENLSRGFGRQGKRTFMAERQYTRMEDWLTAKLAYEGLPSKTYLSKTLAQYTSKTCSNCGFTITSADYDRVLEKLKKTATGWMTTINGKELKVEGQITYYNRYKRQNVVKDLSVELDRLSEESVNNDISSWTKGRSGEALSLLKKRFSHRPVQEKFVCLNCGFETHADEQAALNIARSWLFLRSQEYKKYQTNKTTGNTDKRAFVETWQSFYRKKLKEVWKPAV

SEQ ID NO: 40826 - protein, 978 aa, synthetic construct
  REGION 1..978: note = engineered CasX variant
QEIKRINKIRRRLVKDSNTKKAGKTGPMKTLLVRVMTPDLRERLENLRKKPENIPQPISNTSRANLNKLLTDYTEMKKAILHVYWEEFQKDPVGLMSRVAQPASKKIDQNKLKPEMDEKGNLTTAGFACSQCGQPLFVYKLEQVSEKGKAYTNYFGRCNVAEHEKLILLDQLKPEKDSDEAVTYSLGKFGQRALDFYSIHVTKESTHPVKPLAQIAGNRYASYPVGKALSDACMGTIASFLSKYQDIIIEHQKVVKGNQKRLESLRELAGKENLEYPSVTLPPQPHTKEGVDAYNEVIARVRMWVNLNLWQKLKLSRDDAKPLLRLKGFPSFPLVERQANEVDWWDMVCNVKKLINEKKEDGKVFWQNLAGYKRQEALRPYLSSEEDRKKGKKFARYQLGDLLLHLEKKHPEDWGKVYDEAWERIDKKVEGLSKHIKLEEERRSEDAQSKAALTDWLRAKASFVIEGLKEADKDEFCRCELKLQKWYGDLRGKPFAIEAENSILDISGFSKQYNCAFIWQKDGVKKLNLYLIINYFKGGKLRFKKIKPEAFEANRFYTVINKKSGEIVPMEVNFNFDDPNLIILPLAFGKRQGREFIWNDLLSLETGSLKLANGRVIEKTLYNRRTRQDEPALFVALTFERREVLDSSNIKPMNLIGVDRGENIPAVIALTDPEGCPLSRFKDSLGNPTHILRIGESYKEKQRTIQAKKEVEQRRAGGYSRKYASKAKNLADDMVRNTARDLLYYAVTQDAMLIFENLSRGFGRQGKRTFMAERQYTRMEDWLTAKLAYEGLPSKTYLSKTLAQYTSKTCSNCGFTITSADYDRVLEKLKKTATGWMTTINGKELKVEGQITYYNRYKRQNVVKDLSVELDRLSEESVNNDISSWTKGRSGEALSLLKKRFSHRPVQEKFVCLNCGFETHADEQAALNIARSWLFLRSQEYKKYQTNKTTGNTDKRAFVETWQSFYRKKLKEVWKPAV

SEQ ID NO: 40827 - protein, 978 aa, synthetic construct
  REGION 1..978: note = engineered CasX variant
QEIKRINKIRRRLVKDSNTKKAGKTGPMKTLLVRVMTPDLRERLENLRKKPENIPQPISNTSRANLNKLLTDYTEMKKAILHVYWEEFQKDPVGLMSRVAQPASKKIDQNKLKPEMDEKGNLTTAGFACSQCGQPLFVYKLEQVSEKGKAYTNYFGRCNVAEHEKLILLDQLKPEKDSDEAVTYSLGKFGQRALDFYSIHVTKESTHPVKPLAQIAGNRYASHPVGKALSDACMGTIASFLSKYQDIIIEHQKVVKGNQKRLESLRELAGKENLEYPSVTLPPQPHTKEGVDAYNEVIARVRMWVNLNLWQKLKLSRDDAKPLLRLKGFPSFPLVERQANEVDWWDMVCNVKKLINEKKEDGKVFWQNLAGYKRQEALRPYLSSEEDRKKGKKFARYQLGDLLLHLEKKHPEDWGKVYDEAWERIDKKVEGLSKHIKLEEERRSEDAQSKAALTDWLRAKASFVIEGLKEADKDEFCRCELKLQKWYGDLRGKPFAIEAENSILDISGFSKQYNCAFIWQKDGVKKLNLYLIINYFKGGKLRFKKIKPEAFEANRFYTVINKKSGEIVPMEVNFNFDDPNLIILPLAFGKRQGREFIWNDLLSLETGSLKLANGRVIEKTLYNRRTRQDEPALFVALTFERREVLDSSNIKPMNLIGVDRGENIPAVIALTDPEGCPLSRFKDSLGNPTHILRIGESYKEKQRTIQAKKEVEQRRAGGYSRKYASKAKNLADDMVRNTARDLLYYAVTQDAMLIFENLSRGFGRQGKRTFMAERQYTRMEDWLTAKLAYEGLPSKTYLSKTLAQYTSKTCSNCGFTITSADYDRVLEKLKKTATGWMTTINGKELKVEGQITYYNRYKRQNVVKDLSVELDRLSEESVNNDISSWTKGRSGEALSLLKKRFSHRPVQEKFVCLNCGFETHADEQAALNIARSWLFLRSQEYKKYQTNKTTGNTDKRAFVETWQSFYRKKLKEVWKPAV

SEQ ID NO: 40828 - protein, 978 aa, synthetic construct
  REGION 1..978: note = engineered CasX variant
QEIKRINKIRRRLVKDSNTKKAGKTGPMKTLLVRVMTPDLRERLENLRKKPENIPQPISNTSRANLNKLLTDYTEMKKAILHVYWEEFQKDPVGLMSRVAQPASKKIDQNKLKPEMDEKGNLTTAGFACSQCGQPLFVYKLEQVSEKGKAYTNYFGRCNVAEHEKLILLDQLKPEKDSDEAVTYSLGKFGQRALDFYSIHVTKESTHPVKPLAQIAGNRYASSPVGKALSDACMGTIASFLSKYQDIIIEHQKVVKGNQKRLESLRELAGKENLEYPSVTLPPQPHTKEGVDAYNEVIARVRMWVNLNLWQKLKLSRDDAKPLLRLKGFPSFPLVERQANEVDWWDMVCNVKKLINEKKEDGKVFWQNLAGYKRQEALRPYLSSEEDRKKGKKFARYQLGDLLLHLEKKHPEDWGKVYDEAWERIDKKVEGLSKHIKLEEERRSEDAQSKAALTDWLRAKASFVIEGLKEADKDEFCRCELKLQKWYGDLRGKPFAIEAENSILDISGFSKQYNCAFIWQKDGVKKLNLYLIINYFKGGKLRFKKIKPEAFEANRFYTVINKKSGEIVPMEVNFNFDDPNLIILPLAFGKRQGREFIWNDLLSLETGSLKLANGRVIEKTLYNRRTRQDEPALFVALTFERREVLDSSNIKPMNLIGVDRGENIPAVIALTDPEGCPLSRFKDSLGNPTHILRIGESYKEKQRTIQAKKEVEQRRAGGYSRKYASKAKNLADDMVRNTARDLLYYAVTQDAMLIFENLSRGFGRQGKRTFMAERQYTRMEDWLTAKLAYEGLPSKTYLSKTLAQYTSKTCSNCGFTITSADYDRVLEKLKKTATGWMTTINGKELKVEGQITYYNRYKRQNVVKDLSVELDRLSEESVNNDISSWTKGRSGEALSLLKKRFSHRPVQEKFVCLNCGFETHADEQAALNIARSWLFLRSQEYKKYQTNKTTGNTDKRAFVETWQSFYRKKLKEVWKPAV

SEQ ID NO: 40829 - protein, 978 aa, synthetic construct
  REGION 1..978: note = engineered CasX variant
QEIKRINKIRRRLVKDSNTKKAGKTGPMKTLLVRVMTPDLRERLENLRKKPENIPQPISNTSRANLNKLLTDYTEMKKAILHVYWEEFQKDPVGLMSRVAQPASKKIDQNKLKPEMDEKGNLTTAGFACSQCGQPLFVYKLEQVSEKGKAYTNYFGRCNVAEHEKLILLDQLKPEKDSDEAVTYSLGKFGQRALDFYSIHVTKESTHPVKPLAQIAGNRYASTPVGKALSDACMGTIASFLSKYQDIIIEHQKVVKGNQKRLESLRELAGKENLEYPSVTLPPQPHTKEGVDAYNEVIARVRMWVNLNLWQKLKLSRDDAKPLLRLKGFPSFPLVERQANEVDWWDMVCNVKKLINEKKEDGKVFWQNLAGYKRQEALRPYLSSEEDRKKGKKFARYQLGDLLLHLEKKHPEDWGKVYDEAWERIDKKVEGLSKHIKLEEERRSEDAQSKAALTDWLRAKASFVIEGLKEADKDEFCRCELKLQKWYGDLRGKPFAIEAENSILDISGFSKQYNCAFIWQKDGVKKLNLYLIINYFKGGKLRFKKIKPEAFEANRFYTVINKKSGEIVPMEVNFNFDDPNLIILPLAFGKRQGREFIWNDLLSLETGSLKLANGRVIEKTLYNRRTRQDEPALFVALTFERREVLDSSNIKPMNLIGVDRGENIPAVIALTDPEGCPLSRFKDSLGNPTHILRIGESYKEKQRTIQAKKEVEQRRAGGYSRKYASKAKNLADDMVRNTARDLLYYAVTQDAMLIFENLSRGFGRQGKRTFMAERQYTRMEDWLTAKLAYEGLPSKTYLSKTLAQYTSKTCSNCGFTITSADYDRVLEKLKKTATGWMTTINGKELKVEGQITYYNRYKRQNVVKDLSVELDRLSEESVNNDISSWTKGRSGEALSLLKKRFSHRPVQEKFVCLNCGFETHADEQAALNIARSWLFLRSQEYKKYQTNKTTGNTDKRAFVETWQSFYRKKLKEVWKPAV

SEQ ID NO: 40830 - protein, 978 aa, synthetic construct
  REGION 1..978: note = engineered CasX variant
QEIKRINKIRRRLVKDSNTKKAGKTGPMKTLLVRVMTPDLRERLENLRKKPENIPQPISNTSRANLNKLLTDYTEMKKAILHVYWEEFQKDPVGLMSRVAQPASKKIDQNKLKPEMDEKGNLTTAGFACSQCGQPLFVYKLEQVSEKGKAYTNYFGRCNVAEHEKLILLDQLKPEKDSDEAVTYSLGKFGQRALDFYSIHVTKESTHPVKPLAQIAGNRYASAPVGKALSDACMGTIASFLSKYQDIIIEHQKVVKGNQKRLESLRELAGKENLEYPSVTLPPQPHTKEGVDAYNEVIARVRMWVNLNLWQKLKLSRDDAKPLLRLKGFPSFPLVERQANEVDWWDMVCNVKKLINEKKEDGKVFWQNLAGYKRQEALRPYLSSEEDRKKGKKFARYQLGDLLLHLEKKHPEDWGKVYDEAWERIDKKVEGLSKHIKLEEERRSEDAQSKAALTDWLRAKASFVIEGLKEADKDEFCRCELKLQKWYGDLRGKPFAIEAENSILDISGFSKQYNCAFIWQKDGVKKLNLYLIINYFKGGKLRFKKIKPEAFEANRFYTVINKKSGEIVPMEVNFNFDDPNLIILPLAFGKRQGREFIWNDLLSLETGSLKLANGRVIEKTLYNRRTRQDEPALFVALTFERREVLDSSNIKPMNLIGVDRGENIPAVIALTDPEGCPLSRFKDSLGNPTHILRIGESYKEKQRTIQAKKEVEQRRAGGYSRKYASKAKNLADDMVRNTARDLLYYAVTQDAMLIFENLSRGFGRQGKRTFMAERQYTRMEDWLTAKLAYEGLPSKTYLSKTLAQYTSKTCSNCGFTITSADYDRVLEKLKKTATGWMTTINGKELKVEGQITYYNRYKRQNVVKDLSVELDRLSEESVNNDISSWTKGRSGEALSLLKKRFSHRPVQEKFVCLNCGFETHADEQAALNIARSWLFLRSQEYKKYQTNKTTGNTDKRAFVETWQSFYRKKLKEVWKPAV

SEQ ID NO: 40831 - protein, 978 aa, synthetic construct
  REGION 1..978: note = engineered CasX variant
QEIKRINKIRRRLVKDSNTKKAGKTGPMKTLLVRVMTPDLRERLENLRKKPENIPQPISNTSRANLNKLLTDYTEMKKAILHVYWEEFQKDPVGLMSRVAQPASKKIDQNKLKPEMDEKGNLTTAGFACSQCGQPLFVYKLEQVSEKGKAYTNYFGRCNVAEHEKLILLDQLKPEKDSDEAVTYSLGKFGQRALDFYSIHVTKESTHPVKPLAQIAGNRYASVPVGKALSDACMGTIASFLSKYQDIIIEHQKVVKGNQKRLESLRELAGKENLEYPSVTLPPQPHTKEGVDAYNEVIARVRMWVNLNLWQKLKLSRDDAKPLLRLKGFPSFPLVERQANEVDWWDMVCNVKKLINEKKEDGKVFWQNLAGYKRQEALRPYLSSEEDRKKGKKFARYQLGDLLLHLEKKHPEDWGKVYDEAWERIDKKVEGLSKHIKLEEERRSEDAQSKAALTDWLRAKASFVIEGLKEADKDEFCRCELKLQKWYGDLRGKPFAIEAENSILDISGFSKQYNCAFIWQKDGVKKLNLYLIINYFKGGKLRFKKIKPEAFEANRFYTVINKKSGEIVPMEVNFNFDDPNLIILPLAFGKRQGREFIWNDLLSLETGSLKLANGRVIEKTLYNRRTRQDEPALFVALTFERREVLDSSNIKPMNLIGVDRGENIPAVIALTDPEGCPLSRFKDSLGNPTHILRIGESYKEKQRTIQAKKEVEQRRAGGYSRKYASKAKNLADDMVRNTARDLLYYAVTQDAMLIFENLSRGFGRQGKRTFMAERQYTRMEDWLTAKLAYEGLPSKTYLSKTLAQYTSKTCSNCGFTITSADYDRVLEKLKKTATGWMTTINGKELKVEGQITYYNRYKRQNVVKDLSVELDRLSEESVNNDISSWTKGRSGEALSLLKKRFSHRPVQEKFVCLNCGFETHADEQAALNIARSWLFLRSQEYKKYQTNKTTGNTDKRAFVETWQSFYRKKLKEVWKPAV

SEQ ID NO: 40832 - protein, 978 aa, synthetic construct
  REGION 1..978: note = engineered CasX variant
QEIKRINKIRRRLVKDSNTKKAGKTGPMKTLLVRVMTPDLRERLENLRKKPENIPQPISNTSRANLNKLLTDYTEMKKAILHVYWEEFQKDPVGLMSRVAQPASKKIDQNKLKPEMDEKGNLTTAGFACSQCGQPLFVYKLEQVSEKGKAYTNYFGRCNVAEHEKLIKLDQLKPEKDSDEAVTYSLGKFGQRALDFYSIHVTKESTHPVKPLAQIAGNRYASGPVGKALSDACMGTIASFLSKYQDIIIEHQKVVKGNQKRLESLRELAGKENLEYPSVTLPPQPHTKEGVDAYNEVIARVRMWVNLNLWQKLKLSRDDAKPLLRLKGFPSFPLVERQANEVDWWDMVCNVKKLINEKKEDGKVFWQNLAGYKRQEALRPYLSSEEDRKKGKKFARYQLGDLLLHLEKKHPEDWGKVYDEAWERIDKKVEGLSKHIKLEEERRSEDAQSKAALTDWLRAKASFVIEGLKEADKDEFCRCELKLQKWYGDLRGKPFAIEAENSILDISGFSKQYNCAFIWQKDGVKKLNLYLIINYFKGGKLRFKKIKPEAFEANRFYTVINKKSGEIVPMEVNFNFDDPNLIILPLAFGKRQGREFIWNDLLSLETGSLKLANGRVIEKTLYNRRTRQDEPALFVALTFERREVLDSSNIKPMNLIGVDRGENIPAVIALTDPEGCPLSRFKDSLGNPTHILRIGESYKEKQRTIQAKKEVEQRRAGGYSRKYASKAKNLADDMVRNTARDLLYYAVTQDAMLIFENLSRGFGRQGKRTFMAERQYTRMEDWLTAKLAYEGLPSKTYLSKTLAQYTSKTCSNCGFTITSADYDRVLEKLKKTATGWMTTINGKELKVEGQITYYNRYKRQNVVKDLSVELDRLSEESVNNDISSWTKGRSGEALSLLKKRFSHRPVQEKFVCLNCGFETHADEQAALNIARSWLFLRSQEYKKYQTNKTTGNTDKRAFVETWQSFYRKKLKEVWKPAV

SEQ ID NO: 40833 - protein, 977 aa, synthetic construct
  REGION 1..977: note = engineered CasX variant
QEIKRINKIRRRLVKDSNTKKAGKTGPMKTLLVRVMTPDLRERLENLRKKPENIPQPISNTSRANLNKLLTDYTEMKKAILHVYWEEFQKDPVGLMSRVAQPASKKIDQNKLKPEMDEKGNLTTAGFACSQCGQPLFVYKLEQVSEKGKAYTNYFGRCNVAEHEKLILLDQLKPEKDSDEAVTYSLGKFGQRALDFYSIHVTKESTHPVKPLAQIAGNRYASPVGKALSDACMGTIASFLSKYQDIIIEHQKVVKGNQKRLESLRELAGKENLEYPSVTLPPQPHTKEGVDAYNEVIARVRMWVNLNLWQKLKLSRDDAKPLLRLKGFPSFPLVERQANEVDWWDMVCNVKKLINEKKEDGKVFWQNLAGYKRQEALRPYLSSEEDRKKGKKFARYQLGDLLLHLEKKHPEDWGKVYDEAWERIDKKVEGLSKHIKLEEERRSEDAQSKAALTDWLRAKASFVIEGLKEADKDEFCRCELKLQKWYGDLRGKPFAIEAENSILDISGFSKQYNCAFIWQKDGVKKLNLYLIINYFKGGKLRFKKIKPEAFEANRFYTVINKKSGEIVPMEVNFNFDDPNLIILPLAFGKRQGREFIWNDLLSLETGSLKLANGRVIEKTLYNRRTRQDEPALFVALTFERREVLDSSNIKPMNLIGVDRGENIPAVIALTDPEGCPLSRFKDSLGNPTHILRIGESYKEKQRTIQAKKEVEQRRAGGYSRKYASKAKNLADDMVRNTARDLLYYAVTQDAMLIFENLSRGFGRQGKRTFMAERQYTRMEDWLTAKLAYEGLPSKTYLSKTLAQYTSKTCSNCGFTITSADYDRVLEKLKKTATGWMTTINGKELKVEGQITYYNRYKRQNVVKDLSVELDRLSEESVNNDISSWTKGRSGEALSLLKKRFSHRPVQEKFVCLNCGFETHADEQAALNIARSWLFLRSQEYKKYQTNKTTGNTDKRAFVETWQSFYRKKLKEVWKPAV

SEQ ID NO: 40834 - protein, 979 aa, synthetic construct
  REGION 1..979: note = engineered CasX variant
QEIKRINKIRRRLVKDSNTKKAGKTGPMKTLLVRVMTPDLRERLENLRKKPENIPQPISNTSRANLNKLLTDYTEMKKAILHVYWEEFQKDPVGLMSRVAQPASKKIDQNKLKPEMDEKGNLTTAGFACSQCGQPLFVYKLEQVSEKGKAYTNYFGRCNVAEHEKLILLDQLKPEKDSDEAVTYSLGKFGQRALDFYSIHVTKESTHPVKPLAQIAGNRYASYPVGKALSDACMGTIASFLSKYQDIIIEHQKVVKGNQKRLESLRELAGKENLEYPSVTLPPQPHTKEGVDAYNEVIARVRMWVNLNLWQKLKLSRDDAKPLLRLKGFPSFPLVERQANEVDWWDMVCNVKKLINEKKEDGKVFWQNLAGYKRQEALRPYLSSEEDRKKGKKFARYQLGDLLLHLEKKHGERDWGKVYDEAWERIDKKVEGLSKHIKLEEERRSEDAQSKAALTDWLRAKASFVIEGLKEADKDEFCRCELKLQKWYGDLRGKPFAIEAENSILDISGFSKQYNCAFIWQKDGVKKLNLYLIINYFKGGKLRFKKIKPEAFEANRFYTVINKKSGEIVPMEVNFNFDDPNLIILPLAFGKRQGREFIWNDLLSLETGSLKLANGRVIEKTLYNRRTRQDEPALFVALTFERREVLDSSNIKPMNLIGVDRGENIPAVIALTDPEGCPLSRFKDSLGNPTHILRIGESYKEKQRTIQAKKEVEQRRAGGYSRKYASKAKNLADDMVRNTARDLLYYAVTQDAMLIFENLSRGFGRQGKRTFMAERQYTRMEDWLTAKLAYEGLPSKTYLSKTLAQYTSKTCSNCGFTITSADYDRVLEKLKKTATGWMTTINGKELKVEGQITYYNRYKRQNVVKDLSVELDRLSEESVNNDISSWTKGRSGEALSLLKKRFSHRPVQEKFVCLNCGFETHADEQAALNIARSWLFLRSQEYKKYQTNKTTGNTDKRAFVETWQSFYRKKLKEVWKPAV

SEQ ID NO: 40835 - protein, 979 aa, synthetic construct
  REGION 1..979: note = engineered CasX variant
QEIKRINKIRRRLVKDSNTKKAGKTGPMKTLLVRVMTPDLRERLENLRKKPENIPQPISNTSRANLNKLLTDYTEMKKAILHVYWEEFQKDPVGLMSRVAQPASKKIDQNKLKPEMDEKGNLTTAGFACSQCGQPLFVYKLEQVSEKGKAYTNYFGRCNVAEHEKLILLDQLKPEKDSDEAVTYSLGKFGQRALDFYSIHVTKESTHPVKPLAQIAGNRYASHPVGKALSDACMGTIASFLSKYQDIIIEHQKVVKGNQKRLESLRELAGKENLEYPSVTLPPQPHTKEGVDAYNEVIARVRMWVNLNLWQKLKLSRDDAKPLLRLKGFPSFPLVERQANEVDWWDMVCNVKKLINEKKEDGKVFWQNLAGYKRQEALRPYLSSEEDRKKGKKFARYQLGDLLLHLEKKHGERDWGKVYDEAWERIDKKVEGLSKHIKLEEERRSEDAQSKAALTDWLRAKASFVIEGLKEADKDEFCRCELKLQKWYGDLRGKPFAIEAENSILDISGFSKQYNCAFIWQKDGVKKLNLYLIINYFKGGKLRFKKIKPEAFEANRFYTVINKKSGEIVPMEVNFNFDDPNLIILPLAFGKRQGREFIWNDLLSLETGSLKLANGRVIEKTLYNRRTRQDEPALFVALTFERREVLDSSNIKPMNLIGVDRGENIPAVIALTDPEGCPLSRFKDSLGNPTHILRIGESYKEKQRTIQAKKEVEQRRAGGYSRKYASKAKNLADDMVRNTARDLLYYAVTQDAMLIFENLSRGFGRQGKRTFMAERQYTRMEDWLTAKLAYEGLPSKTYLSKTLAQYTSKTCSNCGFTITSADYDRVLEKLKKTATGWMTTINGKELKVEGQITYYNRYKRQNVVKDLSVELDRLSEESVNNDISSWTKGRSGEALSLLKKRFSHRPVQEKFVCLNCGFETHADEQAALNIARSWLFLRSQEYKKYQTNKTTGNTDKRAFVETWQSFYRKKLKEVWKPAV

SEQ ID NO: 40836 - protein, 979 aa, synthetic construct
  REGION 1..979: note = engineered CasX variant
QEIKRINKIRRRLVKDSNTKKAGKTGPMKTLLVRVMTPDLRERLENLRKKPENIPQPISNTSRANLNKLLTDYTEMKKAILHVYWEEFQKDPVGLMSRVAQPASKKIDQNKLKPEMDEKGNLTTAGFACSQCGQPLFVYKLEQVSEKGKAYTNYFGRCNVAEHEKLILLDQLKPEKDSDEAVTYSLGKFGQRALDFYSIHVTKESTHPVKPLAQIAGNRYASSPVGKALSDACMGTIASFLSKYQDIIIEHQKVVKGNQKRLESLRELAGKENLEYPSVTLPPQPHTKEGVDAYNEVIARVRMWVNLNLWQKLKLSRDDAKPLLRLKGFPSFPLVERQANEVDWWDMVCNVKKLINEKKEDGKVFWQNLAGYKRQEALRPYLSSEEDRKKGKKFARYQLGDLLLHLEKKHGERDWGKVYDEAWERIDKKVEGLSKHIKLEEERRSEDAQSKAALTDWLRAKASFVIEGLKEADKDEFCRCELKLQKWYGDLRGKPFAIEAENSILDISGFSKQYNCAFIWQKDGVKKLNLYLIINYFKGGKLRFKKIKPEAFEANRFYTVINKKSGEIVPMEVNFNFDDPNLIILPLAFGKRQGREFIWNDLLSLETGSLKLANGRVIEKTLYNRRTRQDEPALFVALTFERREVLDSSNIKPMNLIGVDRGENIPAVIALTDPEGCPLSRFKDSLGNPTHILRIGESYKEKQRTIQAKKEVEQRRAGGYSRKYASKAKNLADDMVRNTARDLLYYAVTQDAMLIFENLSRGFGRQGKRTFMAERQYTRMEDWLTAKLAYEGLPSKTYLSKTLAQYTSKTCSNCGFTITSADYDRVLEKLKKTATGWMTTINGKELKVEGQITYYNRYKRQNVVKDLSVELDRLSEESVNNDISSWTKGRSGEALSLLKKRFSHRPVQEKFVCLNCGFETHADEQAALNIARSWLFLRSQEYKKYQTNKTTGNTDKRAFVETWQSFYRKKLKEVWKPAV

SEQ ID NO: 40837 - protein, 979 aa, synthetic construct
  REGION 1..979: note = engineered CasX variant
QEIKRINKIRRRLVKDSNTKKAGKTGPMKTLLVRVMTPDLRERLENLRKKPENIPQPISNTSRANLNKLLTDYTEMKKAILHVYWEEFQKDPVGLMSRVAQPASKKIDQNKLKPEMDEKGNLTTAGFACSQCGQPLFVYKLEQVSEKGKAYTNYFGRCNVAEHEKLILLDQLKPEKDSDEAVTYSLGKFGQRALDFYSIHVTKESTHPVKPLAQIAGNRYASTPVGKALSDACMGTIASFLSKYQDIIIEHQKVVKGNQKRLESLRELAGKENLEYPSVTLPPQPHTKEGVDAYNEVIARVRMWVNLNLWQKLKLSRDDAKPLLRLKGFPSFPLVERQANEVDWWDMVCNVKKLINEKKEDGKVFWQNLAGYKRQEALRPYLSSEEDRKKGKKFARYQLGDLLLHLEKKHGERDWGKVYDEAWERIDKKVEGLSKHIKLEEERRSEDAQSKAALTDWLRAKASFVIEGLKEADKDEFCRCELKLQKWYGDLRGKPFAIEAENSILDISGFSKQYNCAFIWQKDGVKKLNLYLIINYFKGGKLRFKKIKPEAFEANRFYTVINKKSGEIVPMEVNFNFDDPNLIILPLAFGKRQGREFIWNDLLSLETGSLKLANGRVIEKTLYNRRTRQDEPALFVALTFERREVLDSSNIKPMNLIGVDRGENIPAVIALTDPEGCPLSRFKDSLGNPTHILRIGESYKEKQRTIQAKKEVEQRRAGGYSRKYASKAKNLADDMVRNTARDLLYYAVTQDAMLIFENLSRGFGRQGKRTFMAERQYTRMEDWLTAKLAYEGLPSKTYLSKTLAQYTSKTCSNCGFTITSADYDRVLEKLKKTATGWMTTINGKELKVEGQITYYNRYKRQNVVKDLSVELDRLSEESVNNDISSWTKGRSGEALSLLKKRFSHRPVQEKFVCLNCGFETHADEQAALNIARSWLFLRSQEYKKYQTNKTTGNTDKRAFVETWQSFYRKKLKEVWKPAV

SEQ ID NO: 40838 - protein, 979 aa, synthetic construct
  REGION 1..979: note = engineered CasX variant
QEIKRINKIRRRLVKDSNTKKAGKTGPMKTLLVRVMTPDLRERLENLRKKPENIPQPISNTSRANLNKLLTDYTEMKKAILHVYWEEFQKDPVGLMSRVAQPASKKIDQNKLKPEMDEKGNLTTAGFACSQCGQPLFVYKLEQVSEKGKAYTNYFGRCNVAEHEKLILLDQLKPEKDSDEAVTYSLGKFGQRALDFYSIHVTKESTHPVKPLAQIAGNRYASAPVGKALSDACMGTIASFLSKYQDIIIEHQKVVKGNQKRLESLRELAGKENLEYPSVTLPPQPHTKEGVDAYNEVIARVRMWVNLNLWQKLKLSRDDAKPLLRLKGFPSFPLVERQANEVDWWDMVCNVKKLINEKKEDGKVFWQNLAGYKRQEALRPYLSSEEDRKKGKKFARYQLGDLLLHLEKKHGERDWGKVYDEAWERIDKKVEGLSKHIKLEEERRSEDAQSKAALTDWLRAKASFVIEGLKEADKDEFCRCELKLQKWYGDLRGKPFAIEAENSILDISGFSKQYNCAFIWQKDGVKKLNLYLIINYFKGGKLRFKKIKPEAFEANRFYTVINKKSGEIVPMEVNFNFDDPNLIILPLAFGKRQGREFIWNDLLSLETGSLKLANGRVIEKTLYNRRTRQDEPALFVALTFERREVLDSSNIKPMNLIGVDRGENIPAVIALTDPEGCPLSRFKDSLGNPTHILRIGESYKEKQRTIQAKKEVEQRRAGGYSRKYASKAKNLADDMVRNTARDLLYYAVTQDAMLIFENLSRGFGRQGKRTFMAERQYTRMEDWLTAKLAYEGLPSKTYLSKTLAQYTSKTCSNCGFTITSADYDRVLEKLKKTATGWMTTINGKELKVEGQITYYNRYKRQNVVKDLSVELDRLSEESVNNDISSWTKGRSGEALSLLKKRFSHRPVQEKFVCLNCGFETHADEQAALNIARSWLFLRSQEYKKYQTNKTTGNTDKRAFVETWQSFYRKKLKEVWKPAV

SEQ ID NO: 40839 - protein, 979 aa, synthetic construct
  REGION 1..979: note = engineered CasX variant
QEIKRINKIRRRLVKDSNTKKAGKTGPMKTLLVRVMTPDLRERLENLRKKPENIPQPISNTSRANLNKLLTDYTEMKKAILHVYWEEFQKDPVGLMSRVAQPASKKIDQNKLKPEMDEKGNLTTAGFACSQCGQPLFVYKLEQVSEKGKAYTNYFGRCNVAEHEKLILLDQLKPEKDSDEAVTYSLGKFGQRALDFYSIHVTKESTHPVKPLAQIAGNRYASVPVGKALSDACMGTIASFLSKYQDIIIEHQKVVKGNQKRLESLRELAGKENLEYPSVTLPPQPHTKEGVDAYNEVIARVRMWVNLNLWQKLKLSRDDAKPLLRLKGFPSFPLVERQANEVDWWDMVCNVKKLINEKKEDGKVFWQNLAGYKRQEALRPYLSSEEDRKKGKKFARYQLGDLLLHLEKKHGERDWGKVYDEAWERIDKKVEGLSKHIKLEEERRSEDAQSKAALTDWLRAKASFVIEGLKEADKDEFCRCELKLQKWYGDLRGKPFAIEAENSILDISGFSKQYNCAFIWQKDGVKKLNLYLIINYFKGGKLRFKKIKPEAFEANRFYTVINKKSGEIVPMEVNFNFDDPNLIILPLAFGKRQGREFIWNDLLSLETGSLKLANGRVIEKTLYNRRTRQDEPALFVALTFERREVLDSSNIKPMNLIGVDRGENIPAVIALTDPEGCPLSRFKDSLGNPTHILRIGESYKEKQRTIQAKKEVEQRRAGGYSRKYASKAKNLADDMVRNTARDLLYYAVTQDAMLIFENLSRGFGRQGKRTFMAERQYTRMEDWLTAKLAYEGLPSKTYLSKTLAQYTSKTCSNCGFTITSADYDRVLEKLKKTATGWMTTINGKELKVEGQITYYNRYKRQNVVKDLSVELDRLSEESVNNDISSWTKGRSGEALSLLKKRFSHRPVQEKFVCLNCGFETHADEQAALNIARSWLFLRSQEYKKYQTNKTTGNTDKRAFVETWQSFYRKKLKEVWKPAV

SEQ ID NO: 40840 - protein, 979 aa, synthetic construct
  REGION 1..979: note = engineered CasX variant
QEIKRINKIRRRLVKDSNTKKAGKTGPMKTLLVRVMTPDLRERLENLRKKPENIPQPISNTSRANLNKLLTDYTEMKKAILHVYWEEFQKDPVGLMSRVAQPASKKIDQNKLKPEMDEKGNLTTAGFACSQCGQPLFVYKLEQVSEKGKAYTNYFGRCNVAEHEKLIKLDQLKPEKDSDEAVTYSLGKFGQRALDFYSIHVTKESTHPVKPLAQIAGNRYASGPVGKALSDACMGTIASFLSKYQDIIIEHQKVVKGNQKRLESLRELAGKENLEYPSVTLPPQPHTKEGVDAYNEVIARVRMWVNLNLWQKLKLSRDDAKPLLRLKGFPSFPLVERQANEVDWWDMVCNVKKLINEKKEDGKVFWQNLAGYKRQEALRPYLSSEEDRKKGKKFARYQLGDLLLHLEKKHGERDWGKVYDEAWERIDKKVEGLSKHIKLEEERRSEDAQSKAALTDWLRAKASFVIEGLKEADKDEFCRCELKLQKWYGDLRGKPFAIEAENSILDISGFSKQYNCAFIWQKDGVKKLNLYLIINYFKGGKLRFKKIKPEAFEANRFYTVINKKSGEIVPMEVNFNFDDPNLIILPLAFGKRQGREFIWNDLLSLETGSLKLANGRVIEKTLYNRRTRQDEPALFVALTFERREVLDSSNIKPMNLIGVDRGENIPAVIALTDPEGCPLSRFKDSLGNPTHILRIGESYKEKQRTIQAKKEVEQRRAGGYSRKYASKAKNLADDMVRNTARDLLYYAVTQDAMLIFENLSRGFGRQGKRTFMAERQYTRMEDWLTAKLAYEGLPSKTYLSKTLAQYTSKTCSNCGFTITSADYDRVLEKLKKTATGWMTTINGKELKVEGQITYYNRYKRQNVVKDLSVELDRLSEESVNNDISSWTKGRSGEALSLLKKRFSHRPVQEKFVCLNCGFETHADEQAALNIARSWLFLRSQEYKKYQTNKTTGNTDKRAFVETWQSFYRKKLKEVWKPAV

SEQ ID NO: 40841 - protein, 978 aa, synthetic construct
  REGION 1..978: note = engineered CasX variant
QEIKRINKIRRRLVKDSNTKKAGKTGPMKTLLVRVMTPDLRERLENLRKKPENIPQPISNTSRANLNKLLTDYTEMKKAILHVYWEEFQKDPVGLMSRVAQPASKKIDQNKLKPEMDEKGNLTTAGFACSQCGQPLFVYKLEQVSEKGKAYTNYFGRCNVAEHEKLILLDQLKPEKDSDEAVTYSLGKFGQRALDFYSIHVTKESTHPVKPLAQIAGNRYASPVGKALSDACMGTIASFLSKYQDIIIEHQKVVKGNQKRLESLRELAGKENLEYPSVTLPPQPHTKEGVDAYNEVIARVRMWVNLNLWQKLKLSRDDAKPLLRLKGFPSFPLVERQANEVDWWDMVCNVKKLINEKKEDGKVFWQNLAGYKRQEALRPYLSSEEDRKKGKKFARYQLGDLLLHLEKKHGERDWGKVYDEAWERIDKKVEGLSKHIKLEEERRSEDAQSKAALTDWLRAKASFVIEGLKEADKDEFCRCELKLQKWYGDLRGKPFAIEAENSILDISGFSKQYNCAFIWQKDGVKKLNLYLIINYFKGGKLRFKKIKPEAFEANRFYTVINKKSGEIVPMEVNFNFDDPNLIILPLAFGKRQGREFIWNDLLSLETGSLKLANGRVIEKTLYNRRTRQDEPALFVALTFERREVLDSSNIKPMNLIGVDRGENIPAVIALTDPEGCPLSRFKDSLGNPTHILRIGESYKEKQRTIQAKKEVEQRRAGGYSRKYASKAKNLADDMVRNTARDLLYYAVTQDAMLIFENLSRGFGRQGKRTFMAERQYTRMEDWLTAKLAYEGLPSKTYLSKTLAQYTSKTCSNCGFTITSADYDRVLEKLKKTATGWMTTINGKELKVEGQITYYNRYKRQNVVKDLSVELDRLSEESVNNDISSWTKGRSGEALSLLKKRFSHRPVQEKFVCLNCGFETHADEQAALNIARSWLFLRSQEYKKYQTNKTTGNTDKRAFVETWQSFYRKKLKEVWKPAV

SEQ ID NO: 40842 - protein, 979 aa, synthetic construct
  REGION 1..979: note = engineered CasX variant
QEIKRINKIRRRLVKDSNTKKAGKTGPMKTLLVRVMTPDLRERLENLRKKPENIPQPISNTSRANLNKLLTDYTEMKKAILHVYWEEFQKDPVGLMSRVAQPASKKIDQNKLKPEMDEKGNLTTAGFACSQCGQPLFVYKLEQVSEKGKAYTNYFGRCNVAEHEKLILLDQLKPEKDSDEAVTYSLGKFGQRALDFYSIHVTKESTHPVKPLAQIAGNRYASYPVGKALSDACMGTIASFLSKYQDIIIEHQKVVKGNQKRLESLRELAGKENLEYPSVTLPPQPHTKEGVDAYNEVIARVRMWVNLNLWQKLKLSRDDAKPLLRLKGFPSFPLVERQANEVDWWDMVCNVKKLINEKKEDGKVFWQNLAGYKRQEALRPYLSSEEDRKKGKKFARYQLGDLLLHLEKKHGEYDWGKVYDEAWERIDKKVEGLSKHIKLEEERRSEDAQSKAALTDWLRAKASFVIEGLKEADKDEFCRCELKLQKWYGDLRGKPFAIEAENSILDISGFSKQYNCAFIWQKDGVKKLNLYLIINYFKGGKLRFKKIKPEAFEANRFYTVINKKSGEIVPMEVNFNFDDPNLIILPLAFGKRQGREFIWNDLLSLETGSLKLANGRVIEKTLYNRRTRQDEPALFVALTFERREVLDSSNIKPMNLIGVDRGENIPAVIALTDPEGCPLSRFKDSLGNPTHILRIGESYKEKQRTIQAKKEVEQRRAGGYSRKYASKAKNLADDMVRNTARDLLYYAVTQDAMLIFENLSRGFGRQGKRTFMAERQYTRMEDWLTAKLAYEGLPSKTYLSKTLAQYTSKTCSNCGFTITSADYDRVLEKLKKTATGWMTTINGKELKVEGQITYYNRYKRQNVVKDLSVELDRLSEESVNNDISSWTKGRSGEALSLLKKRFSHRPVQEKFVCLNCGFETHADEQAALNIARSWLFLRSQEYKKYQTNKTTGNTDKRAFVETWQSFYRKKLKEVWKPAV

SEQ ID NO: 40843 - protein, 979 aa, synthetic construct
  REGION 1..979: note = engineered CasX variant
QEIKRINKIRRRLVKDSNTKKAGKTGPMKTLLVRVMTPDLRERLENLRKKPENIPQPISNTSRANLNKLLTDYTEMKKAILHVYWEEFQKDPVGLMSRVAQPASKKIDQNKLKPEMDEKGNLTTAGFACSQCGQPLFVYKLEQVSEKGKAYTNYFGRCNVAEHEKLILLDQLKPEKDSDEAVTYSLGKFGQRALDFYSIHVTKESTHPVKPLAQIAGNRYASHPVGKALSDACMGTIASFLSKYQDIIIEHQKVVKGNQKRLESLRELAGKENLEYPSVTLPPQPHTKEGVDAYNEVIARVRMWVNLNLWQKLKLSRDDAKPLLRLKGFPSFPLVERQANEVDWWDMVCNVKKLINEKKEDGKVFWQNLAGYKRQEALRPYLSSEEDRKKGKKFARYQLGDLLLHLEKKHGEYDWGKVYDEAWERIDKKVEGLSKHIKLEEERRSEDAQSKAALTDWLRAKASFVIEGLKEADKDEFCRCELKLQKWYGDLRGKPFAIEAENSILDISGFSKQYNCAFIWQKDGVKKLNLYLIINYFKGGKLRFKKIKPEAFEANRFYTVINKKSGEIVPMEVNFNFDDPNLIILPLAFGKRQGREFIWNDLLSLETGSLKLANGRVIEKTLYNRRTRQDEPALFVALTFERREVLDSSNIKPMNLIGVDRGENIPAVIALTDPEGCPLSRFKDSLGNPTHILRIGESYKEKQRTIQAKKEVEQRRAGGYSRKYASKAKNLADDMVRNTARDLLYYAVTQDAMLIFENLSRGFGRQGKRTFMAERQYTRMEDWLTAKLAYEGLPSKTYLSKTLAQYTSKTCSNCGFTITSADYDRVLEKLKKTATGWMTTINGKELKVEGQITYYNRYKRQNVVKDLSVELDRLSEESVNNDISSWTKGRSGEALSLLKKRFSHRPVQEKFVCLNCGFETHADEQAALNIARSWLFLRSQEYKKYQTNKTTGNTDKRAFVETWQSFYRKKLKEVWKPAV

SEQ ID NO: 40844 - protein, 979 aa, synthetic construct
  REGION 1..979: note = engineered CasX variant
QEIKRINKIRRRLVKDSNTKKAGKTGPMKTLLVRVMTPDLRERLENLRKKPENIPQPISNTSRANLNKLLTDYTEMKKAILHVYWEEFQKDPVGLMSRVAQPASKKIDQNKLKPEMDEKGNLTTAGFACSQCGQPLFVYKLEQVSEKGKAYTNYFGRCNVAEHEKLILLDQLKPEKDSDEAVTYSLGKFGQRALDFYSIHVTKESTHPVKPLAQIAGNRYASSPVGKALSDACMGTIASFLSKYQDIIIEHQKVVKGNQKRLESLRELAGKENLEYPSVTLPPQPHTKEGVDAYNEVIARVRMWVNLNLWQKLKLSRDDAKPLLRLKGFPSFPLVERQANEVDWWDMVCNVKKLINEKKEDGKVFWQNLAGYKRQEALRPYLSSEEDRKKGKKFARYQLGDLLLHLEKKHGEYDWGKVYDEAWERIDKKVEGLSKHIKLEEERRSEDAQSKAALTDWLRAKASFVIEGLKEADKDEFCRCELKLQKWYGDLRGKPFAIEAENSILDISGFSKQYNCAFIWQKDGVKKLNLYLIINYFKGGKLRFKKIKPEAFEANRFYTVINKKSGEIVPMEVNFNFDDPNLIILPLAFGKRQGREFIWNDLLSLETGSLKLANGRVIEKTLYNRRTRQDEPALFVALTFERREVLDSSNIKPMNLIGVDRGENIPAVIALTDPEGCPLSRFKDSLGNPTHILRIGESYKEKQRTIQAKKEVEQRRAGGYSRKYASKAKNLADDMVRNTARDLLYYAVTQDAMLIFENLSRGFGRQGKRTFMAERQYTRMEDWLTAKLAYEGLPSKTYLSKTLAQYTSKTCSNCGFTITSADYDRVLEKLKKTATGWMTTINGKELKVEGQITYYNRYKRQNVVKDLSVELDRLSEESVNNDISSWTKGRSGEALSLLKKRFSHRPVQEKFVCLNCGFETHADEQAALNIARSWLFLRSQEYKKYQTNKTTGNTDKRAFVETWQSFYRKKLKEVWKPAV

SEQ ID NO: 40845 - protein, 979 aa, synthetic construct
  REGION 1..979: note = engineered CasX variant
QEIKRINKIRRRLVKDSNTKKAGKTGPMKTLLVRVMTPDLRERLENLRKKPENIPQPISNTSRANLNKLLTDYTEMKKAILHVYWEEFQKDPVGLMSRVAQPASKKIDQNKLKPEMDEKGNLTTAGFACSQCGQPLFVYKLEQVSEKGKAYTNYFGRCNVAEHEKLILLDQLKPEKDSDEAVTYSLGKFGQRALDFYSIHVTKESTHPVKPLAQIAGNRYASTPVGKALSDACMGTIASFLSKYQDIIIEHQKVVKGNQKRLESLRELAGKENLEYPSVTLPPQPHTKEGVDAYNEVIARVRMWVNLNLWQKLKLSRDDAKPLLRLKGFPSFPLVERQANEVDWWDMVCNVKKLINEKKEDGKVFWQNLAGYKRQEALRPYLSSEEDRKKGKKFARYQLGDLLLHLEKKHGEYDWGKVYDEAWERIDKKVEGLSKHIKLEEERRSEDAQSKAALTDWLRAKASFVIEGLKEADKDEFCRCELKLQKWYGDLRGKPFAIEAENSILDISGFSKQYNCAFIWQKDGVKKLNLYLIINYFKGGKLRFKKIKPEAFEANRFYTVINKKSGEIVPMEVNFNFDDPNLIILPLAFGKRQGREFIWNDLLSLETGSLKLANGRVIEKTLYNRRTRQDEPALFVALTFERREVLDSSNIKPMNLIGVDRGENIPAVIALTDPEGCPLSRFKDSLGNPTHILRIGESYKEKQRTIQAKKEVEQRRAGGYSRKYASKAKNLADDMVRNTARDLLYYAVTQDAMLIFENLSRGFGRQGKRTFMAERQYTRMEDWLTAKLAYEGLPSKTYLSKTLAQYTSKTCSNCGFTITSADYDRVLEKLKKTATGWMTTINGKELKVEGQITYYNRYKRQNVVKDLSVELDRLSEESVNNDISSWTKGRSGEALSLLKKRFSHRPVQEKFVCLNCGFETHADEQAALNIARSWLFLRSQEYKKYQTNKTTGNTDKRAFVETWQSFYRKKLKEVWKPAV

SEQ ID NO: 40846 - protein, 979 aa, synthetic construct
  REGION 1..979: note = engineered CasX variant
QEIKRINKIRRRLVKDSNTKKAGKTGPMKTLLVRVMTPDLRERLENLRKKPENIPQPISNTSRANLNKLLTDYTEMKKAILHVYWEEFQKDPVGLMSRVAQPASKKIDQNKLKPEMDEKGNLTTAGFACSQCGQPLFVYKLEQVSEKGKAYTNYFGRCNVAEHEKLILLDQLKPEKDSDEAVTYSLGKFGQRALDFYSIHVTKESTHPVKPLAQIAGNRYASAPVGKALSDACMGTIASFLSKYQDIIIEHQKVVKGNQKRLESLRELAGKENLEYPSVTLPPQPHTKEGVDAYNEVIARVRMWVNLNLWQKLKLSRDDAKPLLRLKGFPSFPLVERQANEVDWWDMVCNVKKLINEKKEDGKVFWQNLAGYKRQEALRPYLSSEEDRKKGKKFARYQLGDLLLHLEKKHGEYDWGKVYDEAWERIDKKVEGLSKHIKLEEERRSEDAQSKAALTDWLRAKASFVIEGLKEADKDEFCRCELKLQKWYGDLRGKPFAIEAENSILDISGFSKQYNCAFIWQKDGVKKLNLYLIINYFKGGKLRFKKIKPEAFEANRFYTVINKKSGEIVPMEVNFNFDDPNLIILPLAFGKRQGREFIWNDLLSLETGSLKLANGRVIEKTLYNRRTRQDEPALFVALTFERREVLDSSNIKPMNLIGVDRGENIPAVIALTDPEGCPLSRFKDSLGNPTHILRIGESYKEKQRTIQAKKEVEQRRAGGYSRKYASKAKNLADDMVRNTARDLLYYAVTQDAMLIFENLSRGFGRQGKRTFMAERQYTRMEDWLTAKLAYEGLPSKTYLSKTLAQYTSKTCSNCGFTITSADYDRVLEKLKKTATGWMTTINGKELKVEGQITYYNRYKRQNVVKDLSVELDRLSEESVNNDISSWTKGRSGEALSLLKKRFSHRPVQEKFVCLNCGFETHADEQAALNIARSWLFLRSQEYKKYQTNKTTGNTDKRAFVETWQSFYRKKLKEVWKPAV

SEQ ID NO: 40847 - protein, 979 aa, synthetic construct
  REGION 1..979: note = engineered CasX variant
QEIKRINKIRRRLVKDSNTKKAGKTGPMKTLLVRVMTPDLRERLENLRKKPENIPQPISNTSRANLNKLLTDYTEMKKAILHVYWEEFQKDPVGLMSRVAQPASKKIDQNKLKPEMDEKGNLTTAGFACSQCGQPLFVYKLEQVSEKGKAYTNYFGRCNVAEHEKLILLDQLKPEKDSDEAVTYSLGKFGQRALDFYSIHVTKESTHPVKPLAQIAGNRYASVPVGKALSDACMGTIASFLSKYQDIIIEHQKVVKGNQKRLESLRELAGKENLEYPSVTLPPQPHTKEGVDAYNEVIARVRMWVNLNLWQKLKLSRDDAKPLLRLKGFPSFPLVERQANEVDWWDMVCNVKKLINEKKEDGKVFWQNLAGYKRQEALRPYLSSEEDRKKGKKFARYQLGDLLLHLEKKHGEYDWGKVYDEAWERIDKKVEGLSKHIKLEEERRSEDAQSKAALTDWLRAKASFVIEGLKEADKDEFCRCELKLQKWYGDLRGKPFAIEAENSILDISGFSKQYNCAFIWQKDGVKKLNLYLIINYFKGGKLRFKKIKPEAFEANRFYTVINKKSGEIVPMEVNFNFDDPNLIILPLAFGKRQGREFIWNDLLSLETGSLKLANGRVIEKTLYNRRTRQDEPALFVALTFERREVLDSSNIKPMNLIGVDRGENIPAVIALTDPEGCPLSRFKDSLGNPTHILRIGESYKEKQRTIQAKKEVEQRRAGGYSRKYASKAKNLADDMVRNTARDLLYYAVTQDAMLIFENLSRGFGRQGKRTFMAERQYTRMEDWLTAKLAYEGLPSKTYLSKTLAQYTSKTCSNCGFTITSADYDRVLEKLKKTATGWMTTINGKELKVEGQITYYNRYKRQNVVKDLSVELDRLSEESVNNDISSWTKGRSGEALSLLKKRFSHRPVQEKFVCLNCGFETHADEQAALNIARSWLFLRSQEYKKYQTNKTTGNTDKRAFVETWQSFYRKKLKEVWKPAV

SEQ ID NO: 40848 - protein, 979 aa, synthetic construct
  REGION 1..979: note = engineered CasX variant
QEIKRINKIRRRLVKDSNTKKAGKTGPMKTLLVRVMTPDLRERLENLRKKPENIPQPISNTSRANLNKLLTDYTEMKKAILHVYWEEFQKDPVGLMSRVAQPASKKIDQNKLKPEMDEKGNLTTAGFACSQCGQPLFVYKLEQVSEKGKAYTNYFGRCNVAEHEKLIKLDQLKPEKDSDEAVTYSLGKFGQRALDFYSIHVTKESTHPVKPLAQIAGNRYASGPVGKALSDACMGTIASFLSKYQDIIIEHQKVVKGNQKRLESLRELAGKENLEYPSVTLPPQPHTKEGVDAYNEVIARVRMWVNLNLWQKLKLSRDDAKPLLRLKGFPSFPLVERQANEVDWWDMVCNVKKLINEKKEDGKVFWQNLAGYKRQEALRPYLSSEEDRKKGKKFARYQLGDLLLHLEKKHGEYDWGKVYDEAWERIDKKVEGLSKHIKLEEERRSEDAQSKAALTDWLRAKASFVIEGLKEADKDEFCRCELKLQKWYGDLRGKPFAIEAENSILDISGFSKQYNCAFIWQKDGVKKLNLYLIINYFKGGKLRFKKIKPEAFEANRFYTVINKKSGEIVPMEVNFNFDDPNLIILPLAFGKRQGREFIWNDLLSLETGSLKLANGRVIEKTLYNRRTRQDEPALFVALTFERREVLDSSNIKPMNLIGVDRGENIPAVIALTDPEGCPLSRFKDSLGNPTHILRIGESYKEKQRTIQAKKEVEQRRAGGYSRKYASKAKNLADDMVRNTARDLLYYAVTQDAMLIFENLSRGFGRQGKRTFMAERQYTRMEDWLTAKLAYEGLPSKTYLSKTLAQYTSKTCSNCGFTITSADYDRVLEKLKKTATGWMTTINGKELKVEGQITYYNRYKRQNVVKDLSVELDRLSEESVNNDISSWTKGRSGEALSLLKKRFSHRPVQEKFVCLNCGFETHADEQAALNIARSWLFLRSQEYKKYQTNKTTGNTDKRAFVETWQSFYRKKLKEVWKPAV

SEQ ID NO: 40849 - protein, 978 aa, synthetic construct
  REGION 1..978: note = engineered CasX variant
QEIKRINKIRRRLVKDSNTKKAGKTGPMKTLLVRVMTPDLRERLENLRKKPENIPQPISNTSRANLNKLLTDYTEMKKAILHVYWEEFQKDPVGLMSRVAQPASKKIDQNKLKPEMDEKGNLTTAGFACSQCGQPLFVYKLEQVSEKGKAYTNYFGRCNVAEHEKLILLDQLKPEKDSDEAVTYSLGKFGQRALDFYSIHVTKESTHPVKPLAQIAGNRYASPVGKALSDACMGTIASFLSKYQDIIIEHQKVVKGNQKRLESLRELAGKENLEYPSVTLPPQPHTKEGVDAYNEVIARVRMWVNLNLWQKLKLSRDDAKPLLRLKGFPSFPLVERQANEVDWWDMVCNVKKLINEKKEDGKVFWQNLAGYKRQEALRPYLSSEEDRKKGKKFARYQLGDLLLHLEKKHGEYDWGKVYDEAWERIDKKVEGLSKHIKLEEERRSEDAQSKAALTDWLRAKASFVIEGLKEADKDEFCRCELKLQKWYGDLRGKPFAIEAENSILDISGFSKQYNCAFIWQKDGVKKLNLYLIINYFKGGKLRFKKIKPEAFEANRFYTVINKKSGEIVPMEVNFNFDDPNLIILPLAFGKRQGREFIWNDLLSLETGSLKLANGRVIEKTLYNRRTRQDEPALFVALTFERREVLDSSNIKPMNLIGVDRGENIPAVIALTDPEGCPLSRFKDSLGNPTHILRIGESYKEKQRTIQAKKEVEQRRAGGYSRKYASKAKNLADDMVRNTARDLLYYAVTQDAMLIFENLSRGFGRQGKRTFMAERQYTRMEDWLTAKLAYEGLPSKTYLSKTLAQYTSKTCSNCGFTITSADYDRVLEKLKKTATGWMTTINGKELKVEGQITYYNRYKRQNVVKDLSVELDRLSEESVNNDISSWTKGRSGEALSLLKKRFSHRPVQEKFVCLNCGFETHADEQAALNIARSWLFLRSQEYKKYQTNKTTGNTDKRAFVETWQSFYRKKLKEVWKPAV

SEQ ID NO: 40850 - protein, 978 aa, synthetic construct
  REGION 1..978: note = engineered CasX variant
QEIKRINKIRRRLVKDSNTKKAGKTGPMKTLLVRVMTPDLRERLENLRKKPENIPQPISNTSRANLNKLLTDYTEMKKAILHVYWEEFQKDPVGLMSRVAQPASKKIDQNKLKPEMDEKGNLTTAGFACSQCGQPLFVYKLEQVSEKGKAYTNYFGRCNVAEHEKLILLDQLKPEKDSDEAVTYSLGKFGQRALDFYSIHVTKESTHPVKPLAQIAGNRYASYPVGKALSDACMGTIASFLSKYQDIIIEHQKVVKGNQKRLESLRELAGKENLEYPSVTLPPQPHTKEGVDAYNEVIARVRMWVNLNLWQKLKLSRDDAKPLLRLKGFPSFPLVERQANEVDWWDMVCNVKKLINEKKEDGKVFWQNLAGYKRQEALRPYLSSEEDRKKGKKFARYQLGDLLLHLEKKHGEDWGDVYDEAWERIDKKVEGLSKHIKLEEERRSEDAQSKAALTDWLRAKASFVIEGLKEADKDEFCRCELKLQKWYGDLRGKPFAIEAENSILDISGFSKQYNCAFIWQKDGVKKLNLYLIINYFKGGKLRFKKIKPEAFEANRFYTVINKKSGEIVPMEVNFNFDDPNLIILPLAFGKRQGREFIWNDLLSLETGSLKLANGRVIEKTLYNRRTRQDEPALFVALTFERREVLDSSNIKPMNLIGVDRGENIPAVIALTDPEGCPLSRFKDSLGNPTHILRIGESYKEKQRTIQAKKEVEQRRAGGYSRKYASKAKNLADDMVRNTARDLLYYAVTQDAMLIFENLSRGFGRQGKRTFMAERQYTRMEDWLTAKLAYEGLPSKTYLSKTLAQYTSKTCSNCGFTITSADYDRVLEKLKKTATGWMTTINGKELKVEGQITYYNRYKRQNVVKDLSVELDRLSEESVNNDISSWTKGRSGEALSLLKKRFSHRPVQEKFVCLNCGFETHADEQAALNIARSWLFLRSQEYKKYQTNKTTGNTDKRAFVETWQSFYRKKLKEVWKPAV

SEQ ID NO: 40851 - protein, 978 aa, synthetic construct
  REGION 1..978: note = engineered CasX variant
QEIKRINKIRRRLVKDSNTKKAGKTGPMKTLLVRVMTPDLRERLENLRKKPENIPQPISNTSRANLNKLLTDYTEMKKAILHVYWEEFQKDPVGLMSRVAQPASKKIDQNKLKPEMDEKGNLTTAGFACSQCGQPLFVYKLEQVSEKGKAYTNYFGRCNVAEHEKLILLDQLKPEKDSDEAVTYSLGKFGQRALDFYSIHVTKESTHPVKPLAQIAGNRYASHPVGKALSDACMGTIASFLSKYQDIIIEHQKVVKGNQKRLESLRELAGKENLEYPSVTLPPQPHTKEGVDAYNEVIARVRMWVNLNLWQKLKLSRDDAKPLLRLKGFPSFPLVERQANEVDWWDMVCNVKKLINEKKEDGKVFWQNLAGYKRQEALRPYLSSEEDRKKGKKFARYQLGDLLLHLEKKHGEDWGDVYDEAWERIDKKVEGLSKHIKLEEERRSEDAQSKAALTDWLRAKASFVIEGLKEADKDEFCRCELKLQKWYGDLRGKPFAIEAENSILDISGFSKQYNCAFIWQKDGVKKLNLYLIINYFKGGKLRFKKIKPEAFEANRFYTVINKKSGEIVPMEVNFNFDDPNLIILPLAFGKRQGREFIWNDLLSLETGSLKLANGRVIEKTLYNRRTRQDEPALFVALTFERREVLDSSNIKPMNLIGVDRGENIPAVIALTDPEGCPLSRFKDSLGNPTHILRIGESYKEKQRTIQAKKEVEQRRAGGYSRKYASKAKNLADDMVRNTARDLLYYAVTQDAMLIFENLSRGFGRQGKRTFMAERQYTRMEDWLTAKLAYEGLPSKTYLSKTLAQYTSKTCSNCGFTITSADYDRVLEKLKKTATGWMTTINGKELKVEGQITYYNRYKRQNVVKDLSVELDRLSEESVNNDISSWTKGRSGEALSLLKKRFSHRPVQEKFVCLNCGFETHADEQAALNIARSWLFLRSQEYKKYQTNKTTGNTDKRAFVETWQSFYRKKLKEVWKPAV

SEQ ID NO: 40852 - protein, 978 aa, synthetic construct
  REGION 1..978: note = engineered CasX variant
QEIKRINKIRRRLVKDSNTKKAGKTGPMKTLLVRVMTPDLRERLENLRKKPENIPQPISNTSRANLNKLLTDYTEMKKAILHVYWEEFQKDPVGLMSRVAQPASKKIDQNKLKPEMDEKGNLTTAGFACSQCGQPLFVYKLEQVSEKGKAYTNYFGRCNVAEHEKLILLDQLKPEKDSDEAVTYSLGKFGQRALDFYSIHVTKESTHPVKPLAQIAGNRYASSPVGKALSDACMGTIASFLSKYQDIIIEHQKVVKGNQKRLESLRELAGKENLEYPSVTLPPQPHTKEGVDAYNEVIARVRMWVNLNLWQKLKLSRDDAKPLLRLKGFPSFPLVERQANEVDWWDMVCNVKKLINEKKEDGKVFWQNLAGYKRQEALRPYLSSEEDRKKGKKFARYQLGDLLLHLEKKHGEDWGDVYDEAWERIDKKVEGLSKHIKLEEERRSEDAQSKAALTDWLRAKASFVIEGLKEADKDEFCRCELKLQKWYGDLRGKPFAIEAENSILDISGFSKQYNCAFIWQKDGVKKLNLYLIINYFKGGKLRFKKIKPEAFEANRFYTVINKKSGEIVPMEVNFNFDDPNLIILPLAFGKRQGREFIWNDLLSLETGSLKLANGRVIEKTLYNRRTRQDEPALFVALTFERREVLDSSNIKPMNLIGVDRGENIPAVIALTDPEGCPLSRFKDSLGNPTHILRIGESYKEKQRTIQAKKEVEQRRAGGYSRKYASKAKNLADDMVRNTARDLLYYAVTQDAMLIFENLSRGFGRQGKRTFMAERQYTRMEDWLTAKLAYEGLPSKTYLSKTLAQYTSKTCSNCGFTITSADYDRVLEKLKKTATGWMTTINGKELKVEGQITYYNRYKRQNVVKDLSVELDRLSEESVNNDISSWTKGRSGEALSLLKKRFSHRPVQEKFVCLNCGFETHADEQAALNIARSWLFLRSQEYKKYQTNKTTGNTDKRAFVETWQSFYRKKLKEVWKPAV

SEQ ID NO: 40853 - protein, 978 aa, synthetic construct
  REGION 1..978: note = engineered CasX variant
QEIKRINKIRRRLVKDSNTKKAGKTGPMKTLLVRVMTPDLRERLENLRKKPENIPQPISNTSRANLNKLLTDYTEMKKAILHVYWEEFQKDPVGLMSRVAQPASKKIDQNKLKPEMDEKGNLTTAGFACSQCGQPLFVYKLEQVSEKGKAYTNYFGRCNVAEHEKLILLDQLKPEKDSDEAVTYSLGKFGQRALDFYSIHVTKESTHPVKPLAQIAGNRYASTPVGKALSDACMGTIASFLSKYQDIIIEHQKVVKGNQKRLESLRELAGKENLEYPSVTLPPQPHTKEGVDAYNEVIARVRMWVNLNLWQKLKLSRDDAKPLLRLKGFPSFPLVERQANEVDWWDMVCNVKKLINEKKEDGKVFWQNLAGYKRQEALRPYLSSEEDRKKGKKFARYQLGDLLLHLEKKHGEDWGDVYDEAWERIDKKVEGLSKHIKLEEERRSEDAQSKAALTDWLRAKASFVIEGLKEADKDEFCRCELKLQKWYGDLRGKPFAIEAENSILDISGFSKQYNCAFIWQKDGVKKLNLYLIINYFKGGKLRFKKIKPEAFEANRFYTVINKKSGEIVPMEVNFNFDDPNLIILPLAFGKRQGREFIWNDLLSLETGSLKLANGRVIEKTLYNRRTRQDEPALFVALTFERREVLDSSNIKPMNLIGVDRGENIPAVIALTDPEGCPLSRFKDSLGNPTHILRIGESYKEKQRTIQAKKEVEQRRAGGYSRKYASKAKNLADDMVRNTARDLLYYAVTQDAMLIFENLSRGFGRQGKRTFMAERQYTRMEDWLTAKLAYEGLPSKTYLSKTLAQYTSKTCSNCGFTITSADYDRVLEKLKKTATGWMTTINGKELKVEGQITYYNRYKRQNVVKDLSVELDRLSEESVNNDISSWTKGRSGEALSLLKKRFSHRPVQEKFVCLNCGFETHADEQAALNIARSWLFLRSQEYKKYQTNKTTGNTDKRAFVETWQSFYRKKLKEVWKPAV

SEQ ID NO: 40854 - protein, 978 aa, synthetic construct
  REGION 1..978: note = engineered CasX variant
QEIKRINKIRRRLVKDSNTKKAGKTGPMKTLLVRVMTPDLRERLENLRKKPENIPQPISNTSRANLNKLLTDYTEMKKAILHVYWEEFQKDPVGLMSRVAQPASKKIDQNKLKPEMDEKGNLTTAGFACSQCGQPLFVYKLEQVSEKGKAYTNYFGRCNVAEHEKLILLDQLKPEKDSDEAVTYSLGKFGQRALDFYSIHVTKESTHPVKPLAQIAGNRYASAPVGKALSDACMGTIASFLSKYQDIIIEHQKVVKGNQKRLESLRELAGKENLEYPSVTLPPQPHTKEGVDAYNEVIARVRMWVNLNLWQKLKLSRDDAKPLLRLKGFPSFPLVERQANEVDWWDMVCNVKKLINEKKEDGKVFWQNLAGYKRQEALRPYLSSEEDRKKGKKFARYQLGDLLLHLEKKHGEDWGDVYDEAWERIDKKVEGLSKHIKLEEERRSEDAQSKAALTDWLRAKASFVIEGLKEADKDEFCRCELKLQKWYGDLRGKPFAIEAENSILDISGFSKQYNCAFIWQKDGVKKLNLYLIINYFKGGKLRFKKIKPEAFEANRFYTVINKKSGEIVPMEVNFNFDDPNLIILPLAFGKRQGREFIWNDLLSLETGSLKLANGRVIEKTLYNRRTRQDEPALFVALTFERREVLDSSNIKPMNLIGVDRGENIPAVIALTDPEGCPLSRFKDSLGNPTHILRIGESYKEKQRTIQAKKEVEQRRAGGYSRKYASKAKNLADDMVRNTARDLLYYAVTQDAMLIFENLSRGFGRQGKRTFMAERQYTRMEDWLTAKLAYEGLPSKTYLSKTLAQYTSKTCSNCGFTITSADYDRVLEKLKKTATGWMTTINGKELKVEGQITYYNRYKRQNVVKDLSVELDRLSEESVNNDISSWTKGRSGEALSLLKKRFSHRPVQEKFVCLNCGFETHADEQAALNIARSWLFLRSQEYKKYQTNKTTGNTDKRAFVETWQSFYRKKLKEVWKPAV

SEQ ID NO: 40855 - protein, 978 aa, synthetic construct
  REGION 1..978: note = engineered CasX variant
QEIKRINKIRRRLVKDSNTKKAGKTGPMKTLLVRVMTPDLRERLENLRKKPENIPQPISNTSRANLNKLLTDYTEMKKAILHVYWEEFQKDPVGLMSRVAQPASKKIDQNKLKPEMDEKGNLTTAGFACSQCGQPLFVYKLEQVSEKGKAYTNYFGRCNVAEHEKLILLDQLKPEKDSDEAVTYSLGKFGQRALDFYSIHVTKESTHPVKPLAQIAGNRYASVPVGKALSDACMGTIASFLSKYQDIIIEHQKVVKGNQKRLESLRELAGKENLEYPSVTLPPQPHTKEGVDAYNEVIARVRMWVNLNLWQKLKLSRDDAKPLLRLKGFPSFPLVERQANEVDWWDMVCNVKKLINEKKEDGKVFWQNLAGYKRQEALRPYLSSEEDRKKGKKFARYQLGDLLLHLEKKHGEDWGDVYDEAWERIDKKVEGLSKHIKLEEERRSEDAQSKAALTDWLRAKASFVIEGLKEADKDEFCRCELKLQKWYGDLRGKPFAIEAENSILDISGFSKQYNCAFIWQKDGVKKLNLYLIINYFKGGKLRFKKIKPEAFEANRFYTVINKKSGEIVPMEVNFNFDDPNLIILPLAFGKRQGREFIWNDLLSLETGSLKLANGRVIEKTLYNRRTRQDEPALFVALTFERREVLDSSNIKPMNLIGVDRGENIPAVIALTDPEGCPLSRFKDSLGNPTHILRIGESYKEKQRTIQAKKEVEQRRAGGYSRKYASKAKNLADDMVRNTARDLLYYAVTQDAMLIFENLSRGFGRQGKRTFMAERQYTRMEDWLTAKLAYEGLPSKTYLSKTLAQYTSKTCSNCGFTITSADYDRVLEKLKKTATGWMTTINGKELKVEGQITYYNRYKRQNVVKDLSVELDRLSEESVNNDISSWTKGRSGEALSLLKKRFSHRPVQEKFVCLNCGFETHADEQAALNIARSWLFLRSQEYKKYQTNKTTGNTDKRAFVETWQSFYRKKLKEVWKPAV

SEQ ID NO: 40856 - protein, 978 aa, synthetic construct
  REGION 1..978: note = engineered CasX variant
QEIKRINKIRRRLVKDSNTKKAGKTGPMKTLLVRVMTPDLRERLENLRKKPENIPQPISNTSRANLNKLLTDYTEMKKAILHVYWEEFQKDPVGLMSRVAQPASKKIDQNKLKPEMDEKGNLTTAGFACSQCGQPLFVYKLEQVSEKGKAYTNYFGRCNVAEHEKLIKLDQLKPEKDSDEAVTYSLGKFGQRALDFYSIHVTKESTHPVKPLAQIAGNRYASGPVGKALSDACMGTIASFLSKYQDIIIEHQKVVKGNQKRLESLRELAGKENLEYPSVTLPPQPHTKEGVDAYNEVIARVRMWVNLNLWQKLKLSRDDAKPLLRLKGFPSFPLVERQANEVDWWDMVCNVKKLINEKKEDGKVFWQNLAGYKRQEALRPYLSSEEDRKKGKKFARYQLGDLLLHLEKKHGEDWGDVYDEAWERIDKKVEGLSKHIKLEEERRSEDAQSKAALTDWLRAKASFVIEGLKEADKDEFCRCELKLQKWYGDLRGKPFAIEAENSILDISGFSKQYNCAFIWQKDGVKKLNLYLIINYFKGGKLRFKKIKPEAFEANRFYTVINKKSGEIVPMEVNFNFDDPNLIILPLAFGKRQGREFIWNDLLSLETGSLKLANGRVIEKTLYNRRTRQDEPALFVALTFERREVLDSSNIKPMNLIGVDRGENIPAVIALTDPEGCPLSRFKDSLGNPTHILRIGESYKEKQRTIQAKKEVEQRRAGGYSRKYASKAKNLADDMVRNTARDLLYYAVTQDAMLIFENLSRGFGRQGKRTFMAERQYTRMEDWLTAKLAYEGLPSKTYLSKTLAQYTSKTCSNCGFTITSADYDRVLEKLKKTATGWMTTINGKELKVEGQITYYNRYKRQNVVKDLSVELDRLSEESVNNDISSWTKGRSGEALSLLKKRFSHRPVQEKFVCLNCGFETHADEQAALNIARSWLFLRSQEYKKYQTNKTTGNTDKRAFVETWQSFYRKKLKEVWKPAV

SEQ ID NO: 40857 - protein, 977 aa, synthetic construct
  REGION 1..977: note = engineered CasX variant
QEIKRINKIRRRLVKDSNTKKAGKTGPMKTLLVRVMTPDLRERLENLRKKPENIPQPISNTSRANLNKLLTDYTEMKKAILHVYWEEFQKDPVGLMSRVAQPASKKIDQNKLKPEMDEKGNLTTAGFACSQCGQPLFVYKLEQVSEKGKAYTNYFGRCNVAEHEKLILLDQLKPEKDSDEAVTYSLGKFGQRALDFYSIHVTKESTHPVKPLAQIAGNRYASPVGKALSDACMGTIASFLSKYQDIIIEHQKVVKGNQKRLESLRELAGKENLEYPSVTLPPQPHTKEGVDAYNEVIARVRMWVNLNLWQKLKLSRDDAKPLLRLKGFPSFPLVERQANEVDWWDMVCNVKKLINEKKEDGKVFWQNLAGYKRQEALRPYLSSEEDRKKGKKFARYQLGDLLLHLEKKHGEDWGDVYDEAWERIDKKVEGLSKHIKLEEERRSEDAQSKAALTDWLRAKASFVIEGLKEADKDEFCRCELKLQKWYGDLRGKPFAIEAENSILDISGFSKQYNCAFIWQKDGVKKLNLYLIINYFKGGKLRFKKIKPEAFEANRFYTVINKKSGEIVPMEVNFNFDDPNLIILPLAFGKRQGREFIWNDLLSLETGSLKLANGRVIEKTLYNRRTRQDEPALFVALTFERREVLDSSNIKPMNLIGVDRGENIPAVIALTDPEGCPLSRFKDSLGNPTHILRIGESYKEKQRTIQAKKEVEQRRAGGYSRKYASKAKNLADDMVRNTARDLLYYAVTQDAMLIFENLSRGFGRQGKRTFMAERQYTRMEDWLTAKLAYEGLPSKTYLSKTLAQYTSKTCSNCGFTITSADYDRVLEKLKKTATGWMTTINGKELKVEGQITYYNRYKRQNVVKDLSVELDRLSEESVNNDISSWTKGRSGEALSLLKKRFSHRPVQEKFVCLNCGFETHADEQAALNIARSWLFLRSQEYKKYQTNKTTGNTDKRAFVETWQSFYRKKLKEVWKPAV

SEQ ID NO: 40858 - protein, 978 aa, synthetic construct
  REGION 1..978: note = engineered CasX variant
QEIKRINKIRRRLVKDSNTKKAGKTGPMKTLLVRVMTPDLRERLENLRKKPENIPQPISNTSRANLNKLLTDYTEMKKAILHVYWEEFQKDPVGLMSRVAQPASKKIDQNKLKPEMDEKGNLTTAGFACSQCGQPLFVYKLEQVSEKGKAYTNYFGRCNVAEHEKLILLDQLKPEKDSDEAVTYSLGKFGQRALDFYSIHVTKESTHPVKPLAQIAGNRYASYPVGKALSDACMGTIASFLSKYQDIIIEHQKVVKGNQKRLESLRELAGKENLEYPSVTLPPQPHTKEGVDAYNEVIARVRMWVNLNLWQKLKLSRDDAKPLLRLKGFPSFPLVERQANEVDWWDMVCNVKKLINEKKEDGKVFWQNLAGYKRQEALRPYLSSEEDRKKGKKFARYQLGDLLLHLEKKHGEDWGKVYGEAWERIDKKVEGLSKHIKLEEERRSEDAQSKAALTDWLRAKASFVIEGLKEADKDEFCRCELKLQKWYGDLRGKPFAIEAENSILDISGFSKQYNCAFIWQKDGVKKLNLYLIINYFKGGKLRFKKIKPEAFEANRFYTVINKKSGEIVPMEVNFNFDDPNLIILPLAFGKRQGREFIWNDLLSLETGSLKLANGRVIEKTLYNRRTRQDEPALFVALTFERREVLDSSNIKPMNLIGVDRGENIPAVIALTDPEGCPLSRFKDSLGNPTHILRIGESYKEKQRTIQAKKEVEQRRAGGYSRKYASKAKNLADDMVRNTARDLLYYAVTQDAMLIFENLSRGFGRQGKRTFMAERQYTRMEDWLTAKLAYEGLPSKTYLSKTLAQYTSKTCSNCGFTITSADYDRVLEKLKKTATGWMTTINGKELKVEGQITYYNRYKRQNVVKDLSVELDRLSEESVNNDISSWTKGRSGEALSLLKKRFSHRPVQEKFVCLNCGFETHADEQAALNIARSWLFLRSQEYKKYQTNKTTGNTDKRAFVETWQSFYRKKLKEVWKPAV

SEQ ID NO: 40859 - protein, 978 aa, synthetic construct
  REGION 1..978: note = engineered CasX variant
QEIKRINKIRRRLVKDSNTKKAGKTGPMKTLLVRVMTPDLRERLENLRKKPENIPQPISNTSRANLNKLLTDYTEMKKAILHVYWEEFQKDPVGLMSRVAQPASKKIDQNKLKPEMDEKGNLTTAGFACSQCGQPLFVYKLEQVSEKGKAYTNYFGRCNVAEHEKLILLDQLKPEKDSDEAVTYSLGKFGQRALDFYSIHVTKESTHPVKPLAQIAGNRYASHPVGKALSDACMGTIASFLSKYQDIIIEHQKVVKGNQKRLESLRELAGKENLEYPSVTLPPQPHTKEGVDAYNEVIARVRMWVNLNLWQKLKLSRDDAKPLLRLKGFPSFPLVERQANEVDWWDMVCNVKKLINEKKEDGKVFWQNLAGYKRQEALRPYLSSEEDRKKGKKFARYQLGDLLLHLEKKHGEDWGKVYGEAWERIDKKVEGLSKHIKLEEERRSEDAQSKAALTDWLRAKASFVIEGLKEADKDEFCRCELKLQKWYGDLRGKPFAIEAENSILDISGFSKQYNCAFIWQKDGVKKLNLYLIINYFKGGKLRFKKIKPEAFEANRFYTVINKKSGEIVPMEVNFNFDDPNLIILPLAFGKRQGREFIWNDLLSLETGSLKLANGRVIEKTLYNRRTRQDEPALFVALTFERREVLDSSNIKPMNLIGVDRGENIPAVIALTDPEGCPLSRFKDSLGNPTHILRIGESYKEKQRTIQAKKEVEQRRAGGYSRKYASKAKNLADDMVRNTARDLLYYAVTQDAMLIFENLSRGFGRQGKRTFMAERQYTRMEDWLTAKLAYEGLPSKTYLSKTLAQYTSKTCSNCGFTITSADYDRVLEKLKKTATGWMTTINGKELKVEGQITYYNRYKRQNVVKDLSVELDRLSEESVNNDISSWTKGRSGEALSLLKKRFSHRPVQEKFVCLNCGFETHADEQAALNIARSWLFLRSQEYKKYQTNKTTGNTDKRAFVETWQSFYRKKLKEVWKPAV

SEQ ID NO: 40860 - protein, 978 aa, synthetic construct
  REGION 1..978: note = engineered CasX variant
QEIKRINKIRRRLVKDSNTKKAGKTGPMKTLLVRVMTPDLRERLENLRKKPENIPQPISNTSRANLNKLLTDYTEMKKAILHVYWEEFQKDPVGLMSRVAQPASKKIDQNKLKPEMDEKGNLTTAGFACSQCGQPLFVYKLEQVSEKGKAYTNYFGRCNVAEHEKLILLDQLKPEKDSDEAVTYSLGKFGQRALDFYSIHVTKESTHPVKPLAQIAGNRYASSPVGKALSDACMGTIASFLSKYQDIIIEHQKVVKGNQKRLESLRELAGKENLEYPSVTLPPQPHTKEGVDAYNEVIARVRMWVNLNLWQKLKLSRDDAKPLLRLKGFPSFPLVERQANEVDWWDMVCNVKKLINEKKEDGKVFWQNLAGYKRQEALRPYLSSEEDRKKGKKFARYQLGDLLLHLEKKHGEDWGKVYGEAWERIDKKVEGLSKHIKLEEERRSEDAQSKAALTDWLRAKASFVIEGLKEADKDEFCRCELKLQKWYGDLRGKPFAIEAENSILDISGFSKQYNCAFIWQKDGVKKLNLYLIINYFKGGKLRFKKIKPEAFEANRFYTVINKKSGEIVPMEVNFNFDDPNLIILPLAFGKRQGREFIWNDLLSLETGSLKLANGRVIEKTLYNRRTRQDEPALFVALTFERREVLDSSNIKPMNLIGVDRGENIPAVIALTDPEGCPLSRFKDSLGNPTHILRIGESYKEKQRTIQAKKEVEQRRAGGYSRKYASKAKNLADDMVRNTARDLLYYAVTQDAMLIFENLSRGFGRQGKRTFMAERQYTRMEDWLTAKLAYEGLPSKTYLSKTLAQYTSKTCSNCGFTITSADYDRVLEKLKKTATGWMTTINGKELKVEGQITYYNRYKRQNVVKDLSVELDRLSEESVNNDISSWTKGRSGEALSLLKKRFSHRPVQEKFVCLNCGFETHADEQAALNIARSWLFLRSQEYKKYQTNKTTGNTDKRAFVETWQSFYRKKLKEVWKPAV

SEQ ID NO: 40861 - protein, 978 aa, synthetic construct
  REGION 1..978: note = engineered CasX variant
QEIKRINKIRRRLVKDSNTKKAGKTGPMKTLLVRVMTPDLRERLENLRKKPENIPQPISNTSRANLNKLLTDYTEMKKAILHVYWEEFQKDPVGLMSRVAQPASKKIDQNKLKPEMDEKGNLTTAGFACSQCGQPLFVYKLEQVSEKGKAYTNYFGRCNVAEHEKLILLDQLKPEKDSDEAVTYSLGKFGQRALDFYSIHVTKESTHPVKPLAQIAGNRYASTPVGKALSDACMGTIASFLSKYQDIIIEHQKVVKGNQKRLESLRELAGKENLEYPSVTLPPQPHTKEGVDAYNEVIARVRMWVNLNLWQKLKLSRDDAKPLLRLKGFPSFPLVERQANEVDWWDMVCNVKKLINEKKEDGKVFWQNLAGYKRQEALRPYLSSEEDRKKGKKFARYQLGDLLLHLEKKHGEDWGKVYGEAWERIDKKVEGLSKHIKLEEERRSEDAQSKAALTDWLRAKASFVIEGLKEADKDEFCRCELKLQKWYGDLRGKPFAIEAENSILDISGFSKQYNCAFIWQKDGVKKLNLYLIINYFKGGKLRFKKIKPEAFEANRFYTVINKKSGEIVPMEVNFNFDDPNLIILPLAFGKRQGREFIWNDLLSLETGSLKLANGRVIEKTLYNRRTRQDEPALFVALTFERREVLDSSNIKPMNLIGVDRGENIPAVIALTDPEGCPLSRFKDSLGNPTHILRIGESYKEKQRTIQAKKEVEQRRAGGYSRKYASKAKNLADDMVRNTARDLLYYAVTQDAMLIFENLSRGFGRQGKRTFMAERQYTRMEDWLTAKLAYEGLPSKTYLSKTLAQYTSKTCSNCGFTITSADYDRVLEKLKKTATGWMTTINGKELKVEGQITYYNRYKRQNVVKDLSVELDRLSEESVNNDISSWTKGRSGEALSLLKKRFSHRPVQEKFVCLNCGFETHADEQAALNIARSWLFLRSQEYKKYQTNKTTGNTDKRAFVETWQSFYRKKLKEVWKPAV

SEQ ID NO: 40862 - protein, 978 aa, synthetic construct
  REGION 1..978: note = engineered CasX variant
QEIKRINKIRRRLVKDSNTKKAGKTGPMKTLLVRVMTPDLRERLENLRKKPENIPQPISNTSRANLNKLLTDYTEMKKAILHVYWEEFQKDPVGLMSRVAQPASKKIDQNKLKPEMDEKGNLTTAGFACSQCGQPLFVYKLEQVSEKGKAYTNYFGRCNVAEHEKLILLDQLKPEKDSDEAVTYSLGKFGQRALDFYSIHVTKESTHPVKPLAQIAGNRYASAPVGKALSDACMGTIASFLSKYQDIIIEHQKVVKGNQKRLESLRELAGKENLEYPSVTLPPQPHTKEGVDAYNEVIARVRMWVNLNLWQKLKLSRDDAKPLLRLKGFPSFPLVERQANEVDWWDMVCNVKKLINEKKEDGKVFWQNLAGYKRQEALRPYLSSEEDRKKGKKFARYQLGDLLLHLEKKHGEDWGKVYGEAWERIDKKVEGLSKHIKLEEERRSEDAQSKAALTDWLRAKASFVIEGLKEADKDEFCRCELKLQKWYGDLRGKPFAIEAENSILDISGFSKQYNCAFIWQKDGVKKLNLYLIINYFKGGKLRFKKIKPEAFEANRFYTVINKKSGEIVPMEVNFNFDDPNLIILPLAFGKRQGREFIWNDLLSLETGSLKLANGRVIEKTLYNRRTRQDEPALFVALTFERREVLDSSNIKPMNLIGVDRGENIPAVIALTDPEGCPLSRFKDSLGNPTHILRIGESYKEKQRTIQAKKEVEQRRAGGYSRKYASKAKNLADDMVRNTARDLLYYAVTQDAMLIFENLSRGFGRQGKRTFMAERQYTRMEDWLTAKLAYEGLPSKTYLSKTLAQYTSKTCSNCGFTITSADYDRVLEKLKKTATGWMTTINGKELKVEGQITYYNRYKRQNVVKDLSVELDRLSEESVNNDISSWTKGRSGEALSLLKKRFSHRPVQEKFVCLNCGFETHADEQAALNIARSWLFLRSQEYKKYQTNKTTGNTDKRAFVETWQSFYRKKLKEVWKPAV

SEQ ID NO: 40863 - protein, 978 aa, synthetic construct
  REGION 1..978: note = engineered CasX variant
QEIKRINKIRRRLVKDSNTKKAGKTGPMKTLLVRVMTPDLRERLENLRKKPENIPQPISNTSRANLNKLLTDYTEMKKAILHVYWEEFQKDPVGLMSRVAQPASKKIDQNKLKPEMDEKGNLTTAGFACSQCGQPLFVYKLEQVSEKGKAYTNYFGRCNVAEHEKLILLDQLKPEKDSDEAVTYSLGKFGQRALDFYSIHVTKESTHPVKPLAQIAGNRYASVPVGKALSDACMGTIASFLSKYQDIIIEHQKVVKGNQKRLESLRELAGKENLEYPSVTLPPQPHTKEGVDAYNEVIARVRMWVNLNLWQKLKLSRDDAKPLLRLKGFPSFPLVERQANEVDWWDMVCNVKKLINEKKEDGKVFWQNLAGYKRQEALRPYLSSEEDRKKGKKFARYQLGDLLLHLEKKHGEDWGKVYGEAWERIDKKVEGLSKHIKLEEERRSEDAQSKAALTDWLRAKASFVIEGLKEADKDEFCRCELKLQKWYGDLRGKPFAIEAENSILDISGFSKQYNCAFIWQKDGVKKLNLYLIINYFKGGKLRFKKIKPEAFEANRFYTVINKKSGEIVPMEVNFNFDDPNLIILPLAFGKRQGREFIWNDLLSLETGSLKLANGRVIEKTLYNRRTRQDEPALFVALTFERREVLDSSNIKPMNLIGVDRGENIPAVIALTDPEGCPLSRFKDSLGNPTHILRIGESYKEKQRTIQAKKEVEQRRAGGYSRKYASKAKNLADDMVRNTARDLLYYAVTQDAMLIFENLSRGFGRQGKRTFMAERQYTRMEDWLTAKLAYEGLPSKTYLSKTLAQYTSKTCSNCGFTITSADYDRVLEKLKKTATGWMTTINGKELKVEGQITYYNRYKRQNVVKDLSVELDRLSEESVNNDISSWTKGRSGEALSLLKKRFSHRPVQEKFVCLNCGFETHADEQAALNIARSWLFLRSQEYKKYQTNKTTGNTDKRAFVETWQSFYRKKLKEVWKPAV

SEQ ID NO: 40864 - protein, 978 aa, synthetic construct
  REGION 1..978: note = engineered CasX variant
QEIKRINKIRRRLVKDSNTKKAGKTGPMKTLLVRVMTPDLRERLENLRKKPENIPQPISNTSRANLNKLLTDYTEMKKAILHVYWEEFQKDPVGLMSRVAQPASKKIDQNKLKPEMDEKGNLTTAGFACSQCGQPLFVYKLEQVSEKGKAYTNYFGRCNVAEHEKLIKLDQLKPEKDSDEAVTYSLGKFGQRALDFYSIHVTKESTHPVKPLAQIAGNRYASGPVGKALSDACMGTIASFLSKYQDIIIEHQKVVKGNQKRLESLRELAGKENLEYPSVTLPPQPHTKEGVDAYNEVIARVRMWVNLNLWQKLKLSRDDAKPLLRLKGFPSFPLVERQANEVDWWDMVCNVKKLINEKKEDGKVFWQNLAGYKRQEALRPYLSSEEDRKKGKKFARYQLGDLLLHLEKKHGEDWGKVYGEAWERIDKKVEGLSKHIKLEEERRSEDAQSKAALTDWLRAKASFVIEGLKEADKDEFCRCELKLQKWYGDLRGKPFAIEAENSILDISGFSKQYNCAFIWQKDGVKKLNLYLIINYFKGGKLRFKKIKPEAFEANRFYTVINKKSGEIVPMEVNFNFDDPNLIILPLAFGKRQGREFIWNDLLSLETGSLKLANGRVIEKTLYNRRTRQDEPALFVALTFERREVLDSSNIKPMNLIGVDRGENIPAVIALTDPEGCPLSRFKDSLGNPTHILRIGESYKEKQRTIQAKKEVEQRRAGGYSRKYASKAKNLADDMVRNTARDLLYYAVTQDAMLIFENLSRGFGRQGKRTFMAERQYTRMEDWLTAKLAYEGLPSKTYLSKTLAQYTSKTCSNCGFTITSADYDRVLEKLKKTATGWMTTINGKELKVEGQITYYNRYKRQNVVKDLSVELDRLSEESVNNDISSWTKGRSGEALSLLKKRFSHRPVQEKFVCLNCGFETHADEQAALNIARSWLFLRSQEYKKYQTNKTTGNTDKRAFVETWQSFYRKKLKEVWKPAV

SEQ ID NO: 40865 - protein, 977 aa, synthetic construct
  REGION 1..977: note = engineered CasX variant
QEIKRINKIRRRLVKDSNTKKAGKTGPMKTLLVRVMTPDLRERLENLRKKPENIPQPISNTSRANLNKLLTDYTEMKKAILHVYWEEFQKDPVGLMSRVAQPASKKIDQNKLKPEMDEKGNLTTAGFACSQCGQPLFVYKLEQVSEKGKAYTNYFGRCNVAEHEKLILLDQLKPEKDSDEAVTYSLGKFGQRALDFYSIHVTKESTHPVKPLAQIAGNRYASPVGKALSDACMGTIASFLSKYQDIIIEHQKVVKGNQKRLESLRELAGKENLEYPSVTLPPQPHTKEGVDAYNEVIARVRMWVNLNLWQKLKLSRDDAKPLLRLKGFPSFPLVERQANEVDWWDMVCNVKKLINEKKEDGKVFWQNLAGYKRQEALRPYLSSEEDRKKGKKFARYQLGDLLLHLEKKHGEDWGKVYGEAWERIDKKVEGLSKHIKLEEERRSEDAQSKAALTDWLRAKASFVIEGLKEADKDEFCRCELKLQKWYGDLRGKPFAIEAENSILDISGFSKQYNCAFIWQKDGVKKLNLYLIINYFKGGKLRFKKIKPEAFEANRFYTVINKKSGEIVPMEVNFNFDDPNLIILPLAFGKRQGREFIWNDLLSLETGSLKLANGRVIEKTLYNRRTRQDEPALFVALTFERREVLDSSNIKPMNLIGVDRGENIPAVIALTDPEGCPLSRFKDSLGNPTHILRIGESYKEKQRTIQAKKEVEQRRAGGYSRKYASKAKNLADDMVRNTARDLLYYAVTQDAMLIFENLSRGFGRQGKRTFMAERQYTRMEDWLTAKLAYEGLPSKTYLSKTLAQYTSKTCSNCGFTITSADYDRVLEKLKKTATGWMTTINGKELKVEGQITYYNRYKRQNVVKDLSVELDRLSEESVNNDISSWTKGRSGEALSLLKKRFSHRPVQEKFVCLNCGFETHADEQAALNIARSWLFLRSQEYKKYQTNKTTGNTDKRAFVETWQSFYRKKLKEVWKPAV

SEQ ID NO: 40866 - protein, 978 aa, synthetic construct
  REGION 1..978: note = engineered CasX variant
QEIKRINKIRRRLVKDSNTKKAGKTGPMKTLLVRVMTPDLRERLENLRKKPENIPQPISNTSRANLNKLLTDYTEMKKAILHVYWEEFQKDPVGLMSRVAQPASKKIDQNKLKPEMDEKGNLTTAGFACSQCGQPLFVYKLEQVSEKGKAYTNYFGRCNVAEHEKLILLDQLKPEKDSDEAVTYSLGKFGQRALDFYSIHVTKESTHPVKPLAQIAGNRYASYPVGKALSDACMGTIASFLSKYQDIIIEHQKVVKGNQKRLESLRELAGKENLEYPSVTLPPQPHTKEGVDAYNEVIARVRMWVNLNLWQKLKLSRDDAKPLLRLKGFPSFPLVERQANEVDWWDMVCNVKKLINEKKEDGKVFWQNLAGYKRQEALRPYLSSEEDRKKGKKFARYQLGDLLLHLEKKHGEDWGKVYDEAWERIDKKVEGLSKHIKLEEERRSEDAQSKAALTDWLRAKASFVIEGKKEADKDEFCRCELKLQKWYGDLRGKPFAIEAENSILDISGFSKQYNCAFIWQKDGVKKLNLYLIINYFKGGKLRFKKIKPEAFEANRFYTVINKKSGEIVPMEVNFNFDDPNLIILPLAFGKRQGREFIWNDLLSLETGSLKLANGRVIEKTLYNRRTRQDEPALFVALTFERREVLDSSNIKPMNLIGVDRGENIPAVIALTDPEGCPLSRFKDSLGNPTHILRIGESYKEKQRTIQAKKEVEQRRAGGYSRKYASKAKNLADDMVRNTARDLLYYAVTQDAMLIFENLSRGFGRQGKRTFMAERQYTRMEDWLTAKLAYEGLPSKTYLSKTLAQYTSKTCSNCGFTITSADYDRVLEKLKKTATGWMTTINGKELKVEGQITYYNRYKRQNVVKDLSVELDRLSEESVNNDISSWTKGRSGEALSLLKKRFSHRPVQEKFVCLNCGFETHADEQAALNIARSWLFLRSQEYKKYQTNKTTGNTDKRAFVETWQSFYRKKLKEVWKPAV

SEQ ID NO: 40867 - protein, 978 aa, synthetic construct
  REGION 1..978: note = engineered CasX variant
QEIKRINKIRRRLVKDSNTKKAGKTGPMKTLLVRVMTPDLRERLENLRKKPENIPQPISNTSRANLNKLLTDYTEMKKAILHVYWEEFQKDPVGLMSRVAQPASKKIDQNKLKPEMDEKGNLTTAGFACSQCGQPLFVYKLEQVSEKGKAYTNYFGRCNVAEHEKLILLDQLKPEKDSDEAVTYSLGKFGQRALDFYSIHVTKESTHPVKPLAQIAGNRYASHPVGKALSDACMGTIASFLSKYQDIIIEHQKVVKGNQKRLESLRELAGKENLEYPSVTLPPQPHTKEGVDAYNEVIARVRMWVNLNLWQKLKLSRDDAKPLLRLKGFPSFPLVERQANEVDWWDMVCNVKKLINEKKEDGKVFWQNLAGYKRQEALRPYLSSEEDRKKGKKFARYQLGDLLLHLEKKHGEDWGKVYDEAWERIDKKVEGLSKHIKLEEERRSEDAQSKAALTDWLRAKASFVIEGKKEADKDEFCRCELKLQKWYGDLRGKPFAIEAENSILDISGFSKQYNCAFIWQKDGVKKLNLYLIINYFKGGKLRFKKIKPEAFEANRFYTVINKKSGEIVPMEVNFNFDDPNLIILPLAFGKRQGREFIWNDLLSLETGSLKLANGRVIEKTLYNRRTRQDEPALFVALTFERREVLDSSNIKPMNLIGVDRGENIPAVIALTDPEGCPLSRFKDSLGNPTHILRIGESYKEKQRTIQAKKEVEQRRAGGYSRKYASKAKNLADDMVRNTARDLLYYAVTQDAMLIFENLSRGFGRQGKRTFMAERQYTRMEDWLTAKLAYEGLPSKTYLSKTLAQYTSKTCSNCGFTITSADYDRVLEKLKKTATGWMTTINGKELKVEGQITYYNRYKRQNVVKDLSVELDRLSEESVNNDISSWTKGRSGEALSLLKKRFSHRPVQEKFVCLNCGFETHADEQAALNIARSWLFLRSQEYKKYQTNKTTGNTDKRAFVETWQSFYRKKLKEVWKPAV

SEQ ID NO: 40868 - protein, 978 aa, synthetic construct
  REGION 1..978: note = engineered CasX variant
QEIKRINKIRRRLVKDSNTKKAGKTGPMKTLLVRVMTPDLRERLENLRKKPENIPQPISNTSRANLNKLLTDYTEMKKAILHVYWEEFQKDPVGLMSRVAQPASKKIDQNKLKPEMDEKGNLTTAGFACSQCGQPLFVYKLEQVSEKGKAYTNYFGRCNVAEHEKLILLDQLKPEKDSDEAVTYSLGKFGQRALDFYSIHVTKESTHPVKPLAQIAGNRYASSPVGKALSDACMGTIASFLSKYQDIIIEHQKVVKGNQKRLESLRELAGKENLEYPSVTLPPQPHTKEGVDAYNEVIARVRMWVNLNLWQKLKLSRDDAKPLLRLKGFPSFPLVERQANEVDWWDMVCNVKKLINEKKEDGKVFWQNLAGYKRQEALRPYLSSEEDRKKGKKFARYQLGDLLLHLEKKHGEDWGKVYDEAWERIDKKVEGLSKHIKLEEERRSEDAQSKAALTDWLRAKASFVIEGKKEADKDEFCRCELKLQKWYGDLRGKPFAIEAENSILDISGFSKQYNCAFIWQKDGVKKLNLYLIINYFKGGKLRFKKIKPEAFEANRFYTVINKKSGEIVPMEVNFNFDDPNLIILPLAFGKRQGREFIWNDLLSLETGSLKLANGRVIEKTLYNRRTRQDEPALFVALTFERREVLDSSNIKPMNLIGVDRGENIPAVIALTDPEGCPLSRFKDSLGNPTHILRIGESYKEKQRTIQAKKEVEQRRAGGYSRKYASKAKNLADDMVRNTARDLLYYAVTQDAMLIFENLSRGFGRQGKRTFMAERQYTRMEDWLTAKLAYEGLPSKTYLSKTLAQYTSKTCSNCGFTITSADYDRVLEKLKKTATGWMTTINGKELKVEGQITYYNRYKRQNVVKDLSVELDRLSEESVNNDISSWTKGRSGEALSLLKKRFSHRPVQEKFVCLNCGFETHADEQAALNIARSWLFLRSQEYKKYQTNKTTGNTDKRAFVETWQSFYRKKLKEVWKPAV

SEQ ID NO: 40869 - protein, 978 aa, synthetic construct
  REGION 1..978: note = engineered CasX variant
QEIKRINKIRRRLVKDSNTKKAGKTGPMKTLLVRVMTPDLRERLENLRKKPENIPQPISNTSRANLNKLLTDYTEMKKAILHVYWEEFQKDPVGLMSRVAQPASKKIDQNKLKPEMDEKGNLTTAGFACSQCGQPLFVYKLEQVSEKGKAYTNYFGRCNVAEHEKLILLDQLKPEKDSDEAVTYSLGKFGQRALDFYSIHVTKESTHPVKPLAQIAGNRYASTPVGKALSDACMGTIASFLSKYQDIIIEHQKVVKGNQKRLESLRELAGKENLEYPSVTLPPQPHTKEGVDAYNEVIARVRMWVNLNLWQKLKLSRDDAKPLLRLKGFPSFPLVERQANEVDWWDMVCNVKKLINEKKEDGKVFWQNLAGYKRQEALRPYLSSEEDRKKGKKFARYQLGDLLLHLEKKHGEDWGKVYDEAWERIDKKVEGLSKHIKLEEERRSEDAQSKAALTDWLRAKASFVIEGKKEADKDEFCRCELKLQKWYGDLRGKPFAIEAENSILDISGFSKQYNCAFIWQKDGVKKLNLYLIINYFKGGKLRFKKIKPEAFEANRFYTVINKKSGEIVPMEVNFNFDDPNLIILPLAFGKRQGREFIWNDLLSLETGSLKLANGRVIEKTLYNRRTRQDEPALFVALTFERREVLDSSNIKPMNLIGVDRGENIPAVIALTDPEGCPLSRFKDSLGNPTHILRIGESYKEKQRTIQAKKEVEQRRAGGYSRKYASKAKNLADDMVRNTARDLLYYAVTQDAMLIFENLSRGFGRQGKRTFMAERQYTRMEDWLTAKLAYEGLPSKTYLSKTLAQYTSKTCSNCGFTITSADYDRVLEKLKKTATGWMTTINGKELKVEGQITYYNRYKRQNVVKDLSVELDRLSEESVNNDISSWTKGRSGEALSLLKKRFSHRPVQEKFVCLNCGFETHADEQAALNIARSWLFLRSQEYKKYQTNKTTGNTDKRAFVETWQSFYRKKLKEVWKPAV

SEQ ID NO: 40870 - protein, 978 aa, synthetic construct
  REGION 1..978: note = engineered CasX variant
QEIKRINKIRRRLVKDSNTKKAGKTGPMKTLLVRVMTPDLRERLENLRKKPENIPQPISNTSRANLNKLLTDYTEMKKAILHVYWEEFQKDPVGLMSRVAQPASKKIDQNKLKPEMDEKGNLTTAGFACSQCGQPLFVYKLEQVSEKGKAYTNYFGRCNVAEHEKLILLDQLKPEKDSDEAVTYSLGKFGQRALDFYSIHVTKESTHPVKPLAQIAGNRYASAPVGKALSDACMGTIASFLSKYQDIIIEHQKVVKGNQKRLESLRELAGKENLEYPSVTLPPQPHTKEGVDAYNEVIARVRMWVNLNLWQKLKLSRDDAKPLLRLKGFPSFPLVERQANEVDWWDMVCNVKKLINEKKEDGKVFWQNLAGYKRQEALRPYLSSEEDRKKGKKFARYQLGDLLLHLEKKHGEDWGKVYDEAWERIDKKVEGLSKHIKLEEERRSEDAQSKAALTDWLRAKASFVIEGKKEADKDEFCRCELKLQKWYGDLRGKPFAIEAENSILDISGFSKQYNCAFIWQKDGVKKLNLYLIINYFKGGKLRFKKIKPEAFEANRFYTVINKKSGEIVPMEVNFNFDDPNLIILPLAFGKRQGREFIWNDLLSLETGSLKLANGRVIEKTLYNRRTRQDEPALFVALTFERREVLDSSNIKPMNLIGVDRGENIPAVIALTDPEGCPLSRFKDSLGNPTHILRIGESYKEKQRTIQAKKEVEQRRAGGYSRKYASKAKNLADDMVRNTARDLLYYAVTQDAMLIFENLSRGFGRQGKRTFMAERQYTRMEDWLTAKLAYEGLPSKTYLSKTLAQYTSKTCSNCGFTITSADYDRVLEKLKKTATGWMTTINGKELKVEGQITYYNRYKRQNVVKDLSVELDRLSEESVNNDISSWTKGRSGEALSLLKKRFSHRPVQEKFVCLNCGFETHADEQAALNIARSWLFLRSQEYKKYQTNKTTGNTDKRAFVETWQSFYRKKLKEVWKPAV

SEQ ID NO: 40871 - protein, 978 aa, synthetic construct
  REGION 1..978: note = engineered CasX variant
QEIKRINKIRRRLVKDSNTKKAGKTGPMKTLLVRVMTPDLRERLENLRKKPENIPQPISNTSRANLNKLLTDYTEMKKAILHVYWEEFQKDPVGLMSRVAQPASKKIDQNKLKPEMDEKGNLTTAGFACSQCGQPLFVYKLEQVSEKGKAYTNYFGRCNVAEHEKLILLDQLKPEKDSDEAVTYSLGKFGQRALDFYSIHVTKESTHPVKPLAQIAGNRYASVPVGKALSDACMGTIASFLSKYQDIIIEHQKVVKGNQKRLESLRELAGKENLEYPSVTLPPQPHTKEGVDAYNEVIARVRMWVNLNLWQKLKLSRDDAKPLLRLKGFPSFPLVERQANEVDWWDMVCNVKKLINEKKEDGKVFWQNLAGYKRQEALRPYLSSEEDRKKGKKFARYQLGDLLLHLEKKHGEDWGKVYDEAWERIDKKVEGLSKHIKLEEERRSEDAQSKAALTDWLRAKASFVIEGKKEADKDEFCRCELKLQKWYGDLRGKPFAIEAENSILDISGFSKQYNCAFIWQKDGVKKLNLYLIINYFKGGKLRFKKIKPEAFEANRFYTVINKKSGEIVPMEVNFNFDDPNLIILPLAFGKRQGREFIWNDLLSLETGSLKLANGRVIEKTLYNRRTRQDEPALFVALTFERREVLDSSNIKPMNLIGVDRGENIPAVIALTDPEGCPLSRFKDSLGNPTHILRIGESYKEKQRTIQAKKEVEQRRAGGYSRKYASKAKNLADDMVRNTARDLLYYAVTQDAMLIFENLSRGFGRQGKRTFMAERQYTRMEDWLTAKLAYEGLPSKTYLSKTLAQYTSKTCSNCGFTITSADYDRVLEKLKKTATGWMTTINGKELKVEGQITYYNRYKRQNVVKDLSVELDRLSEESVNNDISSWTKGRSGEALSLLKKRFSHRPVQEKFVCLNCGFETHADEQAALNIARSWLFLRSQEYKKYQTNKTTGNTDKRAFVETWQSFYRKKLKEVWKPAV

SEQ ID NO: 40872 - protein, 978 aa, synthetic construct
  REGION 1..978: note = engineered CasX variant
QEIKRINKIRRRLVKDSNTKKAGKTGPMKTLLVRVMTPDLRERLENLRKKPENIPQPISNTSRANLNKLLTDYTEMKKAILHVYWEEFQKDPVGLMSRVAQPASKKIDQNKLKPEMDEKGNLTTAGFACSQCGQPLFVYKLEQVSEKGKAYTNYFGRCNVAEHEKLIKLDQLKPEKDSDEAVTYSLGKFGQRALDFYSIHVTKESTHPVKPLAQIAGNRYASGPVGKALSDACMGTIASFLSKYQDIIIEHQKVVKGNQKRLESLRELAGKENLEYPSVTLPPQPHTKEGVDAYNEVIARVRMWVNLNLWQKLKLSRDDAKPLLRLKGFPSFPLVERQANEVDWWDMVCNVKKLINEKKEDGKVFWQNLAGYKRQEALRPYLSSEEDRKKGKKFARYQLGDLLLHLEKKHGEDWGKVYDEAWERIDKKVEGLSKHIKLEEERRSEDAQSKAALTDWLRAKASFVIEGKKEADKDEFCRCELKLQKWYGDLRGKPFAIEAENSILDISGFSKQYNCAFIWQKDGVKKLNLYLIINYFKGGKLRFKKIKPEAFEANRFYTVINKKSGEIVPMEVNFNFDDPNLIILPLAFGKRQGREFIWNDLLSLETGSLKLANGRVIEKTLYNRRTRQDEPALFVALTFERREVLDSSNIKPMNLIGVDRGENIPAVIALTDPEGCPLSRFKDSLGNPTHILRIGESYKEKQRTIQAKKEVEQRRAGGYSRKYASKAKNLADDMVRNTARDLLYYAVTQDAMLIFENLSRGFGRQGKRTFMAERQYTRMEDWLTAKLAYEGLPSKTYLSKTLAQYTSKTCSNCGFTITSADYDRVLEKLKKTATGWMTTINGKELKVEGQITYYNRYKRQNVVKDLSVELDRLSEESVNNDISSWTKGRSGEALSLLKKRFSHRPVQEKFVCLNCGFETHADEQAALNIARSWLFLRSQEYKKYQTNKTTGNTDKRAFVETWQSFYRKKLKEVWKPAV

SEQ ID NO: 40873 - protein, 977 aa, synthetic construct
  REGION 1..977: note = engineered CasX variant
QEIKRINKIRRRLVKDSNTKKAGKTGPMKTLLVRVMTPDLRERLENLRKKPENIPQPISNTSRANLNKLLTDYTEMKKAILHVYWEEFQKDPVGLMSRVAQPASKKIDQNKLKPEMDEKGNLTTAGFACSQCGQPLFVYKLEQVSEKGKAYTNYFGRCNVAEHEKLILLDQLKPEKDSDEAVTYSLGKFGQRALDFYSIHVTKESTHPVKPLAQIAGNRYASPVGKALSDACMGTIASFLSKYQDIIIEHQKVVKGNQKRLESLRELAGKENLEYPSVTLPPQPHTKEGVDAYNEVIARVRMWVNLNLWQKLKLSRDDAKPLLRLKGFPSFPLVERQANEVDWWDMVCNVKKLINEKKEDGKVFWQNLAGYKRQEALRPYLSSEEDRKKGKKFARYQLGDLLLHLEKKHGEDWGKVYDEAWERIDKKVEGLSKHIKLEEERRSEDAQSKAALTDWLRAKASFVIEGKKEADKDEFCRCELKLQKWYGDLRGKPFAIEAENSILDISGFSKQYNCAFIWQKDGVKKLNLYLIINYFKGGKLRFKKIKPEAFEANRFYTVINKKSGEIVPMEVNFNFDDPNLIILPLAFGKRQGREFIWNDLLSLETGSLKLANGRVIEKTLYNRRTRQDEPALFVALTFERREVLDSSNIKPMNLIGVDRGENIPAVIALTDPEGCPLSRFKDSLGNPTHILRIGESYKEKQRTIQAKKEVEQRRAGGYSRKYASKAKNLADDMVRNTARDLLYYAVTQDAMLIFENLSRGFGRQGKRTFMAERQYTRMEDWLTAKLAYEGLPSKTYLSKTLAQYTSKTCSNCGFTITSADYDRVLEKLKKTATGWMTTINGKELKVEGQITYYNRYKRQNVVKDLSVELDRLSEESVNNDISSWTKGRSGEALSLLKKRFSHRPVQEKFVCLNCGFETHADEQAALNIARSWLFLRSQEYKKYQTNKTTGNTDKRAFVETWQSFYRKKLKEVWKPAV

SEQ ID NO: 40874 - protein, 978 aa, synthetic construct
  REGION 1..978: note = engineered CasX variant
QEIKRINKIRRRLVKDSNTKKAGKTGPMKTLLVRVMTPDLRERLENLRKKPENIPQPISNTSRANLNKLLTDYTEMKKAILHVYWEEFQKDPVGLMSRVAQPASKKIDQNKLKPEMDEKGNLTTAGFACSQCGQPLFVYKLEQVSEKGKAYTNYFGRCNVAEHEKLILLDQLKPEKDSDEAVTYSLGKFGQRALDFYSIHVTKESTHPVKPLAQIAGNRYASYPVGKALSDACMGTIASFLSKYQDIIIEHQKVVKGNQKRLESLRELAGKENLEYPSVTLPPQPHTKEGVDAYNEVIARVRMWVNLNLWQKLKLSRDDAKPLLRLKGFPSFPLVERQANEVDWWDMVCNVKKLINEKKEDGKVFWQNLAGYKRQEALRPYLSSEEDRKKGKKFARYQLGDLLLHLEKKHGEDWGKVYDEAWERIDKKVEGLSKHIKLEEERRSEDAQSKAALTDWLRAKASFVIEGSKEADKDEFCRCELKLQKWYGDLRGKPFAIEAENSILDISGFSKQYNCAFIWQKDGVKKLNLYLIINYFKGGKLRFKKIKPEAFEANRFYTVINKKSGEIVPMEVNFNFDDPNLIILPLAFGKRQGREFIWNDLLSLETGSLKLANGRVIEKTLYNRRTRQDEPALFVALTFERREVLDSSNIKPMNLIGVDRGENIPAVIALTDPEGCPLSRFKDSLGNPTHILRIGESYKEKQRTIQAKKEVEQRRAGGYSRKYASKAKNLADDMVRNTARDLLYYAVTQDAMLIFENLSRGFGRQGKRTFMAERQYTRMEDWLTAKLAYEGLPSKTYLSKTLAQYTSKTCSNCGFTITSADYDRVLEKLKKTATGWMTTINGKELKVEGQITYYNRYKRQNVVKDLSVELDRLSEESVNNDISSWTKGRSGEALSLLKKRFSHRPVQEKFVCLNCGFETHADEQAALNIARSWLFLRSQEYKKYQTNKTTGNTDKRAFVETWQSFYRKKLKEVWKPAV

SEQ ID NO: 40875 - protein, 978 aa, synthetic construct
  REGION 1..978: note = engineered CasX variant
QEIKRINKIRRRLVKDSNTKKAGKTGPMKTLLVRVMTPDLRERLENLRKKPENIPQPISNTSRANLNKLLTDYTEMKKAILHVYWEEFQKDPVGLMSRVAQPASKKIDQNKLKPEMDEKGNLTTAGFACSQCGQPLFVYKLEQVSEKGKAYTNYFGRCNVAEHEKLILLDQLKPEKDSDEAVTYSLGKFGQRALDFYSIHVTKESTHPVKPLAQIAGNRYASHPVGKALSDACMGTIASFLSKYQDIIIEHQKVVKGNQKRLESLRELAGKENLEYPSVTLPPQPHTKEGVDAYNEVIARVRMWVNLNLWQKLKLSRDDAKPLLRLKGFPSFPLVERQANEVDWWDMVCNVKKLINEKKEDGKVFWQNLAGYKRQEALRPYLSSEEDRKKGKKFARYQLGDLLLHLEKKHGEDWGKVYDEAWERIDKKVEGLSKHIKLEEERRSEDAQSKAALTDWLRAKASFVIEGSKEADKDEFCRCELKLQKWYGDLRGKPFAIEAENSILDISGFSKQYNCAFIWQKDGVKKLNLYLIINYFKGGKLRFKKIKPEAFEANRFYTVINKKSGEIVPMEVNFNFDDPNLIILPLAFGKRQGREFIWNDLLSLETGSLKLANGRVIEKTLYNRRTRQDEPALFVALTFERREVLDSSNIKPMNLIGVDRGENIPAVIALTDPEGCPLSRFKDSLGNPTHILRIGESYKEKQRTIQAKKEVEQRRAGGYSRKYASKAKNLADDMVRNTARDLLYYAVTQDAMLIFENLSRGFGRQGKRTFMAERQYTRMEDWLTAKLAYEGLPSKTYLSKTLAQYTSKTCSNCGFTITSADYDRVLEKLKKTATGWMTTINGKELKVEGQITYYNRYKRQNVVKDLSVELDRLSEESVNNDISSWTKGRSGEALSLLKKRFSHRPVQEKFVCLNCGFETHADEQAALNIARSWLFLRSQEYKKYQTNKTTGNTDKRAFVETWQSFYRKKLKEVWKPAV

SEQ ID NO: 40876 - protein, 978 aa, synthetic construct
  REGION 1..978: note = engineered CasX variant
QEIKRINKIRRRLVKDSNTKKAGKTGPMKTLLVRVMTPDLRERLENLRKKPENIPQPISNTSRANLNKLLTDYTEMKKAILHVYWEEFQKDPVGLMSRVAQPASKKIDQNKLKPEMDEKGNLTTAGFACSQCGQPLFVYKLEQVSEKGKAYTNYFGRCNVAEHEKLILLDQLKPEKDSDEAVTYSLGKFGQRALDFYSIHVTKESTHPVKPLAQIAGNRYASSPVGKALSDACMGTIASFLSKYQDIIIEHQKVVKGNQKRLESLRELAGKENLEYPSVTLPPQPHTKEGVDAYNEVIARVRMWVNLNLWQKLKLSRDDAKPLLRLKGFPSFPLVERQANEVDWWDMVCNVKKLINEKKEDGKVFWQNLAGYKRQEALRPYLSSEEDRKKGKKFARYQLGDLLLHLEKKHGEDWGKVYDEAWERIDKKVEGLSKHIKLEEERRSEDAQSKAALTDWLRAKASFVIEGSKEADKDEFCRCELKLQKWYGDLRGKPFAIEAENSILDISGFSKQYNCAFIWQKDGVKKLNLYLIINYFKGGKLRFKKIKPEAFEANRFYTVINKKSGEIVPMEVNFNFDDPNLIILPLAFGKRQGREFIWNDLLSLETGSLKLANGRVIEKTLYNRRTRQDEPALFVALTFERREVLDSSNIKPMNLIGVDRGENIPAVIALTDPEGCPLSRFKDSLGNPTHILRIGESYKEKQRTIQAKKEVEQRRAGGYSRKYASKAKNLADDMVRNTARDLLYYAVTQDAMLIFENLSRGFGRQGKRTFMAERQYTRMEDWLTAKLAYEGLPSKTYLSKTLAQYTSKTCSNCGFTITSADYDRVLEKLKKTATGWMTTINGKELKVEGQITYYNRYKRQNVVKDLSVELDRLSEESVNNDISSWTKGRSGEALSLLKKRFSHRPVQEKFVCLNCGFETHADEQAALNIARSWLFLRSQEYKKYQTNKTTGNTDKRAFVETWQSFYRKKLKEVWKPAV

SEQ ID NO: 40877 - protein, 978 aa, synthetic construct
  REGION 1..978: note = engineered CasX variant
QEIKRINKIRRRLVKDSNTKKAGKTGPMKTLLVRVMTPDLRERLENLRKKPENIPQPISNTSRANLNKLLTDYTEMKKAILHVYWEEFQKDPVGLMSRVAQPASKKIDQNKLKPEMDEKGNLTTAGFACSQCGQPLFVYKLEQVSEKGKAYTNYFGRCNVAEHEKLILLDQLKPEKDSDEAVTYSLGKFGQRALDFYSIHVTKESTHPVKPLAQIAGNRYASTPVGKALSDACMGTIASFLSKYQDIIIEHQKVVKGNQKRLESLRELAGKENLEYPSVTLPPQPHTKEGVDAYNEVIARVRMWVNLNLWQKLKLSRDDAKPLLRLKGFPSFPLVERQANEVDWWDMVCNVKKLINEKKEDGKVFWQNLAGYKRQEALRPYLSSEEDRKKGKKFARYQLGDLLLHLEKKHGEDWGKVYDEAWERIDKKVEGLSKHIKLEEERRSEDAQSKAALTDWLRAKASFVIEGSKEADKDEFCRCELKLQKWYGDLRGKPFAIEAENSILDISGFSKQYNCAFIWQKDGVKKLNLYLIINYFKGGKLRFKKIKPEAFEANRFYTVINKKSGEIVPMEVNFNFDDPNLIILPLAFGKRQGREFIWNDLLSLETGSLKLANGRVIEKTLYNRRTRQDEPALFVALTFERREVLDSSNIKPMNLIGVDRGENIPAVIALTDPEGCPLSRFKDSLGNPTHILRIGESYKEKQRTIQAKKEVEQRRAGGYSRKYASKAKNLADDMVRNTARDLLYYAVTQDAMLIFENLSRGFGRQGKRTFMAERQYTRMEDWLTAKLAYEGLPSKTYLSKTLAQYTSKTCSNCGFTITSADYDRVLEKLKKTATGWMTTINGKELKVEGQITYYNRYKRQNVVKDLSVELDRLSEESVNNDISSWTKGRSGEALSLLKKRFSHRPVQEKFVCLNCGFETHADEQAALNIARSWLFLRSQEYKKYQTNKTTGNTDKRAFVETWQSFYRKKLKEVWKPAV

SEQ ID NO: 40878 - protein, 978 aa, synthetic construct
  REGION 1..978: note = engineered CasX variant
QEIKRINKIRRRLVKDSNTKKAGKTGPMKTLLVRVMTPDLRERLENLRKKPENIPQPISNTSRANLNKLLTDYTEMKKAILHVYWEEFQKDPVGLMSRVAQPASKKIDQNKLKPEMDEKGNLTTAGFACSQCGQPLFVYKLEQVSEKGKAYTNYFGRCNVAEHEKLILLDQLKPEKDSDEAVTYSLGKFGQRALDFYSIHVTKESTHPVKPLAQIAGNRYASAPVGKALSDACMGTIASFLSKYQDIIIEHQKVVKGNQKRLESLRELAGKENLEYPSVTLPPQPHTKEGVDAYNEVIARVRMWVNLNLWQKLKLSRDDAKPLLRLKGFPSFPLVERQANEVDWWDMVCNVKKLINEKKEDGKVFWQNLAGYKRQEALRPYLSSEEDRKKGKKFARYQLGDLLLHLEKKHGEDWGKVYDEAWERIDKKVEGLSKHIKLEEERRSEDAQSKAALTDWLRAKASFVIEGSKEADKDEFCRCELKLQKWYGDLRGKPFAIEAENSILDISGFSKQYNCAFIWQKDGVKKLNLYLIINYFKGGKLRFKKIKPEAFEANRFYTVINKKSGEIVPMEVNFNFDDPNLIILPLAFGKRQGREFIWNDLLSLETGSLKLANGRVIEKTLYNRRTRQDEPALFVALTFERREVLDSSNIKPMNLIGVDRGENIPAVIALTDPEGCPLSRFKDSLGNPTHILRIGESYKEKQRTIQAKKEVEQRRAGGYSRKYASKAKNLADDMVRNTARDLLYYAVTQDAMLIFENLSRGFGRQGKRTFMAERQYTRMEDWLTAKLAYEGLPSKTYLSKTLAQYTSKTCSNCGFTITSADYDRVLEKLKKTATGWMTTINGKELKVEGQITYYNRYKRQNVVKDLSVELDRLSEESVNNDISSWTKGRSGEALSLLKKRFSHRPVQEKFVCLNCGFETHADEQAALNIARSWLFLRSQEYKKYQTNKTTGNTDKRAFVETWQSFYRKKLKEVWKPAV

SEQ ID NO: 40879 - protein, 978 aa, synthetic construct
  REGION 1..978: note = engineered CasX variant
QEIKRINKIRRRLVKDSNTKKAGKTGPMKTLLVRVMTPDLRERLENLRKKPENIPQPISNTSRANLNKLLTDYTEMKKAILHVYWEEFQKDPVGLMSRVAQPASKKIDQNKLKPEMDEKGNLTTAGFACSQCGQPLFVYKLEQVSEKGKAYTNYFGRCNVAEHEKLILLDQLKPEKDSDEAVTYSLGKFGQRALDFYSIHVTKESTHPVKPLAQIAGNRYASVPVGKALSDACMGTIASFLSKYQDIIIEHQKVVKGNQKRLESLRELAGKENLEYPSVTLPPQPHTKEGVDAYNEVIARVRMWVNLNLWQKLKLSRDDAKPLLRLKGFPSFPLVERQANEVDWWDMVCNVKKLINEKKEDGKVFWQNLAGYKRQEALRPYLSSEEDRKKGKKFARYQLGDLLLHLEKKHGEDWGKVYDEAWERIDKKVEGLSKHIKLEEERRSEDAQSKAALTDWLRAKASFVIEGSKEADKDEFCRCELKLQKWYGDLRGKPFAIEAENSILDISGFSKQYNCAFIWQKDGVKKLNLYLIINYFKGGKLRFKKIKPEAFEANRFYTVINKKSGEIVPMEVNFNFDDPNLIILPLAFGKRQGREFIWNDLLSLETGSLKLANGRVIEKTLYNRRTRQDEPALFVALTFERREVLDSSNIKPMNLIGVDRGENIPAVIALTDPEGCPLSRFKDSLGNPTHILRIGESYKEKQRTIQAKKEVEQRRAGGYSRKYASKAKNLADDMVRNTARDLLYYAVTQDAMLIFENLSRGFGRQGKRTFMAERQYTRMEDWLTAKLAYEGLPSKTYLSKTLAQYTSKTCSNCGFTITSADYDRVLEKLKKTATGWMTTINGKELKVEGQITYYNRYKRQNVVKDLSVELDRLSEESVNNDISSWTKGRSGEALSLLKKRFSHRPVQEKFVCLNCGFETHADEQAALNIARSWLFLRSQEYKKYQTNKTTGNTDKRAFVETWQSFYRKKLKEVWKPAV

SEQ ID NO: 40880 - protein, 978 aa, synthetic construct
  REGION 1..978: note = engineered CasX variant
QEIKRINKIRRRLVKDSNTKKAGKTGPMKTLLVRVMTPDLRERLENLRKKPENIPQPISNTSRANLNKLLTDYTEMKKAILHVYWEEFQKDPVGLMSRVAQPASKKIDQNKLKPEMDEKGNLTTAGFACSQCGQPLFVYKLEQVSEKGKAYTNYFGRCNVAEHEKLIKLDQLKPEKDSDEAVTYSLGKFGQRALDFYSIHVTKESTHPVKPLAQIAGNRYASGPVGKALSDACMGTIASFLSKYQDIIIEHQKVVKGNQKRLESLRELAGKENLEYPSVTLPPQPHTKEGVDAYNEVIARVRMWVNLNLWQKLKLSRDDAKPLLRLKGFPSFPLVERQANEVDWWDMVCNVKKLINEKKEDGKVFWQNLAGYKRQEALRPYLSSEEDRKKGKKFARYQLGDLLLHLEKKHGEDWGKVYDEAWERIDKKVEGLSKHIKLEEERRSEDAQSKAALTDWLRAKASFVIEGSKEADKDEFCRCELKLQKWYGDLRGKPFAIEAENSILDISGFSKQYNCAFIWQKDGVKKLNLYLIINYFKGGKLRFKKIKPEAFEANRFYTVINKKSGEIVPMEVNFNFDDPNLIILPLAFGKRQGREFIWNDLLSLETGSLKLANGRVIEKTLYNRRTRQDEPALFVALTFERREVLDSSNIKPMNLIGVDRGENIPAVIALTDPEGCPLSRFKDSLGNPTHILRIGESYKEKQRTIQAKKEVEQRRAGGYSRKYASKAKNLADDMVRNTARDLLYYAVTQDAMLIFENLSRGFGRQGKRTFMAERQYTRMEDWLTAKLAYEGLPSKTYLSKTLAQYTSKTCSNCGFTITSADYDRVLEKLKKTATGWMTTINGKELKVEGQITYYNRYKRQNVVKDLSVELDRLSEESVNNDISSWTKGRSGEALSLLKKRFSHRPVQEKFVCLNCGFETHADEQAALNIARSWLFLRSQEYKKYQTNKTTGNTDKRAFVETWQSFYRKKLKEVWKPAV

SEQ ID NO: 40881 - protein, 977 aa, synthetic construct
  REGION 1..977: note = engineered CasX variant
QEIKRINKIRRRLVKDSNTKKAGKTGPMKTLLVRVMTPDLRERLENLRKKPENIPQPISNTSRANLNKLLTDYTEMKKAILHVYWEEFQKDPVGLMSRVAQPASKKIDQNKLKPEMDEKGNLTTAGFACSQCGQPLFVYKLEQVSEKGKAYTNYFGRCNVAEHEKLILLDQLKPEKDSDEAVTYSLGKFGQRALDFYSIHVTKESTHPVKPLAQIAGNRYASPVGKALSDACMGTIASFLSKYQDIIIEHQKVVKGNQKRLESLRELAGKENLEYPSVTLPPQPHTKEGVDAYNEVIARVRMWVNLNLWQKLKLSRDDAKPLLRLKGFPSFPLVERQANEVDWWDMVCNVKKLINEKKEDGKVFWQNLAGYKRQEALRPYLSSEEDRKKGKKFARYQLGDLLLHLEKKHGEDWGKVYDEAWERIDKKVEGLSKHIKLEEERRSEDAQSKAALTDWLRAKASFVIEGSKEADKDEFCRCELKLQKWYGDLRGKPFAIEAENSILDISGFSKQYNCAFIWQKDGVKKLNLYLIINYFKGGKLRFKKIKPEAFEANRFYTVINKKSGEIVPMEVNFNFDDPNLIILPLAFGKRQGREFIWNDLLSLETGSLKLANGRVIEKTLYNRRTRQDEPALFVALTFERREVLDSSNIKPMNLIGVDRGENIPAVIALTDPEGCPLSRFKDSLGNPTHILRIGESYKEKQRTIQAKKEVEQRRAGGYSRKYASKAKNLADDMVRNTARDLLYYAVTQDAMLIFENLSRGFGRQGKRTFMAERQYTRMEDWLTAKLAYEGLPSKTYLSKTLAQYTSKTCSNCGFTITSADYDRVLEKLKKTATGWMTTINGKELKVEGQITYYNRYKRQNVVKDLSVELDRLSEESVNNDISSWTKGRSGEALSLLKKRFSHRPVQEKFVCLNCGFETHADEQAALNIARSWLFLRSQEYKKYQTNKTTGNTDKRAFVETWQSFYRKKLKEVWKPAV

SEQ ID NO: 40882 - protein, 979 aa, synthetic construct
  REGION 1..979: note = engineered CasX variant
QEIKRINKIRRRLVKDSNTKKAGKTGPMKTLLVRVMTPDLRERLENLRKKPENIPQPISNTSRANLNKLLTDYTEMKKAILHVYWEEFQKDPVGLMSRVAQPASKKIDQNKLKPEMDEKGNLTTAGFACSQCGQPLFVYKLEQVSEKGKAYTNYFGRCNVAEHEKLILLDQLKPEKDSDEAVTYSLGKFGQRALDFYSIHVTKESTHPVKPLAQIAGNRYASYPVGKALSDACMGTIASFLSKYQDIIIEHQKVVKGNQKRLESLRELAGKENLEYPSVTLPPQPHTKEGVDAYNEVIARVRMWVNLNLWQKLKLSRDDAKPLLRLKGFPSFPLVERQANEVDWWDMVCNVKKLINEKKEDGKVFWQNLAGYKRQEALRPYLSSEEDRKKGKKFARYQLGDLLLHLEKKHGEDWGKVYDEAWERIDKKVEGLSKHIKLEEERRSEDAQSKAALTDWLRAKASFVIEGLKEADDKDEFCRCELKLQKWYGDLRGKPFAIEAENSILDISGFSKQYNCAFIWQKDGVKKLNLYLIINYFKGGKLRFKKIKPEAFEANRFYTVINKKSGEIVPMEVNFNFDDPNLIILPLAFGKRQGREFIWNDLLSLETGSLKLANGRVIEKTLYNRRTRQDEPALFVALTFERREVLDSSNIKPMNLIGVDRGENIPAVIALTDPEGCPLSRFKDSLGNPTHILRIGESYKEKQRTIQAKKEVEQRRAGGYSRKYASKAKNLADDMVRNTARDLLYYAVTQDAMLIFENLSRGFGRQGKRTFMAERQYTRMEDWLTAKLAYEGLPSKTYLSKTLAQYTSKTCSNCGFTITSADYDRVLEKLKKTATGWMTTINGKELKVEGQITYYNRYKRQNVVKDLSVELDRLSEESVNNDISSWTKGRSGEALSLLKKRFSHRPVQEKFVCLNCGFETHADEQAALNIARSWLFLRSQEYKKYQTNKTTGNTDKRAFVETWQSFYRKKLKEVWKPAV

SEQ ID NO: 40883 - protein, 979 aa, synthetic construct
  REGION 1..979: note = engineered CasX variant
QEIKRINKIRRRLVKDSNTKKAGKTGPMKTLLVRVMTPDLRERLENLRKKPENIPQPISNTSRANLNKLLTDYTEMKKAILHVYWEEFQKDPVGLMSRVAQPASKKIDQNKLKPEMDEKGNLTTAGFACSQCGQPLFVYKLEQVSEKGKAYTNYFGRCNVAEHEKLILLDQLKPEKDSDEAVTYSLGKFGQRALDFYSIHVTKESTHPVKPLAQIAGNRYASHPVGKALSDACMGTIASFLSKYQDIIIEHQKVVKGNQKRLESLRELAGKENLEYPSVTLPPQPHTKEGVDAYNEVIARVRMWVNLNLWQKLKLSRDDAKPLLRLKGFPSFPLVERQANEVDWWDMVCNVKKLINEKKEDGKVFWQNLAGYKRQEALRPYLSSEEDRKKGKKFARYQLGDLLLHLEKKHGEDWGKVYDEAWERIDKKVEGLSKHIKLEEERRSEDAQSKAALTDWLRAKASFVIEGLKEADDKDEFCRCELKLQKWYGDLRGKPFAIEAENSILDISGFSKQYNCAFIWQKDGVKKLNLYLIINYFKGGKLRFKKIKPEAFEANRFYTVINKKSGEIVPMEVNFNFDDPNLIILPLAFGKRQGREFIWNDLLSLETGSLKLANGRVIEKTLYNRRTRQDEPALFVALTFERREVLDSSNIKPMNLIGVDRGENIPAVIALTDPEGCPLSRFKDSLGNPTHILRIGESYKEKQRTIQAKKEVEQRRAGGYSRKYASKAKNLADDMVRNTARDLLYYAVTQDAMLIFENLSRGFGRQGKRTFMAERQYTRMEDWLTAKLAYEGLPSKTYLSKTLAQYTSKTCSNCGFTITSADYDRVLEKLKKTATGWMTTINGKELKVEGQITYYNRYKRQNVVKDLSVELDRLSEESVNNDISSWTKGRSGEALSLLKKRFSHRPVQEKFVCLNCGFETHADEQAALNIARSWLFLRSQEYKKYQTNKTTGNTDKRAFVETWQSFYRKKLKEVWKPAV

SEQ ID NO: 40884 - protein, 979 aa, synthetic construct
  REGION 1..979: note = engineered CasX variant
QEIKRINKIRRRLVKDSNTKKAGKTGPMKTLLVRVMTPDLRERLENLRKKPENIPQPISNTSRANLNKLLTDYTEMKKAILHVYWEEFQKDPVGLMSRVAQPASKKIDQNKLKPEMDEKGNLTTAGFACSQCGQPLFVYKLEQVSEKGKAYTNYFGRCNVAEHEKLILLDQLKPEKDSDEAVTYSLGKFGQRALDFYSIHVTKESTHPVKPLAQIAGNRYASSPVGKALSDACMGTIASFLSKYQDIIIEHQKVVKGNQKRLESLRELAGKENLEYPSVTLPPQPHTKEGVDAYNEVIARVRMWVNLNLWQKLKLSRDDAKPLLRLKGFPSFPLVERQANEVDWWDMVCNVKKLINEKKEDGKVFWQNLAGYKRQEALRPYLSSEEDRKKGKKFARYQLGDLLLHLEKKHGEDWGKVYDEAWERIDKKVEGLSKHIKLEEERRSEDAQSKAALTDWLRAKASFVIEGLKEADDKDEFCRCELKLQKWYGDLRGKPFAIEAENSILDISGFSKQYNCAFIWQKDGVKKLNLYLIINYFKGGKLRFKKIKPEAFEANRFYTVINKKSGEIVPMEVNFNFDDPNLIILPLAFGKRQGREFIWNDLLSLETGSLKLANGRVIEKTLYNRRTRQDEPALFVALTFERREVLDSSNIKPMNLIGVDRGENIPAVIALTDPEGCPLSRFKDSLGNPTHILRIGESYKEKQRTIQAKKEVEQRRAGGYSRKYASKAKNLADDMVRNTARDLLYYAVTQDAMLIFENLSRGFGRQGKRTFMAERQYTRMEDWLTAKLAYEGLPSKTYLSKTLAQYTSKTCSNCGFTITSADYDRVLEKLKKTATGWMTTINGKELKVEGQITYYNRYKRQNVVKDLSVELDRLSEESVNNDISSWTKGRSGEALSLLKKRFSHRPVQEKFVCLNCGFETHADEQAALNIARSWLFLRSQEYKKYQTNKTTGNTDKRAFVETWQSFYRKKLKEVWKPAV

SEQ ID NO: 40885 - protein, 979 aa, synthetic construct
  REGION 1..979: note = engineered CasX variant
QEIKRINKIRRRLVKDSNTKKAGKTGPMKTLLVRVMTPDLRERLENLRKKPENIPQPISNTSRANLNKLLTDYTEMKKAILHVYWEEFQKDPVGLMSRVAQPASKKIDQNKLKPEMDEKGNLTTAGFACSQCGQPLFVYKLEQVSEKGKAYTNYFGRCNVAEHEKLILLDQLKPEKDSDEAVTYSLGKFGQRALDFYSIHVTKESTHPVKPLAQIAGNRYASTPVGKALSDACMGTIASFLSKYQDIIIEHQKVVKGNQKRLESLRELAGKENLEYPSVTLPPQPHTKEGVDAYNEVIARVRMWVNLNLWQKLKLSRDDAKPLLRLKGFPSFPLVERQANEVDWWDMVCNVKKLINEKKEDGKVFWQNLAGYKRQEALRPYLSSEEDRKKGKKFARYQLGDLLLHLEKKHGEDWGKVYDEAWERIDKKVEGLSKHIKLEEERRSEDAQSKAALTDWLRAKASFVIEGLKEADDKDEFCRCELKLQKWYGDLRGKPFAIEAENSILDISGFSKQYNCAFIWQKDGVKKLNLYLIINYFKGGKLRFKKIKPEAFEANRFYTVINKKSGEIVPMEVNFNFDDPNLIILPLAFGKRQGREFIWNDLLSLETGSLKLANGRVIEKTLYNRRTRQDEPALFVALTFERREVLDSSNIKPMNLIGVDRGENIPAVIALTDPEGCPLSRFKDSLGNPTHILRIGESYKEKQRTIQAKKEVEQRRAGGYSRKYASKAKNLADDMVRNTARDLLYYAVTQDAMLIFENLSRGFGRQGKRTFMAERQYTRMEDWLTAKLAYEGLPSKTYLSKTLAQYTSKTCSNCGFTITSADYDRVLEKLKKTATGWMTTINGKELKVEGQITYYNRYKRQNVVKDLSVELDRLSEESVNNDISSWTKGRSGEALSLLKKRFSHRPVQEKFVCLNCGFETHADEQAALNIARSWLFLRSQEYKKYQTNKTTGNTDKRAFVETWQSFYRKKLKEVWKPAV

SEQ ID NO: 40886 - protein, 979 aa, synthetic construct
  REGION 1..979: note = engineered CasX variant
QEIKRINKIRRRLVKDSNTKKAGKTGPMKTLLVRVMTPDLRERLENLRKKPENIPQPISNTSRANLNKLLTDYTEMKKAILHVYWEEFQKDPVGLMSRVAQPASKKIDQNKLKPEMDEKGNLTTAGFACSQCGQPLFVYKLEQVSEKGKAYTNYFGRCNVAEHEKLILLDQLKPEKDSDEAVTYSLGKFGQRALDFYSIHVTKESTHPVKPLAQIAGNRYASAPVGKALSDACMGTIASFLSKYQDIIIEHQKVVKGNQKRLESLRELAGKENLEYPSVTLPPQPHTKEGVDAYNEVIARVRMWVNLNLWQKLKLSRDDAKPLLRLKGFPSFPLVERQANEVDWWDMVCNVKKLINEKKEDGKVFWQNLAGYKRQEALRPYLSSEEDRKKGKKFARYQLGDLLLHLEKKHGEDWGKVYDEAWERIDKKVEGLSKHIKLEEERRSEDAQSKAALTDWLRAKASFVIEGLKEADDKDEFCRCELKLQKWYGDLRGKPFAIEAENSILDISGFSKQYNCAFIWQKDGVKKLNLYLIINYFKGGKLRFKKIKPEAFEANRFYTVINKKSGEIVPMEVNFNFDDPNLIILPLAFGKRQGREFIWNDLLSLETGSLKLANGRVIEKTLYNRRTRQDEPALFVALTFERREVLDSSNIKPMNLIGVDRGENIPAVIALTDPEGCPLSRFKDSLGNPTHILRIGESYKEKQRTIQAKKEVEQRRAGGYSRKYASKAKNLADDMVRNTARDLLYYAVTQDAMLIFENLSRGFGRQGKRTFMAERQYTRMEDWLTAKLAYEGLPSKTYLSKTLAQYTSKTCSNCGFTITSADYDRVLEKLKKTATGWMTTINGKELKVEGQITYYNRYKRQNVVKDLSVELDRLSEESVNNDISSWTKGRSGEALSLLKKRFSHRPVQEKFVCLNCGFETHADEQAALNIARSWLFLRSQEYKKYQTNKTTGNTDKRAFVETWQSFYRKKLKEVWKPAV

SEQ ID NO: 40887 - protein, 979 aa, synthetic construct
  REGION 1..979: note = engineered CasX variant
QEIKRINKIRRRLVKDSNTKKAGKTGPMKTLLVRVMTPDLRERLENLRKKPENIPQPISNTSRANLNKLLTDYTEMKKAILHVYWEEFQKDPVGLMSRVAQPASKKIDQNKLKPEMDEKGNLTTAGFACSQCGQPLFVYKLEQVSEKGKAYTNYFGRCNVAEHEKLILLDQLKPEKDSDEAVTYSLGKFGQRALDFYSIHVTKESTHPVKPLAQIAGNRYASVPVGKALSDACMGTIASFLSKYQDIIIEHQKVVKGNQKRLESLRELAGKENLEYPSVTLPPQPHTKEGVDAYNEVIARVRMWVNLNLWQKLKLSRDDAKPLLRLKGFPSFPLVERQANEVDWWDMVCNVKKLINEKKEDGKVFWQNLAGYKRQEALRPYLSSEEDRKKGKKFARYQLGDLLLHLEKKHGEDWGKVYDEAWERIDKKVEGLSKHIKLEEERRSEDAQSKAALTDWLRAKASFVIEGLKEADDKDEFCRCELKLQKWYGDLRGKPFAIEAENSILDISGFSKQYNCAFIWQKDGVKKLNLYLIINYFKGGKLRFKKIKPEAFEANRFYTVINKKSGEIVPMEVNFNFDDPNLIILPLAFGKRQGREFIWNDLLSLETGSLKLANGRVIEKTLYNRRTRQDEPALFVALTFERREVLDSSNIKPMNLIGVDRGENIPAVIALTDPEGCPLSRFKDSLGNPTHILRIGESYKEKQRTIQAKKEVEQRRAGGYSRKYASKAKNLADDMVRNTARDLLYYAVTQDAMLIFENLSRGFGRQGKRTFMAERQYTRMEDWLTAKLAYEGLPSKTYLSKTLAQYTSKTCSNCGFTITSADYDRVLEKLKKTATGWMTTINGKELKVEGQITYYNRYKRQNVVKDLSVELDRLSEESVNNDISSWTKGRSGEALSLLKKRFSHRPVQEKFVCLNCGFETHADEQAALNIARSWLFLRSQEYKKYQTNKTTGNTDKRAFVETWQSFYRKKLKEVWKPAV

SEQ ID NO: 40888 - protein, 979 aa, synthetic construct
  REGION 1..979: note = engineered CasX variant
QEIKRINKIRRRLVKDSNTKKAGKTGPMKTLLVRVMTPDLRERLENLRKKPENIPQPISNTSRANLNKLLTDYTEMKKAILHVYWEEFQKDPVGLMSRVAQPASKKIDQNKLKPEMDEKGNLTTAGFACSQCGQPLFVYKLEQVSEKGKAYTNYFGRCNVAEHEKLIKLDQLKPEKDSDEAVTYSLGKFGQRALDFYSIHVTKESTHPVKPLAQIAGNRYASGPVGKALSDACMGTIASFLSKYQDIIIEHQKVVKGNQKRLESLRELAGKENLEYPSVTLPPQPHTKEGVDAYNEVIARVRMWVNLNLWQKLKLSRDDAKPLLRLKGFPSFPLVERQANEVDWWDMVCNVKKLINEKKEDGKVFWQNLAGYKRQEALRPYLSSEEDRKKGKKFARYQLGDLLLHLEKKHGEDWGKVYDEAWERIDKKVEGLSKHIKLEEERRSEDAQSKAALTDWLRAKASFVIEGLKEADDKDEFCRCELKLQKWYGDLRGKPFAIEAENSILDISGFSKQYNCAFIWQKDGVKKLNLYLIINYFKGGKLRFKKIKPEAFEANRFYTVINKKSGEIVPMEVNFNFDDPNLIILPLAFGKRQGREFIWNDLLSLETGSLKLANGRVIEKTLYNRRTRQDEPALFVALTFERREVLDSSNIKPMNLIGVDRGENIPAVIALTDPEGCPLSRFKDSLGNPTHILRIGESYKEKQRTIQAKKEVEQRRAGGYSRKYASKAKNLADDMVRNTARDLLYYAVTQDAMLIFENLSRGFGRQGKRTFMAERQYTRMEDWLTAKLAYEGLPSKTYLSKTLAQYTSKTCSNCGFTITSADYDRVLEKLKKTATGWMTTINGKELKVEGQITYYNRYKRQNVVKDLSVELDRLSEESVNNDISSWTKGRSGEALSLLKKRFSHRPVQEKFVCLNCGFETHADEQAALNIARSWLFLRSQEYKKYQTNKTTGNTDKRAFVETWQSFYRKKLKEVWKPAV

SEQ ID NO: 40889 - protein, 978 aa, synthetic construct
  REGION 1..978: note = engineered CasX variant
QEIKRINKIRRRLVKDSNTKKAGKTGPMKTLLVRVMTPDLRERLENLRKKPENIPQPISNTSRANLNKLLTDYTEMKKAILHVYWEEFQKDPVGLMSRVAQPASKKIDQNKLKPEMDEKGNLTTAGFACSQCGQPLFVYKLEQVSEKGKAYTNYFGRCNVAEHEKLILLDQLKPEKDSDEAVTYSLGKFGQRALDFYSIHVTKESTHPVKPLAQIAGNRYASPVGKALSDACMGTIASFLSKYQDIIIEHQKVVKGNQKRLESLRELAGKENLEYPSVTLPPQPHTKEGVDAYNEVIARVRMWVNLNLWQKLKLSRDDAKPLLRLKGFPSFPLVERQANEVDWWDMVCNVKKLINEKKEDGKVFWQNLAGYKRQEALRPYLSSEEDRKKGKKFARYQLGDLLLHLEKKHGEDWGKVYDEAWERIDKKVEGLSKHIKLEEERRSEDAQSKAALTDWLRAKASFVIEGLKEADDKDEFCRCELKLQKWYGDLRGKPFAIEAENSILDISGFSKQYNCAFIWQKDGVKKLNLYLIINYFKGGKLRFKKIKPEAFEANRFYTVINKKSGEIVPMEVNFNFDDPNLIILPLAFGKRQGREFIWNDLLSLETGSLKLANGRVIEKTLYNRRTRQDEPALFVALTFERREVLDSSNIKPMNLIGVDRGENIPAVIALTDPEGCPLSRFKDSLGNPTHILRIGESYKEKQRTIQAKKEVEQRRAGGYSRKYASKAKNLADDMVRNTARDLLYYAVTQDAMLIFENLSRGFGRQGKRTFMAERQYTRMEDWLTAKLAYEGLPSKTYLSKTLAQYTSKTCSNCGFTITSADYDRVLEKLKKTATGWMTTINGKELKVEGQITYYNRYKRQNVVKDLSVELDRLSEESVNNDISSWTKGRSGEALSLLKKRFSHRPVQEKFVCLNCGFETHADEQAALNIARSWLFLRSQEYKKYQTNKTTGNTDKRAFVETWQSFYRKKLKEVWKPAV

SEQ ID NO: 40890 - protein, 979 aa, synthetic construct
  REGION 1..979: note = engineered CasX variant
QEIKRINKIRRRLVKDSNTKKAGKTGPMKTLLVRVMTPDLRERLENLRKKPENIPQPISNTSRANLNKLLTDYTEMKKAILHVYWEEFQKDPVGLMSRVAQPASKKIDQNKLKPEMDEKGNLTTAGFACSQCGQPLFVYKLEQVSEKGKAYTNYFGRCNVAEHEKLILLDQLKPEKDSDEAVTYSLGKFGQRALDFYSIHVTKESTHPVKPLAQIAGNRYASYPVGKALSDACMGTIASFLSKYQDIIIEHQKVVKGNQKRLESLRELAGKENLEYPSVTLPPQPHTKEGVDAYNEVIARVRMWVNLNLWQKLKLSRDDAKPLLRLKGFPSFPLVERQANEVDWWDMVCNVKKLINEKKEDGKVFWQNLAGYKRQEALRPYLSSEEDRKKGKKFARYQLGDLLLHLEKKHGEDWGKVYDEAWERIDKKVEGLSKHIKLEEERRSEDAQSKAALTDWLRAKASFVIEGLKEADKDEFCRCELKLQKWYGDLRGKPFAIEAENSILDISGFSKQYNCAFIWQKDGVKKLNLYLIINYFKGGKLRFKKIKPEAFEANRFYTVINKKSGEIVPMEVNFNFDDPNLIILPLAFGKRQGREFIWNDLLSLETGSLKLANGRVIEKTLYNRRTRQDEPALFVALTFERREVLDSSNIKPMNLIGVDRGENIPAVIALTDPEGCPLSRFKDSLGNPTHILRIGESYKEKQRTIQAKKEVEQRRAGGYSRKYASKAKNLADDMVRNTARDLLYYAVTQDAMLIFENLSRGFGRQGKRTFMAERQYTRMEDWLTAKLAYEGLPSKTYLSKTLAQYTSKTCSNCGFTITSADYDRVLEKLKKTATGWMTTINGKELKVEGQITYYNRYKRQNVVKDLSVELDRLSEESVNNDISSWTKGRSGNEALSLLKKRFSHRPVQEKFVCLNCGFETHADEQAALNIARSWLFLRSQEYKKYQTNKTTGNTDKRAFVETWQSFYRKKLKEVWKPAV

SEQ ID NO: 40891 - protein, 979 aa, synthetic construct
  REGION 1..979: note = engineered CasX variant
QEIKRINKIRRRLVKDSNTKKAGKTGPMKTLLVRVMTPDLRERLENLRKKPENIPQPISNTSRANLNKLLTDYTEMKKAILHVYWEEFQKDPVGLMSRVAQPASKKIDQNKLKPEMDEKGNLTTAGFACSQCGQPLFVYKLEQVSEKGKAYTNYFGRCNVAEHEKLILLDQLKPEKDSDEAVTYSLGKFGQRALDFYSIHVTKESTHPVKPLAQIAGNRYASHPVGKALSDACMGTIASFLSKYQDIIIEHQKVVKGNQKRLESLRELAGKENLEYPSVTLPPQPHTKEGVDAYNEVIARVRMWVNLNLWQKLKLSRDDAKPLLRLKGFPSFPLVERQANEVDWWDMVCNVKKLINEKKEDGKVFWQNLAGYKRQEALRPYLSSEEDRKKGKKFARYQLGDLLLHLEKKHGEDWGKVYDEAWERIDKKVEGLSKHIKLEEERRSEDAQSKAALTDWLRAKASFVIEGLKEADKDEFCRCELKLQKWYGDLRGKPFAIEAENSILDISGFSKQYNCAFIWQKDGVKKLNLYLIINYFKGGKLRFKKIKPEAFEANRFYTVINKKSGEIVPMEVNFNFDDPNLIILPLAFGKRQGREFIWNDLLSLETGSLKLANGRVIEKTLYNRRTRQDEPALFVALTFERREVLDSSNIKPMNLIGVDRGENIPAVIALTDPEGCPLSRFKDSLGNPTHILRIGESYKEKQRTIQAKKEVEQRRAGGYSRKYASKAKNLADDMVRNTARDLLYYAVTQDAMLIFENLSRGFGRQGKRTFMAERQYTRMEDWLTAKLAYEGLPSKTYLSKTLAQYTSKTCSNCGFTITSADYDRVLEKLKKTATGWMTTINGKELKVEGQITYYNRYKRQNVVKDLSVELDRLSEESVNNDISSWTKGRSGNEALSLLKKRFSHRPVQEKFVCLNCGFETHADEQAALNIARSWLFLRSQEYKKYQTNKTTGNTDKRAFVETWQSFYRKKLKEVWKPAV

SEQ ID NO: 40892 - protein, 979 aa, synthetic construct
  REGION 1..979: note = engineered CasX variant
QEIKRINKIRRRLVKDSNTKKAGKTGPMKTLLVRVMTPDLRERLENLRKKPENIPQPISNTSRANLNKLLTDYTEMKKAILHVYWEEFQKDPVGLMSRVAQPASKKIDQNKLKPEMDEKGNLTTAGFACSQCGQPLFVYKLEQVSEKGKAYTNYFGRCNVAEHEKLILLDQLKPEKDSDEAVTYSLGKFGQRALDFYSIHVTKESTHPVKPLAQIAGNRYASSPVGKALSDACMGTIASFLSKYQDIIIEHQKVVKGNQKRLESLRELAGKENLEYPSVTLPPQPHTKEGVDAYNEVIARVRMWVNLNLWQKLKLSRDDAKPLLRLKGFPSFPLVERQANEVDWWDMVCNVKKLINEKKEDGKVFWQNLAGYKRQEALRPYLSSEEDRKKGKKFARYQLGDLLLHLEKKHGEDWGKVYDEAWERIDKKVEGLSKHIKLEEERRSEDAQSKAALTDWLRAKASFVIEGLKEADKDEFCRCELKLQKWYGDLRGKPFAIEAENSILDISGFSKQYNCAFIWQKDGVKKLNLYLIINYFKGGKLRFKKIKPEAFEANRFYTVINKKSGEIVPMEVNFNFDDPNLIILPLAFGKRQGREFIWNDLLSLETGSLKLANGRVIEKTLYNRRTRQDEPALFVALTFERREVLDSSNIKPMNLIGVDRGENIPAVIALTDPEGCPLSRFKDSLGNPTHILRIGESYKEKQRTIQAKKEVEQRRAGGYSRKYASKAKNLADDMVRNTARDLLYYAVTQDAMLIFENLSRGFGRQGKRTFMAERQYTRMEDWLTAKLAYEGLPSKTYLSKTLAQYTSKTCSNCGFTITSADYDRVLEKLKKTATGWMTTINGKELKVEGQITYYNRYKRQNVVKDLSVELDRLSEESVNNDISSWTKGRSGNEALSLLKKRFSHRPVQEKFVCLNCGFETHADEQAALNIARSWLFLRSQEYKKYQTNKTTGNTDKRAFVETWQSFYRKKLKEVWKPAV

SEQ ID NO: 40893 - protein, 979 aa, synthetic construct
  REGION 1..979: note = engineered CasX variant
QEIKRINKIRRRLVKDSNTKKAGKTGPMKTLLVRVMTPDLRERLENLRKKPENIPQPISNTSRANLNKLLTDYTEMKKAILHVYWEEFQKDPVGLMSRVAQPASKKIDQNKLKPEMDEKGNLTTAGFACSQCGQPLFVYKLEQVSEKGKAYTNYFGRCNVAEHEKLILLDQLKPEKDSDEAVTYSLGKFGQRALDFYSIHVTKESTHPVKPLAQIAGNRYASTPVGKALSDACMGTIASFLSKYQDIIIEHQKVVKGNQKRLESLRELAGKENLEYPSVTLPPQPHTKEGVDAYNEVIARVRMWVNLNLWQKLKLSRDDAKPLLRLKGFPSFPLVERQANEVDWWDMVCNVKKLINEKKEDGKVFWQNLAGYKRQEALRPYLSSEEDRKKGKKFARYQLGDLLLHLEKKHGEDWGKVYDEAWERIDKKVEGLSKHIKLEEERRSEDAQSKAALTDWLRAKASFVIEGLKEADKDEFCRCELKLQKWYGDLRGKPFAIEAENSILDISGFSKQYNCAFIWQKDGVKKLNLYLIINYFKGGKLRFKKIKPEAFEANRFYTVINKKSGEIVPMEVNFNFDDPNLIILPLAFGKRQGREFIWNDLLSLETGSLKLANGRVIEKTLYNRRTRQDEPALFVALTFERREVLDSSNIKPMNLIGVDRGENIPAVIALTDPEGCPLSRFKDSLGNPTHILRIGESYKEKQRTIQAKKEVEQRRAGGYSRKYASKAKNLADDMVRNTARDLLYYAVTQDAMLIFENLSRGFGRQGKRTFMAERQYTRMEDWLTAKLAYEGLPSKTYLSKTLAQYTSKTCSNCGFTITSADYDRVLEKLKKTATGWMTTINGKELKVEGQITYYNRYKRQNVVKDLSVELDRLSEESVNNDISSWTKGRSGNEALSLLKKRFSHRPVQEKFVCLNCGFETHADEQAALNIARSWLFLRSQEYKKYQTNKTTGNTDKRAFVETWQSFYRKKLKEVWKPAV

SEQ ID NO: 40894 - protein, 979 aa, synthetic construct
  REGION 1..979: note = engineered CasX variant
QEIKRINKIRRRLVKDSNTKKAGKTGPMKTLLVRVMTPDLRERLENLRKKPENIPQPISNTSRANLNKLLTDYTEMKKAILHVYWEEFQKDPVGLMSRVAQPASKKIDQNKLKPEMDEKGNLTTAGFACSQCGQPLFVYKLEQVSEKGKAYTNYFGRCNVAEHEKLILLDQLKPEKDSDEAVTYSLGKFGQRALDFYSIHVTKESTHPVKPLAQIAGNRYASAPVGKALSDACMGTIASFLSKYQDIIIEHQKVVKGNQKRLESLRELAGKENLEYPSVTLPPQPHTKEGVDAYNEVIARVRMWVNLNLWQKLKLSRDDAKPLLRLKGFPSFPLVERQANEVDWWDMVCNVKKLINEKKEDGKVFWQNLAGYKRQEALRPYLSSEEDRKKGKKFARYQLGDLLLHLEKKHGEDWGKVYDEAWERIDKKVEGLSKHIKLEEERRSEDAQSKAALTDWLRAKASFVIEGLKEADKDEFCRCELKLQKWYGDLRGKPFAIEAENSILDISGFSKQYNCAFIWQKDGVKKLNLYLIINYFKGGKLRFKKIKPEAFEANRFYTVINKKSGEIVPMEVNFNFDDPNLIILPLAFGKRQGREFIWNDLLSLETGSLKLANGRVIEKTLYNRRTRQDEPALFVALTFERREVLDSSNIKPMNLIGVDRGENIPAVIALTDPEGCPLSRFKDSLGNPTHILRIGESYKEKQRTIQAKKEVEQRRAGGYSRKYASKAKNLADDMVRNTARDLLYYAVTQDAMLIFENLSRGFGRQGKRTFMAERQYTRMEDWLTAKLAYEGLPSKTYLSKTLAQYTSKTCSNCGFTITSADYDRVLEKLKKTATGWMTTINGKELKVEGQITYYNRYKRQNVVKDLSVELDRLSEESVNNDISSWTKGRSGNEALSLLKKRFSHRPVQEKFVCLNCGFETHADEQAALNIARSWLFLRSQEYKKYQTNKTTGNTDKRAFVETWQSFYRKKLKEVWKPAV

SEQ ID NO: 40895 - protein, 979 aa, synthetic construct
  REGION 1..979: note = engineered CasX variant
QEIKRINKIRRRLVKDSNTKKAGKTGPMKTLLVRVMTPDLRERLENLRKKPENIPQPISNTSRANLNKLLTDYTEMKKAILHVYWEEFQKDPVGLMSRVAQPASKKIDQNKLKPEMDEKGNLTTAGFACSQCGQPLFVYKLEQVSEKGKAYTNYFGRCNVAEHEKLILLDQLKPEKDSDEAVTYSLGKFGQRALDFYSIHVTKESTHPVKPLAQIAGNRYASVPVGKALSDACMGTIASFLSKYQDIIIEHQKVVKGNQKRLESLRELAGKENLEYPSVTLPPQPHTKEGVDAYNEVIARVRMWVNLNLWQKLKLSRDDAKPLLRLKGFPSFPLVERQANEVDWWDMVCNVKKLINEKKEDGKVFWQNLAGYKRQEALRPYLSSEEDRKKGKKFARYQLGDLLLHLEKKHGEDWGKVYDEAWERIDKKVEGLSKHIKLEEERRSEDAQSKAALTDWLRAKASFVIEGLKEADKDEFCRCELKLQKWYGDLRGKPFAIEAENSILDISGFSKQYNCAFIWQKDGVKKLNLYLIINYFKGGKLRFKKIKPEAFEANRFYTVINKKSGEIVPMEVNFNFDDPNLIILPLAFGKRQGREFIWNDLLSLETGSLKLANGRVIEKTLYNRRTRQDEPALFVALTFERREVLDSSNIKPMNLIGVDRGENIPAVIALTDPEGCPLSRFKDSLGNPTHILRIGESYKEKQRTIQAKKEVEQRRAGGYSRKYASKAKNLADDMVRNTARDLLYYAVTQDAMLIFENLSRGFGRQGKRTFMAERQYTRMEDWLTAKLAYEGLPSKTYLSKTLAQYTSKTCSNCGFTITSADYDRVLEKLKKTATGWMTTINGKELKVEGQITYYNRYKRQNVVKDLSVELDRLSEESVNNDISSWTKGRSGNEALSLLKKRFSHRPVQEKFVCLNCGFETHADEQAALNIARSWLFLRSQEYKKYQTNKTTGNTDKRAFVETWQSFYRKKLKEVWKPAV

SEQ ID NO: 40896 - protein, 979 aa, synthetic construct
  REGION 1..979: note = engineered CasX variant
QEIKRINKIRRRLVKDSNTKKAGKTGPMKTLLVRVMTPDLRERLENLRKKPENIPQPISNTSRANLNKLLTDYTEMKKAILHVYWEEFQKDPVGLMSRVAQPASKKIDQNKLKPEMDEKGNLTTAGFACSQCGQPLFVYKLEQVSEKGKAYTNYFGRCNVAEHEKLIKLDQLKPEKDSDEAVTYSLGKFGQRALDFYSIHVTKESTHPVKPLAQIAGNRYASGPVGKALSDACMGTIASFLSKYQDIIIEHQKVVKGNQKRLESLRELAGKENLEYPSVTLPPQPHTKEGVDAYNEVIARVRMWVNLNLWQKLKLSRDDAKPLLRLKGFPSFPLVERQANEVDWWDMVCNVKKLINEKKEDGKVFWQNLAGYKRQEALRPYLSSEEDRKKGKKFARYQLGDLLLHLEKKHGEDWGKVYDEAWERIDKKVEGLSKHIKLEEERRSEDAQSKAALTDWLRAKASFVIEGLKEADKDEFCRCELKLQKWYGDLRGKPFAIEAENSILDISGFSKQYNCAFIWQKDGVKKLNLYLIINYFKGGKLRFKKIKPEAFEANRFYTVINKKSGEIVPMEVNFNFDDPNLIILPLAFGKRQGREFIWNDLLSLETGSLKLANGRVIEKTLYNRRTRQDEPALFVALTFERREVLDSSNIKPMNLIGVDRGENIPAVIALTDPEGCPLSRFKDSLGNPTHILRIGESYKEKQRTIQAKKEVEQRRAGGYSRKYASKAKNLADDMVRNTARDLLYYAVTQDAMLIFENLSRGFGRQGKRTFMAERQYTRMEDWLTAKLAYEGLPSKTYLSKTLAQYTSKTCSNCGFTITSADYDRVLEKLKKTATGWMTTINGKELKVEGQITYYNRYKRQNVVKDLSVELDRLSEESVNNDISSWTKGRSGNEALSLLKKRFSHRPVQEKFVCLNCGFETHADEQAALNIARSWLFLRSQEYKKYQTNKTTGNTDKRAFVETWQSFYRKKLKEVWKPAV

SEQ ID NO: 40897 - protein, 978 aa, synthetic construct
  REGION 1..978: note = engineered CasX variant
QEIKRINKIRRRLVKDSNTKKAGKTGPMKTLLVRVMTPDLRERLENLRKKPENIPQPISNTSRANLNKLLTDYTEMKKAILHVYWEEFQKDPVGLMSRVAQPASKKIDQNKLKPEMDEKGNLTTAGFACSQCGQPLFVYKLEQVSEKGKAYTNYFGRCNVAEHEKLILLDQLKPEKDSDEAVTYSLGKFGQRALDFYSIHVTKESTHPVKPLAQIAGNRYASPVGKALSDACMGTIASFLSKYQDIIIEHQKVVKGNQKRLESLRELAGKENLEYPSVTLPPQPHTKEGVDAYNEVIARVRMWVNLNLWQKLKLSRDDAKPLLRLKGFPSFPLVERQANEVDWWDMVCNVKKLINEKKEDGKVFWQNLAGYKRQEALRPYLSSEEDRKKGKKFARYQLGDLLLHLEKKHGEDWGKVYDEAWERIDKKVEGLSKHIKLEEERRSEDAQSKAALTDWLRAKASFVIEGLKEADKDEFCRCELKLQKWYGDLRGKPFAIEAENSILDISGFSKQYNCAFIWQKDGVKKLNLYLIINYFKGGKLRFKKIKPEAFEANRFYTVINKKSGEIVPMEVNFNFDDPNLIILPLAFGKRQGREFIWNDLLSLETGSLKLANGRVIEKTLYNRRTRQDEPALFVALTFERREVLDSSNIKPMNLIGVDRGENIPAVIALTDPEGCPLSRFKDSLGNPTHILRIGESYKEKQRTIQAKKEVEQRRAGGYSRKYASKAKNLADDMVRNTARDLLYYAVTQDAMLIFENLSRGFGRQGKRTFMAERQYTRMEDWLTAKLAYEGLPSKTYLSKTLAQYTSKTCSNCGFTITSADYDRVLEKLKKTATGWMTTINGKELKVEGQITYYNRYKRQNVVKDLSVELDRLSEESVNNDISSWTKGRSGNEALSLLKKRFSHRPVQEKFVCLNCGFETHADEQAALNIARSWLFLRSQEYKKYQTNKTTGNTDKRAFVETWQSFYRKKLKEVWKPAV

SEQ ID NO: 40898 - protein, 978 aa, synthetic construct
  REGION 1..978: note = engineered CasX variant
QEIKRINKIRRRLVKDSNTKKAGKTGPMKTLLVRVMTPDLRERLENLRKKPENIPQPISNTSRANLNKLLTDYTEMKKAILHVYWEEFQKDPVGLMSRVAQPASKKIDQNKLKPEMDEKGNLTTAGFACSQCGQPLFVYKLEQVSEKGKAYTNYFGRCNVAEHEKLILLDQLKPEKDSDEAVTYSLGKFGQRALDFYSIHVTKESTHPVKPLAQIAGNRYASYPVGKALSDACMGTIASFLSKYQDIIIEHQKVVKGNQKRLESLRELAGKENLEYPSVTLPPQPHTKEGVDAYNEVIARVRMWVNLNLWQKLKLSRDDAKPLLRLKGFPSFPLVERQANEVDWWDMVCNVKKLINEKKEDGKVFWQNLAGYKRQEALRPYLSSEEDRQKGKKFARYQLGDLLLHLEKKHGEDWGKVYDEAWERIDKKVEGLSKHIKLEEERRSEDAQSKAALTDWLRAKASFVIEGLKEADKDEFCRCELKLQKWYGDLRGKPFAIEAENSILDISGFSKQYNCAFIWQKDGVKKLNLYLIINYFKGGKLRFKKIKPEAFEANRFYTVINKKSGEIVPMEVNFNFDDPNLIILPLAFGKRQGREFIWNDLLSLETGSLKLANGRVIEKTLYNRRTRQDEPALFVALTFERREVLDSSNIKPMNLIGVDRGENIPAVIALTDPEGCPLSRFKDSLGNPTHILRIGESYKEKQRTIQAKKEVEQRRAGGYSRKYASKAKNLADDMVRNTARDLLYYAVTQDAMLIFENLSRGFGRQGKRTFMAERQYTRMEDWLTAKLAYEGLPSKTYLSKTLAQYTSKTCSNCGFTITSADYDRVLEKLKKTATGWMTTINGKELKVEGQITYYNRYKRQNVVKDLSVELDRLSEESVNNDISSWTKGRSGEALSLLKKRFSHRPVQEKFVCLNCGFETHADEQAALNIARSWLFLRSQEYKKYQTNKTTGNTDKRAFVETWQSFYRKKLKEVWKPAV

SEQ ID NO: 40899 - protein, 978 aa, synthetic construct
  REGION 1..978: note = engineered CasX variant
QEIKRINKIRRRLVKDSNTKKAGKTGPMKTLLVRVMTPDLRERLENLRKKPENIPQPISNTSRANLNKLLTDYTEMKKAILHVYWEEFQKDPVGLMSRVAQPASKKIDQNKLKPEMDEKGNLTTAGFACSQCGQPLFVYKLEQVSEKGKAYTNYFGRCNVAEHEKLILLDQLKPEKDSDEAVTYSLGKFGQRALDFYSIHVTKESTHPVKPLAQIAGNRYASHPVGKALSDACMGTIASFLSKYQDIIIEHQKVVKGNQKRLESLRELAGKENLEYPSVTLPPQPHTKEGVDAYNEVIARVRMWVNLNLWQKLKLSRDDAKPLLRLKGFPSFPLVERQANEVDWWDMVCNVKKLINEKKEDGKVFWQNLAGYKRQEALRPYLSSEEDRQKGKKFARYQLGDLLLHLEKKHGEDWGKVYDEAWERIDKKVEGLSKHIKLEEERRSEDAQSKAALTDWLRAKASFVIEGLKEADKDEFCRCELKLQKWYGDLRGKPFAIEAENSILDISGFSKQYNCAFIWQKDGVKKLNLYLIINYFKGGKLRFKKIKPEAFEANRFYTVINKKSGEIVPMEVNFNFDDPNLIILPLAFGKRQGREFIWNDLLSLETGSLKLANGRVIEKTLYNRRTRQDEPALFVALTFERREVLDSSNIKPMNLIGVDRGENIPAVIALTDPEGCPLSRFKDSLGNPTHILRIGESYKEKQRTIQAKKEVEQRRAGGYSRKYASKAKNLADDMVRNTARDLLYYAVTQDAMLIFENLSRGFGRQGKRTFMAERQYTRMEDWLTAKLAYEGLPSKTYLSKTLAQYTSKTCSNCGFTITSADYDRVLEKLKKTATGWMTTINGKELKVEGQITYYNRYKRQNVVKDLSVELDRLSEESVNNDISSWTKGRSGEALSLLKKRFSHRPVQEKFVCLNCGFETHADEQAALNIARSWLFLRSQEYKKYQTNKTTGNTDKRAFVETWQSFYRKKLKEVWKPAV

SEQ ID NO: 40900 - protein, 978 aa, synthetic construct
  REGION 1..978: note = engineered CasX variant
QEIKRINKIRRRLVKDSNTKKAGKTGPMKTLLVRVMTPDLRERLENLRKKPENIPQPISNTSRANLNKLLTDYTEMKKAILHVYWEEFQKDPVGLMSRVAQPASKKIDQNKLKPEMDEKGNLTTAGFACSQCGQPLFVYKLEQVSEKGKAYTNYFGRCNVAEHEKLILLDQLKPEKDSDEAVTYSLGKFGQRALDFYSIHVTKESTHPVKPLAQIAGNRYASSPVGKALSDACMGTIASFLSKYQDIIIEHQKVVKGNQKRLESLRELAGKENLEYPSVTLPPQPHTKEGVDAYNEVIARVRMWVNLNLWQKLKLSRDDAKPLLRLKGFPSFPLVERQANEVDWWDMVCNVKKLINEKKEDGKVFWQNLAGYKRQEALRPYLSSEEDRQKGKKFARYQLGDLLLHLEKKHGEDWGKVYDEAWERIDKKVEGLSKHIKLEEERRSEDAQSKAALTDWLRAKASFVIEGLKEADKDEFCRCELKLQKWYGDLRGKPFAIEAENSILDISGFSKQYNCAFIWQKDGVKKLNLYLIINYFKGGKLRFKKIKPEAFEANRFYTVINKKSGEIVPMEVNFNFDDPNLIILPLAFGKRQGREFIWNDLLSLETGSLKLANGRVIEKTLYNRRTRQDEPALFVALTFERREVLDSSNIKPMNLIGVDRGENIPAVIALTDPEGCPLSRFKDSLGNPTHILRIGESYKEKQRTIQAKKEVEQRRAGGYSRKYASKAKNLADDMVRNTARDLLYYAVTQDAMLIFENLSRGFGRQGKRTFMAERQYTRMEDWLTAKLAYEGLPSKTYLSKTLAQYTSKTCSNCGFTITSADYDRVLEKLKKTATGWMTTINGKELKVEGQITYYNRYKRQNVVKDLSVELDRLSEESVNNDISSWTKGRSGEALSLLKKRFSHRPVQEKFVCLNCGFETHADEQAALNIARSWLFLRSQEYKKYQTNKTTGNTDKRAFVETWQSFYRKKLKEVWKPAV

SEQ ID NO: 40901 - protein, 978 aa, synthetic construct
  REGION 1..978: note = engineered CasX variant
QEIKRINKIRRRLVKDSNTKKAGKTGPMKTLLVRVMTPDLRERLENLRKKPENIPQPISNTSRANLNKLLTDYTEMKKAILHVYWEEFQKDPVGLMSRVAQPASKKIDQNKLKPEMDEKGNLTTAGFACSQCGQPLFVYKLEQVSEKGKAYTNYFGRCNVAEHEKLILLDQLKPEKDSDEAVTYSLGKFGQRALDFYSIHVTKESTHPVKPLAQIAGNRYASTPVGKALSDACMGTIASFLSKYQDIIIEHQKVVKGNQKRLESLRELAGKENLEYPSVTLPPQPHTKEGVDAYNEVIARVRMWVNLNLWQKLKLSRDDAKPLLRLKGFPSFPLVERQANEVDWWDMVCNVKKLINEKKEDGKVFWQNLAGYKRQEALRPYLSSEEDRQKGKKFARYQLGDLLLHLEKKHGEDWGKVYDEAWERIDKKVEGLSKHIKLEEERRSEDAQSKAALTDWLRAKASFVIEGLKEADKDEFCRCELKLQKWYGDLRGKPFAIEAENSILDISGFSKQYNCAFIWQKDGVKKLNLYLIINYFKGGKLRFKKIKPEAFEANRFYTVINKKSGEIVPMEVNFNFDDPNLIILPLAFGKRQGREFIWNDLLSLETGSLKLANGRVIEKTLYNRRTRQDEPALFVALTFERREVLDSSNIKPMNLIGVDRGENIPAVIALTDPEGCPLSRFKDSLGNPTHILRIGESYKEKQRTIQAKKEVEQRRAGGYSRKYASKAKNLADDMVRNTARDLLYYAVTQDAMLIFENLSRGFGRQGKRTFMAERQYTRMEDWLTAKLAYEGLPSKTYLSKTLAQYTSKTCSNCGFTITSADYDRVLEKLKKTATGWMTTINGKELKVEGQITYYNRYKRQNVVKDLSVELDRLSEESVNNDISSWTKGRSGEALSLLKKRFSHRPVQEKFVCLNCGFETHADEQAALNIARSWLFLRSQEYKKYQTNKTTGNTDKRAFVETWQSFYRKKLKEVWKPAV

SEQ ID NO: 40902 - protein, 978 aa, synthetic construct
  REGION 1..978: note = engineered CasX variant
QEIKRINKIRRRLVKDSNTKKAGKTGPMKTLLVRVMTPDLRERLENLRKKPENIPQPISNTSRANLNKLLTDYTEMKKAILHVYWEEFQKDPVGLMSRVAQPASKKIDQNKLKPEMDEKGNLTTAGFACSQCGQPLFVYKLEQVSEKGKAYTNYFGRCNVAEHEKLILLDQLKPEKDSDEAVTYSLGKFGQRALDFYSIHVTKESTHPVKPLAQIAGNRYASAPVGKALSDACMGTIASFLSKYQDIIIEHQKVVKGNQKRLESLRELAGKENLEYPSVTLPPQPHTKEGVDAYNEVIARVRMWVNLNLWQKLKLSRDDAKPLLRLKGFPSFPLVERQANEVDWWDMVCNVKKLINEKKEDGKVFWQNLAGYKRQEALRPYLSSEEDRQKGKKFARYQLGDLLLHLEKKHGEDWGKVYDEAWERIDKKVEGLSKHIKLEEERRSEDAQSKAALTDWLRAKASFVIEGLKEADKDEFCRCELKLQKWYGDLRGKPFAIEAENSILDISGFSKQYNCAFIWQKDGVKKLNLYLIINYFKGGKLRFKKIKPEAFEANRFYTVINKKSGEIVPMEVNFNFDDPNLIILPLAFGKRQGREFIWNDLLSLETGSLKLANGRVIEKTLYNRRTRQDEPALFVALTFERREVLDSSNIKPMNLIGVDRGENIPAVIALTDPEGCPLSRFKDSLGNPTHILRIGESYKEKQRTIQAKKEVEQRRAGGYSRKYASKAKNLADDMVRNTARDLLYYAVTQDAMLIFENLSRGFGRQGKRTFMAERQYTRMEDWLTAKLAYEGLPSKTYLSKTLAQYTSKTCSNCGFTITSADYDRVLEKLKKTATGWMTTINGKELKVEGQITYYNRYKRQNVVKDLSVELDRLSEESVNNDISSWTKGRSGEALSLLKKRFSHRPVQEKFVCLNCGFETHADEQAALNIARSWLFLRSQEYKKYQTNKTTGNTDKRAFVETWQSFYRKKLKEVWKPAV

SEQ ID NO: 40903 - protein, 978 aa, synthetic construct
  REGION 1..978: note = engineered CasX variant
QEIKRINKIRRRLVKDSNTKKAGKTGPMKTLLVRVMTPDLRERLENLRKKPENIPQPISNTSRANLNKLLTDYTEMKKAILHVYWEEFQKDPVGLMSRVAQPASKKIDQNKLKPEMDEKGNLTTAGFACSQCGQPLFVYKLEQVSEKGKAYTNYFGRCNVAEHEKLILLDQLKPEKDSDEAVTYSLGKFGQRALDFYSIHVTKESTHPVKPLAQIAGNRYASVPVGKALSDACMGTIASFLSKYQDIIIEHQKVVKGNQKRLESLRELAGKENLEYPSVTLPPQPHTKEGVDAYNEVIARVRMWVNLNLWQKLKLSRDDAKPLLRLKGFPSFPLVERQANEVDWWDMVCNVKKLINEKKEDGKVFWQNLAGYKRQEALRPYLSSEEDRQKGKKFARYQLGDLLLHLEKKHGEDWGKVYDEAWERIDKKVEGLSKHIKLEEERRSEDAQSKAALTDWLRAKASFVIEGLKEADKDEFCRCELKLQKWYGDLRGKPFAIEAENSILDISGFSKQYNCAFIWQKDGVKKLNLYLIINYFKGGKLRFKKIKPEAFEANRFYTVINKKSGEIVPMEVNFNFDDPNLIILPLAFGKRQGREFIWNDLLSLETGSLKLANGRVIEKTLYNRRTRQDEPALFVALTFERREVLDSSNIKPMNLIGVDRGENIPAVIALTDPEGCPLSRFKDSLGNPTHILRIGESYKEKQRTIQAKKEVEQRRAGGYSRKYASKAKNLADDMVRNTARDLLYYAVTQDAMLIFENLSRGFGRQGKRTFMAERQYTRMEDWLTAKLAYEGLPSKTYLSKTLAQYTSKTCSNCGFTITSADYDRVLEKLKKTATGWMTTINGKELKVEGQITYYNRYKRQNVVKDLSVELDRLSEESVNNDISSWTKGRSGEALSLLKKRFSHRPVQEKFVCLNCGFETHADEQAALNIARSWLFLRSQEYKKYQTNKTTGNTDKRAFVETWQSFYRKKLKEVWKPAV

SEQ ID NO: 40904 - protein, 978 aa, synthetic construct
  REGION 1..978: note = engineered CasX variant
QEIKRINKIRRRLVKDSNTKKAGKTGPMKTLLVRVMTPDLRERLENLRKKPENIPQPISNTSRANLNKLLTDYTEMKKAILHVYWEEFQKDPVGLMSRVAQPASKKIDQNKLKPEMDEKGNLTTAGFACSQCGQPLFVYKLEQVSEKGKAYTNYFGRCNVAEHEKLIKLDQLKPEKDSDEAVTYSLGKFGQRALDFYSIHVTKESTHPVKPLAQIAGNRYASGPVGKALSDACMGTIASFLSKYQDIIIEHQKVVKGNQKRLESLRELAGKENLEYPSVTLPPQPHTKEGVDAYNEVIARVRMWVNLNLWQKLKLSRDDAKPLLRLKGFPSFPLVERQANEVDWWDMVCNVKKLINEKKEDGKVFWQNLAGYKRQEALRPYLSSEEDRQKGKKFARYQLGDLLLHLEKKHGEDWGKVYDEAWERIDKKVEGLSKHIKLEEERRSEDAQSKAALTDWLRAKASFVIEGLKEADKDEFCRCELKLQKWYGDLRGKPFAIEAENSILDISGFSKQYNCAFIWQKDGVKKLNLYLIINYFKGGKLRFKKIKPEAFEANRFYTVINKKSGEIVPMEVNFNFDDPNLIILPLAFGKRQGREFIWNDLLSLETGSLKLANGRVIEKTLYNRRTRQDEPALFVALTFERREVLDSSNIKPMNLIGVDRGENIPAVIALTDPEGCPLSRFKDSLGNPTHILRIGESYKEKQRTIQAKKEVEQRRAGGYSRKYASKAKNLADDMVRNTARDLLYYAVTQDAMLIFENLSRGFGRQGKRTFMAERQYTRMEDWLTAKLAYEGLPSKTYLSKTLAQYTSKTCSNCGFTITSADYDRVLEKLKKTATGWMTTINGKELKVEGQITYYNRYKRQNVVKDLSVELDRLSEESVNNDISSWTKGRSGEALSLLKKRFSHRPVQEKFVCLNCGFETHADEQAALNIARSWLFLRSQEYKKYQTNKTTGNTDKRAFVETWQSFYRKKLKEVWKPAV

SEQ ID NO: 40905 - protein, 977 aa, synthetic construct
  REGION 1..977: note = engineered CasX variant
QEIKRINKIRRRLVKDSNTKKAGKTGPMKTLLVRVMTPDLRERLENLRKKPENIPQPISNTSRANLNKLLTDYTEMKKAILHVYWEEFQKDPVGLMSRVAQPASKKIDQNKLKPEMDEKGNLTTAGFACSQCGQPLFVYKLEQVSEKGKAYTNYFGRCNVAEHEKLILLDQLKPEKDSDEAVTYSLGKFGQRALDFYSIHVTKESTHPVKPLAQIAGNRYASPVGKALSDACMGTIASFLSKYQDIIIEHQKVVKGNQKRLESLRELAGKENLEYPSVTLPPQPHTKEGVDAYNEVIARVRMWVNLNLWQKLKLSRDDAKPLLRLKGFPSFPLVERQANEVDWWDMVCNVKKLINEKKEDGKVFWQNLAGYKRQEALRPYLSSEEDRQKGKKFARYQLGDLLLHLEKKHGEDWGKVYDEAWERIDKKVEGLSKHIKLEEERRSEDAQSKAALTDWLRAKASFVIEGLKEADKDEFCRCELKLQKWYGDLRGKPFAIEAENSILDISGFSKQYNCAFIWQKDGVKKLNLYLIINYFKGGKLRFKKIKPEAFEANRFYTVINKKSGEIVPMEVNFNFDDPNLIILPLAFGKRQGREFIWNDLLSLETGSLKLANGRVIEKTLYNRRTRQDEPALFVALTFERREVLDSSNIKPMNLIGVDRGENIPAVIALTDPEGCPLSRFKDSLGNPTHILRIGESYKEKQRTIQAKKEVEQRRAGGYSRKYASKAKNLADDMVRNTARDLLYYAVTQDAMLIFENLSRGFGRQGKRTFMAERQYTRMEDWLTAKLAYEGLPSKTYLSKTLAQYTSKTCSNCGFTITSADYDRVLEKLKKTATGWMTTINGKELKVEGQITYYNRYKRQNVVKDLSVELDRLSEESVNNDISSWTKGRSGEALSLLKKRFSHRPVQEKFVCLNCGFETHADEQAALNIARSWLFLRSQEYKKYQTNKTTGNTDKRAFVETWQSFYRKKLKEVWKPAV

SEQ ID NO: 40906 - protein, 978 aa, synthetic construct
  REGION 1..978: note = engineered CasX variant
QEIKRINKIRRRLVKDSNTKKAGKTGPMKTLLVRVMTPDLRERLENLRKKPENIPQPISNTSRANLNKLLTDYTEMKKAILHVYWEEFQKDPVGLMSRVAQPASKKIDQNKLKPEMDEKGNLTTAGFACSQCGQPLFVYKLEQVSEKGKAYTNYFGRCNVAEHEKLILLDQLKPEKDSDEAVTYSLGKFGQRALDFYSIHVTKESTHPVKPLAQIAGNRYASYPVGKALSDACMGTIASFLSKYQDIIIEHQKVVKGNQKRLESLRELAGKENLEYPSVTLPPQPHTKEGVDAYNEVIARVRMWVNLNLWQKLKLSRDDAKPLLRLKGFPSFPLVERQANEVDWWDMVCNVKKLINEKKEDGKVFWQNLAGYKRQEALRPYLSSEEDRKKGKKFARYQLGDLLLHLEKKHGEDWGKVYDEAWERIDKKVEGLSKHIKLEEERRSEDAQSKAALTDWLRAKASFVIEGLKEADKDEFCRCELKLQKWYGDLRGKPFAIEAENSILDISGFSKQYNCAFIWQKDGVKKLNLYLIINYFKGGKLRFKKIKPEAFEANRFYTVINKKSGEIVPMEVNFNFDDPNLIILPLAFGKRQGREFIWNDLLSLETGSLKLANGRVIEKTLYNRRTRQDEPALFVALTFERREVLDSSNIKPMNLIGVDRGENIPAVIALTDPEGCPLSRFKDSLGNPTHILRIGESYKEKQRTIQAKKEVEQRRAGGYSRKYASKAKNLADDMVRNTARDLLYYAVTQDAMLIFENLSRGFGRQGKRTFMAERQYTRMEDWLTAKLAYEGLPSQTYLSKTLAQYTSKTCSNCGFTITSADYDRVLEKLKKTATGWMTTINGKELKVEGQITYYNRYKRQNVVKDLSVELDRLSEESVNNDISSWTKGRSGEALSLLKKRFSHRPVQEKFVCLNCGFETHADEQAALNIARSWLFLRSQEYKKYQTNKTTGNTDKRAFVETWQSFYRKKLKEVWKPAV

SEQ ID NO: 40907 - protein, 978 aa, synthetic construct
  REGION 1..978: note = engineered CasX variant
QEIKRINKIRRRLVKDSNTKKAGKTGPMKTLLVRVMTPDLRERLENLRKKPENIPQPISNTSRANLNKLLTDYTEMKKAILHVYWEEFQKDPVGLMSRVAQPASKKIDQNKLKPEMDEKGNLTTAGFACSQCGQPLFVYKLEQVSEKGKAYTNYFGRCNVAEHEKLILLDQLKPEKDSDEAVTYSLGKFGQRALDFYSIHVTKESTHPVKPLAQIAGNRYASHPVGKALSDACMGTIASFLSKYQDIIIEHQKVVKGNQKRLESLRELAGKENLEYPSVTLPPQPHTKEGVDAYNEVIARVRMWVNLNLWQKLKLSRDDAKPLLRLKGFPSFPLVERQANEVDWWDMVCNVKKLINEKKEDGKVFWQNLAGYKRQEALRPYLSSEEDRKKGKKFARYQLGDLLLHLEKKHGEDWGKVYDEAWERIDKKVEGLSKHIKLEEERRSEDAQSKAALTDWLRAKASFVIEGLKEADKDEFCRCELKLQKWYGDLRGKPFAIEAENSILDISGFSKQYNCAFIWQKDGVKKLNLYLIINYFKGGKLRFKKIKPEAFEANRFYTVINKKSGEIVPMEVNFNFDDPNLIILPLAFGKRQGREFIWNDLLSLETGSLKLANGRVIEKTLYNRRTRQDEPALFVALTFERREVLDSSNIKPMNLIGVDRGENIPAVIALTDPEGCPLSRFKDSLGNPTHILRIGESYKEKQRTIQAKKEVEQRRAGGYSRKYASKAKNLADDMVRNTARDLLYYAVTQDAMLIFENLSRGFGRQGKRTFMAERQYTRMEDWLTAKLAYEGLPSQTYLSKTLAQYTSKTCSNCGFTITSADYDRVLEKLKKTATGWMTTINGKELKVEGQITYYNRYKRQNVVKDLSVELDRLSEESVNNDISSWTKGRSGEALSLLKKRFSHRPVQEKFVCLNCGFETHADEQAALNIARSWLFLRSQEYKKYQTNKTTGNTDKRAFVETWQSFYRKKLKEVWKPAV

SEQ ID NO: 40908 - protein, 978 aa, synthetic construct
  REGION 1..978: note = engineered CasX variant
QEIKRINKIRRRLVKDSNTKKAGKTGPMKTLLVRVMTPDLRERLENLRKKPENIPQPISNTSRANLNKLLTDYTEMKKAILHVYWEEFQKDPVGLMSRVAQPASKKIDQNKLKPEMDEKGNLTTAGFACSQCGQPLFVYKLEQVSEKGKAYTNYFGRCNVAEHEKLILLDQLKPEKDSDEAVTYSLGKFGQRALDFYSIHVTKESTHPVKPLAQIAGNRYASSPVGKALSDACMGTIASFLSKYQDIIIEHQKVVKGNQKRLESLRELAGKENLEYPSVTLPPQPHTKEGVDAYNEVIARVRMWVNLNLWQKLKLSRDDAKPLLRLKGFPSFPLVERQANEVDWWDMVCNVKKLINEKKEDGKVFWQNLAGYKRQEALRPYLSSEEDRKKGKKFARYQLGDLLLHLEKKHGEDWGKVYDEAWERIDKKVEGLSKHIKLEEERRSEDAQSKAALTDWLRAKASFVIEGLKEADKDEFCRCELKLQKWYGDLRGKPFAIEAENSILDISGFSKQYNCAFIWQKDGVKKLNLYLIINYFKGGKLRFKKIKPEAFEANRFYTVINKKSGEIVPMEVNFNFDDPNLIILPLAFGKRQGREFIWNDLLSLETGSLKLANGRVIEKTLYNRRTRQDEPALFVALTFERREVLDSSNIKPMNLIGVDRGENIPAVIALTDPEGCPLSRFKDSLGNPTHILRIGESYKEKQRTIQAKKEVEQRRAGGYSRKYASKAKNLADDMVRNTARDLLYYAVTQDAMLIFENLSRGFGRQGKRTFMAERQYTRMEDWLTAKLAYEGLPSQTYLSKTLAQYTSKTCSNCGFTITSADYDRVLEKLKKTATGWMTTINGKELKVEGQITYYNRYKRQNVVKDLSVELDRLSEESVNNDISSWTKGRSGEALSLLKKRFSHRPVQEKFVCLNCGFETHADEQAALNIARSWLFLRSQEYKKYQTNKTTGNTDKRAFVETWQSFYRKKLKEVWKPAV

SEQ ID NO: 40909 - protein, 978 aa, synthetic construct
  REGION 1..978: note = engineered CasX variant
QEIKRINKIRRRLVKDSNTKKAGKTGPMKTLLVRVMTPDLRERLENLRKKPENIPQPISNTSRANLNKLLTDYTEMKKAILHVYWEEFQKDPVGLMSRVAQPASKKIDQNKLKPEMDEKGNLTTAGFACSQCGQPLFVYKLEQVSEKGKAYTNYFGRCNVAEHEKLILLDQLKPEKDSDEAVTYSLGKFGQRALDFYSIHVTKESTHPVKPLAQIAGNRYASTPVGKALSDACMGTIASFLSKYQDIIIEHQKVVKGNQKRLESLRELAGKENLEYPSVTLPPQPHTKEGVDAYNEVIARVRMWVNLNLWQKLKLSRDDAKPLLRLKGFPSFPLVERQANEVDWWDMVCNVKKLINEKKEDGKVFWQNLAGYKRQEALRPYLSSEEDRKKGKKFARYQLGDLLLHLEKKHGEDWGKVYDEAWERIDKKVEGLSKHIKLEEERRSEDAQSKAALTDWLRAKASFVIEGLKEADKDEFCRCELKLQKWYGDLRGKPFAIEAENSILDISGFSKQYNCAFIWQKDGVKKLNLYLIINYFKGGKLRFKKIKPEAFEANRFYTVINKKSGEIVPMEVNFNFDDPNLIILPLAFGKRQGREFIWNDLLSLETGSLKLANGRVIEKTLYNRRTRQDEPALFVALTFERREVLDSSNIKPMNLIGVDRGENIPAVIALTDPEGCPLSRFKDSLGNPTHILRIGESYKEKQRTIQAKKEVEQRRAGGYSRKYASKAKNLADDMVRNTARDLLYYAVTQDAMLIFENLSRGFGRQGKRTFMAERQYTRMEDWLTAKLAYEGLPSQTYLSKTLAQYTSKTCSNCGFTITSADYDRVLEKLKKTATGWMTTINGKELKVEGQITYYNRYKRQNVVKDLSVELDRLSEESVNNDISSWTKGRSGEALSLLKKRFSHRPVQEKFVCLNCGFETHADEQAALNIARSWLFLRSQEYKKYQTNKTTGNTDKRAFVETWQSFYRKKLKEVWKPAV

SEQ ID NO: 40910 - protein, 978 aa, synthetic construct
  REGION 1..978: note = engineered CasX variant
QEIKRINKIRRRLVKDSNTKKAGKTGPMKTLLVRVMTPDLRERLENLRKKPENIPQPISNTSRANLNKLLTDYTEMKKAILHVYWEEFQKDPVGLMSRVAQPASKKIDQNKLKPEMDEKGNLTTAGFACSQCGQPLFVYKLEQVSEKGKAYTNYFGRCNVAEHEKLILLDQLKPEKDSDEAVTYSLGKFGQRALDFYSIHVTKESTHPVKPLAQIAGNRYASAPVGKALSDACMGTIASFLSKYQDIIIEHQKVVKGNQKRLESLRELAGKENLEYPSVTLPPQPHTKEGVDAYNEVIARVRMWVNLNLWQKLKLSRDDAKPLLRLKGFPSFPLVERQANEVDWWDMVCNVKKLINEKKEDGKVFWQNLAGYKRQEALRPYLSSEEDRKKGKKFARYQLGDLLLHLEKKHGEDWGKVYDEAWERIDKKVEGLSKHIKLEEERRSEDAQSKAALTDWLRAKASFVIEGLKEADKDEFCRCELKLQKWYGDLRGKPFAIEAENSILDISGFSKQYNCAFIWQKDGVKKLNLYLIINYFKGGKLRFKKIKPEAFEANRFYTVINKKSGEIVPMEVNFNFDDPNLIILPLAFGKRQGREFIWNDLLSLETGSLKLANGRVIEKTLYNRRTRQDEPALFVALTFERREVLDSSNIKPMNLIGVDRGENIPAVIALTDPEGCPLSRFKDSLGNPTHILRIGESYKEKQRTIQAKKEVEQRRAGGYSRKYASKAKNLADDMVRNTARDLLYYAVTQDAMLIFENLSRGFGRQGKRTFMAERQYTRMEDWLTAKLAYEGLPSQTYLSKTLAQYTSKTCSNCGFTITSADYDRVLEKLKKTATGWMTTINGKELKVEGQITYYNRYKRQNVVKDLSVELDRLSEESVNNDISSWTKGRSGEALSLLKKRFSHRPVQEKFVCLNCGFETHADEQAALNIARSWLFLRSQEYKKYQTNKTTGNTDKRAFVETWQSFYRKKLKEVWKPAV

SEQ ID NO: 40911 - protein, 978 aa, synthetic construct
  REGION 1..978: note = engineered CasX variant
QEIKRINKIRRRLVKDSNTKKAGKTGPMKTLLVRVMTPDLRERLENLRKKPENIPQPISNTSRANLNKLLTDYTEMKKAILHVYWEEFQKDPVGLMSRVAQPASKKIDQNKLKPEMDEKGNLTTAGFACSQCGQPLFVYKLEQVSEKGKAYTNYFGRCNVAEHEKLILLDQLKPEKDSDEAVTYSLGKFGQRALDFYSIHVTKESTHPVKPLAQIAGNRYASVPVGKALSDACMGTIASFLSKYQDIIIEHQKVVKGNQKRLESLRELAGKENLEYPSVTLPPQPHTKEGVDAYNEVIARVRMWVNLNLWQKLKLSRDDAKPLLRLKGFPSFPLVERQANEVDWWDMVCNVKKLINEKKEDGKVFWQNLAGYKRQEALRPYLSSEEDRKKGKKFARYQLGDLLLHLEKKHGEDWGKVYDEAWERIDKKVEGLSKHIKLEEERRSEDAQSKAALTDWLRAKASFVIEGLKEADKDEFCRCELKLQKWYGDLRGKPFAIEAENSILDISGFSKQYNCAFIWQKDGVKKLNLYLIINYFKGGKLRFKKIKPEAFEANRFYTVINKKSGEIVPMEVNFNFDDPNLIILPLAFGKRQGREFIWNDLLSLETGSLKLANGRVIEKTLYNRRTRQDEPALFVALTFERREVLDSSNIKPMNLIGVDRGENIPAVIALTDPEGCPLSRFKDSLGNPTHILRIGESYKEKQRTIQAKKEVEQRRAGGYSRKYASKAKNLADDMVRNTARDLLYYAVTQDAMLIFENLSRGFGRQGKRTFMAERQYTRMEDWLTAKLAYEGLPSQTYLSKTLAQYTSKTCSNCGFTITSADYDRVLEKLKKTATGWMTTINGKELKVEGQITYYNRYKRQNVVKDLSVELDRLSEESVNNDISSWTKGRSGEALSLLKKRFSHRPVQEKFVCLNCGFETHADEQAALNIARSWLFLRSQEYKKYQTNKTTGNTDKRAFVETWQSFYRKKLKEVWKPAV

SEQ ID NO: 40912 - protein, 978 aa, synthetic construct
  REGION 1..978: note = engineered CasX variant
QEIKRINKIRRRLVKDSNTKKAGKTGPMKTLLVRVMTPDLRERLENLRKKPENIPQPISNTSRANLNKLLTDYTEMKKAILHVYWEEFQKDPVGLMSRVAQPASKKIDQNKLKPEMDEKGNLTTAGFACSQCGQPLFVYKLEQVSEKGKAYTNYFGRCNVAEHEKLIKLDQLKPEKDSDEAVTYSLGKFGQRALDFYSIHVTKESTHPVKPLAQIAGNRYASGPVGKALSDACMGTIASFLSKYQDIIIEHQKVVKGNQKRLESLRELAGKENLEYPSVTLPPQPHTKEGVDAYNEVIARVRMWVNLNLWQKLKLSRDDAKPLLRLKGFPSFPLVERQANEVDWWDMVCNVKKLINEKKEDGKVFWQNLAGYKRQEALRPYLSSEEDRKKGKKFARYQLGDLLLHLEKKHGEDWGKVYDEAWERIDKKVEGLSKHIKLEEERRSEDAQSKAALTDWLRAKASFVIEGLKEADKDEFCRCELKLQKWYGDLRGKPFAIEAENSILDISGFSKQYNCAFIWQKDGVKKLNLYLIINYFKGGKLRFKKIKPEAFEANRFYTVINKKSGEIVPMEVNFNFDDPNLIILPLAFGKRQGREFIWNDLLSLETGSLKLANGRVIEKTLYNRRTRQDEPALFVALTFERREVLDSSNIKPMNLIGVDRGENIPAVIALTDPEGCPLSRFKDSLGNPTHILRIGESYKEKQRTIQAKKEVEQRRAGGYSRKYASKAKNLADDMVRNTARDLLYYAVTQDAMLIFENLSRGFGRQGKRTFMAERQYTRMEDWLTAKLAYEGLPSQTYLSKTLAQYTSKTCSNCGFTITSADYDRVLEKLKKTATGWMTTINGKELKVEGQITYYNRYKRQNVVKDLSVELDRLSEESVNNDISSWTKGRSGEALSLLKKRFSHRPVQEKFVCLNCGFETHADEQAALNIARSWLFLRSQEYKKYQTNKTTGNTDKRAFVETWQSFYRKKLKEVWKPAV

SEQ ID NO: 40913 - protein, 977 aa, synthetic construct
  REGION 1..977: note = engineered CasX variant
QEIKRINKIRRRLVKDSNTKKAGKTGPMKTLLVRVMTPDLRERLENLRKKPENIPQPISNTSRANLNKLLTDYTEMKKAILHVYWEEFQKDPVGLMSRVAQPASKKIDQNKLKPEMDEKGNLTTAGFACSQCGQPLFVYKLEQVSEKGKAYTNYFGRCNVAEHEKLILLDQLKPEKDSDEAVTYSLGKFGQRALDFYSIHVTKESTHPVKPLAQIAGNRYASPVGKALSDACMGTIASFLSKYQDIIIEHQKVVKGNQKRLESLRELAGKENLEYPSVTLPPQPHTKEGVDAYNEVIARVRMWVNLNLWQKLKLSRDDAKPLLRLKGFPSFPLVERQANEVDWWDMVCNVKKLINEKKEDGKVFWQNLAGYKRQEALRPYLSSEEDRKKGKKFARYQLGDLLLHLEKKHGEDWGKVYDEAWERIDKKVEGLSKHIKLEEERRSEDAQSKAALTDWLRAKASFVIEGLKEADKDEFCRCELKLQKWYGDLRGKPFAIEAENSILDISGFSKQYNCAFIWQKDGVKKLNLYLIINYFKGGKLRFKKIKPEAFEANRFYTVINKKSGEIVPMEVNFNFDDPNLIILPLAFGKRQGREFIWNDLLSLETGSLKLANGRVIEKTLYNRRTRQDEPALFVALTFERREVLDSSNIKPMNLIGVDRGENIPAVIALTDPEGCPLSRFKDSLGNPTHILRIGESYKEKQRTIQAKKEVEQRRAGGYSRKYASKAKNLADDMVRNTARDLLYYAVTQDAMLIFENLSRGFGRQGKRTFMAERQYTRMEDWLTAKLAYEGLPSQTYLSKTLAQYTSKTCSNCGFTITSADYDRVLEKLKKTATGWMTTINGKELKVEGQITYYNRYKRQNVVKDLSVELDRLSEESVNNDISSWTKGRSGEALSLLKKRFSHRPVQEKFVCLNCGFETHADEQAALNIARSWLFLRSQEYKKYQTNKTTGNTDKRAFVETWQSFYRKKLKEVWKPAV

SEQ ID NO: 40914 - protein, 978 aa, synthetic construct
  REGION 1..978: note = engineered CasX variant
QEIKRINKIRRRLVKDSNTKKAGKTGPMKTLLVRVMTPDLRERLENLRKKPENIPQPISNTSRANLNKLLTDYTEMKKAILHVYWEEFQKDPVGLMSRVAQPASKKIDQNKLKPEMDEKGNLTTAGFACSQCGQPLFVYKLEQVSEKGKAYTNYFGRCNVAEHEKLILLDQLKPEKDSDEAVTYSLGKFGQRALDFYSIHVTKESTHPVKPLAQIAGNRYASYPVGKALSDACMGTIASFLSKYQDIIIEHQKVVKGNQKRLESLRELAGKENLEYPSVTLPPQPHTKEGVDAYNEVIARVRMWVNLNLWQKLKLSRDDAKPLLRLKGFPSFPLVERQANEVDWWDMVCNVKKLINEKKEDGKVFWQNLAGYKRQEALRPYLSSEEDRKKGKKFARYQLGDLLLHLEKKHGEDWGKVYDEAWERIDKKVEGLSKHIKLEEERRSEDAQSKAALTDWLRAKASFVIEGLKEADKDEFCRCELKLQKWYGDLRGKPFAIEAENSILDISGFSKQYNCAFIWQKDGVKKLNLYLIINYFKGGKLRFKKIKPEAFEANRFYTVINKKSGEIVPMEVNFNFDDPNLIILPLAFGKRQGREFIWNDLLSLETGSLKLANGRVIEKTLYNRRTRQDEPALFVALTFERREVLDSSNIKPMNLIGVDRGENIPAVIALTDPEGCPLSRFKDSLGNPTHILRIGESYKEKQRTIQAKKEVEQRRAGGYSRKYASKAKNLADDMVRNTARDLLYYAVTQDAMLIFENLSRGFGRQGKRTFMAERQYTRMEDWLTAKLAYNGLPSKTYLSKTLAQYTSKTCSNCGFTITSADYDRVLEKLKKTATGWMTTINGKELKVEGQITYYNRYKRQNVVKDLSVELDRLSEESVNNDISSWTKGRSGEALSLLKKRFSHRPVQEKFVCLNCGFETHADEQAALNIARSWLFLRSQEYKKYQTNKTTGNTDKRAFVETWQSFYRKKLKEVWKPAV

SEQ ID NO: 40915 - protein, 978 aa, synthetic construct
  REGION 1..978: note = engineered CasX variant
QEIKRINKIRRRLVKDSNTKKAGKTGPMKTLLVRVMTPDLRERLENLRKKPENIPQPISNTSRANLNKLLTDYTEMKKAILHVYWEEFQKDPVGLMSRVAQPASKKIDQNKLKPEMDEKGNLTTAGFACSQCGQPLFVYKLEQVSEKGKAYTNYFGRCNVAEHEKLILLDQLKPEKDSDEAVTYSLGKFGQRALDFYSIHVTKESTHPVKPLAQIAGNRYASHPVGKALSDACMGTIASFLSKYQDIIIEHQKVVKGNQKRLESLRELAGKENLEYPSVTLPPQPHTKEGVDAYNEVIARVRMWVNLNLWQKLKLSRDDAKPLLRLKGFPSFPLVERQANEVDWWDMVCNVKKLINEKKEDGKVFWQNLAGYKRQEALRPYLSSEEDRKKGKKFARYQLGDLLLHLEKKHGEDWGKVYDEAWERIDKKVEGLSKHIKLEEERRSEDAQSKAALTDWLRAKASFVIEGLKEADKDEFCRCELKLQKWYGDLRGKPFAIEAENSILDISGFSKQYNCAFIWQKDGVKKLNLYLIINYFKGGKLRFKKIKPEAFEANRFYTVINKKSGEIVPMEVNFNFDDPNLIILPLAFGKRQGREFIWNDLLSLETGSLKLANGRVIEKTLYNRRTRQDEPALFVALTFERREVLDSSNIKPMNLIGVDRGENIPAVIALTDPEGCPLSRFKDSLGNPTHILRIGESYKEKQRTIQAKKEVEQRRAGGYSRKYASKAKNLADDMVRNTARDLLYYAVTQDAMLIFENLSRGFGRQGKRTFMAERQYTRMEDWLTAKLAYNGLPSKTYLSKTLAQYTSKTCSNCGFTITSADYDRVLEKLKKTATGWMTTINGKELKVEGQITYYNRYKRQNVVKDLSVELDRLSEESVNNDISSWTKGRSGEALSLLKKRFSHRPVQEKFVCLNCGFETHADEQAALNIARSWLFLRSQEYKKYQTNKTTGNTDKRAFVETWQSFYRKKLKEVWKPAV

SEQ ID NO: 40916 - protein, 978 aa, synthetic construct
  REGION 1..978: note = engineered CasX variant
QEIKRINKIRRRLVKDSNTKKAGKTGPMKTLLVRVMTPDLRERLENLRKKPENIPQPISNTSRANLNKLLTDYTEMKKAILHVYWEEFQKDPVGLMSRVAQPASKKIDQNKLKPEMDEKGNLTTAGFACSQCGQPLFVYKLEQVSEKGKAYTNYFGRCNVAEHEKLILLDQLKPEKDSDEAVTYSLGKFGQRALDFYSIHVTKESTHPVKPLAQIAGNRYASSPVGKALSDACMGTIASFLSKYQDIIIEHQKVVKGNQKRLESLRELAGKENLEYPSVTLPPQPHTKEGVDAYNEVIARVRMWVNLNLWQKLKLSRDDAKPLLRLKGFPSFPLVERQANEVDWWDMVCNVKKLINEKKEDGKVFWQNLAGYKRQEALRPYLSSEEDRKKGKKFARYQLGDLLLHLEKKHGEDWGKVYDEAWERIDKKVEGLSKHIKLEEERRSEDAQSKAALTDWLRAKASFVIEGLKEADKDEFCRCELKLQKWYGDLRGKPFAIEAENSILDISGFSKQYNCAFIWQKDGVKKLNLYLIINYFKGGKLRFKKIKPEAFEANRFYTVINKKSGEIVPMEVNFNFDDPNLIILPLAFGKRQGREFIWNDLLSLETGSLKLANGRVIEKTLYNRRTRQDEPALFVALTFERREVLDSSNIKPMNLIGVDRGENIPAVIALTDPEGCPLSRFKDSLGNPTHILRIGESYKEKQRTIQAKKEVEQRRAGGYSRKYASKAKNLADDMVRNTARDLLYYAVTQDAMLIFENLSRGFGRQGKRTFMAERQYTRMEDWLTAKLAYNGLPSKTYLSKTLAQYTSKTCSNCGFTITSADYDRVLEKLKKTATGWMTTINGKELKVEGQITYYNRYKRQNVVKDLSVELDRLSEESVNNDISSWTKGRSGEALSLLKKRFSHRPVQEKFVCLNCGFETHADEQAALNIARSWLFLRSQEYKKYQTNKTTGNTDKRAFVETWQSFYRKKLKEVWKPAV

SEQ ID NO: 40917 - protein, 978 aa, synthetic construct
  REGION 1..978: note = engineered CasX variant
QEIKRINKIRRRLVKDSNTKKAGKTGPMKTLLVRVMTPDLRERLENLRKKPENIPQPISNTSRANLNKLLTDYTEMKKAILHVYWEEFQKDPVGLMSRVAQPASKKIDQNKLKPEMDEKGNLTTAGFACSQCGQPLFVYKLEQVSEKGKAYTNYFGRCNVAEHEKLILLDQLKPEKDSDEAVTYSLGKFGQRALDFYSIHVTKESTHPVKPLAQIAGNRYASTPVGKALSDACMGTIASFLSKYQDIIIEHQKVVKGNQKRLESLRELAGKENLEYPSVTLPPQPHTKEGVDAYNEVIARVRMWVNLNLWQKLKLSRDDAKPLLRLKGFPSFPLVERQANEVDWWDMVCNVKKLINEKKEDGKVFWQNLAGYKRQEALRPYLSSEEDRKKGKKFARYQLGDLLLHLEKKHGEDWGKVYDEAWERIDKKVEGLSKHIKLEEERRSEDAQSKAALTDWLRAKASFVIEGLKEADKDEFCRCELKLQKWYGDLRGKPFAIEAENSILDISGFSKQYNCAFIWQKDGVKKLNLYLIINYFKGGKLRFKKIKPEAFEANRFYTVINKKSGEIVPMEVNFNFDDPNLIILPLAFGKRQGREFIWNDLLSLETGSLKLANGRVIEKTLYNRRTRQDEPALFVALTFERREVLDSSNIKPMNLIGVDRGENIPAVIALTDPEGCPLSRFKDSLGNPTHILRIGESYKEKQRTIQAKKEVEQRRAGGYSRKYASKAKNLADDMVRNTARDLLYYAVTQDAMLIFENLSRGFGRQGKRTFMAERQYTRMEDWLTAKLAYNGLPSKTYLSKTLAQYTSKTCSNCGFTITSADYDRVLEKLKKTATGWMTTINGKELKVEGQITYYNRYKRQNVVKDLSVELDRLSEESVNNDISSWTKGRSGEALSLLKKRFSHRPVQEKFVCLNCGFETHADEQAALNIARSWLFLRSQEYKKYQTNKTTGNTDKRAFVETWQSFYRKKLKEVWKPAV

SEQ ID NO: 40918 - protein, 978 aa, synthetic construct
  REGION 1..978: note = engineered CasX variant
QEIKRINKIRRRLVKDSNTKKAGKTGPMKTLLVRVMTPDLRERLENLRKKPENIPQPISNTSRANLNKLLTDYTEMKKAILHVYWEEFQKDPVGLMSRVAQPASKKIDQNKLKPEMDEKGNLTTAGFACSQCGQPLFVYKLEQVSEKGKAYTNYFGRCNVAEHEKLILLDQLKPEKDSDEAVTYSLGKFGQRALDFYSIHVTKESTHPVKPLAQIAGNRYASAPVGKALSDACMGTIASFLSKYQDIIIEHQKVVKGNQKRLESLRELAGKENLEYPSVTLPPQPHTKEGVDAYNEVIARVRMWVNLNLWQKLKLSRDDAKPLLRLKGFPSFPLVERQANEVDWWDMVCNVKKLINEKKEDGKVFWQNLAGYKRQEALRPYLSSEEDRKKGKKFARYQLGDLLLHLEKKHGEDWGKVYDEAWERIDKKVEGLSKHIKLEEERRSEDAQSKAALTDWLRAKASFVIEGLKEADKDEFCRCELKLQKWYGDLRGKPFAIEAENSILDISGFSKQYNCAFIWQKDGVKKLNLYLIINYFKGGKLRFKKIKPEAFEANRFYTVINKKSGEIVPMEVNFNFDDPNLIILPLAFGKRQGREFIWNDLLSLETGSLKLANGRVIEKTLYNRRTRQDEPALFVALTFERREVLDSSNIKPMNLIGVDRGENIPAVIALTDPEGCPLSRFKDSLGNPTHILRIGESYKEKQRTIQAKKEVEQRRAGGYSRKYASKAKNLADDMVRNTARDLLYYAVTQDAMLIFENLSRGFGRQGKRTFMAERQYTRMEDWLTAKLAYNGLPSKTYLSKTLAQYTSKTCSNCGFTITSADYDRVLEKLKKTATGWMTTINGKELKVEGQITYYNRYKRQNVVKDLSVELDRLSEESVNNDISSWTKGRSGEALSLLKKRFSHRPVQEKFVCLNCGFETHADEQAALNIARSWLFLRSQEYKKYQTNKTTGNTDKRAFVETWQSFYRKKLKEVWKPAV

SEQ ID NO: 40919 - protein, 978 aa, synthetic construct
  REGION 1..978: note = engineered CasX variant
QEIKRINKIRRRLVKDSNTKKAGKTGPMKTLLVRVMTPDLRERLENLRKKPENIPQPISNTSRANLNKLLTDYTEMKKAILHVYWEEFQKDPVGLMSRVAQPASKKIDQNKLKPEMDEKGNLTTAGFACSQCGQPLFVYKLEQVSEKGKAYTNYFGRCNVAEHEKLILLDQLKPEKDSDEAVTYSLGKFGQRALDFYSIHVTKESTHPVKPLAQIAGNRYASVPVGKALSDACMGTIASFLSKYQDIIIEHQKVVKGNQKRLESLRELAGKENLEYPSVTLPPQPHTKEGVDAYNEVIARVRMWVNLNLWQKLKLSRDDAKPLLRLKGFPSFPLVERQANEVDWWDMVCNVKKLINEKKEDGKVFWQNLAGYKRQEALRPYLSSEEDRKKGKKFARYQLGDLLLHLEKKHGEDWGKVYDEAWERIDKKVEGLSKHIKLEEERRSEDAQSKAALTDWLRAKASFVIEGLKEADKDEFCRCELKLQKWYGDLRGKPFAIEAENSILDISGFSKQYNCAFIWQKDGVKKLNLYLIINYFKGGKLRFKKIKPEAFEANRFYTVINKKSGEIVPMEVNFNFDDPNLIILPLAFGKRQGREFIWNDLLSLETGSLKLANGRVIEKTLYNRRTRQDEPALFVALTFERREVLDSSNIKPMNLIGVDRGENIPAVIALTDPEGCPLSRFKDSLGNPTHILRIGESYKEKQRTIQAKKEVEQRRAGGYSRKYASKAKNLADDMVRNTARDLLYYAVTQDAMLIFENLSRGFGRQGKRTFMAERQYTRMEDWLTAKLAYNGLPSKTYLSKTLAQYTSKTCSNCGFTITSADYDRVLEKLKKTATGWMTTINGKELKVEGQITYYNRYKRQNVVKDLSVELDRLSEESVNNDISSWTKGRSGEALSLLKKRFSHRPVQEKFVCLNCGFETHADEQAALNIARSWLFLRSQEYKKYQTNKTTGNTDKRAFVETWQSFYRKKLKEVWKPAV

SEQ ID NO: 40920 - protein, 978 aa, synthetic construct
  REGION 1..978: note = engineered CasX variant
QEIKRINKIRRRLVKDSNTKKAGKTGPMKTLLVRVMTPDLRERLENLRKKPENIPQPISNTSRANLNKLLTDYTEMKKAILHVYWEEFQKDPVGLMSRVAQPASKKIDQNKLKPEMDEKGNLTTAGFACSQCGQPLFVYKLEQVSEKGKAYTNYFGRCNVAEHEKLIKLDQLKPEKDSDEAVTYSLGKFGQRALDFYSIHVTKESTHPVKPLAQIAGNRYASGPVGKALSDACMGTIASFLSKYQDIIIEHQKVVKGNQKRLESLRELAGKENLEYPSVTLPPQPHTKEGVDAYNEVIARVRMWVNLNLWQKLKLSRDDAKPLLRLKGFPSFPLVERQANEVDWWDMVCNVKKLINEKKEDGKVFWQNLAGYKRQEALRPYLSSEEDRKKGKKFARYQLGDLLLHLEKKHGEDWGKVYDEAWERIDKKVEGLSKHIKLEEERRSEDAQSKAALTDWLRAKASFVIEGLKEADKDEFCRCELKLQKWYGDLRGKPFAIEAENSILDISGFSKQYNCAFIWQKDGVKKLNLYLIINYFKGGKLRFKKIKPEAFEANRFYTVINKKSGEIVPMEVNFNFDDPNLIILPLAFGKRQGREFIWNDLLSLETGSLKLANGRVIEKTLYNRRTRQDEPALFVALTFERREVLDSSNIKPMNLIGVDRGENIPAVIALTDPEGCPLSRFKDSLGNPTHILRIGESYKEKQRTIQAKKEVEQRRAGGYSRKYASKAKNLADDMVRNTARDLLYYAVTQDAMLIFENLSRGFGRQGKRTFMAERQYTRMEDWLTAKLAYNGLPSKTYLSKTLAQYTSKTCSNCGFTITSADYDRVLEKLKKTATGWMTTINGKELKVEGQITYYNRYKRQNVVKDLSVELDRLSEESVNNDISSWTKGRSGEALSLLKKRFSHRPVQEKFVCLNCGFETHADEQAALNIARSWLFLRSQEYKKYQTNKTTGNTDKRAFVETWQSFYRKKLKEVWKPAV

SEQ ID NO: 40921 - protein, 977 aa, synthetic construct
  REGION 1..977: note = engineered CasX variant
QEIKRINKIRRRLVKDSNTKKAGKTGPMKTLLVRVMTPDLRERLENLRKKPENIPQPISNTSRANLNKLLTDYTEMKKAILHVYWEEFQKDPVGLMSRVAQPASKKIDQNKLKPEMDEKGNLTTAGFACSQCGQPLFVYKLEQVSEKGKAYTNYFGRCNVAEHEKLILLDQLKPEKDSDEAVTYSLGKFGQRALDFYSIHVTKESTHPVKPLAQIAGNRYASPVGKALSDACMGTIASFLSKYQDIIIEHQKVVKGNQKRLESLRELAGKENLEYPSVTLPPQPHTKEGVDAYNEVIARVRMWVNLNLWQKLKLSRDDAKPLLRLKGFPSFPLVERQANEVDWWDMVCNVKKLINEKKEDGKVFWQNLAGYKRQEALRPYLSSEEDRKKGKKFARYQLGDLLLHLEKKHGEDWGKVYDEAWERIDKKVEGLSKHIKLEEERRSEDAQSKAALTDWLRAKASFVIEGLKEADKDEFCRCELKLQKWYGDLRGKPFAIEAENSILDISGFSKQYNCAFIWQKDGVKKLNLYLIINYFKGGKLRFKKIKPEAFEANRFYTVINKKSGEIVPMEVNFNFDDPNLIILPLAFGKRQGREFIWNDLLSLETGSLKLANGRVIEKTLYNRRTRQDEPALFVALTFERREVLDSSNIKPMNLIGVDRGENIPAVIALTDPEGCPLSRFKDSLGNPTHILRIGESYKEKQRTIQAKKEVEQRRAGGYSRKYASKAKNLADDMVRNTARDLLYYAVTQDAMLIFENLSRGFGRQGKRTFMAERQYTRMEDWLTAKLAYNGLPSKTYLSKTLAQYTSKTCSNCGFTITSADYDRVLEKLKKTATGWMTTINGKELKVEGQITYYNRYKRQNVVKDLSVELDRLSEESVNNDISSWTKGRSGEALSLLKKRFSHRPVQEKFVCLNCGFETHADEQAALNIARSWLFLRSQEYKKYQTNKTTGNTDKRAFVETWQSFYRKKLKEVWKPAV

SEQ ID NO: 40922 - protein, 978 aa, synthetic construct
  REGION 1..978: note = engineered CasX variant
QEIKRINKIRRRLVKDSNTKKAGKTGPMKTLLVRVMTPDLRERLENLRKKPENIPQPISNTSRANLNKLLTDYTEMKKAILHVYWEEFQKDPVGLMSRVAQPASKKIDQNKLKPEMDEKGNLTTAGFACSQCGQPLFVYKLEQVSEKGKAYTNYFGRCNVAEHEKLIQLDQLKPEKDSDEAVTYSLGKFGQRALDFYSIHVTKESTHPVKPLAQIAGNRYASYPVGKALSDACMGTIASFLSKYQDIIIEHQKVVKGNQKRLESLRELAGKENLEYPSVTLPPQPHTKEGVDAYNEVIARVRMWVNLNLWQKLKLSRDDAKPLLRLKGFPSFPLVERQANEVDWWDMVCNVKKLINEKKEDGKVFWQNLAGYKRQEALRPYLSSEEDRKKGKKFARYQLGDLLLHLEKKHGEDWGKVYDEAWERIDKKVEGLSKHIKLEEERRSEDAQSKAALTDWLRAKASFVIEGLKEADKDEFCRCELKLQKWYGDLRGKPFAIEAENSILDISGFSKQYNCAFIWQKDGVKKLNLYLIINYFKGGKLRFKKIKPEAFEANRFYTVINKKSGEIVPMEVNFNFDDPNLIILPLAFGKRQGREFIWNDLLSLETGSLKLANGRVIEKTLYNRRTRQDEPALFVALTFERREVLDSSNIKPMNLIGVDRGENIPAVIALTDPEGCPLSRFKDSLGNPTHILRIGESYKEKQRTIQAKKEVEQRRAGGYSRKYASKAKNLADDMVRNTARDLLYYAVTQDAMLIFENLSRGFGRQGKRTFMAERQYTRMEDWLTAKLAYEGLPSKTYLSKTLAQYTSKTCSNCGFTITSADYDRVLEKLKKTATGWMTTINGKELKVEGQITYYNRYKRQNVVKDLSVELDRLSEESVNNDISSWTKGRSGEALSLLKKRFSHRPVQEKFVCLNCGFETHADEQAALNIARSWLFLRSQEYKKYQTNKTTGNTDKRAFVETWQSFYRKKLKEVWKPAV

SEQ ID NO: 40923 - protein, 978 aa, synthetic construct
  REGION 1..978: note = engineered CasX variant
QEIKRINKIRRRLVKDSNTKKAGKTGPMKTLLVRVMTPDLRERLENLRKKPENIPQPISNTSRANLNKLLTDYTEMKKAILHVYWEEFQKDPVGLMSRVAQPASKKIDQNKLKPEMDEKGNLTTAGFACSQCGQPLFVYKLEQVSEKGKAYTNYFGRCNVAEHEKLIQLDQLKPEKDSDEAVTYSLGKFGQRALDFYSIHVTKESTHPVKPLAQIAGNRYASHPVGKALSDACMGTIASFLSKYQDIIIEHQKVVKGNQKRLESLRELAGKENLEYPSVTLPPQPHTKEGVDAYNEVIARVRMWVNLNLWQKLKLSRDDAKPLLRLKGFPSFPLVERQANEVDWWDMVCNVKKLINEKKEDGKVFWQNLAGYKRQEALRPYLSSEEDRKKGKKFARYQLGDLLLHLEKKHGEDWGKVYDEAWERIDKKVEGLSKHIKLEEERRSEDAQSKAALTDWLRAKASFVIEGLKEADKDEFCRCELKLQKWYGDLRGKPFAIEAENSILDISGFSKQYNCAFIWQKDGVKKLNLYLIINYFKGGKLRFKKIKPEAFEANRFYTVINKKSGEIVPMEVNFNFDDPNLIILPLAFGKRQGREFIWNDLLSLETGSLKLANGRVIEKTLYNRRTRQDEPALFVALTFERREVLDSSNIKPMNLIGVDRGENIPAVIALTDPEGCPLSRFKDSLGNPTHILRIGESYKEKQRTIQAKKEVEQRRAGGYSRKYASKAKNLADDMVRNTARDLLYYAVTQDAMLIFENLSRGFGRQGKRTFMAERQYTRMEDWLTAKLAYEGLPSKTYLSKTLAQYTSKTCSNCGFTITSADYDRVLEKLKKTATGWMTTINGKELKVEGQITYYNRYKRQNVVKDLSVELDRLSEESVNNDISSWTKGRSGEALSLLKKRFSHRPVQEKFVCLNCGFETHADEQAALNIARSWLFLRSQEYKKYQTNKTTGNTDKRAFVETWQSFYRKKLKEVWKPAV

SEQ ID NO: 40924 - protein, 978 aa, synthetic construct
  REGION 1..978: note = engineered CasX variant
QEIKRINKIRRRLVKDSNTKKAGKTGPMKTLLVRVMTPDLRERLENLRKKPENIPQPISNTSRANLNKLLTDYTEMKKAILHVYWEEFQKDPVGLMSRVAQPASKKIDQNKLKPEMDEKGNLTTAGFACSQCGQPLFVYKLEQVSEKGKAYTNYFGRCNVAEHEKLIQLDQLKPEKDSDEAVTYSLGKFGQRALDFYSIHVTKESTHPVKPLAQIAGNRYASSPVGKALSDACMGTIASFLSKYQDIIIEHQKVVKGNQKRLESLRELAGKENLEYPSVTLPPQPHTKEGVDAYNEVIARVRMWVNLNLWQKLKLSRDDAKPLLRLKGFPSFPLVERQANEVDWWDMVCNVKKLINEKKEDGKVFWQNLAGYKRQEALRPYLSSEEDRKKGKKFARYQLGDLLLHLEKKHGEDWGKVYDEAWERIDKKVEGLSKHIKLEEERRSEDAQSKAALTDWLRAKASFVIEGLKEADKDEFCRCELKLQKWYGDLRGKPFAIEAENSILDISGFSKQYNCAFIWQKDGVKKLNLYLIINYFKGGKLRFKKIKPEAFEANRFYTVINKKSGEIVPMEVNFNFDDPNLIILPLAFGKRQGREFIWNDLLSLETGSLKLANGRVIEKTLYNRRTRQDEPALFVALTFERREVLDSSNIKPMNLIGVDRGENIPAVIALTDPEGCPLSRFKDSLGNPTHILRIGESYKEKQRTIQAKKEVEQRRAGGYSRKYASKAKNLADDMVRNTARDLLYYAVTQDAMLIFENLSRGFGRQGKRTFMAERQYTRMEDWLTAKLAYEGLPSKTYLSKTLAQYTSKTCSNCGFTITSADYDRVLEKLKKTATGWMTTINGKELKVEGQITYYNRYKRQNVVKDLSVELDRLSEESVNNDISSWTKGRSGEALSLLKKRFSHRPVQEKFVCLNCGFETHADEQAALNIARSWLFLRSQEYKKYQTNKTTGNTDKRAFVETWQSFYRKKLKEVWKPAV

SEQ ID NO: 40925 - protein, 978 aa, synthetic construct
  REGION 1..978: note = engineered CasX variant
QEIKRINKIRRRLVKDSNTKKAGKTGPMKTLLVRVMTPDLRERLENLRKKPENIPQPISNTSRANLNKLLTDYTEMKKAILHVYWEEFQKDPVGLMSRVAQPASKKIDQNKLKPEMDEKGNLTTAGFACSQCGQPLFVYKLEQVSEKGKAYTNYFGRCNVAEHEKLIQLDQLKPEKDSDEAVTYSLGKFGQRALDFYSIHVTKESTHPVKPLAQIAGNRYASTPVGKALSDACMGTIASFLSKYQDIIIEHQKVVKGNQKRLESLRELAGKENLEYPSVTLPPQPHTKEGVDAYNEVIARVRMWVNLNLWQKLKLSRDDAKPLLRLKGFPSFPLVERQANEVDWWDMVCNVKKLINEKKEDGKVFWQNLAGYKRQEALRPYLSSEEDRKKGKKFARYQLGDLLLHLEKKHGEDWGKVYDEAWERIDKKVEGLSKHIKLEEERRSEDAQSKAALTDWLRAKASFVIEGLKEADKDEFCRCELKLQKWYGDLRGKPFAIEAENSILDISGFSKQYNCAFIWQKDGVKKLNLYLIINYFKGGKLRFKKIKPEAFEANRFYTVINKKSGEIVPMEVNFNFDDPNLIILPLAFGKRQGREFIWNDLLSLETGSLKLANGRVIEKTLYNRRTRQDEPALFVALTFERREVLDSSNIKPMNLIGVDRGENIPAVIALTDPEGCPLSRFKDSLGNPTHILRIGESYKEKQRTIQAKKEVEQRRAGGYSRKYASKAKNLADDMVRNTARDLLYYAVTQDAMLIFENLSRGFGRQGKRTFMAERQYTRMEDWLTAKLAYEGLPSKTYLSKTLAQYTSKTCSNCGFTITSADYDRVLEKLKKTATGWMTTINGKELKVEGQITYYNRYKRQNVVKDLSVELDRLSEESVNNDISSWTKGRSGEALSLLKKRFSHRPVQEKFVCLNCGFETHADEQAALNIARSWLFLRSQEYKKYQTNKTTGNTDKRAFVETWQSFYRKKLKEVWKPAV

SEQ ID NO: 40926 - protein, 978 aa, synthetic construct
  REGION 1..978: note = engineered CasX variant
QEIKRINKIRRRLVKDSNTKKAGKTGPMKTLLVRVMTPDLRERLENLRKKPENIPQPISNTSRANLNKLLTDYTEMKKAILHVYWEEFQKDPVGLMSRVAQPASKKIDQNKLKPEMDEKGNLTTAGFACSQCGQPLFVYKLEQVSEKGKAYTNYFGRCNVAEHEKLIQLDQLKPEKDSDEAVTYSLGKFGQRALDFYSIHVTKESTHPVKPLAQIAGNRYASAPVGKALSDACMGTIASFLSKYQDIIIEHQKVVKGNQKRLESLRELAGKENLEYPSVTLPPQPHTKEGVDAYNEVIARVRMWVNLNLWQKLKLSRDDAKPLLRLKGFPSFPLVERQANEVDWWDMVCNVKKLINEKKEDGKVFWQNLAGYKRQEALRPYLSSEEDRKKGKKFARYQLGDLLLHLEKKHGEDWGKVYDEAWERIDKKVEGLSKHIKLEEERRSEDAQSKAALTDWLRAKASFVIEGLKEADKDEFCRCELKLQKWYGDLRGKPFAIEAENSILDISGFSKQYNCAFIWQKDGVKKLNLYLIINYFKGGKLRFKKIKPEAFEANRFYTVINKKSGEIVPMEVNFNFDDPNLIILPLAFGKRQGREFIWNDLLSLETGSLKLANGRVIEKTLYNRRTRQDEPALFVALTFERREVLDSSNIKPMNLIGVDRGENIPAVIALTDPEGCPLSRFKDSLGNPTHILRIGESYKEKQRTIQAKKEVEQRRAGGYSRKYASKAKNLADDMVRNTARDLLYYAVTQDAMLIFENLSRGFGRQGKRTFMAERQYTRMEDWLTAKLAYEGLPSKTYLSKTLAQYTSKTCSNCGFTITSADYDRVLEKLKKTATGWMTTINGKELKVEGQITYYNRYKRQNVVKDLSVELDRLSEESVNNDISSWTKGRSGEALSLLKKRFSHRPVQEKFVCLNCGFETHADEQAALNIARSWLFLRSQEYKKYQTNKTTGNTDKRAFVETWQSFYRKKLKEVWKPAV

SEQ ID NO: 40927 - protein, 978 aa, synthetic construct
  REGION 1..978: note = engineered CasX variant
QEIKRINKIRRRLVKDSNTKKAGKTGPMKTLLVRVMTPDLRERLENLRKKPENIPQPISNTSRANLNKLLTDYTEMKKAILHVYWEEFQKDPVGLMSRVAQPASKKIDQNKLKPEMDEKGNLTTAGFACSQCGQPLFVYKLEQVSEKGKAYTNYFGRCNVAEHEKLIQLDQLKPEKDSDEAVTYSLGKFGQRALDFYSIHVTKESTHPVKPLAQIAGNRYASVPVGKALSDACMGTIASFLSKYQDIIIEHQKVVKGNQKRLESLRELAGKENLEYPSVTLPPQPHTKEGVDAYNEVIARVRMWVNLNLWQKLKLSRDDAKPLLRLKGFPSFPLVERQANEVDWWDMVCNVKKLINEKKEDGKVFWQNLAGYKRQEALRPYLSSEEDRKKGKKFARYQLGDLLLHLEKKHGEDWGKVYDEAWERIDKKVEGLSKHIKLEEERRSEDAQSKAALTDWLRAKASFVIEGLKEADKDEFCRCELKLQKWYGDLRGKPFAIEAENSILDISGFSKQYNCAFIWQKDGVKKLNLYLIINYFKGGKLRFKKIKPEAFEANRFYTVINKKSGEIVPMEVNFNFDDPNLIILPLAFGKRQGREFIWNDLLSLETGSLKLANGRVIEKTLYNRRTRQDEPALFVALTFERREVLDSSNIKPMNLIGVDRGENIPAVIALTDPEGCPLSRFKDSLGNPTHILRIGESYKEKQRTIQAKKEVEQRRAGGYSRKYASKAKNLADDMVRNTARDLLYYAVTQDAMLIFENLSRGFGRQGKRTFMAERQYTRMEDWLTAKLAYEGLPSKTYLSKTLAQYTSKTCSNCGFTITSADYDRVLEKLKKTATGWMTTINGKELKVEGQITYYNRYKRQNVVKDLSVELDRLSEESVNNDISSWTKGRSGEALSLLKKRFSHRPVQEKFVCLNCGFETHADEQAALNIARSWLFLRSQEYKKYQTNKTTGNTDKRAFVETWQSFYRKKLKEVWKPAV

SEQ ID NO: 40928 - protein, 979 aa, synthetic construct
  REGION 1..979: note = engineered CasX variant
QEIKRINKIRRRLVKDSNTKKAGKTGPMKTLLVRVMTPDLRERLENLRKKPENIPQPISNTSRANLNKLLTDYTEMKKAILHVYWEEFQKDPVGLMSRVAQPASKKIDQNKLKPEMDEKGNLTTAGFACSQCGQPLFVYKLEQVSEKGKAYTNYFGRCNVAEHEKLIQKLDQLKPEKDSDEAVTYSLGKFGQRALDFYSIHVTKESTHPVKPLAQIAGNRYASGPVGKALSDACMGTIASFLSKYQDIIIEHQKVVKGNQKRLESLRELAGKENLEYPSVTLPPQPHTKEGVDAYNEVIARVRMWVNLNLWQKLKLSRDDAKPLLRLKGFPSFPLVERQANEVDWWDMVCNVKKLINEKKEDGKVFWQNLAGYKRQEALRPYLSSEEDRKKGKKFARYQLGDLLLHLEKKHGEDWGKVYDEAWERIDKKVEGLSKHIKLEEERRSEDAQSKAALTDWLRAKASFVIEGLKEADKDEFCRCELKLQKWYGDLRGKPFAIEAENSILDISGFSKQYNCAFIWQKDGVKKLNLYLIINYFKGGKLRFKKIKPEAFEANRFYTVINKKSGEIVPMEVNFNFDDPNLIILPLAFGKRQGREFIWNDLLSLETGSLKLANGRVIEKTLYNRRTRQDEPALFVALTFERREVLDSSNIKPMNLIGVDRGENIPAVIALTDPEGCPLSRFKDSLGNPTHILRIGESYKEKQRTIQAKKEVEQRRAGGYSRKYASKAKNLADDMVRNTARDLLYYAVTQDAMLIFENLSRGFGRQGKRTFMAERQYTRMEDWLTAKLAYEGLPSKTYLSKTLAQYTSKTCSNCGFTITSADYDRVLEKLKKTATGWMTTINGKELKVEGQITYYNRYKRQNVVKDLSVELDRLSEESVNNDISSWTKGRSGEALSLLKKRFSHRPVQEKFVCLNCGFETHADEQAALNIARSWLFLRSQEYKKYQTNKTTGNTDKRAFVETWQSFYRKKLKEVWKPAV

SEQ ID NO: 40929 - protein, 977 aa, synthetic construct
  REGION 1..977: note = engineered CasX variant
QEIKRINKIRRRLVKDSNTKKAGKTGPMKTLLVRVMTPDLRERLENLRKKPENIPQPISNTSRANLNKLLTDYTEMKKAILHVYWEEFQKDPVGLMSRVAQPASKKIDQNKLKPEMDEKGNLTTAGFACSQCGQPLFVYKLEQVSEKGKAYTNYFGRCNVAEHEKLIQLDQLKPEKDSDEAVTYSLGKFGQRALDFYSIHVTKESTHPVKPLAQIAGNRYASPVGKALSDACMGTIASFLSKYQDIIIEHQKVVKGNQKRLESLRELAGKENLEYPSVTLPPQPHTKEGVDAYNEVIARVRMWVNLNLWQKLKLSRDDAKPLLRLKGFPSFPLVERQANEVDWWDMVCNVKKLINEKKEDGKVFWQNLAGYKRQEALRPYLSSEEDRKKGKKFARYQLGDLLLHLEKKHGEDWGKVYDEAWERIDKKVEGLSKHIKLEEERRSEDAQSKAALTDWLRAKASFVIEGLKEADKDEFCRCELKLQKWYGDLRGKPFAIEAENSILDISGFSKQYNCAFIWQKDGVKKLNLYLIINYFKGGKLRFKKIKPEAFEANRFYTVINKKSGEIVPMEVNFNFDDPNLIILPLAFGKRQGREFIWNDLLSLETGSLKLANGRVIEKTLYNRRTRQDEPALFVALTFERREVLDSSNIKPMNLIGVDRGENIPAVIALTDPEGCPLSRFKDSLGNPTHILRIGESYKEKQRTIQAKKEVEQRRAGGYSRKYASKAKNLADDMVRNTARDLLYYAVTQDAMLIFENLSRGFGRQGKRTFMAERQYTRMEDWLTAKLAYEGLPSKTYLSKTLAQYTSKTCSNCGFTITSADYDRVLEKLKKTATGWMTTINGKELKVEGQITYYNRYKRQNVVKDLSVELDRLSEESVNNDISSWTKGRSGEALSLLKKRFSHRPVQEKFVCLNCGFETHADEQAALNIARSWLFLRSQEYKKYQTNKTTGNTDKRAFVETWQSFYRKKLKEVWKPAV

SEQ ID NO: 40930 - protein, 978 aa, synthetic construct
  REGION 1..978: note = engineered CasX variant
QEIKRINKIRRRLVKDSNTKKAGKTGPMKTLLVRVMTPDLRERLENLRKKPENIPQPISNTSRANLNKLLTDYTEMKKAILHVYWEEFQKDPVGLMSRVAQPASKKIDQNKLKPEMDEKGNLTTAGFACSQCGQPLFVYKLEQVSEKGKAYTNYFGRCNVAEHEKLILLDQLKPEKDSDEAVTYSLGKFGQRALDFYSIHVTKESTHPVKPLAQIAGNRYASYPVGKALSDACMGTIASFLSKYQDIIIEHQKVVKGNQKRLESLRELAGKENLEYPSVTLPPQPHTKEGVDAYNEVIARVRMWVNLNLWQKLKLSRDDAKPLLRLKGFPSFPLVERQANEVDWWDMVCNVKKLINEKKEDGKVFWQNLAIYKRQEALRPYLSSEEDRKKGKKFARYQLGDLLLHLEKKHGEDWGKVYDEAWERIDKKVEGLSKHIKLEEERRSEDAQSKAALTDWLRAKASFVIEGLKEADKDEFCRCELKLQKWYGDLRGKPFAIEAENSILDISGFSKQYNCAFIWQKDGVKKLNLYLIINYFKGGKLRFKKIKPEAFEANRFYTVINKKSGEIVPMEVNFNFDDPNLIILPLAFGKRQGREFIWNDLLSLETGSLKLANGRVIEKTLYNRRTRQDEPALFVALTFERREVLDSSNIKPMNLIGVDRGENIPAVIALTDPEGCPLSRFKDSLGNPTHILRIGESYKEKQRTIQAKKEVEQRRAGGYSRKYASKAKNLADDMVRNTARDLLYYAVTQDAMLIFENLSRGFGRQGKRTFMAERQYTRMEDWLTAKLAYEGLPSKTYLSKTLAQYTSKTCSNCGFTITSADYDRVLEKLKKTATGWMTTINGKELKVEGQITYYNRYKRQNVVKDLSVELDRLSEESVNNDISSWTKGRSGEALSLLKKRFSHRPVQEKFVCLNCGFETHADEQAALNIARSWLFLRSQEYKKYQTNKTTGNTDKRAFVETWQSFYRKKLKEVWKPAV

SEQ ID NO: 40931 - protein, 978 aa, synthetic construct
  REGION 1..978: note = engineered CasX variant
QEIKRINKIRRRLVKDSNTKKAGKTGPMKTLLVRVMTPDLRERLENLRKKPENIPQPISNTSRANLNKLLTDYTEMKKAILHVYWEEFQKDPVGLMSRVAQPASKKIDQNKLKPEMDEKGNLTTAGFACSQCGQPLFVYKLEQVSEKGKAYTNYFGRCNVAEHEKLILLDQLKPEKDSDEAVTYSLGKFGQRALDFYSIHVTKESTHPVKPLAQIAGNRYASHPVGKALSDACMGTIASFLSKYQDIIIEHQKVVKGNQKRLESLRELAGKENLEYPSVTLPPQPHTKEGVDAYNEVIARVRMWVNLNLWQKLKLSRDDAKPLLRLKGFPSFPLVERQANEVDWWDMVCNVKKLINEKKEDGKVFWQNLAIYKRQEALRPYLSSEEDRKKGKKFARYQLGDLLLHLEKKHGEDWGKVYDEAWERIDKKVEGLSKHIKLEEERRSEDAQSKAALTDWLRAKASFVIEGLKEADKDEFCRCELKLQKWYGDLRGKPFAIEAENSILDISGFSKQYNCAFIWQKDGVKKLNLYLIINYFKGGKLRFKKIKPEAFEANRFYTVINKKSGEIVPMEVNFNFDDPNLIILPLAFGKRQGREFIWNDLLSLETGSLKLANGRVIEKTLYNRRTRQDEPALFVALTFERREVLDSSNIKPMNLIGVDRGENIPAVIALTDPEGCPLSRFKDSLGNPTHILRIGESYKEKQRTIQAKKEVEQRRAGGYSRKYASKAKNLADDMVRNTARDLLYYAVTQDAMLIFENLSRGFGRQGKRTFMAERQYTRMEDWLTAKLAYEGLPSKTYLSKTLAQYTSKTCSNCGFTITSADYDRVLEKLKKTATGWMTTINGKELKVEGQITYYNRYKRQNVVKDLSVELDRLSEESVNNDISSWTKGRSGEALSLLKKRFSHRPVQEKFVCLNCGFETHADEQAALNIARSWLFLRSQEYKKYQTNKTTGNTDKRAFVETWQSFYRKKLKEVWKPAV

SEQ ID NO: 40932 - protein, 978 aa, synthetic construct
  REGION 1..978: note = engineered CasX variant
QEIKRINKIRRRLVKDSNTKKAGKTGPMKTLLVRVMTPDLRERLENLRKKPENIPQPISNTSRANLNKLLTDYTEMKKAILHVYWEEFQKDPVGLMSRVAQPASKKIDQNKLKPEMDEKGNLTTAGFACSQCGQPLFVYKLEQVSEKGKAYTNYFGRCNVAEHEKLILLDQLKPEKDSDEAVTYSLGKFGQRALDFYSIHVTKESTHPVKPLAQIAGNRYASSPVGKALSDACMGTIASFLSKYQDIIIEHQKVVKGNQKRLESLRELAGKENLEYPSVTLPPQPHTKEGVDAYNEVIARVRMWVNLNLWQKLKLSRDDAKPLLRLKGFPSFPLVERQANEVDWWDMVCNVKKLINEKKEDGKVFWQNLAIYKRQEALRPYLSSEEDRKKGKKFARYQLGDLLLHLEKKHGEDWGKVYDEAWERIDKKVEGLSKHIKLEEERRSEDAQSKAALTDWLRAKASFVIEGLKEADKDEFCRCELKLQKWYGDLRGKPFAIEAENSILDISGFSKQYNCAFIWQKDGVKKLNLYLIINYFKGGKLRFKKIKPEAFEANRFYTVINKKSGEIVPMEVNFNFDDPNLIILPLAFGKRQGREFIWNDLLSLETGSLKLANGRVIEKTLYNRRTRQDEPALFVALTFERREVLDSSNIKPMNLIGVDRGENIPAVIALTDPEGCPLSRFKDSLGNPTHILRIGESYKEKQRTIQAKKEVEQRRAGGYSRKYASKAKNLADDMVRNTARDLLYYAVTQDAMLIFENLSRGFGRQGKRTFMAERQYTRMEDWLTAKLAYEGLPSKTYLSKTLAQYTSKTCSNCGFTITSADYDRVLEKLKKTATGWMTTINGKELKVEGQITYYNRYKRQNVVKDLSVELDRLSEESVNNDISSWTKGRSGEALSLLKKRFSHRPVQEKFVCLNCGFETHADEQAALNIARSWLFLRSQEYKKYQTNKTTGNTDKRAFVETWQSFYRKKLKEVWKPAV

SEQ ID NO: 40933 - protein, 978 aa, synthetic construct
  REGION 1..978: note = engineered CasX variant
QEIKRINKIRRRLVKDSNTKKAGKTGPMKTLLVRVMTPDLRERLENLRKKPENIPQPISNTSRANLNKLLTDYTEMKKAILHVYWEEFQKDPVGLMSRVAQPASKKIDQNKLKPEMDEKGNLTTAGFACSQCGQPLFVYKLEQVSEKGKAYTNYFGRCNVAEHEKLILLDQLKPEKDSDEAVTYSLGKFGQRALDFYSIHVTKESTHPVKPLAQIAGNRYASTPVGKALSDACMGTIASFLSKYQDIIIEHQKVVKGNQKRLESLRELAGKENLEYPSVTLPPQPHTKEGVDAYNEVIARVRMWVNLNLWQKLKLSRDDAKPLLRLKGFPSFPLVERQANEVDWWDMVCNVKKLINEKKEDGKVFWQNLAIYKRQEALRPYLSSEEDRKKGKKFARYQLGDLLLHLEKKHGEDWGKVYDEAWERIDKKVEGLSKHIKLEEERRSEDAQSKAALTDWLRAKASFVIEGLKEADKDEFCRCELKLQKWYGDLRGKPFAIEAENSILDISGFSKQYNCAFIWQKDGVKKLNLYLIINYFKGGKLRFKKIKPEAFEANRFYTVINKKSGEIVPMEVNFNFDDPNLIILPLAFGKRQGREFIWNDLLSLETGSLKLANGRVIEKTLYNRRTRQDEPALFVALTFERREVLDSSNIKPMNLIGVDRGENIPAVIALTDPEGCPLSRFKDSLGNPTHILRIGESYKEKQRTIQAKKEVEQRRAGGYSRKYASKAKNLADDMVRNTARDLLYYAVTQDAMLIFENLSRGFGRQGKRTFMAERQYTRMEDWLTAKLAYEGLPSKTYLSKTLAQYTSKTCSNCGFTITSADYDRVLEKLKKTATGWMTTINGKELKVEGQITYYNRYKRQNVVKDLSVELDRLSEESVNNDISSWTKGRSGEALSLLKKRFSHRPVQEKFVCLNCGFETHADEQAALNIARSWLFLRSQEYKKYQTNKTTGNTDKRAFVETWQSFYRKKLKEVWKPAV

SEQ ID NO: 40934 - protein, 978 aa, synthetic construct
  REGION 1..978: note = engineered CasX variant
QEIKRINKIRRRLVKDSNTKKAGKTGPMKTLLVRVMTPDLRERLENLRKKPENIPQPISNTSRANLNKLLTDYTEMKKAILHVYWEEFQKDPVGLMSRVAQPASKKIDQNKLKPEMDEKGNLTTAGFACSQCGQPLFVYKLEQVSEKGKAYTNYFGRCNVAEHEKLILLDQLKPEKDSDEAVTYSLGKFGQRALDFYSIHVTKESTHPVKPLAQIAGNRYASAPVGKALSDACMGTIASFLSKYQDIIIEHQKVVKGNQKRLESLRELAGKENLEYPSVTLPPQPHTKEGVDAYNEVIARVRMWVNLNLWQKLKLSRDDAKPLLRLKGFPSFPLVERQANEVDWWDMVCNVKKLINEKKEDGKVFWQNLAIYKRQEALRPYLSSEEDRKKGKKFARYQLGDLLLHLEKKHGEDWGKVYDEAWERIDKKVEGLSKHIKLEEERRSEDAQSKAALTDWLRAKASFVIEGLKEADKDEFCRCELKLQKWYGDLRGKPFAIEAENSILDISGFSKQYNCAFIWQKDGVKKLNLYLIINYFKGGKLRFKKIKPEAFEANRFYTVINKKSGEIVPMEVNFNFDDPNLIILPLAFGKRQGREFIWNDLLSLETGSLKLANGRVIEKTLYNRRTRQDEPALFVALTFERREVLDSSNIKPMNLIGVDRGENIPAVIALTDPEGCPLSRFKDSLGNPTHILRIGESYKEKQRTIQAKKEVEQRRAGGYSRKYASKAKNLADDMVRNTARDLLYYAVTQDAMLIFENLSRGFGRQGKRTFMAERQYTRMEDWLTAKLAYEGLPSKTYLSKTLAQYTSKTCSNCGFTITSADYDRVLEKLKKTATGWMTTINGKELKVEGQITYYNRYKRQNVVKDLSVELDRLSEESVNNDISSWTKGRSGEALSLLKKRFSHRPVQEKFVCLNCGFETHADEQAALNIARSWLFLRSQEYKKYQTNKTTGNTDKRAFVETWQSFYRKKLKEVWKPAV

SEQ ID NO: 40935 - protein, 978 aa, synthetic construct
  REGION 1..978: note = engineered CasX variant
QEIKRINKIRRRLVKDSNTKKAGKTGPMKTLLVRVMTPDLRERLENLRKKPENIPQPISNTSRANLNKLLTDYTEMKKAILHVYWEEFQKDPVGLMSRVAQPASKKIDQNKLKPEMDEKGNLTTAGFACSQCGQPLFVYKLEQVSEKGKAYTNYFGRCNVAEHEKLILLDQLKPEKDSDEAVTYSLGKFGQRALDFYSIHVTKESTHPVKPLAQIAGNRYASVPVGKALSDACMGTIASFLSKYQDIIIEHQKVVKGNQKRLESLRELAGKENLEYPSVTLPPQPHTKEGVDAYNEVIARVRMWVNLNLWQKLKLSRDDAKPLLRLKGFPSFPLVERQANEVDWWDMVCNVKKLINEKKEDGKVFWQNLAIYKRQEALRPYLSSEEDRKKGKKFARYQLGDLLLHLEKKHGEDWGKVYDEAWERIDKKVEGLSKHIKLEEERRSEDAQSKAALTDWLRAKASFVIEGLKEADKDEFCRCELKLQKWYGDLRGKPFAIEAENSILDISGFSKQYNCAFIWQKDGVKKLNLYLIINYFKGGKLRFKKIKPEAFEANRFYTVINKKSGEIVPMEVNFNFDDPNLIILPLAFGKRQGREFIWNDLLSLETGSLKLANGRVIEKTLYNRRTRQDEPALFVALTFERREVLDSSNIKPMNLIGVDRGENIPAVIALTDPEGCPLSRFKDSLGNPTHILRIGESYKEKQRTIQAKKEVEQRRAGGYSRKYASKAKNLADDMVRNTARDLLYYAVTQDAMLIFENLSRGFGRQGKRTFMAERQYTRMEDWLTAKLAYEGLPSKTYLSKTLAQYTSKTCSNCGFTITSADYDRVLEKLKKTATGWMTTINGKELKVEGQITYYNRYKRQNVVKDLSVELDRLSEESVNNDISSWTKGRSGEALSLLKKRFSHRPVQEKFVCLNCGFETHADEQAALNIARSWLFLRSQEYKKYQTNKTTGNTDKRAFVETWQSFYRKKLKEVWKPAV

SEQ ID NO: 40936 - protein, 978 aa, synthetic construct
  REGION 1..978: note = engineered CasX variant
QEIKRINKIRRRLVKDSNTKKAGKTGPMKTLLVRVMTPDLRERLENLRKKPENIPQPISNTSRANLNKLLTDYTEMKKAILHVYWEEFQKDPVGLMSRVAQPASKKIDQNKLKPEMDEKGNLTTAGFACSQCGQPLFVYKLEQVSEKGKAYTNYFGRCNVAEHEKLIKLDQLKPEKDSDEAVTYSLGKFGQRALDFYSIHVTKESTHPVKPLAQIAGNRYASGPVGKALSDACMGTIASFLSKYQDIIIEHQKVVKGNQKRLESLRELAGKENLEYPSVTLPPQPHTKEGVDAYNEVIARVRMWVNLNLWQKLKLSRDDAKPLLRLKGFPSFPLVERQANEVDWWDMVCNVKKLINEKKEDGKVFWQNLAIYKRQEALRPYLSSEEDRKKGKKFARYQLGDLLLHLEKKHGEDWGKVYDEAWERIDKKVEGLSKHIKLEEERRSEDAQSKAALTDWLRAKASFVIEGLKEADKDEFCRCELKLQKWYGDLRGKPFAIEAENSILDISGFSKQYNCAFIWQKDGVKKLNLYLIINYFKGGKLRFKKIKPEAFEANRFYTVINKKSGEIVPMEVNFNFDDPNLIILPLAFGKRQGREFIWNDLLSLETGSLKLANGRVIEKTLYNRRTRQDEPALFVALTFERREVLDSSNIKPMNLIGVDRGENIPAVIALTDPEGCPLSRFKDSLGNPTHILRIGESYKEKQRTIQAKKEVEQRRAGGYSRKYASKAKNLADDMVRNTARDLLYYAVTQDAMLIFENLSRGFGRQGKRTFMAERQYTRMEDWLTAKLAYEGLPSKTYLSKTLAQYTSKTCSNCGFTITSADYDRVLEKLKKTATGWMTTINGKELKVEGQITYYNRYKRQNVVKDLSVELDRLSEESVNNDISSWTKGRSGEALSLLKKRFSHRPVQEKFVCLNCGFETHADEQAALNIARSWLFLRSQEYKKYQTNKTTGNTDKRAFVETWQSFYRKKLKEVWKPAV

SEQ ID NO: 40937 - protein, 977 aa, synthetic construct
  REGION 1..977: note = engineered CasX variant
QEIKRINKIRRRLVKDSNTKKAGKTGPMKTLLVRVMTPDLRERLENLRKKPENIPQPISNTSRANLNKLLTDYTEMKKAILHVYWEEFQKDPVGLMSRVAQPASKKIDQNKLKPEMDEKGNLTTAGFACSQCGQPLFVYKLEQVSEKGKAYTNYFGRCNVAEHEKLILLDQLKPEKDSDEAVTYSLGKFGQRALDFYSIHVTKESTHPVKPLAQIAGNRYASPVGKALSDACMGTIASFLSKYQDIIIEHQKVVKGNQKRLESLRELAGKENLEYPSVTLPPQPHTKEGVDAYNEVIARVRMWVNLNLWQKLKLSRDDAKPLLRLKGFPSFPLVERQANEVDWWDMVCNVKKLINEKKEDGKVFWQNLAIYKRQEALRPYLSSEEDRKKGKKFARYQLGDLLLHLEKKHGEDWGKVYDEAWERIDKKVEGLSKHIKLEEERRSEDAQSKAALTDWLRAKASFVIEGLKEADKDEFCRCELKLQKWYGDLRGKPFAIEAENSILDISGFSKQYNCAFIWQKDGVKKLNLYLIINYFKGGKLRFKKIKPEAFEANRFYTVINKKSGEIVPMEVNFNFDDPNLIILPLAFGKRQGREFIWNDLLSLETGSLKLANGRVIEKTLYNRRTRQDEPALFVALTFERREVLDSSNIKPMNLIGVDRGENIPAVIALTDPEGCPLSRFKDSLGNPTHILRIGESYKEKQRTIQAKKEVEQRRAGGYSRKYASKAKNLADDMVRNTARDLLYYAVTQDAMLIFENLSRGFGRQGKRTFMAERQYTRMEDWLTAKLAYEGLPSKTYLSKTLAQYTSKTCSNCGFTITSADYDRVLEKLKKTATGWMTTINGKELKVEGQITYYNRYKRQNVVKDLSVELDRLSEESVNNDISSWTKGRSGEALSLLKKRFSHRPVQEKFVCLNCGFETHADEQAALNIARSWLFLRSQEYKKYQTNKTTGNTDKRAFVETWQSFYRKKLKEVWKPAV

SEQ ID NO: 40938 - protein, 978 aa, synthetic construct
  REGION 1..978: note = engineered CasX variant
QEIKRINKIRRRLVKDSNTKKAGKTGPMKTLLVRVMTPDLRERLENLRKKPENIPQPISNTSRANLNKLLTDYTEMKKAILHVYWEEFQKDPVGLMSRVAQPASKKIDQNKLKPEMDEKGNLTTAGFACSQCGQPLFVYKLEQVSEKGKAYTNYFGRCNVAEHEKLILLDQLKPEKDSDEAVTYSLGKFGQRALDFYSIHVTKESTHPVKPLAQIAGNRYASYPVGKALSDACMGTIASFLSKYQDIIIEHQKVVKGNQKRLESLRELAGKENLEYPSVTLPPQPHTKEGVDAYNEVIARVRMWVNLNLWQKLKLSRDDAKPLLRLKGFPSFPLVERQANEVDWWDMVCNVKKLINEKKEDGKVFWQNLAGYKRQEALRPYLSSEEDREKGKKFARYQLGDLLLHLEKKHGEDWGKVYDEAWERIDKKVEGLSKHIKLEEERRSEDAQSKAALTDWLRAKASFVIEGLKEADKDEFCRCELKLQKWYGDLRGKPFAIEAENSILDISGFSKQYNCAFIWQKDGVKKLNLYLIINYFKGGKLRFKKIKPEAFEANRFYTVINKKSGEIVPMEVNFNFDDPNLIILPLAFGKRQGREFIWNDLLSLETGSLKLANGRVIEKTLYNRRTRQDEPALFVALTFERREVLDSSNIKPMNLIGVDRGENIPAVIALTDPEGCPLSRFKDSLGNPTHILRIGESYKEKQRTIQAKKEVEQRRAGGYSRKYASKAKNLADDMVRNTARDLLYYAVTQDAMLIFENLSRGFGRQGKRTFMAERQYTRMEDWLTAKLAYEGLPSKTYLSKTLAQYTSKTCSNCGFTITSADYDRVLEKLKKTATGWMTTINGKELKVEGQITYYNRYKRQNVVKDLSVELDRLSEESVNNDISSWTKGRSGEALSLLKKRFSHRPVQEKFVCLNCGFETHADEQAALNIARSWLFLRSQEYKKYQTNKTTGNTDKRAFVETWQSFYRKKLKEVWKPAV

SEQ ID NO: 40939 - protein, 978 aa, synthetic construct
  REGION 1..978: note = engineered CasX variant
QEIKRINKIRRRLVKDSNTKKAGKTGPMKTLLVRVMTPDLRERLENLRKKPENIPQPISNTSRANLNKLLTDYTEMKKAILHVYWEEFQKDPVGLMSRVAQPASKKIDQNKLKPEMDEKGNLTTAGFACSQCGQPLFVYKLEQVSEKGKAYTNYFGRCNVAEHEKLILLDQLKPEKDSDEAVTYSLGKFGQRALDFYSIHVTKESTHPVKPLAQIAGNRYASHPVGKALSDACMGTIASFLSKYQDIIIEHQKVVKGNQKRLESLRELAGKENLEYPSVTLPPQPHTKEGVDAYNEVIARVRMWVNLNLWQKLKLSRDDAKPLLRLKGFPSFPLVERQANEVDWWDMVCNVKKLINEKKEDGKVFWQNLAGYKRQEALRPYLSSEEDREKGKKFARYQLGDLLLHLEKKHGEDWGKVYDEAWERIDKKVEGLSKHIKLEEERRSEDAQSKAALTDWLRAKASFVIEGLKEADKDEFCRCELKLQKWYGDLRGKPFAIEAENSILDISGFSKQYNCAFIWQKDGVKKLNLYLIINYFKGGKLRFKKIKPEAFEANRFYTVINKKSGEIVPMEVNFNFDDPNLIILPLAFGKRQGREFIWNDLLSLETGSLKLANGRVIEKTLYNRRTRQDEPALFVALTFERREVLDSSNIKPMNLIGVDRGENIPAVIALTDPEGCPLSRFKDSLGNPTHILRIGESYKEKQRTIQAKKEVEQRRAGGYSRKYASKAKNLADDMVRNTARDLLYYAVTQDAMLIFENLSRGFGRQGKRTFMAERQYTRMEDWLTAKLAYEGLPSKTYLSKTLAQYTSKTCSNCGFTITSADYDRVLEKLKKTATGWMTTINGKELKVEGQITYYNRYKRQNVVKDLSVELDRLSEESVNNDISSWTKGRSGEALSLLKKRFSHRPVQEKFVCLNCGFETHADEQAALNIARSWLFLRSQEYKKYQTNKTTGNTDKRAFVETWQSFYRKKLKEVWKPAV

SEQ ID NO: 40940 - protein, 978 aa, synthetic construct
  REGION 1..978: note = engineered CasX variant
QEIKRINKIRRRLVKDSNTKKAGKTGPMKTLLVRVMTPDLRERLENLRKKPENIPQPISNTSRANLNKLLTDYTEMKKAILHVYWEEFQKDPVGLMSRVAQPASKKIDQNKLKPEMDEKGNLTTAGFACSQCGQPLFVYKLEQVSEKGKAYTNYFGRCNVAEHEKLILLDQLKPEKDSDEAVTYSLGKFGQRALDFYSIHVTKESTHPVKPLAQIAGNRYASSPVGKALSDACMGTIASFLSKYQDIIIEHQKVVKGNQKRLESLRELAGKENLEYPSVTLPPQPHTKEGVDAYNEVIARVRMWVNLNLWQKLKLSRDDAKPLLRLKGFPSFPLVERQANEVDWWDMVCNVKKLINEKKEDGKVFWQNLAGYKRQEALRPYLSSEEDREKGKKFARYQLGDLLLHLEKKHGEDWGKVYDEAWERIDKKVEGLSKHIKLEEERRSEDAQSKAALTDWLRAKASFVIEGLKEADKDEFCRCELKLQKWYGDLRGKPFAIEAENSILDISGFSKQYNCAFIWQKDGVKKLNLYLIINYFKGGKLRFKKIKPEAFEANRFYTVINKKSGEIVPMEVNFNFDDPNLIILPLAFGKRQGREFIWNDLLSLETGSLKLANGRVIEKTLYNRRTRQDEPALFVALTFERREVLDSSNIKPMNLIGVDRGENIPAVIALTDPEGCPLSRFKDSLGNPTHILRIGESYKEKQRTIQAKKEVEQRRAGGYSRKYASKAKNLADDMVRNTARDLLYYAVTQDAMLIFENLSRGFGRQGKRTFMAERQYTRMEDWLTAKLAYEGLPSKTYLSKTLAQYTSKTCSNCGFTITSADYDRVLEKLKKTATGWMTTINGKELKVEGQITYYNRYKRQNVVKDLSVELDRLSEESVNNDISSWTKGRSGEALSLLKKRFSHRPVQEKFVCLNCGFETHADEQAALNIARSWLFLRSQEYKKYQTNKTTGNTDKRAFVETWQSFYRKKLKEVWKPAV
